United States Patent Application Publication US 2023/0075314 A1 - sequence listing, part 2

SEQ ID NO: 536 - protein, 737 aa, Artificial Sequence
  source: /note="Description of Artificial Sequence: Synthetic polypeptide"
MAADGYLPDWLEDTLSEGIRQWWKLKPGPPPPKPAERHKDDSRGLVLPGYKYLGPFNGLDKGEPVNEADAAALEHDKAYDRQLDSGDNPYLKYNHADAEFQERLKEDTSFGGNLGRAVFQAKKRLLEPLGLVEEAAKTAPGKKRPVEQSPQEPDSSSGIGKTGQQPAKKRLNFGQTGDTESVPDPQPIGEPPAAPSGVGSLTMASGGGAPVADNNEGADGVGSSSGNWHCDSQWLGDRVITTSTRTWALPTYNNHLYKQISNGTSGGATNDNTYFGYSTPWGYFDFNRFHCHFSPRDWQRLINNNWGFRPKRLSFKLFNIQVKEVTQNEGTKTIANNLTSTVQVFTDSEYQLPYVLGSAHQGCLPPFPADVFMIPQYGYLTLNNGSQAVGRSSFYCLEYFPSQMLRTGNNFQFTYTFEDVPFHSSYAHSQSLDRLMNPLIDQYLYYLSRTQTTGGTANTQTLGFSQGGPNTMANQAKNWLPGPCYRQQRVSTTTGQNNNSNFAWTAGTKYHLNGRNSLANPGIAMATHKDDKERFFPSNGILIFGKQNAARDNADYSDVMLTSEEEIKTTNPVATEEYGIVADNLQQQNTAPQIGTVNSQGALPGMVWQNRDVYLQGPIWAKIPHTDGNFHPSPLMGGFGLKHPPPQILIKNTPVPADPPTTFNQSKLNSFITQYSTGQVSVEIEWELQKENSKRWNPEIQYTSNYYKSTSVDFAVNTEGVYSEPHPIGTRYLTRPL

SEQ ID NO: 537 - protein, 736 aa, Artificial Sequence
  source: /note="Description of Artificial Sequence: Synthetic polypeptide"
MAADGYLPDWLEDNLSEGIREWWDLKPGAPKPKANQQKQDDGRGLVLPGYKYLGPFNGLDKGEPVNAADAAALEHDKAYDQQLKAGDNPYLRYNHADAEFQERLQEDTSFGGNLGRAVFQAKKRVLEPLGLVEEGAKTAPGKKRPVEQSPQEPDSSSGIGKTGQQPAKKRLNFGQTGDTESVPDPQPIGEPPAAPSGVGSLTMASGGGAPVADNNEGADGVGSSSGNWHCDSQWLGDRVITTSTRTWALPTYNNHLYKQISSASTGASNDNHYFGYSTPWGYFDFNRFHCHFSPRDWQRLINNNWGFRPKRLNFKLFNIQVKEVTDNNGVKTIANNLTSTVQVFTDSDYQLPYVLGSAHQGCLPPFPADVFMIPQYGYLTLNNGSQAVGRSSFYCLEYFPSQMLRTGNNFQFTYTFEDVPFHSSYAHSQSLDRLMNPLIDQYLYYLSRTQTTGGTANTQTLGFSQGGPNTMANQAKNWLPGPCYRQQRVSTTTGQNNNSNFAWTAGTKYHLNGRNSLANPGIAMATHKDDKERFFPSNGILIFGKQNAARDNADYSDVMLTSEEEIKTTNPVATEEYGIVADNLQQQNTAPQIGTVNSQGALPGMVWQNRDVYLQGPIWAKIPHTDGNFHPSPLMGGFGLKHPPPQILIKNTPVPADPPTTFNQSKLNSFITQYSTGQVSVEIEWELQKENSKRWNPEIQYTSNYYKSTSVDFAVNTEGVYSEPHPIGTRYLTRPL

SEQ ID NO: 538 - protein, 736 aa, Artificial Sequence
  source: /note="Description of Artificial Sequence: Synthetic polypeptide"
MAADGYLPDWLEDTLSEGIRQWWKLKPGPPPPKPAERHKDDSRGLVLPGYKYLGPFNGLDKGEPVNEADAAALEHDKAYDRQLDSGDNPYLKYNHADAEFQERLQGDTSFGGNLGRAVFQAKKRVLEPLGLVEEGAKTAPGKKRPVEQSPQEPDSSSGIGETGQQPAKKRLNFGQTGDSESVPDPQPLGEPPATPAAVGPTTMASGGGAPMADNNEGADGVGSSSGNWHCDSQWLGDRVITTSTRTWALPTYNNHLYKQISSASTGASNDNHYFGYSTPWGYFDFNRFHCHFSPRDWQRLINNNWGFRPKRLSFKLFNIQVKEVTDNNGVKTIANNLTSTVQVFTDSEYQLPYVLGSAHQGCLPPFPADVFMIPQYGYLTLNNGSQAVGRSSFYCLEYFPSQMLRTGNNFTFSYTFEDVPFHSSYAHSQSLDRLMNPLIDQYLYYLSRTQTTGGTANTQTLGFSQGGPNTMANQAKNWLPGPCYRQQRVSTTTGQNNNSNFAWTAGTKYHLNGRNSLANPGIAMATHKDDKERFFPSNGILIFGKQNAARDNADYSDVMLTSEEEIKTTNPVATEEYGIVADNLQQQNTAPQIGTVNSQGALPGMVWQNRDVYLQGPIWAKIPHTDGNFHPSPLMGGFGLKHPPPQILIKNTPVPADPPTTFNQSKLNSFITQYSTGQVSVEIEWELQKENSKRWNPEIQYTSNYYKSTSVDFAVNTEGVYSEPHPIGTRYLTRPL

SEQ ID NO: 539 - DNA, 2181 bp, Artificial Sequence
  source: /note="Description of Artificial Sequence: Synthetic polynucleotide"
atgtcttttgttgatcaccctccagattggttggaagaagttggtgaaggtcttcgcgagtttttgggccttgaagcgggcccaccgaaaccaaaacccaatcagcagcatcaagatcaagcccgtggtcttgtgctgcctggttataactatctcggacccggaaacggtctcgatcgaggagagcctgtcaacagggcagacgaggtcgcgcgagagcacgacatctcgtacaacgagcagcttgaggcgggagacaacccctacctcaagtacaaccacgcggacgccgagtttcaggagaagctcgccgacgacacatccttcgggggaaacctcggaaaggcagtctttcaggccaagaaaagggttctcgaaccttttggcctggttgaagagggtgctaagacggcccctaccggaaagcggatagacgaccactttccaaaaagaaagaaggctcggaccgaagaggactccaagccttccacctcgtcagacgccgaagctggacccagcggatcccagcagctgcaaatcccagcacaaccagcctcaagtttgggagctgatacaatgtctgcgggaggtggcggcccattgggcgacaataaccaaggtgccgatggagtgggcaatgcctcgggagattggcattgcgattccacgtggatgggggacagagtcgtcaccaagtccacccgcacctgggtgctgcccagctacaacaaccaccagtaccgagagatcaaaagcggctccgtcgacggaagcaacgccaacgcctactttggatacagcaccccctgggggtactttgactttaaccgcttccacagccactggagcccccgagactggcaaagactcatcaacaactattggggcttcagaccccggtctctcagagtcaaaatcttcaacatccaagtcaaagaggtcacggtgcaggactccaccaccaccatcgccaacaacctcacctccaccgtccaagtgtttacggacgacgactaccaactcccgtacgtcgtcggcaacgggaccgagggatgcctgccggccttccccccgcaggtctttacgctgccgcagtacggctacgcgacgctgaaccgagacaacggagacaacccgacagagcggagcagcttcttttgcctagagtactttcccagcaagatgctgaggacgggcaacaactttgagtttacctacagctttgaagaggtgcccttccactgcagcttcgccccgagccagaacctctttaagctggccaacccgctggtggaccagtacctgtaccgcttcgtgagcacctcggccacgggcgccatccagttccaaaagaacctggcgggcagatacgccaacacctacaaaaactggttcccggggcccatgggccgaacccagggctggaacacgagctctggggtcagcagcaccaacagagtcagcgtcaacaacttttccgtctcaaaccggatgaacctggagggggccagctaccaagtgaacccccagcccaacgggatgacaaacacgctccaaggcagcaaccgctacgcgctggaaaacaccatgatcttcaacgctcaaaacgccacgccgggaactacctcggtgtacccagaggacaatctactgctgaccagcgagagcgagactcagcccgtcaaccgggtggcttacaacacgggcggtcagatggccaccaacgcccagaacgccaccacggctcccacggtcgggacctacaacctccaggaagtgcttcctggcagcgtatggatggagagggacgtgtacctccaaggacccatctgggccaagatcccagagacgggggcgcactttcacccctctccggccatgggcggattcggactcaaacacccgccgcccatgatgctcatcaaaaacacgccggtgcccggcaacatcaccagcttctcggacgtgcccgtcagcagcttcatcacccagtacagcaccgggcaggtcaccgtggagatggaatgggagctcaaaaaggaaaactccaagaggtggaacccagagatccagtacaccaacaactacaacgacccccagtttgtggactttgctccagacggctccggcgaatacagaaccaccagagccatcggaacccgatacctcacccgacccctt

SEQ ID NO: 540 - protein, 726 aa, Artificial Sequence
  source: /note="Description of Artificial Sequence: Synthetic polypeptide"
MSFVDHPPDWLEEVGEGLREFLGLEAGPPKPKPNQQHQDQARGLVLPGYNYLGPGNGLDRGEPVNRADEVAREHDISYNEQLEAGDNPYLKYNHADAEFQEKLADDTSFGGNLGKAVFQAKKRVLEPFGLVEEGAKTAPTGKRIDDHFPKRKKARTEEDSKPSTSSDAEAGPSGSQQLQIPAQPASSLGADTMSAGGGGPLGDNNQGADGVGNASGDWHCDSTWMGDRVVTKSTRTWVLPSYNNHQYREIKSGSVDGSNANAYFGYSTPWGYFDFNRFHSHWSPRDWQRLINNYWGFRPRSLRVKIFNIQVKEVTVQDSTTTIANNLTSTVQVFTDDDYQLPYVVGNGTEGCLPAFPPQVFTLPQYGYATLNRDNGDNPTERSSFFCLEYFPSKMLRTGNNFEFTYSFEEVPFHCSFAPSQNLFKLANPLVDQYLYRFVSTSATGAIQFQKNLAGRYANTYKNWFPGPMGRTQGWNTSSGSSTNRVSVNNFSVSNRMNLEGASYQVNPQPNGMTNTLQGSNRYALENTMIFNAQNATPGTTSVYPEDNLLLTSESETQPVNRVAYNTGGQMATNAQNATTAPTVGTYNLQEVLPGSVWMERDVYLQGPIWAKIPETGAHFHPSPAMGGFGLKHPPPMMLIKNTPVPGNITSFSDVPVSSFITQYSTGQVTVEMEWELKKENSKRWNPEIQYTNNYNDPQFVDFAPDGSGEYRTTRAIGTRYLTRPL

SEQ ID NO: 541 - protein, 735 aa, Artificial Sequence
  source: /note="Description of Artificial Sequence: Synthetic polypeptide"
MAADGYLPDWLEDTLSEGIRQWWKLKPGPPPPKPAERHKDDSRGLVLPGYKYLGPFNGLDKGEPVNEADAAALEHDKAYDRQLDSGDNPYLKYNHADAEFQERLKEDTSFGGNLGRAVFQAKKRILEPLGLVEEPVKTAPGKKRPVEHSPAEPDSSSGTGKSGQQPARKRLNFGQTGDADSVPDPQPLGQPPAAPSGLGTNTMASGSGAPMADNNEGADGVGNSSGNWHCDSTWMGDRVITTSTRTWALPTYNNHLYKQISSQSGASNDNHYFGYSTPWGYFDFNRFHCHFSPRDWQRLINNNWGFRPKRLSFKLFNIQVKEVTQNDGTTTIANNLTSTVQVFTDSEYQLPYVLGSAHQGCLPPFPADVFMVPQYGYLTLNNGSQAVGRSSFYCLEYFPSQMLRTGNNFTFSYTFEDVPFHSSYAHSQSLDRLMNPLIDQYLYYLSRTNTPSGTTTMSRLQFSQAGASDIRDQSRNWLPGPCYRQQRVSKTAADNNNSDYSWTGATKYHLNGRDSLVNPGPAMASHKDDEEKYFPQSGVLIFGKQDSGKTNVDIEKVMITDEEEIRTTNPVATEQYGSVSTNLQSGNTQAATSDVNTQGVLPGMVWQDRDVYLQGPIWAKIPHTDGHFHPSPLMGGFGLKHPPPQILIKNTPVPANPSTTFSAAKFASFITQYSTGQVSVEIEWELQKENSKRWNPEIQYTSNYNKSVNVDFTVDTNGVYSEPRPIGTRYLTRNL

SEQ ID NO: 542 - DNA, 1797 bp, Artificial Sequence
  source: /note="Description of Artificial Sequence: Synthetic polynucleotide"
acggctccgaccggagacaagcggaaaggcgaagacgaacctcgtttgcccgacacttcttcacagactcccaagaaaaacaagaagcctcgcaaggaaagaccttccggcggggcagaagatccgggcgaaggcacctcttccaacgctggagcagcagcacccgcctctagtgtgggatcatctatcatggctgaaggaggtggcggcccagtgggcgatgcaggccagggtgccgatggagtgggcaattcctccggaaattggcattgcgattcccaatggctggaaaacggagtcgtcactcgaaccacccgaacctgggtcttgcccagctacaacaaccacctgtacaaacgaatccaaggacccagcggaggcgacaacaacaacaaattctttggattcagcaccccctggggatactttgactacaatcgattccactgccacttttccccgcgagactggcaacgactcatcaacaacaactggggcatccgtcccaaagcgatgcgctttagactctttaacatccaggttaaagaggtcacggtccaagacttcaacaccaccatcggcaacaacctcaccagtacggtccaggtctttgcggacaaggactaccaactgccgtacgtcctcggatcggctaccgaaggcaccttcccgccgttcccagcggatatctacacgatcccgcagtacgggtactgcacgctaaactacaacaacgaggcggtggatcgttcggccttctactgtctggactactttccctcagacatgctgcggacaggaaataactttgagtttacttacaccttcgaggacgttcctttccatagcatgtttgcccacaaccagacgctagaccggctgatgaatcccctcgtggatcagtacctctgggctttcagctccgtcagccaagcaggctcatctggacgagctcttcattactcgcgggcgactaaaaccaacatggcggctcaatataggaactggttacctgggcctttcttccgtgatcagcaaatctttacgggcgctagcaacatcactaaaaataacgtctttagcgtttgggaaaaaggcaagcaatgggaactcgacaatcggaccaacctaatgcagcccggtcctgcggcagcgaccacctttagcggagaacctgaccgtcaagccatgcaaaacacgctggcttttagcaggaccgtctacgatcaaacgaccgccacgaccgatcgtaaccagatactcatcaccaacgaagacgaaatcagacccaccaactcggtcggtatcgacgcgtggggagcagttcccaccaacaaccagtcgatcgtgacccccggcactcgcgcggccgtcaacaatcaaggggcgcttcccgggatggtgtggcaaaacagagacatttaccctacagggacccatttggccaaaattcccgacactgacaatcacttccatccgtccccgcttattgggcggtttggctgcaagcatccccctccccagattttcattaaaaacacacccgtccctgccaacccttcggaaacgttccagacggccaaagtggcctccttcatcaaccagtactcgaccggacagtgcaccgtcgaaatcttttgggaactcaagaaggaaacctccaagcgctggaaccccgaaatccagttcacctccaactttggcaacgcggccgacatccagtttgccgtctccgacacgggatcctattccgaacctcgtcccatcggtacccgttaccttaccaaacctctgtaa

SEQ ID NO: 543 - DNA, 1989 bp, Artificial Sequence
  source: /note="Description of Artificial Sequence: Synthetic polynucleotide"
atgaggtcgtactacgaggtcatcgttcagctgcccaacgacgtcgagagtcaggtacctggaatctccgattcgttcgtcaactggattacgtcgcgagaatggacgttgcctgaggacgccgattgggatttggaccaggtcgatcaagttcaactgacgctcggcgacaaaatccaacgggagattcgaactcattgggggacgatggccaaagaaccggactttcactattttatccaactggaacaaggtgaggtgttctttcatttacacgtcctgctggaaacgtgttccgtaaagccgatggtactcggaagatatatccgacatattcaacaaaaaattgtgagtaaagtctactgcgccacgagcctacgatggaaggatggatgcgtggtgaccaagaccaaaaatttcgggggcgcgaacaaggtccgggccgagtcgtatattcccgcctacctgatcccgaaacagcaaccggaagtgcagtgggcgtggactaacgtgcccgagtatataaaagcgtgcttgcaccgagaactgcgtgccagtctcgcgcgacttcacttcgaggaggcgggcgtctcgcaatccaaggaaaatctcgcgagaactgcagacggcgctcccgtgatgccgacccgcgtcagcaaacgctacatggagctcgtggattggctcgtggagaaggggatcaccaccgagaaggaatggctgctggaaaacagagaaagctttcggagctttcaggcctcgagcaactcggcgcgtcagatcaagacggccctgcaaggcgccattcaggagatgcttctgaccaagacggcggaggactacctcgtcggaaaggatcccgtctcggacgacgacatccgtcagaaccgcatctacaagattctggaactgaaccactacgacccagcgtacgtggggagtattttggtcgggtggtgccagaagaaatggggcaagcgaaacacgctgtggctgttcggacatgcgaccaccggcaagaccaacatcgcggaggctattgcccatgctgtgccgttctatggatgcgttaactggaccaacgagaactttccgttcaacgactgcgtcgaaaaaatgattatctggtgggaggagggcaaaatgaccgccaaagtggtggaaacagccaaggcgattctgggaggatctcgggtgagagtggaccaaaaatgcaaagcttcggttccgatcgaaccgacgccggtcattattaccagtaacaccaacatgtgttatgtcatcgacgggaacacgaccacgttcgagcataagcagccgttggaggacaggatgtttaagctcgaattgctgactcggttgcctgatgactttggtaaggtgaccaaacaggaggtgcgtcaattcttcaggtggtctcaggatcacctgacccctgtgatcccagaattcctagtgcggaaggcggagtctcgcaaaagacccgccccttccggggaaggctatataagcccgacaaagcggcccgcgctcgcagagcagcagcaggcgtcggagagcgcggacccggttcccaccaggtatcgtatcaaatgctcgaaacattgcggtatggataaaatgttgtttccttgccaaatttgtgaatcgatgaacagagatattaatatttgtgctattcataaaacgaccgactgtaaagagtgtttccccgactacggggataaagatgatgtagaactacccccctgtacagaacacaacgtgtctcgttgttatcaatgtcattcgggcgaattgtatcgcgtgacttcggactctgacgagaaacctgcccccgagagtgatgaaggcaccgagccatcctatgctccctgcacgattcaccacctgatgggcaagagtcacgggttagtcacttgcgcggcgtgtcggttgaaaaatagtacgttgcatgatgacttggatgacggtgatctcgaacaataa

SEQ ID NO: 544 - DNA, 1626 bp, Artificial Sequence
  source: /note="Description of Artificial Sequence: Synthetic polynucleotide"
atgaggtcgtactacgaggtcatcgttcagctgcccaacgacgtcgagagtcaggtacctggaatctccgattcgttcgtcaactggattacgtcgcgagaatggacgttgcctgaggacgccgattgggatttggaccaggtcgatcaagttcaactgacgctcggcgacaaaatccaacgggagattcgaactcattgggggacgatggccaaagaaccggactttcactattttatccaactggaacaaggtgaggtgttctttcatttacacgtcctgctggaaacgtgttccgtaaagccgatggtactcggaagatatatccgacatattcaacaaaaaattgtgagtaaagtctactgcgccacgagcctacgatggaaggatggatgcgtggtgaccaagaccaaaaatttcgggggcgcgaacaaggtccgggccgagtcgtatattcccgcctacctgatcccgaaacagcaaccggaagtgcagtgggcgtggactaacgtgcccgagtatataaaagcgtgcttgcaccgagaactgcgtgccagtctcgcgcgacttcacttcgaggaggcgggcgtctcgcaatccaaggaaaatctcgcgagaactgcagacggcgctcccgtgatgccgacccgcgtcagcaaacgctacatggagctcgtggattggctcgtggagaaggggatcaccaccgagaaggaatggctgctggaaaacagagaaagctttcggagctttcaggcctcgagcaactcggcgcgtcagatcaagacggccctgcaaggcgccattcaggagatgcttctgaccaagacggcggaggactacctcgtcggaaaggatcccgtctcggacgacgacatccgtcagaaccgcatctacaagattctggaactgaaccactacgacccagcgtacgtggggagtattttggtcgggtggtgccagaagaaatggggcaagcgaaacacgctgtggctgttcggacatgcgaccaccggcaagaccaacatcgcggaggctattgcccatgctgtgccgttctatggatgcgttaactggaccaacgagaactttccgttcaacgactgcgtcgaaaaaatgattatctggtgggaggagggcaaaatgaccgccaaagtggtggaaacagccaaggcgattctgggaggatctcgggtgagagtggaccaaaaatgcaaagcttcggttccgatcgaaccgacgccggtcattattaccagtaacaccaacatgtgttatgtcatcgacgggaacacgaccacgttcgagcataagcagccgttggaggacaggatgtttaagctcgaattgctgactcggttgcctgatgactttggtaaggtgaccaaacaggaggtgcgtcaattcttcaggtggtctcaggatcacctgacccctgtgatcccagaattcctagtgcggaaggcggagtctcgcaaaagacccgccccttccggggaaggctatataagcccgacaaagcggcccgcgctcgcagagcagcagcaggcgtcggagagcgcggacccggttcccaccagattggttggagcggttggtcaaaaagggagtgaatgctgcagctga

SEQ ID NO: 545 - DNA, 1323 bp, Artificial Sequence
  source: /note="Description of Artificial Sequence: Synthetic polynucleotide"
atggagctcgtggattggctcgtggagaaggggatcaccaccgagaaggaatggctgctggaaaacagagaaagctttcggagctttcaggcctcgagcaactcggcgcgtcagatcaagacggccctgcaaggcgccattcaggagatgcttctgaccaagacggcggaggactacctcgtcggaaaggatcccgtctcggacgacgacatccgtcagaaccgcatctacaagattctggaactgaaccactacgacccagcgtacgtggggagtattttggtcgggtggtgccagaagaaatggggcaagcgaaacacgctgtggctgttcggacatgcgaccaccggcaagaccaacatcgcggaggctattgcccatgctgtgccgttctatggatgcgttaactggaccaacgagaactttccgttcaacgactgcgtcgaaaaaatgattatctggtgggaggagggcaaaatgaccgccaaagtggtggaaacagccaaggcgattctgggaggatctcgggtgagagtggaccaaaaatgcaaagcttcggttccgatcgaaccgacgccggtcattattaccagtaacaccaacatgtgttatgtcatcgacgggaacacgaccacgttcgagcataagcagccgttggaggacaggatgtttaagctcgaattgctgactcggttgcctgatgactttggtaaggtgaccaaacaggaggtgcgtcaattcttcaggtggtctcaggatcacctgacccctgtgatcccagaattcctagtgcggaaggcggagtctcgcaaaagacccgccccttccggggaaggctatataagcccgacaaagcggcccgcgctcgcagagcagcagcaggcgtcggagagcgcggacccggttcccaccaggtatcgtatcaaatgctcgaaacattgcggtatggataaaatgttgtttccttgccaaatttgtgaatcgatgaacagagatattaatatttgtgctattcataaaacgaccgactgtaaagagtgtttccccgactacggggataaagatgatgtagaactacccccctgtacagaacacaacgtgtctcgttgttatcaatgtcattcgggcgaattgtatcgcgtgacttcggactctgacgagaaacctgcccccgagagtgatgaaggcaccgagccatcctatgctccctgcacgattcaccacctgatgggcaagagtcacgggttagtcacttgcgcggcgtgtcggttgaaaaatagtacgttgcatgatgacttggatgacggtgatctcgaacaataa

SEQ ID NO: 546 - DNA, 960 bp, Artificial Sequence
  source: /note="Description of Artificial Sequence: Synthetic polynucleotide"
atggagctcgtggattggctcgtggagaaggggatcaccaccgagaaggaatggctgctggaaaacagagaaagctttcggagctttcaggcctcgagcaactcggcgcgtcagatcaagacggccctgcaaggcgccattcaggagatgcttctgaccaagacggcggaggactacctcgtcggaaaggatcccgtctcggacgacgacatccgtcagaaccgcatctacaagattctggaactgaaccactacgacccagcgtacgtggggagtattttggtcgggtggtgccagaagaaatggggcaagcgaaacacgctgtggctgttcggacatgcgaccaccggcaagaccaacatcgcggaggctattgcccatgctgtgccgttctatggatgcgttaactggaccaacgagaactttccgttcaacgactgcgtcgaaaaaatgattatctggtgggaggagggcaaaatgaccgccaaagtggtggaaacagccaaggcgattctgggaggatctcgggtgagagtggaccaaaaatgcaaagcttcggttccgatcgaaccgacgccggtcattattaccagtaacaccaacatgtgttatgtcatcgacgggaacacgaccacgttcgagcataagcagccgttggaggacaggatgtttaagctcgaattgctgactcggttgcctgatgactttggtaaggtgaccaaacaggaggtgcgtcaattcttcaggtggtctcaggatcacctgacccctgtgatcccagaattcctagtgcggaaggcggagtctcgcaaaagacccgccccttccggggaaggctatataagcccgacaaagcggcccgcgctcgcagagcagcagcaggcgtcggagagcgcggacccggttcccaccagattggttggagcggttggtcaaaaagggagtgaatgctgcagctga

SEQ ID NO: 547 - DNA, 1608 bp, Artificial Sequence
  source: /note="Description of Artificial Sequence: Synthetic polynucleotide"
atggctgaaggaggtggcggcccagtgggcgatgcaggccagggtgccgatggagtgggcaattcctccggaaattggcattgcgattcccaatggctggaaaacggagtcgtcactcgaaccacccgaacctgggtcttgcccagctacaacaaccacctgtacaaacgaatccaaggacccagcggaggcgacaacaacaacaaattctttggattcagcaccccctggggatactttgactacaatcgattccactgccacttttccccgcgagactggcaacgactcatcaacaacaactggggcatccgtcccaaagcgatgcgctttagactctttaacatccaggttaaagaggtcacggtccaagacttcaacaccaccatcggcaacaacctcaccagtacggtccaggtctttgcggacaaggactaccaactgccgtacgtcctcggatcggctaccgaaggcaccttcccgccgttcccagcggatatctacacgatcccgcagtacgggtactgcacgctaaactacaacaacgaggcggtggatcgttcggccttctactgtctggactactttccctcagacatgctgcggacaggaaataactttgagtttacttacaccttcgaggacgttcctttccatagcatgtttgcccacaaccagacgctagaccggctgatgaatcccctcgtggatcagtacctctgggctttcagctccgtcagccaagcaggctcatctggacgagctcttcattactcgcgggcgactaaaaccaacatggcggctcaatataggaactggttacctgggcctttcttccgtgatcagcaaatctttacgggcgctagcaacatcactaaaaataacgtctttagcgtttgggaaaaaggcaagcaatgggaactcgacaatcggaccaacctaatgcagcccggtcctgcggcagcgaccacctttagcggagaacctgaccgtcaagccatgcaaaacacgctggcttttagcaggaccgtctacgatcaaacgaccgccacgaccgatcgtaaccagatactcatcaccaacgaagacgaaatcagacccaccaactcggtcggtatcgacgcgtggggagcagttcccaccaacaaccagtcgatcgtgacccccggcactcgcgcggccgtcaacaatcaaggggcgcttcccgggatggtgtggcaaaacagagacatttaccctacagggacccatttggccaaaattcccgacactgacaatcacttccatccgtccccgcttattgggcggtttggctgcaagcatccccctccccagattttcattaaaaacacacccgtccctgccaacccttcggaaacgttccagacggccaaagtggcctccttcatcaaccagtactcgaccggacagtgcaccgtcgaaatcttttgggaactcaagaaggaaacctccaagcgctggaaccccgaaatccagttcacctccaactttggcaacgcggccgacatccagtttgccgtctccgacacgggatcctattccgaacctcgtcccatcggtacccgttaccttaccaaacctctgtaa

SEQ ID NO: 548 - DNA, 2232 bp, Artificial Sequence
  source: /note="Description of Artificial Sequence: Synthetic polynucleotide"
atgtctctcatttctgatgcgattccagattggttggagcggttggtcaaaaagggagtgaatgctgcagctgatttctaccatttggaaagcggtcctcctcgtcctaaggcaaatcagcaaactcaagaatctcttgaaaaggacgattcgagaggtctcgtgttcccaggctacaattatctaggccctttcaacggtctagataaaggagaacccgtcaacgaggcagacgctgccgccttagaacacgacaaggcttacgacctcgaaatcaaggacgggcacaacccgtactttgagtacaacgaggccgacagacgtttccaggaacgtctcaaagacgatacctcctttggaggcaatttaggtaaagccatcttccaggccaaaaagagggttctcgaaccctttggtctggtggaagactcaaagacggctccgaccggagacaagcggaaaggcgaagacgaacctcgtttgcccgacacttcttcacagactcccaagaaaaacaagaagcctcgcaaggaaagaccttccggcggggcagaagatccgggcgaaggcacctcttccaacgctggagcagcagcacccgcctctagtgtgggatcatctatcatggctgaaggaggtggcggcccagtgggcgatgcaggccagggtgccgatggagtgggcaattcctccggaaattggcattgcgattcccaatggctggaaaacggagtcgtcactcgaaccacccgaacctgggtcttgcccagctacaacaaccacctgtacaaacgaatccaaggacccagcggaggcgacaacaacaacaaattctttggattcagcaccccctggggatactttgactacaatcgattccactgccacttttccccgcgagactggcaacgactcatcaacaacaactggggcatccgtcccaaagcgatgcgctttagactctttaacatccaggttaaagaggtcacggtccaagacttcaacaccaccatcggcaacaacctcaccagtacggtccaggtctttgcggacaaggactaccaactgccgtacgtcctcggatcggctaccgaaggcaccttcccgccgttcccagcggatatctacacgatcccgcagtacgggtactgcacgctaaactacaacaacgaggcggtggatcgttcggccttctactgtctggactactttccctcagacatgctgcggacaggaaataactttgagtttacttacaccttcgaggacgttcctttccatagcatgtttgcccacaaccagacgctagaccggctgatgaatcccctcgtggatcagtacctctgggctttcagctccgtcagccaagcaggctcatctggacgagctcttcattactcgcgggcgactaaaaccaacatggcggctcaatataggaactggttacctgggcctttcttccgtgatcagcaaatctttacgggcgctagcaacatcactaaaaataacgtctttagcgtttgggaaaaaggcaagcaatgggaactcgacaatcggaccaacctaatgcagcccggtcctgcggcagcgaccacctttagcggagaacctgaccgtcaagccatgcaaaacacgctggcttttagcaggaccgtctacgatcaaacgaccgccacgaccgatcgtaaccagatactcatcaccaacgaagacgaaatcagacccaccaactcggtcggtatcgacgcgtggggagcagttcccaccaacaaccagtcgatcgtgacccccggcactcgcgcggccgtcaacaatcaaggggcgcttcccgggatggtgtggcaaaacagagacatttaccctacagggacccatttggccaaaattcccgacactgacaatcacttccatccgtccccgcttattgggcggtttggctgcaagcatccccctccccagattttcattaaaaacacacccgtccctgccaacccttcggaaacgttccagacggccaaagtggcctccttcatcaaccagtactcgaccggacagtgcaccgtcgaaatcttttgggaactcaagaaggaaacctccaagcgctggaaccccgaaatccagttcacctccaactttggcaacgcggccgacatccagtttgccgtctccgacacgggatcctattccgaacctcgtcccatcggtacccgttaccttaccaaacctctgtaa

SEQ ID NO: 549 - protein, 535 aa, Artificial Sequence
  source: /note="Description of Artificial Sequence: Synthetic polypeptide"
MAEGGGGPVGDAGQGADGVGNSSGNWHCDSQWLENGVVTRTTRTWVLPSYNNHLYKRIQGPSGGDNNNKFFGFSTPWGYFDYNRFHCHFSPRDWQRLINNNWGIRPKAMRFRLFNIQVKEVTVQDFNTTIGNNLTSTVQVFADKDYQLPYVLGSATEGTFPPFPADIYTIPQYGYCTLNYNNEAVDRSAFYCLDYFPSDMLRTGNNFEFTYTFEDVPFHSMFAHNQTLDRLMNPLVDQYLWAFSSVSQAGSSGRALHYSRATKTNMAAQYRNWLPGPFFRDQQIFTGASNITKNNVFSVWEKGKQWELDNRTNLMQPGPAAATTFSGEPDRQAMQNTLAFSRTVYDQTTATTDRNQILITNEDEIRPTNSVGIDAWGAVPTNNQSIVTPGTRAAVNNQGALPGMVWQNRDIYPTGTHLAKIPDTDNHFHPSPLIGRFGCKHPPPQIFIKNTPVPANPSETFQTAKVASFINQYSTGQCTVEIFWELKKETSKRWNPEIQFTSNFGNAADIQFAVSDTGSYSEPRPIGTRYLTKPL

SEQ ID NO: 550 - protein, 440 aa, Artificial Sequence
  source: /note="Description of Artificial Sequence: Synthetic polypeptide"
MELVDWLVEKGITTEKEWLLENRESFRSFQASSNSARQIKTALQGAIQEMLLTKTAEDYLVGKDPVSDDDIRQNRIYKILELNHYDPAYVGSILVGWCQKKWGKRNTLWLFGHATTGKTNIAEAIAHAVPFYGCVNWTNENFPFNDCVEKMIIWWEEGKMTAKVVETAKAILGGSRVRVDQKCKASVPIEPTPVIITSNTNMCYVIDGNTTTFEHKQPLEDRMFKLELLTRLPDDFGKVTKQEVRQFFRWSQDHLTPVIPEFLVRKAESRKRPAPSGEGYISPTKRPALAEQQQASESADPVPTRYRIKCSKHCGMDKMLFPCQICESMNRDINICAIHKTTDCKECFPDYGDKDDVELPPCTEHNVSRCYQCHSGELYRVTSDSDEKPAPESDEGTEPSYAPCTIHHLMGKSHGLVTCAACRLKNSTLHDDLDDGDLEQ

SEQ ID NO: 551 - protein, 319 aa, Artificial Sequence
  source: /note="Description of Artificial Sequence: Synthetic polypeptide"
MELVDWLVEKGITTEKEWLLENRESFRSFQASSNSARQIKTALQGAIQEMLLTKTAEDYLVGKDPVSDDDIRQNRIYKILELNHYDPAYVGSILVGWCQKKWGKRNTLWLFGHATTGKTNIAEAIAHAVPFYGCVNWTNENFPFNDCVEKMIIWWEEGKMTAKVVETAKAILGGSRVRVDQKCKASVPIEPTPVIITSNTNMCYVIDGNTTTFEHKQPLEDRMFKLELLTRLPDDFGKVTKQEVRQFFRWSQDHLTPVIPEFLVRKAESRKRPAPSGEGYISPTKRPALAEQQQASESADPVPTRLVGAVGQKGSECCS

SEQ ID NO: 552 - protein, 662 aa, Artificial Sequence
  source: /note="Description of Artificial Sequence: Synthetic polypeptide"
MRSYYEVIVQLPNDVESQVPGISDSFVNWITSREWTLPEDADWDLDQVDQVQLTLGDKIQREIRTHWGTMAKEPDFHYFIQLEQGEVFFHLHVLLETCSVKPMVLGRYIRHIQQKIVSKVYCATSLRWKDGCVVTKTKNFGGANKVRAESYIPAYLIPKQQPEVQWAWTNVPEYIKACLHRELRASLARLHFEEAGVSQSKENLARTADGAPVMPTRVSKRYMELVDWLVEKGITTEKEWLLENRESFRSFQASSNSARQIKTALQGAIQEMLLTKTAEDYLVGKDPVSDDDIRQNRIYKILELNHYDPAYVGSILVGWCQKKWGKRNTLWLFGHATTGKTNIAEAIAHAVPFYGCVNWTNENFPFNDCVEKMIIWWEEGKMTAKVVETAKAILGGSRVRVDQKCKASVPIEPTPVIITSNTNMCYVIDGNTTTFEHKQPLEDRMFKLELLTRLPDDFGKVTKQEVRQFFRWSQDHLTPVIPEFLVRKAESRKRPAPSGEGYISPTKRPALAEQQQASESADPVPTRYRIKCSKHCGMDKMLFPCQICESMNRDINICAIHKTTDCKECFPDYGDKDDVELPPCTEHNVSRCYQCHSGELYRVTSDSDEKPAPESDEGTEPSYAPCTIHHLMGKSHGLVTCAACRLKNSTLHDDLDDGDLEQ

SEQ ID NO: 553 - protein, 541 aa, Artificial Sequence
  source: /note="Description of Artificial Sequence: Synthetic polypeptide"
MRSYYEVIVQLPNDVESQVPGISDSFVNWITSREWTLPEDADWDLDQVDQVQLTLGDKIQREIRTHWGTMAKEPDFHYFIQLEQGEVFFHLHVLLETCSVKPMVLGRYIRHIQQKIVSKVYCATSLRWKDGCVVTKTKNFGGANKVRAESYIPAYLIPKQQPEVQWAWTNVPEYIKACLHRELRASLARLHFEEAGVSQSKENLARTADGAPVMPTRVSKRYMELVDWLVEKGITTEKEWLLENRESFRSFQASSNSARQIKTALQGAIQEMLLTKTAEDYLVGKDPVSDDDIRQNRIYKILELNHYDPAYVGSILVGWCQKKWGKRNTLWLFGHATTGKTNIAEAIAHAVPFYGCVNWTNENFPFNDCVEKMIIWWEEGKMTAKVVETAKAILGGSRVRVDQKCKASVPIEPTPVIITSNTNMCYVIDGNTTTFEHKQPLEDRMFKLELLTRLPDDFGKVTKQEVRQFFRWSQDHLTPVIPEFLVRKAESRKRPAPSGEGYISPTKRPALAEQQQASESADPVPTRLVGAVGQKGSECCS

SEQ ID NO: 554 - protein, 743 aa, Artificial Sequence
  source: /note="Description of Artificial Sequence: Synthetic polypeptide"
MSLISDAIPDWLERLVKKGVNAAADFYHLESGPPRPKANQQTQESLEKDDSRGLVFPGYNYLGPFNGLDKGEPVNEADAAALEHDKAYDLEIKDGHNPYFEYNEADRRFQERLKDDTSFGGNLGKAIFQAKKRVLEPFGLVEDSKTAPTGDKRKGEDEPRLPDTSSQTPKKNKKPRKERPSGGAEDPGEGTSSNAGAAAPASSVGSSIMAEGGGGPVGDAGQGADGVGNSSGNWHCDSQWLENGVVTRTTRTWVLPSYNNHLYKRIQGPSGGDNNNKFFGFSTPWGYFDYNRFHCHFSPRDWQRLINNNWGIRPKAMRFRLFNIQVKEVTVQDFNTTIGNNLTSTVQVFADKDYQLPYVLGSATEGTFPPFPADIYTIPQYGYCTLNYNNEAVDRSAFYCLDYFPSDMLRTGNNFEFTYTFEDVPFHSMFAHNQTLDRLMNPLVDQYLWAFSSVSQAGSSGRALHYSRATKTNMAAQYRNWLPGPFFRDQQIFTGASNITKNNVFSVWEKGKQWELDNRTNLMQPGPAAATTFSGEPDRQAMQNTLAFSRTVYDQTTATTDRNQILITNEDEIRPTNSVGIDAWGAVPTNNQSIVTPGTRAAVNNQGALPGMVWQNRDIYPTGTHLAKIPDTDNHFHPSPLIGRFGCKHPPPQIFIKNTPVPANPSETFQTAKVASFINQYSTGQCTVEIFWELKKETSKRWNPEIQFTSNFGNAADIQFAVSDTGSYSEPRPIGTRYLTKPL

SEQ ID NO: 555 - protein, 598 aa, Artificial Sequence
  source: /note="Description of Artificial Sequence: Synthetic polypeptide"
TAPTGDKRKGEDEPRLPDTSSQTPKKNKKPRKERPSGGAEDPGEGTSSNAGAAAPASSVGSSIMAEGGGGPVGDAGQGADGVGNSSGNWHCDSQWLENGVVTRTTRTWVLPSYNNHLYKRIQGPSGGDNNNKFFGFSTPWGYFDYNRFHCHFSPRDWQRLINNNWGIRPKAMRFRLFNIQVKEVTVQDFNTTIGNNLTSTVQVFADKDYQLPYVLGSATEGTFPPFPADIYTIPQYGYCTLNYNNEAVDRSAFYCLDYFPSDMLRTGNNFEFTYTFEDVPFHSMFAHNQTLDRLMNPLVDQYLWAFSSVSQAGSSGRALHYSRATKTNMAAQYRNWLPGPFFRDQQIFTGASNITKNNVFSVWEKGKQWELDNRTNLMQPGPAAATTFSGEPDRQAMQNTLAFSRTVYDQTTATTDRNQILITNEDEIRPTNSVGIDAWGAVPTNNQSIVTPGTRAAVNNQGALPGMVWQNRDIYPTGTHLAKIPDTDNHFHPSPLIGRFGCKHPPPQIFIKNTPVPANPSETFQTAKVASFINQYSTGQCTVEIFWELKKETSKRWNPEIQFTSNFGNAADIQFAVSDTGSYSEPRPIGTRYLTKPL

SEQ ID NO: 556 - DNA, 4694 bp, Artificial Sequence
  source: /note="Description of Artificial Sequence: Synthetic polynucleotide"
tggccagtttccaagacaggctcgctcgctcactcgggccggggccccaaaggggcccctagcgaccgcttcgcggtcgcggcccgagtgagcgagcgagcctgtcttggaaactggccagcactccggtgaggtaatgccgtcacgtggtcgggaatgggaacgggaaatctcgcgagaacgtaaacaaatataagacggcgccacacggcgctgcgtcatacgcgcgcgcgcaccggcgagatgaggtcgtactacgaggtcatcgttcagctgcccaacgacgtcgagagtcaggtacctggaatctccgattcgttcgtcaactggattacgtcgcgagaatggacgttgcctgaggacgccgattgggatttggaccaggtcgatcaagttcaactgacgctcggcgacaaaatccaacgggagattcgaactcattgggggacgatggccaaagaaccggactttcactattttatccaactggaacaaggtgaggtgttctttcatttacacgtcctgctggaaacgtgttccgtaaagccgatggtactcggaagatatatccgacatattcaacaaaaaattgtgagtaaagtctactgcgccacgagcctacgatggaaggatggatgcgtggtgaccaagaccaaaaatttcgggggcgcgaacaaggtccgggccgagtcgtatattcccgcctacctgatcccgaaacagcaaccggaagtgcagtgggcgtggactaacgtgcccgagtatataaaagcgtgcttgcaccgagaactgcgtgccagtctcgcgcgacttcacttcgaggaggcgggcgtctcgcaatccaaggaaaatctcgcgagaactgcagacggcgctcccgtgatgccgacccgcgtcagcaaacgctacatggagctcgtggattggctcgtggagaaggggatcaccaccgagaaggaatggctgctggaaaacagagaaagctttcggagctttcaggcctcgagcaactcggcgcgtcagatcaagacggccctgcaaggcgccattcaggagatgcttctgaccaagacggcggaggactacctcgtcggaaaggatcccgtctcggacgacgacatccgtcagaaccgcatctacaagattctggaactgaaccactacgacccagcgtacgtggggagtattttggtcgggtggtgccagaagaaatggggcaagcgaaacacgctgtggctgttcggacatgcgaccaccggcaagaccaacatcgcggaggctattgcccatgctgtgccgttctatggatgcgttaactggaccaacgagaactttccgttcaacgactgcgtcgaaaaaatgattatctggtgggaggagggcaaaatgaccgccaaagtggtggaaacagccaaggcgattctgggaggatctcgggtgagagtggaccaaaaatgcaaagcttcggttccgatcgaaccgacgccggtcattattaccagtaacaccaacatgtgttatgtcatcgacgggaacacgaccacgttcgagcataagcagccgttggaggacaggatgtttaagctcgaattgctgactcggttgcctgatgactttggtaaggtgaccaaacaggaggtgcgtcaattcttcaggtggtctcaggatcacctgacccctgtgatcccagaattcctagtgcggaaggcggagtctcgcaaaagacccgccccttccggggaaggctatataagcccgacaaagcggcccgcgctcgcagagcagcagcaggcgtcggagagcgcggacccggttcccaccaggtatcgtatcaaatgctcgaaacattgcggtatggataaaatgttgtttccttgccaaatttgtgaatcgatgaacagagatattaatatttgtgctattcataaaacgaccgactgtaaagagtgtttccccgactacggggataaagatgatgtagaactacccccctgtacagaacacaacgtgtctcgttgttatcaatgtcattcgggcgaattgtatcgcgtgacttcggactctgacgagaaacctgcccccgagagtgatgaaggcaccgagccatcctatgctccctgcacgattcaccacctgatgggcaagagtcacgggttagtcacttgcgcggcgtgtcggttgaaaaatagtacgttgcatgatgacttggatgacggtgatctcgaacaataaatgattgaaatgtagccatgtctctcatttctgatgcgattccagattggttggagcggttggtcaaaaagggagtgaatgctgcagctgatttctaccatttggaaagcggtcctcctcgtcctaaggcaaatcagcaaactcaagaatctcttgaaaaggacgattcgagaggtctcgtgttcccaggctacaattatctaggccctttcaacggtctagataaaggagaacccgtcaacgaggcagacgctgccgccttagaacacgacaaggcttacgacctcgaaatcaaggacgggcacaacccgtactttgagtacaacgaggccgacagacgtttccaggaacgtctcaaagacgatacctcctttggaggcaatttaggtaaagccatcttccaggccaaaaagagggttctcgaaccctttggtctggtggaagactcaaagacggctccgaccggagacaagcggaaaggcgaagacgaacctcgtttgcccgacacttcttcacagactcccaagaaaaacaagaagcctcgcaaggaaagaccttccggcggggcagaagatccgggcgaaggcacctcttccaacgctggagcagcagcacccgcctctagtgtgggatcatctatcatggctgaaggaggtggcggcccagtgggcgatgcaggccagggtgccgatggagtgggcaattcctccggaaattggcattgcgattcccaatggctggaaaacggagtcgtcactcgaaccacccgaacctgggtcttgcccagctacaacaaccacctgtacaaacgaatccaaggacccagcggaggcgacaacaacaacaaattctttggattcagcaccccctggggatactttgactacaatcgattccactgccacttttccccgcgagactggcaacgactcatcaacaacaactggggcatccgtcccaaagcgatgcgctttagactctttaacatccaggttaaagaggtcacggtccaagacttcaacaccaccatcggcaacaacctcaccagtacggtccaggtctttgcggacaaggactaccaactgccgtacgtcctcggatcggctaccgaaggcaccttcccgccgttcccagcggatatctacacgatcccgcagtacgggtactgcacgctaaactacaacaacgaggcggtggatcgttcggccttctactgtctggactactttccctcagacatgctgcggacaggaaataactttgagtttacttacaccttcgaggacgttcctttccatagcatgtttgcccacaaccagacgctagaccggctgatgaatcccctcgtggatcagtacctctgggctttcagctccgtcagccaagcaggctcatctggacgagctcttcattactcgcgggcgactaaaaccaacatggcggctcaatataggaactggttacctgggcctttcttccgtgatcagcaaatctttacgggcgctagcaacatcactaaaaataacgtctttagcgtttgggaaaaaggcaagcaatgggaactcgacaatcggaccaacctaatgcagcccggtcctgcggcagcgaccacctttagcggagaacctgaccgtcaagccatgcaaaacacgctggcttttagcaggaccgtctacgatcaaacgaccgccacgaccgatcgtaaccagatactcatcaccaacgaagacgaaatcagacccaccaactcggtcggtatcgacgcgtggggagcagttcccaccaacaaccagtcgatcgtgacccccggcactcgcgcggccgtcaacaatcaaggggcgcttcccgggatggtgtggcaaaacagagacatttaccctacagggacccatttggccaaaattcccgacactgacaatcacttccatccgtccccgcttattgggcggtttggctgcaagcatccccctccccagattttcattaaaaacacacccgtccctgccaacccttcggaaacgttccagacggccaaagtggcctccttcatcaaccagtactcgaccggacagtgcaccgtcgaaatcttttgggaactcaagaaggaaacctccaagcgctggaaccccgaaatccagttcacctccaactttggcaacgcggccgacatccagtttgccgtctccgacacgggatcctattccgaacctcgtcccatcggtacccgttaccttaccaaacctctgtaaattaaacccttcaataaaccgtttatgcgtaactgtatttccgtctcctgtcgttattcagtcacatgatgcggcattacctcaccggagtgctggccagtttccaagacaggctcgctcgctcactcgggccggggccccaaaggggcccctagcgaccgcttcgcggtcgcggcccgagtgagcgagcgagcctgtcttggaaactggcca

SEQ ID NO: 557 - DNA, 2211 bp, Artificial Sequence
  source: /note="Description of Artificial Sequence: Synthetic polynucleotide"
atggctgctgatggttatcttccagattggctcgaggacactctctctgaaggaataagacagtggtggaagctcaaacctggcccaccaccaccaaagcccgcagagcggcataaggacgacagcaggggtcttgtgcttcctgggtacaagtacctcggacccttcaacggactcgacaagggagagccggtcaacgaggcagacgcagcggccctcgagcacgacaaggcctacgaccagcagctcaaggccggtgacaacccctacctcaagtacaaccacgccgacgcggagttccagcagcggcttcagggcgacacatcgtttgggggcaacctcggcagagcagtcttccaggccaaaaagagggttcttgaacctcttggtctggttgagcaagcgggtgagacggctcctggaaagaagagaccgttgattgaatccccccagcagcccgactcctccacgggtatcggcaaaaaaggcaagcagccggctaaaaagagactcaattttggtcagactggcgactcagagtcagtccccgacccacaacctctcggagaacctccagcaacccccgctgctgtgggacctactacaatggcttcaggtggtggcgcaccaatggcagacaataacgaaggcgccgacggagtgggtaatgcctcaggaaattggcattgcgattccacatggctgggcgacagagtcatcaccaccagcacccgcacctgggccttgcccacctacaataaccacctctacaagcaaatctccagtgcttcaacgggggccagcaacgacaaccactacttcggctacagcaccccctgggggtattttgacttcaacagattccactgccacttttcaccacgtgactggcagcgactcatcaacaacaattggggattccggcccaagagactcaacttcaaactcttcaacatccaagtcaaggaggtcacgacgaatgatggcgtcacaaccatcgctaataaccttaccagcacggttcaagtcttctcggactcagactatcagctcccgtacgtgctcgggtcggctcacgagggctgcctcccgccgttcccagcagacgtcttcatggtgccacagtatggatacctcaccctgaacaacgggagtcaggcagtaggacgctcttcattttactgcctggagtactttccttctcagatgctgcgtaccggaaacaactttaccttcagctacacttttgaggacgttcctttccacagcagctacgctcacagccagagtctggaccgtctcatgaatcctctcatcgaccagtacctgtattacctgaacagaactcagaatcagtccggaagtgcccaaaacaaggacttgctgtttagccgggggtctccagctggcatgtctgttcagcccaaaaactggctacctggaccctgttatcggcagcagcgcgtttctaaaacaaaaacagacaacaacaacagcaactttacctggactggtgcttcaaaatataaccttaatgggcgtgaatctataatcaaccctggcactgctatggcctcacacaaagacgacaaagacaagttctttcccatgagcggtgtcatgatttttggaaaggagagcgccggagcttcaaacactgcattggacaatgtcatgatcacagacgaagaggaaatcaaagccactaaccccgtggccaccgaaagatttgggactgtggcagtcaatctccagagcagcagcacagaccctgcgaccggagatgtgcatgttatgggagccttacctggaatggtgtggcaagacagagacgtatacctgcagggtcccatttgggccaaaattcctcacacagatggacactttcacccgtctcctcttatgggcggctttggactcaagaacccgcctcctcagatcctcatcaaaaacacgcctgttcctgcgaatcctccggcggagttttcagctacaaagtttgcttcattcatcacccaatactccacaggacaagtgagtgtggaaattgaatgggagctgcagaaagaaaacagcaagcgctggaatcccgaagtgcagtacacatccaattatgcaaaatctgccaacgttgattttactgtggacaacaatggactttatactgagcctcgccccattggcacccgttacctcacccgtcccctgtaa

SEQ ID NO: 558 - protein, 736 aa, Artificial Sequence
  source: /note="Description of Artificial Sequence: Synthetic polypeptide"
MAADGYLPDWLEDTLSEGIRQWWKLKPGPPPPKPAERHKDDSRGLVLPGYKYLGPFNGLDKGEPVNEADAAALEHDKAYDQQLKAGDNPYLKYNHADAEFQQRLQGDTSFGGNLGRAVFQAKKRVLEPLGLVEQAGETAPGKKRPLIESPQQPDSSTGIGKKGKQPAKKRLNFGQTGDSESVPDPQPLGEPPATPAAVGPTTMASGGGAPMADNNEGADGVGNASGNWHCDSTWLGDRVITTSTRTWALPTYNNHLYKQISSASTGASNDNHYFGYSTPWGYFDFNRFHCHFSPRDWQRLINNNWGFRPKRLNFKLFNIQVKEVTTNDGVTTIANNLTSTVQVFSDSDYQLPYVLGSAHEGCLPPFPADVFMVPQYGYLTLNNGSQAVGRSSFYCLEYFPSQMLRTGNNFTFSYTFEDVPFHSSYAHSQSLDRLMNPLIDQYLYYLNRTQNQSGSAQNKDLLFSRGSPAGMSVQPKNWLPGPCYRQQRVSKTKTDNNNSNFTWTGASKYNLNGRESIINPGTAMASHKDDKDKFFPMSGVMIFGKESAGASNTALDNVMITDEEEIKATNPVATERFGTVAVNLQSSSTDPATGDVHVMGALPGMVWQDRDVYLQGPIWAKIPHTDGHFHPSPLMGGFGLKNPPPQILIKNTPVPANPPAEFSATKFASFITQYSTGQVSVEIEWELQKENSKRWNPEVQYTSNYAKSANVDFTVDNNGLYTEPRPIGTRYLTRPL

SEQ ID NO: 559 - DNA, 2211 bp, Artificial Sequence
  source: /note="Description of Artificial Sequence: Synthetic polynucleotide"
atggcttccgatggttatcttccagattggctcgaggacaacctctctgagggcatccgcgagtggtgggacttgaaacctggagccccgaaacccaaagccaaccagcaaaagcaggacgacggccggggtctggtgcttcctggctacaagtacctcggacccttcaacggactcgacaagggggagcccgtcaacgcggcggatgcagcggccctcgagcacgacaaggcctacgaccagcagctcagagcgggtgacaatccgtacctgcggtataaccacgccgacgccgagtttcaggagcgtctgcaagaagatacgtcttttgggggcaacctcgggcgagcagtcttccaggccaagaagagggttctcgaaccttttggtctggttgaggaaggtgctaagacggctcctggaaagaaacgtccggtagagcagtcgccacaagagccagactcctcctcgggcattggcaagacaggccagcagcccgctaaaaagagactcaattttggtcagactggcgactcagagtcagtccccgacccacaacctctcggagaacctccagcaacccccgctgctgtgggacctactacaatggcttcaggcggtggcgcaccaatggcagacaataacgaaggcgccgacggagtgggtaatgcctcaggaaattggcattgcgattccacatggctgggcgacagagtcatcaccaccagcacccgaacatgggccttgcccacctataacaaccacctctacaagcaaatctccagtgcttcaacgggggccagcaacgacaaccactacttcggctacagcaccccctgggggtattttgatttcaacagattccactgccatttctcaccacgtgactggcagcgactcatcaacaacaattggggattccggcccaagagactcaacttcaaactcttcaacatccaagtcaaggaggtcacgacgaatgatggcgtcacaaccatcgctaataaccttaccagcacggttcaagtcttctcggactcggagtaccagcttccgtacgtcctcggctctgcgcaccagggctgcctccctccgttcccggcggacgtgttcatgattccgcagtacggctacctaacgctcaacaatggcagccaggcagtgggacggtcatccttttactgcctggaatatttcccatcgcagatgctgagaacgggcaataactttaccttcagctacaccttcgaggacgtgcctttccacagcagctacgcgcacagccagagcctggaccggctgatgaatcctctcatcgaccagtacctgtattacctgaacagaactcagaatcagtccggaagtgcccaaaacaaggacttgctgtttagccgggggtctccagctggcatgtctgttcagcccaaaaactggctacctggaccctgttaccggcagcagcgcgtttctaaaacaaaaacagacaacaacaacagcaactttacctggactggtgcttcaaaatataaccttaatgggcgtgaatctataatcaaccctggcactgctatggcctcacacaaagacgacaaagacaagttctttcccatgagcggtgtcatgatttttggaaaggagagcgccggagcttcaaacactgcattggacaatgtcatgatcacagacgaagaggaaatcaaagccactaaccccgtggccaccgaaagatttgggactgtggcagtcaatctccagagcagcagcacagaccctgcgaccggagatgtgcatgttatgggagccttacctggaatggtgtggcaagacagagacgtatacctgcagggtcccatttgggccaaaattcctcacacagatggacactttcacccgtctcctcttatgggcggctttggacttaagcacccgcctcctcagatcctcatcaaaaacacgcctgttcctgcgaatcctccggcagagttttcggctacaaagtttgcttcattcatcacccagtattctactggccaagtcagcgtggagattgaatgggagctgcagaaagaaaacagcaaacgctggaatcccgaagtgcagtatacatctaactatgcaaaatctgccaacgttgatttcactgtggacaacaatggactttatactgagcctcgtcccattggcacccgttacctcacccgtcccctgtaa

SEQ ID NO: 560 - protein, 736 aa, Artificial Sequence
  source: /note="Description of Artificial Sequence: Synthetic polypeptide"
MASDGYLPDWLEDNLSEGIREWWDLKPGAPKPKANQQKQDDGRGLVLPGYKYLGPFNGLDKGEPVNAADAAALEHDKAYDQQLRAGDNPYLRYNHADAEFQERLQEDTSFGGNLGRAVFQAKKRVLEPFGLVEEGAKTAPGKKRPVEQSPQEPDSSSGIGKTGQQPAKKRLNFGQTGDSESVPDPQPLGEPPATPAAVGPTTMASGGGAPMADNNEGADGVGNASGNWHCDSTWLGDRVITTSTRTWALPTYNNHLYKQISSASTGASNDNHYFGYSTPWGYFDFNRFHCHFSPRDWQRLINNNWGFRPKRLNFKLFNIQVKEVTTNDGVTTIANNLTSTVQVFSDSEYQLPYVLGSAHQGCLPPFPADVFMIPQYGYLTLNNGSQAVGRSSFYCLEYFPSQMLRTGNNFTFSYTFEDVPFHSSYAHSQSLDRLMNPLIDQYLYYLNRTQNQSGSAQNKDLLFSRGSPAGMSVQPKNWLPGPCYRQQRVSKTKTDNNNSNFTWTGASKYNLNGRESIINPGTAMASHKDDKDKFFPMSGVMIFGKESAGASNTALDNVMITDEEEIKATNPVATERFGTVAVNLQSSSTDPATGDVHVMGALPGMVWQDRDVYLQGPIWAKIPHTDGHFHPSPLMGGFGLKHPPPQILIKNTPVPANPPAEFSATKFASFITQYSTGQVSVEIEWELQKENSKRWNPEVQYTSNYAKSANVDFTVDNNGLYTEPRPIGTRYLTRPL

SEQ ID NO: 561 - DNA, 2211 bp, Artificial Sequence
  source: /note="Description of Artificial Sequence: Synthetic polynucleotide"
atggctgctgatggttatcttccagattggctcgaggacactctctctgaaggaataagacagtggtggaagctcaaacctggcccaccaccaccaaagcccgcagagcggcataaggacgacagcaggggtcttgtgcttcctgggtacaagtacctcggacccttcaacggactcgacaagggagagccggtcaacgaggcagacgcagcggccctcgagcacgacaaggcctacgaccagcagctcaaggccggtgacaacccctacctcaagtacaaccacgccgacgcggagttccagcagcggcttcagggcgacacatcgtttgggggcaacctcggcagagcagtcttccaggccaaaaagagggttcttgaacctcttggtctggttgagcaagcgggtgagacggctcctggaaagaagagaccgttgattgaatccccccagcagcccgactcctccacgggtatcggcaaaaaaggcaagcagccggctaaaaagagactcaattttggtcagactggcgactcagagtcagtccccgacccacaacctctcggagaacctccagcaacccccgctgctgtgggacctactacaatggcttcaggtggtggcgcaccaatggcagacaataacgaaggcgccgacggagtgggtaatgcctcaggaaattggcattgcgattccacatggctgggcgacagagtcatcaccaccagcacccgcacctgggccttgcccacctacaataaccacctctacaagcaaatctccagtgcttcaacgggggccagcaacgacaaccactacttcggctacagcaccccctgggggtattttgacttcaacagattccactgccacttttcaccacgtgactggcagcgactcatcaacaacaattggggattccggcccaagagactcaacttcaaactcttcaacatccaagtcaaggaggtcacgacgaatgatggcgtcacaaccatcgctaataaccttaccagcacggttcaagtcttctcggactcagactatcagctcccgtacgtgctcgggtcggctcacgagggctgcctcccgccgttcccagcagacgtcttcatggtgccacagtatggatacctcaccctgaacaacgggagtcaggcagtaggacgctcttcattttactgcctggagtactttccttctcagatgctgcgtaccggaaacaactttaccttcagctacacttttgaggacgttcctttccacagcagctacgctcacagccagagtctggaccgtctcatgaatcctctcatcgaccagtacctgtattacctgaacagaactcagaatcagtccggaagtgcccaaaacaaggacttgctgtttagccgggggtctccaactggcatgtctgttcagcccaaaaactggctacctggaccctgttatcggcagcagcgcgtttctaaaacaaaaacagacaacaacaacagcaactttacctggactggtgcttcaaaatataaccttaatgggcgtgaatctataatcaaccctggcactgctatggcctcacacaaagacgacaaagacaagttctttcccatgagcggtgtcatgatttttggaaaggagagcgccggagcttcaaacactgcattggacaatgtcatgatcacagacgaagaggaaatcaaagccactaaccccgtggccactgaaagatttgggactgtggcagtcaatctccagagcagcagcacagaccctgcgaccggagatgtgcatgccatgggagccttacctggaatggtgtggcaagacagagacgtatacctgcagggtcctatttgggccaaaattcctcacacggatggacactttcacccgtctcctctcatgggcggctttggactcaagaacccgcctcctcagatcctcatcaaaaacacgcctgttcctgcgaatcctccggcggagttttcagctacaaagtttgcttcattcatcacccagtattccacaggacaagtgagcgtggagattgaatgggagctgcagaaagaaaacagcaaacgctggaatcccgaagtgcagtatacatctaactatgcaaaatctgccaacgttgatttcactgtggacaacaatggactttatactgagcctcgccccattggcacccgttacctcacccgtcccctgtaa

SEQ ID NO: 562 - protein, 736 aa, Artificial Sequence
  source: /note="Description of Artificial Sequence: Synthetic polypeptide"
MAADGYLPDWLEDTLSEGIRQWWKLKPGPPPPKPAERHKDDSRGLVLPGYKYLGPFNGLDKGEPVNEADAAALEHDKAYDQQLKAGDNPYLKYNHADAEFQQRLQGDTSFGGNLGRAVFQAKKRVLEPLGLVEQAGETAPGKKRPLIESPQQPDSSTGIGKKGKQPAKKRLNFGQTGDSESVPDPQPLGEPPATPAAVGPTTMASGGGAPMADNNEGADGVGNASGNWHCDSTWLGDRVITTSTRTWALPTYNNHLYKQISSASTGASNDNHYFGYSTPWGYFDFNRFHCHFSPRDWQRLINNNWGFRPKRLNFKLFNIQVKEVTTNDGVTTIANNLTSTVQVFSDSDYQLPYVLGSAHEGCLPPFPADVFMVPQYGYLTLNNGSQAVGRSSFYCLEYFPSQMLRTGNNFTFSYTFEDVPFHSSYAHSQSLDRLMNPLIDQYLYYLNRTQNQSGSAQNKDLLFSRGSPTGMSVQPKNWLPGPCYRQQRVSKTKTDNNNSNFTWTGASKYNLNGRESIINPGTAMASHKDDKDKFFPMSGVMIFGKESAGASNTALDNVMITDEEEIKATNPVATERFGTVAVNLQSSSTDPATGDVHAMGALPGMVWQDRDVYLQGPIWAKIPHTDGHFHPSPLMGGFGLKNPPPQILIKNTPVPANPPAEFSATKFASFITQYSTGQVSVEIEWELQKENSKRWNPEVQYTSNYAKSANVDFTVDNNGLYTEPRPIGTRYLTRPL

SEQ ID NO: 563 - DNA, 2211 bp, Artificial Sequence
  source: /note="Description of Artificial Sequence: Synthetic polynucleotide"
atggctgccgatggttatcttccagattggctcgaggacaacctctctgagggcattcgcgagtggtgggcgctgaaacctggagccccgaagcccaaagccaaccagcaaaagcaggacgacggccggggtctggtgcttcctggctacaagtacctcggacccttcaacggactcgacaagggggagcccgtcaacgcggcggatgcagcggccctcgagcacgacaaggcctacgaccagcagctcaaagcgggtgacaatccgtacctgcggtataaccacgccgacgccgagtttcaggagcgtctgcaagaagatacgtcttttgggggcaacctcgggcgagcagtcttccaggccaagaagcgggttctcgaacctctcggtctggttgaggaaggcgctaagacggctcctggaaagaaacgtccggtagagcaatcgccacaagagccagactcctcctcgggcatcggcaagacaggccagcagcccgctaaaaagagactcaattttggtcagactggcgactcagagtcagtccccgacccacaacctctcggagaacctccagcaacccccgctgctgtgggacctactacaatggcttcaggcggtggcgcaccaatggcagacaataacgaaggcgccgacggagtgggtaatgcctcaggaaattggcattgcgattccacatggctgggcgacagagtcatcaccaccagcacccgaacatgggccttgcccacctataacaaccacctctacaagcaaatctccagtgcttcgacgggggccagcaacgacaaccactacttcggctacagcaccccctgggggtattttgactttaacagattccactgccacttttcaccacgtgactggcagcgactcatcaacaacaactggggattccggcccaagagactcagcttcaagctcttcaacatccaggtcaaggaggtcacgacgaatgatggcgtcacaaccatcgctaataaccttaccagcacggttcaagtcttctcggactcggagtaccagcttccgtacgtcctcggctctgcgcaccagggctgcctccctccgttcccggcggacgtgttcatgattccgcaatacggctacctgacgctcaacaatggcagccaagccgtgggacgttcatccttttactgcctggaatatttcccttctcagatgctgagaacgggcaacaactttaccttcagctacacctttgaggaagtgcctttccacagcagctacgcgcacagccagagcctggaccggctgatgaatcctctcatcgatcaatacctgtattacctgaacagaactcaaaatcagtccggaagtgcccaaaacaaggacttgctgtttagccgtgggtctccagctggcatgtctgttcagcccaaaaactggctacctggaccctgttatcggcagcagcgcgtttctaaaacaaaaacagacaacaacaacagcaattttacctggactggtgcttcaaaatataacctcaatgggcgtgaatccatcatcaaccctggcactgctatggcctcacataaagacgacgaagacaagttctttcccatgagcggtgtcatgatttttggaaaagagagcgccggagcttcaaacactgcattggacaatgtcatgattacagacgaagaggaaattaaagccactaaccctgtggccaccgaaagatttgggaccgtggcagtcaatttccagagcagcagcacagaccctgcgaccggagatgtgcatgctatgggagcattacctggcatggtgtggcaagatagagacgtgtacctgcagggtcccatttgggccaaaattcctcacacagatggacactttcacccgtctcctcttatgggcggctttggactcaagaacccgcctcctcagatcctcatcaaaaacacgcctgttcctgcgaatcctccggcggagttttcagctacaaagtttgcttcattcatcacccaatactccacaggacaagtgagcgtggagattgaatgggagctgcagaaagaaaacagcaaacgctggaatcccgaagtgcagtatacatctaactatgcaaaatctgccaacattgatttcactgtggacaacaatggactttatactgagcctcgccccattggcacccgttacctcacccgtccccagtaa

SEQ ID NO: 564 - protein, 736 aa, Artificial Sequence
  source: /note="Description of Artificial Sequence: Synthetic polypeptide"
MAADGYLPDWLEDNLSEGIREWWALKPGAPKPKANQQKQDDGRGLVLPGYKYLGPFNGLDKGEPVNAADAAALEHDKAYDQQLKAGDNPYLRYNHADAEFQERLQEDTSFGGNLGRAVFQAKKRVLEPLGLVEEGAKTAPGKKRPVEQSPQEPDSSSGIGKTGQQPAKKRLNFGQTGDSESVPDPQPLGEPPATPAAVGPTTMASGGGAPMADNNEGADGVGNASGNWHCDSTWLGDRVITTSTRTWALPTYNNHLYKQISSASTGASNDNHYFGYSTPWGYFDFNRFHCHFSPRDWQRLINNNWGFRPKRLSFKLFNIQVKEVTTNDGVTTIANNLTSTVQVFSDSEYQLPYVLGSAHQGCLPPFPADVFMIPQYGYLTLNNGSQAVGRSSFYCLEYFPSQMLRTGNNFTFSYTFEEVPFHSSYAHSQSLDRLMNPLIDQYLYYLNRTQNQSGSAQNKDLLFSRGSPAGMSVQPKNWLPGPCYRQQRVSKTKTDNNNSNFTWTGASKYNLNGRESIINPGTAMASHKDDEDKFFPMSGVMIFGKESAGASNTALDNVMITDEEEIKATNPVATERFGTVAVNFQSSSTDPATGDVHAMGALPGMVWQDRDVYLQGPIWAKIPHTDGHFHPSPLMGGFGLKNPPPQILIKNTPVPANPPAEFSATKFASFITQYSTGQVSVEIEWELQKENSKRWNPEVQYTSNYAKSANIDFTVDNNGLYTEPRPIGTRYLTRPQ

SEQ ID NO: 565 - DNA, 2211 bp, Artificial Sequence
  source: /note="Description of Artificial Sequence: Synthetic polynucleotide"
atggctgccgatggttatcttccagattggctcgaggacaacctctctgagggcattcgcgagtggtgggacttgaaacctggagccccgaaacccaaagccaaccagcaaaagcaggacgacggccggggtctggtgcttcctggctacaagtacctcggacccttcaacggactcgacaagggggagcccgtcaacgcggcggatgcagcggccctcgagcacgacaaggcctacgaccagcagctcaaagcgggtgacaatccgtaccttcggtataaccacgccgacgccgagtttcaggagcgtctgcaagaagatacgtcttttgggggcaacctcgggcgagcagtcttccaggccaaaaagagggttctcgaacctctcggtctggttgaggaagcggctaagacggctcctggaaagaaacgtccggtagagcagtcgccacaagagccagactcctcctcgggcattggcaagacaggccagcagcccgctaaaaagagactcaattttggtcagactggcgactcagagtcagtccccgacccacaacctctcggagaacctcccgcagccccctcaggtgtgggatctcttacaatggcttcaggtggtggcgcaccaatggcagacaataacgaaggcgccgacggagtgggtaatgcctcaggaaattggcattgcgattccacatggctgggcgacagagtcatcaccaccagcacccgcacctgggccttgcccacctacaataaccacctctacaagcaaatctccagtgcttcaacgggggccagcaacgacaaccactacttcggctacagcaccccctgggggtattttgacttcaacagattccactgccacttttcaccacgtgactggcaaagactcatcaacaacaattggggattccggcccaagagactcaacttcaagctcttcaacatccaagtcaaggaggtcacgacgaatgatggcgtcacgaccatcgctaataaccttaccagcacggttcaagtcttctcggactcggagtaccagttgccgtacgtcctcggctctgcgcaccagggctgcctccctccgttcccggcggacgtgttcatgattccgcagtacggctacctaacgctcaacaatggcagccaggcagtgggacggtcatccttttactgcctggaatatttcccatcgcagatgctgagaacgggcaacaactttaccttcagctacacctttgaggaagtgcctttccacagcagctacgcgcacagccagagcctggaccggctgatgaatcctctcatcgaccagtacctgtattacctgaacagaactcaaaatcagtccggaagtgcccaaaacaaggacttgctgtttagccgtgggtctccagctggcatgtctgttcagcccaaaaactggctacctggaccctgttaccggcagcagtgcgtttctaaaacaaaaacagacaacaacaacagcaactttacctggactggtgcttcaaaatataaccttaatgggcgtgaatctataatcaaccctggcactgctatggcctcacacaaagacgacaaagacaagttctttcccatgagcggtgtcatgatttttggaaaggagagcgccggagcttcaaacactgcattggacaatgtcatgatcacagacgaagaggaaatcaaagccactaaccccgtggccaccgaaagatttgggactgtggcagtcaatctccagagcagcagcacagaccctgcgaccggagatgtgcatgttatgggagccttacctggaatggtgtggcaagacagagacgtatacctgcagggtcctatttgggccaaaattcctcacacagatggacactttcacccgtctcctcttatgggcggctttggactcaagaacccgcctcctcagatcctcatcaaaaacacgcctgttcctgcgaatcctccggcggagttttcagctacaaagtttgcttcattcatcacccaatactccacaggacaagtgagcgtggagattgaatgggagctgcagaaagaaaacagcaagcgctggaatcccgaagtgcagtacacatccaattatgcaaaatctgccaacgttgatttcactgtggacaacaatggactttatactgagcctcgccccattggcacccgttacctcacccgtcccctgtaa

SEQ ID NO: 566 - protein, 736 aa, Artificial Sequence
  source: /note="Description of Artificial Sequence: Synthetic polypeptide"
MAADGYLPDWLEDNLSEGIREWWDLKPGAPKPKANQQKQDDGRGLVLPGYKYLGPFNGLDKGEPVNAADAAALEHDKAYDQQLKAGDNPYLRYNHADAEFQERLQEDTSFGGNLGRAVFQAKKRVLEPLGLVEEAAKTAPGKKRPVEQSPQEPDSSSGIGKTGQQPAKKRLNFGQTGDSESVPDPQPLGEPPAAPSGVGSLTMASGGGAPMADNNEGADGVGNASGNWHCDSTWLGDRVITTSTRTWALPTYNNHLYKQISSASTGASNDNHYFGYSTPWGYFDFNRFHCHFSPRDWQRLINNNWGFRPKRLNFKLFNIQVKEVTTNDGVTTIANNLTSTVQVFSDSEYQLPYVLGSAHQGCLPPFPADVFMIPQYGYLTLNNGSQAVGRSSFYCLEYFPSQMLRTGNNFTFSYTFEEVPFHSSYAHSQSLDRLMNPLIDQYLYYLNRTQNQSGSAQNKDLLFSRGSPAGMSVQPKNWLPGPCYRQQCVSKTKTDNNNSNFTWTGASKYNLNGRESIINPGTAMASHKDDKDKFFPMSGVMIFGKESAGASNTALDNVMITDEEEIKATNPVATERFGTVAVNLQSSSTDPATGDVHVMGALPGMVWQDRDVYLQGPIWAKIPHTDGHFHPSPLMGGFGLKNPPPQILIKNTPVPANPPAEFSATKFASFITQYSTGQVSVEIEWELQKENSKRWNPEVQYTSNYAKSANVDFTVDNNGLYTEPRPIGTRYLTRPL

SEQ ID NO: 567 - DNA, 2211 bp, Artificial Sequence
  source: /note="Description of Artificial Sequence: Synthetic polynucleotide"
atggctgccgatggttatcttccagattggctcgaggacaacctctctgagggcattcgcgaatggtgggacttgaaacctggagccccgaaacccaaagtcaaccagcaaaagcaggacaacgctcggggtcttgtgcttccgggttacaaatacctcggacccttcaacggactcgacaagggggagcccgtcaacgcggcggacgcagcggccctcgagcacgacaaggcctacgaccagcagctcaaagcgggtgacaatccgtaccttcggtataaccacgccgacgccgagtttcaggagcgtctgcaagaagatacgtcttttgggggcaaccttggacgagcagtcttccaggccaagaagagggttctcgaaccttttggtctggttgaggaaggtgctaagacggctcctggaaagaaacgtccggtagagcagtcgccacaagagccagactcctcctcgggcattggcaagacaggccagcagcccgctaaaaagagactcaattttggtcagactggcgactcagagtcagtccccgacccacaacctctcggagaacctccagcaacccccgctgctgtgggacctactacaatggcttcaggcggtggcgcaccaatggcagacaataacgaaggcgccgacggagtgggtaatgcctcaggaaattggcattgcgattccacatggctgggcgacagagtcatcaccaccagcacccgcacctgggccttgcccacctacaataaccacctctacaagcaaatctccagtgcttcaacgggggccagcaacgacaaccactacttcggctacagcaccccctgggggtattttgacttcaacagattccactgccacttttcaccacgtgactggcaaagactcatcaacaacaattggggattccggcccaagagactcaacttcaagctcttcaacatccaagtcaaggaggtcacgacgaatgatggcgtcacgaccatcgctaataaccttaccagcacggttcaagtcttctcggactcggagtaccagttgccgtacgtcctcggctctgcgcaccagggctgcctccctccgttcccggcggacgtgttcatgattccgcaatacggctacctgacgctcaacaatggcagccaggcagtgggacggtcatccttttactgcctggaatatttcccatcgcagatgctgagaacgggcaataactttaccttcagctacacttttgaggacgttcctttccacagcagctacgctcacagccagagcctggaccggctgatgaatcctctcatcgaccagtacctgtattacctgaacagaactcagaatcagtccggaagtgcccaaaacaaggacttgctgtttagccgtgggtctccaactggcatgtctgttcagcccaaaaactggctacctggaccctgttatcggcagcagcgcgtttctaaaacaaaaacagacaacaacaacagcaactttacctggactggtgcttcaaaatataaccttaatgggcgtgaatctataatcaaccctggcactgctatggcctcacacaaagacgacgaagacaagttctttcccatgagcggtgtcatgatttttggaaaggagagcgccggagcttcaaacactgcattggacaatgtcatgatcacagacgaagaggaaatcaaagccactaaccccgtggccactgaaagatttgggactgtggcagtcaatctccagagcagcagcacagaccctgcgaccggagatgtgcatgccatgggagccttacctggaatggtgtggcaagacagagacgtatacctgcagggtcctatttgggccaaaattcctcacacggatggacactttcacccgtctcctctcatgggcggctttggacttaagcacccgcctcctcagatcctcatcaaaaacacgcctgttcctgcgaatcctccggcagagttttcggctacaaagtttgcttcattcatcacccagtattccacaggacaagtgagcgtggagattgaatgggagctgcagaaagaaaacagcaaacgctggaatcccgaagtgcagtatacatctaactatgcaaaatctgccaacgttgatttcactgtggacaacaatggactttatactgagcctcgccccattggcacccgttacctcacccgtcccctgtaa

SEQ ID NO: 568 - protein, 736 aa, Artificial Sequence
  source: /note="Description of Artificial Sequence: Synthetic polypeptide"
MAADGYLPDWLEDNLSEGIREWWDLKPGAPKPKVNQQKQDNARGLVLPGYKYLGPFNGLDKGEPVNAADAAALEHDKAYDQQLKAGDNPYLRYNHADAEFQERLQEDTSFGGNLGRAVFQAKKRVLEPFGLVEEGAKTAPGKKRPVEQSPQEPDSSSGIGKTGQQPAKKRLNFGQTGDSESVPDPQPLGEPPATPAAVGPTTMASGGGAPMADNNEGADGVGNASGNWHCDSTWLGDRVITTSTRTWALPTYNNHLYKQISSASTGASNDNHYFGYSTPWGYFDFNRFHCHFSPRDWQRLINNNWGFRPKRLNFKLFNIQVKEVTTNDGVTTIANNLTSTVQVFSDSEYQLPYVLGSAHQGCLPPFPADVFMIPQYGYLTLNNGSQAVGRSSFYCLEYFPSQMLRTGNNFTFSYTFEDVPFHSSYAHSQSLDRLMNPLIDQYLYYLNRTQNQSGSAQNKDLLFSRGSPTGMSVQPKNWLPGPCYRQQRVSKTKTDNNNSNFTWTGASKYNLNGRESIINPGTAMASHKDDEDKFFPMSGVMIFGKESAGASNTALDNVMITDEEEIKATNPVATERFGTVAVNLQSSSTDPATGDVHAMGALPGMVWQDRDVYLQGPIWAKIPHTDGHFHPSPLMGGFGLKHPPPQILIKNTPVPANPPAEFSATKFASFITQYSTGQVSVEIEWELQKENSKRWNPEVQYTSNYAKSANVDFTVDNNGLYTEPRPIGTRYLTRPL

SEQ ID NO: 569 - DNA, 2208 bp, Artificial Sequence
  source: /note="Description of Artificial Sequence: Synthetic polynucleotide"
  modified_base (955)..(955): a, c, g or t
  modified_base (971)..(972): a, c, g or t
  modified_base (981)..(981): a, c, g or t
  modified_base (986)..(986): a, c, g or t
  modified_base (1235)..(1235): a, c, g or t
  modified_base (1694)..(1696): a, c, g or t
  modified_base (1698)..(1698): a, c, g or t
  modified_base (1763)..(1765): a, c, g or t
  modified_base (1778)..(1778): a, c, g or t
  modified_base (2204)..(2204): a, c, g or t
atggctgccgatggttatcttccagattggctcgaggacaacctctctgagggcattcgcgaatggtgggacttgaaacctggagccccgaaacccaaagtcaaccagcaaaagcaggacaacgctcggggtcttgtgcttccgggttacaaatacctcggacccttcaacggactcgacaagggggagcccgtcaacgcggcggacgcagcggccctcgagcacgacaaggcctacgaccagcagctcaaagcgggtgacaatccgtaccttcggtataaccacgccgacgccgagtttcaggagcgtctgcaagaagatacgtcttttgggggcaaccttggacgagcagtcttccaggccaagaagagggttctcgaaccttttggtctggttgaggaaggtgctaagacggctcctggaaagaaacgtccggtagagcagtcgccacaagagccagactcctcctcgggcattggcaagacaggccagcagcccgctaaaaagagactcaattttggtcagactggcgactcagagtcagtccccgacccacaacctctcggagaacctccagcaacccccgctgctgtgggacctactacaatggcttcaggcggtggcgcaccaatggcagacaataacgaaggcgccgacggagtgggtaatgcctcaggaaattggcattgcgattccacatggctgggcgacagagtcatcaccaccagcacccgaacatgggccttgcccacctataacaaccacctctacaagcaaatctccagtgcttcaacgggggccagcaacgacaaccactacttcggctacagcaccccctgggggtattttgatttcaacagattccactgccacttttcaccacgtgactggcagcgactcatcaataacaattggggattccggcccaagagactcaacttcaaactcttcaacntccaagtcaaggaggnnacgacgaangatgncgtcacaaccatcgctaataaccttaccagcacggttcaagtcttctcggactcggagtaccagcttccgtacgtcctcggctctgcgcaccagggctgcctccctccgttcccggcggacgtgttcatgattccgcaatacggctacctgacgctcaacaatggcagccaggcagtgggacggtcatccttttactgcctggaatatttcccatcgcagatgctgagaacgggcaataactttacctncagctacacttttgaggacgttcctttccacagcagctacgctcacagccagagcctggaccggctgatgaatcctctcatcgaccagtacctgtattacctgaacagaactcagaatcagtccggaagtgcccaaaacaaggacttgctgtttagccgtgggtctccaactggcatgtctgttcagcccaaaaactggctacctggaccctgttatcggcagcagcgcgtttctaaaacaaaaacagacaacaacaacagcaactttacctggactggtgcttcaaaatataaccttaatgggcgtgaatctataatcaaccctggcactgctatggcctcacacaaagacgacgaagacaagttctttcccatgagcggtgtcatgatttttggaaaggagagcgccggagcttcaaacactgcattggacaatgtcatgatcacagacgaagagannncnaagccactaaccccgtggccactgaaagatttgggactgtggcagtcaatctccaagcagcacannnaccctgcgaccgnagatgtgcatgccatgggagccttacctggaatggtgtggcaagacagagacgtatacctgcagggtcctatttgggccaaaattcctcacacggatggacactttcacccgtctcctctcatgggcggctttggacttaagcacccgcctcctcagatcctcatcaaaaacacgcctgttcctgcgaatcctccggcagagttttcggctacaaagtttgcttcattcatcacccagtattccacaggacaagtgagcgtggagattgaatgggagctgcagaaagaaaacagcaaacgctggaatcccgaagtgcagtatacatctaactatgcaaaatctgccaacgttgatttcactgtggacaacaatggactttatactgagcctcgccccattggcacccgttacctcacccgtccccngtaa

SEQ ID NO: 570 - protein, 723 aa, Artificial Sequence
  source: /note="Description of Artificial Sequence: Synthetic polypeptide"
MAADGYLPDWLEDNLSEGIREWWDLKPGAPKPKVNQQKQDNARGLVLPGYKYLGPFNGLDKGEPVNAADAAALEHDKAYDQQLKAGDNPYLRYNHADAEFQERLQEDTSFGGNLGRAVFQAKKRVLEPFGLVEEGAKTAPGKKRPVEQSPQEPDSSSGIGKTGQQPAKKRLNFGQTGDSESVPDPQPLGEPPATPAAVGPTTMASGGGAPMADNNEGADGVGNASGNWHCDSTWLGDRVITTSTRTWALPTYNNHLYKQISSASTGASNDNHYFGYSTPWGYFDFNRFHCHFSPRDWQRLINNNWGFRPKRLNFKLFNQVKETTDVTTIANNLTSTVQVFSDSEYQLPYVLGSAHQGCLPPFPADVFMIPQYGYLTLNNGSQAVGRSSFYCLEYFPSQMLRTGNNFTSYTFEDVPFHSSYAHSQSLDRLMNPLIDQYLYYLNRTQNQSGSAQNKDLLFSRGSPTGMSVQPKNWLPGPCYRQQRVSKTKTDNNNSNFTWTGASKYNLNGRESIINPGTAMASHKDDEDKFFPMSGVMIFGKESAGASNTALDNVMITDEEATNPVATERFGTVAVNLQSSPATDVHAMGALPGMVWQDRDVYLQGPIWAKIPHTDGHFHPSPLMGGFGLKHPPPQILIKNTPVPANPPAEFSATKFASFITQYSTGQVSVEIEWELQKENSKRWNPEVQYTSNYAKSANVDFTVDNNGLYTEPRPIGTRYLTRP

SEQ ID NO: 571 - DNA, 2208 bp, Artificial Sequence
  source: /note="Description of Artificial Sequence: Synthetic polynucleotide"
atggctgccgatggttatcttccagattggctcgaggacactctctctgaaggaataagacagtggtggaagctcaaacctggcccaccaccaccaaagcccgcagagcggcataaggacgacagcaggggtcttgtgcttcctgggtacaagtacctcggacccttcaacggactcgacaagggagagccggtcaacgaggcagacgccgcggccctcgagcacgacaaagcctatgaccggcagctcgacagcggagacaacccgtacctcaagtacaaccacgccgacgcggagtttcaggagcgccttaaagaagatacgtcttttgggggcaacctcggacgagcagtcttccaggcgaaaaagagggttcttgaacctctgggcctggttgaggaacctgttaagacggctccgggaaaaaagaggccggtagagcactctcctgtggagccagactcctcctcgggaaccggaaaggcgggtcagcagcctgcaagaaaaagattgaattttggtcagactggagacgcagactcagtacctgacccccagcctctcggacagccaccagcagccccctctggtctgggaactaatacgatggctacaggcagtggcgcaccaatggcagacaataacgagggcgccgacggagtgggtaattcctcgggaaattggcattgcgattccacatggatgggcgacagagtcatcaccaccagcacccgaacctgggccctgcccacctacaacaaccacctctacaaacaaatttccagccaatcaggagcctcgaacgacaatcactactttggctacagcaccccttgggggtattttgacttcaacagattccactgccacttttcaccacgtgactggcaaagactcatcaacaacaactggggattccgacccaagagactcaagttcaagctctttaacattcaagtcaaagaggtcacgcagaatgacggtacgacgacgattgccaataaccttaccagcacggttcaggtgtttactgactcggagtaccagctcccgtacgtcctcggctcggcgcatcaaggatgcctcccgccgttcccagcagacgtcttcatggtgccacagtatggatacctcaccctgaacaacgggagtcaggcagtaggacgctcttcattttactgcctggagtactttccttctcagatgctgcgtaccggtaacaactttaccttcagctacacttttgaggacgttcctttccacagcagctacgctcacagccagagtctggaccgtctcatgaatcctctcatcgaccagtacctgtattacttgagcagaacagacgctccaagtggaaccaccacgcagtcaaggcttcagttttctcaggccggagcgagtgacattcgggaccagtctaggaactggcttcctggaccctgttaccgccagcagcgagtatcaaagacatctgcggataacaacaacagtgaatactcgtggactggagctaccaagtaccacctcaatggcagagactctctggtgaatccgggcccggccatggcaagccacaaggacgatgaagaaaagttttttcctcagagcggggttctcatctttgggaagcaaggctcagagaaaacaagtgtggacattgaaaaggtcatgattacagacgaagaggaaatcaggacaaccaatcccgtggctacggagcagtatggttctgtatctaccaacctccagagaggcaacagacaagcagctaccgcagatgtcaacacacaaggcgttcttccaggcatggtctggcaggacagagatgtgtaccttcaggggcccatctgggcaaagattccacacacggacggacattttcacccctctcccctcatgggtggattcggacttaaacaccctcctccacagattctcatcaagaacaccccggtacctgcgaatccttcgaccaccttcagtgcggcaaagtttgcttccttcatcacacagtactccacgggacaggtcagcgtggagatcgagtgggagctgcagaaggaaaacagcaaacgctggaatcccgaagttcagtacacttccaactacaacaagtctgttaatgtggactttactgtggacactaatggcgtgtattcagagcctcgccccattggcaccagatacctgactcgtaatctgtaa

SEQ ID NO: 572 - protein, 735 aa, Artificial Sequence
  source: /note="Description of Artificial Sequence: Synthetic polypeptide"
MAADGYLPDWLEDTLSEGIRQWWKLKPGPPPPKPAERHKDDSRGLVLPGYKYLGPFNGLDKGEPVNEADAAALEHDKAYDRQLDSGDNPYLKYNHADAEFQERLKEDTSFGGNLGRAVFQAKKRVLEPLGLVEEPVKTAPGKKRPVEHSPVEPDSSSGTGKAGQQPARKRLNFGQTGDADSVPDPQPLGQPPAAPSGLGTNTMATGSGAPMADNNEGADGVGNSSGNWHCDSTWMGDRVITTSTRTWALPTYNNHLYKQISSQSGASNDNHYFGYSTPWGYFDFNRFHCHFSPRDWQRLINNNWGFRPKRLKFKLFNIQVKEVTQNDGTTTIANNLTSTVQVFTDSEYQLPYVLGSAHQGCLPPFPADVFMVPQYGYLTLNNGSQAVGRSSFYCLEYFPSQMLRTGNNFTFSYTFEDVPFHSSYAHSQSLDRLMNPLIDQYLYYLSRTDAPSGTTTQSRLQFSQAGASDIRDQSRNWLPGPCYRQQRVSKTSADNNNSEYSWTGATKYHLNGRDSLVNPGPAMASHKDDEEKFFPQSGVLIFGKQGSEKTSVDIEKVMITDEEEIRTTNPVATEQYGSVSTNLQRGNRQAATADVNTQGVLPGMVWQDRDVYLQGPIWAKIPHTDGHFHPSPLMGGFGLKHPPPQILIKNTPVPANPSTTFSAAKFASFITQYSTGQVSVEIEWELQKENSKRWNPEVQYTSNYNKSVNVDFTVDTNGVYSEPRPIGTRYLTRNL

SEQ ID NO: 573 - DNA, 2208 bp, Artificial Sequence
  source: /note="Description of Artificial Sequence: Synthetic polynucleotide"
atggctgccgatggttatcttccagattggctcgaggacactctctctgaaggaataagacagtggtggaagctcaaacctggcccaccaccaccaaagcccgcagagcggcataaggacgacagcaggggtcttgtgcttcctgggtacaagtacctcggacccttcaacggactcgacaagggagagccggtcaacgaggcagacgccgcggccctcgagcacgacaaagcctatgaccggcagctcgacagcggagacaacccgtacctcaagtacaaccacgccgacgcggagtttcaggagcgccttaaagaagatacgtcttttgggggcaacctcggacgagcagtcttccaggcgaaaaagagggttcttgaacctctgggcctggttgaggaacctgttaagacggctccgggaaaaaagaggccggtagagcactctcctgtggagccagactcctcctcgggaaccggaaaggcgggccagcagcctgcaagaaaaagattgaattttggtcagactggagacgcaaactcagtacctgacccccagcctctcggacagccaccagcagccccctctggtctgggaactaatacgatggctacaggcagtggcgcaccaatggcagacaataacgagggcgccgacggagtgggtaattcctcgggaaattggcattgcgattccacatggatgggcgacagagtcatcaccaccagcacccgaacctgggccctgcccacctacaacaaccacctctacaaacaaatttccagccaatcaggagcctcgaacgacaatcactactttggctacagcaccccttgggggtattttgacttcaacagattccactgccacttttcaccacgtgactggcaaagactcatcaacaacaactggggattccgacccaagagactcaagttcaagctctttaacattcaagtcaaagaggtcacgcagaatgacggtacgacgacgattgccaataaccttaccagcacggttcaggtgtttactgactcggagtaccagctcccgtacgtcctcggctcggcgcatcaaggatgcctcccgccgttcccagcagacgtcttcatggtgccacagtatggatacctcaccctgaacaacgggagtcgggcagtaggacgctcttcattttactgcctggagtactttccttctcagatgctgcgtaccggtaacaactttaccttcagctacacttttgaggacgttcctttccacagcagctacgctcacagccagagtctggaccgtctcatgaatcctctcatcgaccagtacctgtattacttgagcagaacagacactccaagtggaaccaccacgcagtcaaggcttcagttttctcaggccggagcgagtgacattcgggaccagtctaggaactggcttcctggaccctgttaccgccagcagcgagtatcaaagacatctgcggataacaacaacagtgaatactcgtggactggagctaccaagtaccacctcaatggcagagactctctggtgaatccgggcccggccatggcaagccacaaggacgatgaagaaaagttttttcctcagagcggggttctcatctttgggaagcaaggctcagagaaaacaagtgtggacattgaaaaggtcatgattacagacgaagaggaaatcaggacgaccaatcccgtggctacggagcagtatggttctgtatctaccaacctccagagaggcaacagacaagcagctaccgcagatgtcaacacacaaggcgttcttccaggcatggtctggcaggacagagatgtgtaccttcaggggcccatctgggcaaagattccacacacggacggacattttcacccctctcccctcatgggtggattcggacttaaacaccctcctccacagattctcatcaagaacaccccggtacctgcgaatccttcgaccaccttcagtgcggcaaagtttgcttccttcatcacacagtactccacgggacaggtcagcgtggagatcgagtgggagctgcagaaggaaaacagcaaacgctggaatcccgaagttcagtacacttccaactacaacaagtctgttaatgtggactttactgtggacactaatggcgtgtatacagagcctcgccccattggcaccagatacctgactcgtaatctgtaa

SEQ ID NO: 574 - protein, 735 aa, Artificial Sequence
  source: /note="Description of Artificial Sequence: Synthetic polypeptide"
MAADGYLPDWLEDTLSEGIRQWWKLKPGPPPPKPAERHKDDSRGLVLPGYKYLGPFNGLDKGEPVNEADAAALEHDKAYDRQLDSGDNPYLKYNHADAEFQERLKEDTSFGGNLGRAVFQAKKRVLEPLGLVEEPVKTAPGKKRPVEHSPVEPDSSSGTGKAGQQPARKRLNFGQTGDANSVPDPQPLGQPPAAPSGLGTNTMATGSGAPMADNNEGADGVGNSSGNWHCDSTWMGDRVITTSTRTWALPTYNNHLYKQISSQSGASNDNHYFGYSTPWGYFDFNRFHCHFSPRDWQRLINNNWGFRPKRLKFKLFNIQVKEVTQNDGTTTIANNLTSTVQVFTDSEYQLPYVLGSAHQGCLPPFPADVFMVPQYGYLTLNNGSRAVGRSSFYCLEYFPSQMLRTGNNFTFSYTFEDVPFHSSYAHSQSLDRLMNPLIDQYLYYLSRTDTPSGTTTQSRLQFSQAGASDIRDQSRNWLPGPCYRQQRVSKTSADNNNSEYSWTGATKYHLNGRDSLVNPGPAMASHKDDEEKFFPQSGVLIFGKQGSEKTSVDIEKVMITDEEEIRTTNPVATEQYGSVSTNLQRGNRQAATADVNTQGVLPGMVWQDRDVYLQGPIWAKIPHTDGHFHPSPLMGGFGLKHPPPQILIKNTPVPANPSTTFSAAKFASFITQYSTGQVSVEIEWELQKENSKRWNPEVQYTSNYNKSVNVDFTVDTNGVYTEPRPIGTRYLTRNL

SEQ ID NO: 575 - DNA, 2211 bp, Artificial Sequence
  source: /note="Description of Artificial Sequence: Synthetic polynucleotide"
atggctgccgatggttatcttccagattggctcgaggacactctctctgaaggaataagacagtggtggaagctcaaacctggcccaccaccaccaaagcccgcagagcggcataaggacgacagcaggggtcttgtgcttcctgggtacaagtacctcggacccttcaacggactcgacaagggagagccggtcaacgaggcagacgccgcggccctcgagcacgacaaggcctacgaccagcagctcaaagcgggtgacaatccgtacctgcggtataaccacgccgacgccgagtttcaggagcgtctgcaagaagatacgtcttttgggggcaacctcgggcgagcagtcttccaggccaagaagcgggttctcgaacctctcggtctggttgaggaaggcgctaagacggctcctggaaagaaacgtccggtagagcagtcgccacaagagccagactcctcctcgggcatcggcaagacaggccagcagcccgctaaaaagagactcaattttggtcagactggcgactcagagtcagtccccgacccacaacctctcggagaacctccagcaacccccgctgctgtgggacctactacaatggcttcaggcggtggcgcaccaatggcagacaataacgaaggcgccgacggagtgggtaatgcctcaggaaattggcattgcgattccacatggctgggcgacagagtcatcaccaccagcacccgaacatgggccttgcccacctataacaaccacctctacaagcaaatctccagtgcttcgacgggggccagcaacgacaaccactacttcggctacagcaccccctgggggtattttgactttaacagattccactgccacttttcaccacgtgactggcagcgactcatcaacaataactggggattccggcccaagagactcagcttcaagctcttcaacatccaggtcaaggaggtcacgacgaatgatggcgtcacaaccatcgctaataaccttaccagcacggttcaagtcttctcggactcggagtaccagcttccgtacgtcctcggctctgcgcaccagggctgcctccctccgttcccggcggacgtgttcatgattccgcaatacggctacctgacgctcaacaatggcagccaagccgtgggacgttcatccttttactgcctggaatatttcccttctcagatgctgagaacgggcaacaactttaccttcagctacacctttgaggaagtgcctttccacagcagctacgcgcacagccagagcctggaccggctgatgaatcctctcatcgatcaatacctgtattacctgaacagaactcaaaatcagtccggaagtgcccaaaacaaggacttgctgtttagccgtgggtctccagctggcatgtctgttcagcccaaaaactggctacctggaccctgttatcggcagcagcgcgtttctaaaacaaaaacagacaacaacaacagcaattttacctggactggtgcttcaaaatataacctcaatgggcgtgaatccatcatcaaccctggcactgctatggcctcacacaaagacgacgaagacaagttctttcccatgagcggtgtcatgatttttggaaaagagagcgccggagcttcaaacactgcattggacaatgtcatgattacggacgaagaggaaattaaagccactaaccctgtggccaccgaaagatttgggaccgtggcagtcaatttccagagcagcagcacagaccctgcgaccggagatgtgcatgctatgggagcattacctggcatggtgtggcaagatagagacgtgtacctgcagggtcccatttgggccaaaattcctcacacagatggacactttcacccgtctcctcttatgggcggctttggactcaagaacccgcctcctcagatcctcatcaaaaacacgcctgttcctgcgaatcctccggcggagttttcagctacaaagtttgcttcattcatcactcaatactccacaggacaagtgagcgtggaaattgaatgggagctgcagaaagaaaacagcaaacgctggaatcccgaagtgcagtatacatctaactatgcaaaatctgccaacgttgatttcactgtggacaacaatggactttatactgagcctcgccccattggcacccgttacctcacccgtcccctgtaa

SEQ ID NO: 576 - protein, 736 aa, Artificial Sequence
  source: /note="Description of Artificial Sequence: Synthetic polypeptide"
MAADGYLPDWLEDTLSEGIRQWWKLKPGPPPPKPAERHKDDSRGLVLPGYKYLGPFNGLDKGEPVNEADAAALEHDKAYDQQLKAGDNPYLRYNHADAEFQERLQEDTSFGGNLGRAVFQAKKRVLEPLGLVEEGAKTAPGKKRPVEQSPQEPDSSSGIGKTGQQPAKKRLNFGQTGDSESVPDPQPLGEPPATPAAVGPTTMASGGGAPMADNNEGADGVGNASGNWHCDSTWLGDRVITTSTRTWALPTYNNHLYKQISSASTGASNDNHYFGYSTPWGYFDFNRFHCHFSPRDWQRLINNNWGFRPKRLSFKLFNIQVKEVTTNDGVTTIANNLTSTVQVFSDSEYQLPYVLGSAHQGCLPPFPADVFMIPQYGYLTLNNGSQAVGRSSFYCLEYFPSQMLRTGNNFTFSYTFEEVPFHSSYAHSQSLDRLMNPLIDQYLYYLNRTQNQSGSAQNKDLLFSRGSPAGMSVQPKNWLPGPCYRQQRVSKTKTDNNNSNFTWTGASKYNLNGRESIINPGTAMASHKDDEDKFFPMSGVMIFGKESAGASNTALDNVMITDEEEIKATNPVATERFGTVAVNFQSSSTDPATGDVHAMGALPGMVWQDRDVYLQGPIWAKIPHTDGHFHPSPLMGGFGLKNPPPQILIKNTPVPANPPAEFSATKFASFITQYSTGQVSVEIEWELQKENSKRWNPEVQYTSNYAKSANVDFTVDNNGLYTEPRPIGTRYLTRPL

SEQ ID NO: 577 - protein, 735 aa, Artificial Sequence
  source: /note="Description of Artificial Sequence: Synthetic polypeptide"
MAADGYLPDWLEDTLSEGIRQWWKLKPGPPPPKPAERHKDDSRGLVLPGYKYLGPFNGLDKGEPVNEADAAALEHDKAYDRQLDSGDNPYLKYNHADAEFQERLKEDTSFGGNLGRAVFQAKKRVLEPLGLVEEPVKTAPGKKRPVEHSPVEPDSSSGTGKAGQQPARKRLNFGQTGDADSVPDPQPLGQPPAAPSGLGTNTMATGSGAPMADNNEGADGVGNSSGNWHCDSTWMGDRVITTSTRTWALPTYNNHLYKQISSQSGASNDNHYFGYSTPWGYFDFNRFHCHFSPRDWQRLINNNWGFRPKRLKFKLFNIQVKEVTQNDGTTTIANNLTSTVQVFTDSEYQLPYVLGSAHQGCLPPFPADVFMVPQYGYLTLNNGSQAVGRSSFYCLEYFPSQMLRTGNNFTFSYTFEDVPFHSSYAHSQSLDRLMNPLIDQYLYYLSRTDTPSGTTTQSRLQFSQAGASDIRNQSRNWLPGPCYRQQRVSKTSADNNNSEYSWTGATKYHLNGRDSLVNPGPAMASHKDDEEKFFPQSGVLIFGKQGSEKTSVDIEKVMITDEEEIRTTNPVATEQYGSVSTNLQRGNRQAATADVNTQGVLPGMVWQDRDVYLQGPIWAKIPHTDGHFHPSPLMGGFGLKHPPPQILIKNTPVPANPSTTFSAAKFASFITQYSTGQVSVEIEWELQKENSKRWNPEVQYTSNYNKSVNVDFTVDTNGVYSEPRPIGTRYLTRNQ

SEQ ID NO: 578 - DNA, 2208 bp, Artificial Sequence
  source: /note="Description of Artificial Sequence: Synthetic polynucleotide"
atggctgccgatggttatcttccagattggctcgaggacactctctctgaaggaataagacagtggtggaagctcaaacctggcccaccaccaccaaagcccgcagagcggcataaggacgacagcaggggtcttgtgcttcctgggtacaagtacctcggacccttcaacggactcgacaagggagagccggtcaacgaggcagacgccgcggccctcgagcacgacaaagcctatgaccggcagctcgacagcggagacaacccgtacctcaagtacaaccacgccgacgcggagtttcaggaacgccttaaagaagatacgtcttttgggggcaacctcggacgagcagtcttccaggcgaaaaagagggttcttgaacctctgggcctggttgaggaacctgttaagacggctccgggaaaaaagaggccggtagagcactctcctgtggagccagactcctcctcgggaaccggaaaggcgggccagcagcctgcaagaaaaagattgaattttggtcagactggagacgcagactcagtacctgacccccagcctctcggacagccaccagcagccccctctggtctgggaactaatacgatggctacaggcagtggcgcaccaatggcagacaataacgagggcgccgacggagtgggtaattcctcgggaaattggcattgcgattccacatggatgggcgacagagtcatcaccaccagcacccgaacctgggccctgcccacctacaacaaccacctctacaaacaaatttccagccaatcaggagcctcgaacgacaatcactactttggctacagcaccccttgggggtattttgacttcaacagattccactgccacttttcaccacgtgactggcaaagactcatcaacaacaactggggattccgacccaagagactcaagttcaagctctttaacattcaagtcaaagaggtcacgcagaatgacggtacgacgacgattgccaataaccttaccagcacggttcaggtgtttactgactcggagtaccagctcccgtacgtcctcggctcggcgcatcaaggatgcctcccgccgttcccagcagacgtcttcatggtgccacagtatggatacctcaccctgaacaacgggagtcaggcagtaggacgctcttcattttactgcctggagtactttccttctcagatgctgcgtaccggtaacaactttaccttcagctacacttttgaggacgttcctttccacagcagctacgctcacagccagagtctggaccgtctcatgaatcctctcatcgaccagtacctgtattacttgagcagaacagacactccaagtggaaccaccacgcagtcaaggcttcagttttctcaggccggagcgagtgacattcggaaccagtctaggaactggcttcctggaccctgttaccgccagcagcgagtatcaaagacatctgcggataacaacaacagtgaatactcgtggactggagctaccaagtaccacctcaatggcagagactctctggtgaatccgggcccggccatggcaagccacaaggacgatgaagaaaagttttttcctcagagcggggttctcatctttgggaagcaaggctcagagaaaacaagtgtggacattgaaaaggtcatgattacagacgaagaggaaatcaggacaaccaatcccgtggctacggagcagtatggttctgtatctaccaacctccagagaggcaacagacaagcagctaccgcagatgtcaacacacaaggcgttcttccaggcatggtctggcaggacagagatgtgtaccttcaggggcccatctgggcaaagattccacacacggacggacattttcacccctctcccctcatgggtggattcggacttaaacaccctcctccacagattctcatcaagaacaccccggtacctgcgaatccttcgaccaccttcagtgcggcaaagtttgcttccttcatcacacagtactccacgggacaggtcagcgtggagatcgagtgggagctgcagaaggaaaacagcaaacgctggaatcccgaagttcagtacacttccaactacaacaagtctgttaatgtggactttactgtggacactaatggcgtgtattcagagcctcgccccattggcaccagatacctgactcgtaatcagtaa

SEQ ID NO: 579 - DNA, 2208 bp, Artificial Sequence
  source: /note="Description of Artificial Sequence: Synthetic polynucleotide"
atggctgccgatggttatcttccagattggctcgaggacactctctctgaaggaataagacagtggtggaagctcaaacctggcccaccaccaccaaagcccgcagagcggcataaggacgacagcaggggtcttgtgcttcctgggtacaagtacctcggacccttcaacggactcgacaagggagagccggtcaacgaggcagacgccgcggccctcgagcacgacaaagcctatgaccggcagctcgacagcggagacaacccgtacctcaagtacaaccacgccgacgcggagtttcaggagcgccttaaagaagatacgtcttttgggggcaacctcggacgagcagtcttccaggcgaaaaagagggttcttgaacctctgggcctggttgaggaacctgttaagacggctccgggaaaaaagaggccggtagagcactctcctgtggagccagactcctcctcgggaaccggaaaggcgggccagcagcctgcaagaaaaagattgaattttggtcagactggagacgcagactcagtacctgatccccagcctctcggacagccaccagcagccccctctggtctgggaactaatacgatggctacaggcagtggcgcaccaatggcagacaataacgagggcgccgacggagtgggtaattcctcgggaaattggcattgcgattccacatggatgggcgacagagtcatcaccaccagcacccgaacctgggccctgcccacctacaacaaccacctctacaaacaaatttccagccaatcaggagcctcgaacgacaatcactactttggctacagcaccccttgggggtattttgacttcaacagattccactgccacttttcaccacgtgactggcaaagactcatcaacaacaactggggattccgacccaagagactcaagttcaagctctttaacattcaagtcaaagaggtcacgcagaatgacggtacgacgacgattgccaataaccttaccagcacggttcaggtgtttactgactcggagtaccagctcccgtatgtcctcggctcggcgcatcaaggatgcctcccgccgttcccagcagacgtcttcatggtgccacagtatggatacctcaccctgaacaacgggagtcaggcagtaggacgctcttcattttactgcctggagtactttccttctcagatgctgcgtaccggtaacaactttaccttcagctacacttttgaggacgttcctttccacagcagctacgctcacagccagagtctggaccgtctcatgaatcctctcatcgaccagtacctgtattacttgagcagaacagacactccaagtggaaccaccacgcagtcaaggcttcagttttctcaggccggagcgagtgacattcgggaccagtctaggaactggcttcctggaccctgttaccgccagcagcgagtatcaaagacatctgcggataacaacaacagtgaatactcgtggactggagctaccaagtaccacctcaatggcagagactctctggtgaatccgggcccggccatggcaagccacaaggacgatgaagaaaagttttttcctcagagcggggttctcatctttgggaagcaaggctcagagaaaacaagtgtggacattgaaaaggtcatgattacagacgaagaggaaatcaggacaaccaatcccgtggctacggagcagtatggttctgtatctaccaacctccagagaggcaacagacaagcagctaccgcagatgtcaacacacaaggcgttcttccaggcatggtctggcaggacagagatgtgtaccttcaggggcccatctgggcaaagattccacacacggacggacattttcacccctctcccctcatgggtggattcggacttaaacaccctcctccacagattctcatcaagaacaccccggtacctgcgaatccttcgaccaccttcagtgcggcaaagtttgcttccttcatcacacagtactccacgggacaggtcagcgtggagatcgagtgggagctgcagaaggaaaacagcaaacgctggaatcccgaagttcagtacacttccaactacaacaagtctgttaatgtggactttactgtggacactaatggcgtgtattcagagcctcgccccattggcaccagatacctgactcgtaatctgtaa

SEQ ID NO: 580 - protein, 735 aa, Artificial Sequence
  source: /note="Description of Artificial Sequence: Synthetic polypeptide"
MAADGYLPDWLEDTLSEGIRQWWKLKPGPPPPKPAERHKDDSRGLVLPGYKYLGPFNGLDKGEPVNEADAAALEHDKAYDRQLDSGDNPYLKYNHADAEFQERLKEDTSFGGNLGRAVFQAKKRVLEPLGLVEEPVKTAPGKKRPVEHSPVEPDSSSGTGKAGQQPARKRLNFGQTGDADSVPDPQPLGQPPAAPSGLGTNTMATGSGAPMADNNEGADGVGNSSGNWHCDSTWMGDRVITTSTRTWALPTYNNHLYKQISSQSGASNDNHYFGYSTPWGYFDFNRFHCHFSPRDWQRLINNNWGFRPKRLKFKLFNIQVKEVTQNDGTTTIANNLTSTVQVFTDSEYQLPYVLGSAHQGCLPPFPADVFMVPQYGYLTLNNGSQAVGRSSFYCLEYFPSQMLRTGNNFTFSYTFEDVPFHSSYAHSQSLDRLMNPLIDQYLYYLSRTDTPSGTTTQSRLQFSQAGASDIRDQSRNWLPGPCYRQQRVSKTSADNNNSEYSWTGATKYHLNGRDSLVNPGPAMASHKDDEEKFFPQSGVLIFGKQGSEKTSVDIEKVMITDEEEIRTTNPVATEQYGSVSTNLQRGNRQAATADVNTQGVLPGMVWQDRDVYLQGPIWAKIPHTDGHFHPSPLMGGFGLKHPPPQILIKNTPVPANPSTTFSAAKFASFITQYSTGQVSVEIEWELQKENSKRWNPEVQYTSNYNKSVNVDFTVDTNGVYSEPRPIGTRYLTRNL

SEQ ID NO: 581 - DNA, 2601 bp, Artificial Sequence
  source: /note="Description of Artificial Sequence: Synthetic polynucleotide"
ccatcgacgtcagacgcggaagcttcgatcaactacgcggacaggtaccaaaacaaatgttctcgtcacgtgggcatgaatctgatgctgtttccctgcagacaatgcgagagactgaatcagaattcaaatatctgcttcactcacggtgtcaaagactgtttagagtgctttcccgtgtcagaatctcaacccgtttctgtcgtcaaaaaggcgtatcagaaactgtgctacattcatcacatcatgggaaaggtgccagacgcttgcactgcttgcgacctggtcaatgtggacttggatgactgtgtttctgaacaataaatgacttaaaccaggtatgactgccgatggttatcttccagattggctcgaggacaaccttagtgaaggaattcgcgagtggtgggctttgaaacctggagcccctcaacccaaggcaaatcaacaacatcaagacaacgctcgaggtcttgtgcttccgggttacaaataccttggacccggcaacggactcgacaagggggagccggtcaacgcagcagacgcggcggccctcgagcacgacaaggcctacgaccagcagctcaaggccggagacaacccgtacctcaagtacaaccacgccgacgccgagttccaggagcggctcaaagaagatacgtcttttgggggcaacctcgggcgagcagtcttccaggccaaaaagaggcttcttgaacctcttggtctggttgaggaagcggctaagacggctcctggaaagaagaggcctgtagagcagtctcctcaggaaccggactcctccgcgggtattggcaaatcgggtgcacagcccgctaaaaagagactcaatttcggtcagactggcgacacagagtcagtcccagaccctcaaccaatcggagaacctcccgcagccccctcaggtgtgggatctcttacaatggcttcaggtggtggcgcaccagtggcagacaataacgaaggtgccgatggagtgggtagttcctcgggaaattggcattgcgattcccaatggctgggggacagagtcatcaccaccagcacccgaacctgggccctgcccacctacaacaatcacctctacaagcaaatctccaacagcacatctggaggatcttcaaatgacaacgcctacttcggctacagcaccccctgggggtattttgacttcaacagattccactgccacttctcaccacgtgactggcagcgactcatcaacaacaactggggattccggcctaagcaactcaacttcaagctcttcaacattcaggtcaaagaggttacggacaacaatggagtcaagaccatcgccaataaccttaccagcacggtccaggtcttcacggactcagactatcagctcccgtacgtgctcgggtcggctcacgagggctgcctcccgccgttcccagcggacgttttcatgattcctcagtacgggtatctgacgcttaatgatggaagccaggccgtgggtcgttcgtccttttactgcctggaatatttcccgtcgcaaatgctaagaacgggtaacaacttccagttcagctacgagtttgagaacgtacctttccatagcagctacgctcacagccaaagcctggaccgactaatgaatccactcatcgaccaatacttgtactatctctcaaagactattaacggttctggacagaatcaacaaacgctaaaattcagtgtggccggacccagcaacatggctgtccagggaagaaactacatacctggacccagctaccgacaacaacgtgtctcaaccactgtgactcaaaacaacaacagcgaatttgcttggcctggagcttcttcttgggctctcaatggacgtaatagcttgatgaatcctggacctgctatggccagccacaaagaaggagaggaccgtttctttcctttgtctggatctttaatttttggcaaacaaggaactggaagagacaacgtggatgcggacaaagtcatgataaccaacgaagaagaaattaaaactactaacccggtagcaacggagtcctatggacaagtggccacaaaccaccagagtgcccaagcacaggcgcagaccggctgggttcaaaaccaaggaatacttccgggtatggtttggcaggacagagatgtgtacctgcaaggacccatttgggccaaaattcctcacacggacggcaactttcacccttctccgctgatgggagggtttggaatgaagcacccgcctcctcagatcctcatcaaaaacacacctgtacctgcggatcctccaacggccttcaacaaggacaagctgaactctttcatcacccagtattctactggccaagtcagcgtggagatcgagtgggagctgcagaaggaaaacagcaagcgctggaacccggagatccagtacacttccaactattacaagtctaataatgttgaatttgctgttaatactgaaggtgtatatagtgaaccccgccccattggcaccagatacctgactcgtaatctgtaattgcttgttaatcaataaaccgtttaattcgtttcagttgaactgcggcc

SEQ ID NO: 582 - DNA, 2601 bp, Artificial Sequence
  source: /note="Description of Artificial Sequence: Synthetic polynucleotide"
ccatcgacgtcagacgcggaagcttcgatcaactacgcggacaggtaccaaaacaaatgttctcgtcacgtgggcatgaatctgatgctgtttccctgcagacaatgcgagagactgaatcagaattcaaatatctgcttcactcacggtgtcaaagactgtttagagtgctttcccgtgtcagaatctcaacccgtttctgtcgtcaaaaaggcgtatcagaaactgtgctacattcatcacatcatgggaaaggtgccagacgcttgcactgcttgcgacctggtcaatgtggacttggatgactgtgtttctgaacaataaatgacttaaaccaggtatggctgccgatggttatcttccagattggctcgaggacaaccttagtgaaggaattcgcgagtggtgggctttgaaacctggagcccctcaacccaaggcaaatcaacaacatcaagacaacgctcgaggtcttgtgcttccgggttacaaataccttggacccggcaacggactcgacaagggggagccggtcaacgcagcagacgcggcggccctcgagcacgacaaggcctacgaccagcagctcaaggccggagacaacccgtacctcaagtacaaccacgccgacgccgagttccaggagcggctcaaagaagatacgtcttttgggggcaacctcgggcgagcagtcttccaggccaaaaagaggcttcttgaacctcttggtctggttgaggaagcggctaagacggctcctggaaagaagaggcctgtagagcagtctcctcaggaaccggactcctccgcgggtattggcaaatcgggtgcacagcccgctaaaaagagactcaatttcggtcagactggcgacacagagtcagtcccagaccctcaaccaatcggagaacctcccgcagccccctcaggtgtgggatctcttacaatggcttcaggtggtggcgcaccagtggcagacaataacgaaggtgccgatggagtgggtagttcctcgggaaattggcattgcgattcccaatggctgggggacagagtcatcaccaccagcacccgaacctgggccctgcccacctacaacaatcacctctacaagcaaatctccaacagcacatctggaggatcttcaaatgacaacgcctacttcggctacagcaccccctgggggtattttgacttcaacagattccactgccacttctcaccacgtgactggcagcgactcatcaacaacaactggggattccggcctaagcgactcaacttcaagctcttcaacattcaggtcaaagaggttacggacaacaatggagtcaagaccatcgccaataaccttaccagcacggtccaggtcttcacggactcagactatcagctcccgtacgtgctcgggtcggctcacgagggctgcctcccgccgttcccagcggacgttttcatgattcctcagtacgggtatctgacgcttaatgatggaagccaggccgtgggtcgttcgtccttttactgcctggaatatttcccgtcgcaaatgctaagaacgggtaacaacttccagttcagctacgagtttgagaacgtacctttccatagcagctacgctcacagccaaagcctggaccgactaatgaatccactcatcgaccaatacttgtactatctctcaaagactattaacggttctggacagaatcaacaaacgctaaaattcagtgtggccggacccagcaacatggctgtccagggaagaaactacatacctggacccagctaccgacaacaacgtgtctcaaccactgtgactcaaaacaacaacagcgaatttgcttggcctggggcttcttcttgggctctcaatggacgtaatagcttgatgaatcctggacctgctatggccagccacaaagaaggagaggaccgtttctttcctttgtctggatctttaatttttggcaaacaaggaactggaagagacaacgtggatgcggacaaagtcatgataaccaacgaagaagaaattaaaactactaacccggtagcaacggagtcctatggacaagtggccacaaaccaccagagtgcccaagcacaggcgcagaccggctgggttcaaaaccaaggaatacttccgggtatggtttggcaggacagagatgtgtacctgcaaggacccatttgggccaaaattcctcacacgggcggcaactttcacccttctccgctgatgggagggtttggaatgaagcacccgcctcctcagatcctcatcaaaaacacacctgtacctgcggatcctccaacggccttcaacaaggacaagctgaactctttcatcacccagtattctactggccaagtcagcgtggagatcgagtgggagctgcagaaggaaaacagcaagcgctggaacccggagatccagtacacttccaactattacaagtctaataatgttgaatttgctgttaatactggaggtgtatatagtgaaccccgccccattggcaccagatacctgactcgtaatctgtaattgcttgttaatcaataaaccgtttaattcgtttcagttgaactgcggcc

SEQ ID NO: 583 - DNA, 2601 bp, Artificial Sequence
  source: /note="Description of Artificial Sequence: Synthetic polynucleotide"
ccatcgacgtcagacgcggaagcttcgatcaactacgcggacaggtaccaaaacaaatgttctcgtcacgtgggcatgaatctgatgctgtttccctgcagacaatgcgagagactgaatcagaattcaaatatctgcttcactcacggtgtcaaagactgtttagagtgctttcccgtgtcagaatctcaacccgtttctgtcgtcaaaaaggcgtatcagaaactgtgctacattcatcacatcatgggaaaggtgccagacgcttgcactgcttgcgacctggtcaatgtggactcggatgactgtgtttctgaacaataaatgacttaaaccaggtatggctgccgatggttatcttccagattggctcgaggacaaccttagtgaaggaattcgcgagtggtgggctttgaaacctggagcccctcaacccaaggcaaatcaacaacatcaagacaacgctcgaggtcttgtgcttccgggttacaaataccttggacccggcaacggactcgacaagggggagccggtcaacgcagcagacgcggcggccctcgagcacgacaaggcctacgaccagcagctcaaggccggagacaacccgtacctcaagtacaaccacgccgacgccgagttccaggagcggctcaaagaagatacgtcttttgggggcaacctcgggcgagcagtcttccaggccaaaaagaggcttcttgaacctcttggtctggttgaggaagcggctaagacggctcctggaaagaagaggcctgtagagcagtctcctcaggaaccggactcctccgcgggtattgacaaatcgggtgcacagcccgctaaaaagagactcaatttcggtcagactggcgacacagagtcagtcccagaccctcaaccaatcggagaacctcccgcagccccctcaggtgtgggatctcttacaatggcttcaggtggtggcgcaccagtggcagacaataacgaaggtgccgatggagtgggtagttcctcgggaaattggcattgcgattcccaatggctgggggacagagtcatcaccaccagcacccgaacctgggccctgcccacctacaacaatcacctctacaagcaaatctccaacagcacatctggaggatcttcaaatgacaacgcctacttcggctacagcaccccctgggggtattttgacttcaacagattccactgccacttctcaccacgtgactggcagcgactcatcaacaacaactggggattccggcctaagcgactcaacttcaagctcttcaacattcaggtcaaagaggttacggacaacaatggagtcaagaccatcgccaataaccttaccagcacggtccaggtcttcacggactcggactatcagctcccgtacgtgctcgggtcggctcacgagggctgcctcccgccgttcccagcggacgttttcatgattcctcagtacgggtatctgacgcttaatgatggaagccaggccgtgggtcgttcgtccttttactgcctggaatatttcccgtcgcaaatgctaagaacgggtaacaacttccagttcagctacgagtttgagaacgtacctttccatagcagctacgctcacagccaaagcctggaccgactaatgaatccactcatcgaccaatacttgtactatctctcaaagactattaacggttctggacagaatcaacaaacgctaaaattcagtgtggccggacccagcaacatggctgtccagggaagaaactacatacctggacccagctaccgacaacaacgtgtctcaaccactgtgactcaaaacaacaacagcgaatttgcttggcctggagcttcttcttgggctctcaatggacgtaatagcttgatgaatcctggacctgctatggccagccacaaagaaggagaggaccgtttctttcctttgtctggatctttaatttttggcaaacaaggaactggaagagacaacgtggatgcggacaaagtcatgataaccaacgaagaagaaattaaaactactaacccggtagcaacggagtcctatggacaagtggccacaaaccaccagagtgcccaagcacaggcgcagaccggctgggttcaaaaccaaggaatacttccgggtatggtttggcaggacagagatgtgtacctgcaaggacccatttgggccaaaattcctcacacggacggcaactttcacccttctccgctgatgggagggtttggaatgaagcacccgcctcctcagatcctcatcaaaaacacacctgtacctgcggatcctccaacggccttcaacaaggacaagctgaactctttcatcacccagtattctactggccaagtcagcgtggagatcgagtgggagctgcagaaggaaaacagcaagcgctggaacccggagatccagtacacttccaactattacaagtctaataatgttgaatttgctgttaatactgaaggtgtatatagtgaaccccgccccattggcaccagatacctgactcgtaatctgtaattgcttgttaatcaataaaccgtttaattcgtttcagttgaactgcggcc

SEQ ID NO: 584 - DNA, 2601 bp, Artificial Sequence
  source: /note="Description of Artificial Sequence: Synthetic polynucleotide"
ccatcgacgtcagacgcggaagcttcgatcaactacgcggacaggtaccaaaacaaatgttctcgtcacgtgggcatgaatctgatgctgtttccctgcagacaatgcgagagactgaatcagaattcaaatatctgcttcactcacggtgtcaaagactgtttagagtgctttcccgtgtcagaatctcaacccgtttctgtcgtcaaaaaggcgtatcagaaactgtgctacattcatcacatcatgggaaaggtgccagacgcttgcactgcttgcgacctggtcaatgtggacttggatgactgtgtttctgaacaataaatgacttaaaccaggtatggctgccgatggttatcttccagattggctcgaggacaaccttagtgaaggaattcgcgagtggtgggctttgaaacctggagcccctcaacccaaggcaaatcaacaacatcaagacaacgctcgaggtcttgtgcttccgggttacaaataccttggacccggcaacggactcgacaagggggagccggtcaacgcagcagacgcggcggccctcgagcacgacaaggcctacgaccagcagctcaaggccggagacaacccgtacctcaagtacaaccacgccgacgccgagttccaggagcggctcaaagaagatacgtcttttgggggcaacctcgggcgagcagtcctccaggccaaaaagaggcttcttgaacctcttggtctggttgaggaagcggctaagacggctcctggaaagaagaggcctgtagagcagtctcctcaggaaccggactcctccgcgggtattggcaaatcgggtgcacagcccgctaaaaagagactcaatttcggtcagactggcgacacagagtcagtcccagaccctcaaccaatcggagaacctcccgcagccccctcaggtgtgggatctcttacaatggcttcaggtggtggcgcaccagtggcagacaataacgaaggtgccgatggagtgggtagttcctcgggaaattggcattgcgattcccaatggctgggggacagagtcatcaccaccagcacccgaacctgggccctgcccacctacaacaatcacctctacaagcaaatctccaacagcacatctggaggatcttcaaatgacaacgcctacttcggctacagcaccccctgggggtattttgacttcaacagattccactgccacttctcaccacgtgactggcagcgactcatcaacaacaactggggattccggcctaagcgactcaacttcaagctcttcaacattcaggtcaaagaggttacggacaacaatggagtcaagaccatcgccaataaccttaccagcacggtccaggtcttcacggactcagactatcagctcccgtacgtgctcgggtcggctcacgagggctgcctcccgccgttcccagcggacgttttcatgattcctcagtacgggtatctgacgcttaatgatggaagccaggccgtgggtcgttcgtccttttactgcctggaatatttcccgtcgcaaatgctaagaacgggtaacaacttccagttcagctacgagtttgagaacgtacctttccatagcagctacgctcacagccaaagcctggaccgactaatgaatccactcatcgaccaatacttgtactatctctcaaagactattaacggttctggacagaatcaacaaacgctaaaattcagtgtggccggatccagcaacatggctgtccagggaagaaactacatacctggacccagctaccgacaacaacgtgtctcaaccactgtgactcaaaacaacaacagcgaatttgcttggcctggagcttcttcttgggctctcaatggacgtaatagcttgatgaatcctggacctgctatggccagccacaaagaaggagaggaccgtttctttcctttgtctggatctttaatttttggcaaacaaggaactggaagagacaacgtggatgcggacaaagtcatgataaccaacgaagaagaaattaaaactactaacccggtagcaacggagtcctatggacaagtggccacaaaccaccagagtgcccaagcacaggcgcagaccggctgggttcaaaaccaaggaatacttccaggtatggtttggcaggacagagatgtgtacctgcaaggacccatttgggccaaaattcctcacacggacggcaactttcacccttctccgctgatgggagggtttggaatgaagcacccgcctcctcagatcctcatcaaaaacacacctgtacctgcggatcctccaacggccttcaacaaggacaagctgaactctttcatcacccagtattctactggccaagtcagcgtggagatcgagtgggagctgcagaaggaaaacagcaagcgctggaacccggagatccagtacacttccaactattacaagtctaataatgttgaatttgctgttaatactgaaggtgtatatagtgaaccccgccccattggcaccagatacctgactcgtaatctgtaattgcttgttaatcaataaaccgtttaattcgtttcagttgaactgcggcc

SEQ ID NO: 585 - DNA, 2601 bp, Artificial Sequence
  source: /note="Description of Artificial Sequence: Synthetic polynucleotide"
ccatcgacgtcagacgcggaagcttcgatcaactacgcggacaggtaccaaaacaaatgttctcgtcacgtgggcatgaatctgatgctgtttccctgcagacaatgcgagagactgaatcagaattcaaatatctgcttcactcacggtgtcaaagactgtttagagtgctttcccgtgtcagaatctcaacccgtttctgtcgtcaaaaaggcgtatcagaaactgtgctacattcatcacatcatgggaaaggtgccagacgcttgcactgcttgcgacctggtcaatgtggacttggatgactgtgtttctgaacaataaatgacttaaaccaggtatggctgccgatggttatcttccagattggctcgaggacaaccttagtgaaggaattcgcgagtggtgggctttgaaacctggagcccctcaacccaaggcaaatcaacaacatcaagacaacgctcgaggtcttgtgcttccgggttacaaataccttggacccggcaacggactcgacaagggggagccggtcaacgcagcagacgcggcggccctcgagcacgacagggcctacgaccagcagctcaaggccggagacaacccgtacctcaagtacaaccacgccgacgccgagttccaggagcggctcaaagaagatacgtcttttgggggcaacctcgggcgagcagtcttccaggccaaaaagaggcttcttgaacctcttggtctggttgaggaagcggctaagacggctcctggaaagaagaggcctgtagagcagtctcctcaggaaccggactcctccgcgggtattggcaaatcgggtgcacagcccgctaaaaagagactcaatttcggtcagactggcgacacagagtcagtcccagaccctcaaccaatcggagaacctcccgcagccccctcaggtgtgggatctcttacaatggcttcaggtggtggcgcaccagtggcagacaataacgaaggtgccgatggagtgggtagttcctcgggaaattggcattgcgattcccaatggctgggggacagagtcatcaccaccagcacccgaacctgggccctgcccacctacaacaatcacctctacaagcaaatctccaacagcacatctggaggatcttcaaatgacaacgcctacttcggctacagcaccccctgggggtattttgacttcaacagattccactgccacttctcaccacgtgactggcagcgactcatcaacaacaactggggattccggcctaagcgactcaacttcaagctcttcaacattcaggtcaaagaggttacggacaacaatggagtcaagaccatcgccaataaccttaccagcacggtccaggtcttcacggactcagactatcagctcccgtacgtgctcgggtcggctcacgagggctgcctcccgccgttcccagcggacgttttcatgattcctcagtacgggtatctgacgcttaatgatggaagccaggccgtgggtcgttcgtccttttactgcctggaatatttcccgtcgcaaatgctaagaacgggtaacaacttccagttcagctacgagtttgagaacgtacctttccatagcagctacgctcacagccaaagcctggaccgactaatgaatccactcatcgaccaatacttgtactatctctcaaagactattaacggttctggacagaatcaacaaacgctaaaattcagtgtggccggacctagcaacatggctgtccagggaagaaactacatacctggacccagctaccgacaacaacgtgtctcaaccactgtgactcaaaacaacaacagcgaatttgcttggcctggagcttcttcttgggctctcaatggacgtaatagcttgatgaatcctggacctgctatggccagccacaaagaaggagaggaccgtttctttcctttgtctggatctttaatttttggcaaacaaggaactggaagagacaacgtggatgcggacaaagtcatgataaccaacgaagaagaaattaaaactactaacccggtagcaacggagtcctatggacaagtggccacaaaccaccagagtgcccaagcacaggcgcagaccggctgggttcaaaaccaaggaatacttccgggtatggtttggcaggacagagatgtgtacctgcaaggacccatttgggccaaaattcctcacacggacggcaactttcacccttctccgctgatgggagggtttggaatgaagcacccgcctcctcagatcctcatcaaaaacacacctgtacctgcggatcctccaacggccttcaacaaggacaagctgaactctttcatcacccagtattctactggccaagtcagcgtggagatcgagtgggagctgcagaagaaaaacagcaagcgctggaacccggagatccagtacacttccaactattacaagtctaataatgttgaatttgctgttaacactgaaggtgtatatagtgaaccccgccccattggcaccagatacctgactcgtaatctgtaattgcttgttaatcaataaaccgtttaattcgtttcagttgaactgcggcc

SEQ ID NO: 586 - DNA, 2601 bp, Artificial Sequence
  source: /note="Description of Artificial Sequence: Synthetic polynucleotide"
ccatcgacgtcagacgcggaagcttcgatcaactacgcggacaggtaccaaaacaaatgttctcgtcacgtgggcatgaatctgatgctgtttccctgcagacaatgcgagagactgaatcagaattcaaatatctgcttcactcacggtgtcaaagactgtttagagtgctttcccgtgtcagaatctcaacccgtttctgtcgtcaaaaaggcgtatcagaaactgtgctacattcatcacatcatgggaaaggtgccagacgcttgcactgcttgcgacctggtcaatgtggacttggatgactgtgtttctgaacaataaatgacttaaaccaggtatggctgccgatggttatcttccagattggctcgaggacaaccttagtgaaggaattcgcgagtggtgggctttgaaacctggagcccctcaacccaaggcaaatcaacaacatcaagacaacgctcgaggtcttgtgcttccgggttacaaataccttggacccggcaacggactcgacaagggggagccggtcaacgcagcagacgcggcggccctcgagcacgacaaggcctacgaccagcagctcaaggccggagacaacccgtacctcaagtacaaccacgccgacgccgagttccaggagcggctcaaagaagatacgtcttttgggggcaacctcgggcgagcagtcttccaggccaaaaagaggcttcttgaacctcttggtctggttgaggaagcggctaagacggctcctggaaagaagaggcctgtagagcagtctcctcaggaaccggactcctccgcgggtattggcaaatcgggtgcacagcccgctaaaaagagactcaatttcggtcagactggcgacacagagtcagtcccagaccctcaaccaatcggagaacctcccgcagccccctcaggtgtgggatctcttacaatggcttcaggtggtggcgcaccagtggcagacaataacgaaggtgccgatggagtgggtagttcctcgggaaattggcattgcgattcccaatggctgggggacagagtcatcaccaccagcacccgaacctgggccctgcccacctacaacaatcacctctacaagcaaatctccaacagcacatctggaggatcttcaaatgacaacgcctacttcggctacagcaccccctgggggtattttgacttcaacagattccactgccacttctcaccacgtgactggcagcgactcatcaacaacaactggggattccggcctaagcgactcaacttcaagctcttcaacattcaggtcaaagaggttacggacaacaatggagtcaagaccatcgccaataaccttaccagcacggtccaggtcttcacggactcagactatcagctcccgtacgtgctcgggtcggctcacgagggctgcctcccgccgttcccagcggacgttttcatgattcctcagtacgggtatctgacgcttaatgatggaagccaggccgtgggtcgttcgtccttttactgcctggaatatttcccgtcgcaaatgctaagaacgggtaacaacttccagttcagctacgagtttgagaacgtacctttccatagcagctacgctcacagccaaagcctggaccgactaatgaatccactcatcgaccaatacttgtactatctctcaaagactattaacggttctggacagaatcaacaaacgctaaaattcagtgtggccggacccagcaacatggctgtccagggaagaaactacatacctggacccagctaccgacaacaacgtgtctcaaccactgtgactcaaaacaacaacagcgaatttgcttggcctggagcttcttcttgggctctcaatggacgtaatagcttgatgaatcctggacctgctatggccagccacaaagaaggagaggaccgtttctttcctttgtctggatctttaatttttggcaaacaaggaactggaagagacaacgtggatgcggacaaagtcatgataaccaacgaagaagaaattaaaactactaacccggtagcaacggagtcctatggacaagtggccacaaaccaccagagtgcccaagcacgggcgcagaccggctgggttcaaaaccaaggaatacttccgggtatggtttggcaggacagagatgtgtacctgcaaggacccatttgggccaaaattcctcacacggacggcaactttcacccttctccgctgatgggagggtttggaatgaagcacccgcctcctcagatcctcatcaaaaacacacctgtacctgcggatcctccaacggccttcaacaaggacaagctgaactctttcatcacccagtattctactggccaagtcagcgtggagatcgagtgggagctgcagaaggaaaacagcaagcgctggaacccggagatccagtacacttccaactattacaagtctaataatgttgaatttgctgttaatactgaaggtgtatatagtgaaccccgccccattggcaccagatacctgactcgtaatctgtaattgcttgttaatcaataaaccgtttaattcgtttcagttgaactgcggcc

SEQ ID NO: 587 - DNA, 2601 bp, Artificial Sequence
  source: /note="Description of Artificial Sequence: Synthetic polynucleotide"
ccatcgacgtcagacgcggaagcttcgatcaactacgcggacaggtaccaaaacaaatgttctcgtcacgtgggcatgaatctgatgctgtttccctgcagacaatgcgagagactgaatcagaattcaaatatctgcttcactcacggtgtcaaagactgtttagagtgctttcccgtgtcagaatctcaacccgtttctgtcgtcaaaaaggcgtatcagaaactgtgctacattcatcacatcatgggaaaggtgccagacgcttgcactgcttgcgacctggtcaatgtggacttggatgactgtgtttctgaacaataaatgacttaaaccaggtatggctgccgatggttatcttccagattggctcgaggacaaccttagtgaaggaattcgcgagtggtgggctttgaaacctggagcccctcaacccaaggcaaatcaacaacatcaagacaacgctcgaggtcttgtgcttccgggttacaaataccttggacccggcaacggactcgacaagggggagccggtcaacgcagtagacgcggcggccctcgagcacgacaaggcctacgaccagcagctcaaggccggagacaacccgtacctcaagtacaaccacgccgacgccgagttccaggagcggctcaaagaagatacgtcttttgggggcaacctcgggcgagcagtcttccaggccaaaaagaggcttcttgaacctcttggtctggttgaggaagcggctaagacggctcctggaaagaagaggcctgtagagcagtctcctcaggaaccggactcctccgcgggtattggcaaatcgggtgcacagcccgctaaaaagagactcaatttcggtcagactggcgacacagagtcagtcccagaccctcaaccaatcggagaacctcccgcagccccctcaggtgtgggatctcttacaatggcttcaggtggtggcgcaccagtggcagacaataacgaaggtgccgatggagtgggtagttcctcgggaaattggcattgcgattcccaatggctgggggacagagtcatcaccaccagcacccgaacctgggccctgcccacctacaacaatcacctctacaagcaaatctccaacagcacatctggaggatcttcaaatgacaacgcctacttcggctacagcaccccctgggggtattttgacttcaacagattccactgccacttctcaccacgtgactggcagcgactcatcaacaacaactggggatttcggcctaagcgactcaacttcaagctcttcaacattcaggtcaaagaggttacggacaacaatggagtcaagaccatcgccaataaccttaccagcacggtccaggtcttcacggactcagactatcagctcccgtacgtgctcgggtcggctcacgagggctgcctcccgccgttcccagcggacgttttcatgattcctcagtacgggtatctgacgcttaatgatggaagccaggccgtgggtcgttcgtccttttactgcctggaatatttcccgtcgcaaatgctaagaacgggtaacaacttccagttcagctacgagtttgagaacgtacctttccatagcagctacgctcacagccaaagcctggaccgactaatgaatccactcatcgaccaatacttgtactatctctcaaagactattaacggttctggacagaatcaacaaacgctaaaattcagtgtggccggacccagcaacatggctgtccagggaagaaactacatacctggacccagctaccgacaacaacgtgtctcaaccactgtgactcaaaacaacaacagcgaatttgcttggcctggagcttcttcttgggctctcaatggacgtaatagcttgatgaatcctggacctgctatggccagccacaaagaaggagaggaccgtttctttcctttgtctggatctttaatttttggcaaacaaggaactggaagagacaacgtggatgcggacaaagtcatgataaccaacgaagaagaaattaaaactactaacccggtagcaacggagtcctatggacaagtggccacaaaccaccagagtgcccaagcacaggcgcagaccggctgggttcaaaaccaaggaatacttccgggtatggtttggcaggacagagatgtgtacctgcaaggacccatttgggccaaaattcctcacacggacggcaactttcacccttctccgctgatgggagggtttggaatgaagcacccgcctcctcagatcctcatcaaaaacacacctgtacctgcggatcctccaacggccttcaacaaggacaagctgaactctttcatcacccagtattctactggccaagtcagcgtggagatcgagtgggagctgcagaaggaaaacagcaagcgctggaacccggagatccagtacacttccaactattacaagtctaataatgttgaatttgctgttaatactgaaggtgtatatagtgaaccccgccccattggcaccagatacctgactcgtaatctgtaattgcttgttaatcaataaaccgtttaattcgtttcagttgaactgcggcc

SEQ ID NO: 588 - DNA, 2580 bp, Artificial Sequence
  source: /note="Description of Artificial Sequence: Synthetic polynucleotide"
ccatcgacgtcagacgcggaagcttcgatcaactacgcggacaggtaccaaaacaaatgttctcgtcacgtgggcatgaatctgatgctgtttccctgcagacaatgcgagagactgaatcagaattcaaatatctgcttcactcacggtgtcaaagactgtttagagtgctttcccgtgtcagaatctcaacccgtttctgtcgtcaaaaaggcgtatcagaaactgtgctacattcatcacatcatgggaaaggtgccagacgcttgcactgcttgcgacctggtcaatgtggacttggatgactgtgtttctgaacaataaatgacttaaaccaggtatggctgccgatggttatcttccagattggctcgaggacaaccttagtgaaggaattcgcgagtggtgggctttgaaacctggagcccctcaacccaaggcaaatcaacaacatcaagacaacgctcgaggtcttgtgcttccgggttacaaataccttggacccggcaacggactcgacaagggggagccggtcaacgcagcagacgcggcggccctcgagcacgacaaggcctacgaccagcagctcaaggccggagacaacccgtacctcaagtacaaccacgccgacgccgagttccaggagcggctcaaagaagatacgtcttttgggggcaacctcgggcgagcagtcttccaggccaaaaagaggcttcttgaacctcttggtctggttgaggaagcggctaagacggctcctggaaagaagaggcctgtagagcagtctcctcgggaaccggactcctccgcgggtattggcaaatcgggtgcacagcccgctaaaaagagactcaatttcggtcagactggcgacacagagtcagtcccagaccctcaaccaatcggagaacctcccgcagccccctcaggtgtgggatctcttacaatggcttcaggtggtggcgcaccagtggcagacaataacgaaggtgccgatggagtgggtagttcctcgggaaattggcattgcgattcccaatggctgggggacagagtcatcaccaccagcacccgaacctgggccctgcccacctacaacaatcacctctacaagcaaatctccaacagcacatctggaggatcttcaaatgacaacgcctacttcggctacagcaccccctgggggtattttgacttcaacagattccactgccacttctcaccacgtgactggcagcgactcatcaacaacaactggggattccggcctaagcgactcaacttcaagctcttcaacattcaggtcaaagaggttacggacaacaatggagtcaagaccatcgccaataaccttaccagcacggtccaggtcttcacggactcagactatcagctcccgtacgtgctcgggtcggctcacgagggctgcctcccgccgttcccagcggacgttttcatgattcctcagtacgggtatctgacgcttaatgatggaagccaggccgtgggtcgttcgtccttttactgcctggaatatttcccgtcgcaaatgctaagaacgggtaacaacttccagttcagctacgagtttgagaacgtacctttccatagcagctacgctcacagccaaagcctggaccgactaatgaatccactcatcgaccaatacttgtactatctctcaaagactattaacggttctggacagaatcaacaaacgctaaaattcagtgtggccggacccagcaacatggctgtccagggaagaaactacatacctggacccagctaccgacaacaacgtgtctcaaccactgtgactcaaaacaacaacagcgaatttgcttggcctggagcttcttcttgggctctcaatggacgtaatagcttgatgaatcctggacctgctatggccagccacaaagaaggagaggaccgtttctttcctttgtctggatctttaatttttggcaaacaaggaactggaagagacaacgtggatgcggacaaagtcatgataaccaacgaagaagaaattaaaactactaacccggtagcaacggagtcctatggacaagtggccacaaaccaccagagtgcccaagcacaggcgcagaccggctgggttcaaaaccaaggaatacttccgggtatggtttggcaggacagagatgtgtacctgcaaggacccatttgggccaaaattcctcacacggacggcaactttcacccttctccgctgatgggagggtttggaatgaagcacccgcctcctcagatcctcatcaaaaacacacctgtacctgcggatcctccaacggccttcaacaaggacaagctgaactctttcatcacccagtattctactggccaagtcagcgtggagatcgagtgggaactgcagaaggaaaacagcaagcgctggaacccggagatccagtacacttccaactattacaagtctaataatgttgaatttgctgttaatactgaaggtgtatatagtgaaccccgccccattggcaccagatacctgactcgtaatctgtaattgcttgttaatcaataaaccgtttaatt

SEQ ID NO: 589 - DNA, 2601 bp, Artificial Sequence
  source: /note="Description of Artificial Sequence: Synthetic polynucleotide"
ccatcgacgtcagacgcggaagcttcgatcaactacgcggacaggtaccaaaacaaatgttctcgtcacgtgggcatgaatctgatgctgtttccctgcagacaatgcgagagactgaatcagaattcaaatatctgcttcactcacggtgtcaaagactgtttagagtgctttcccgtgtcagaatctcaacccgtttctgtcgtcaaaaaggcgtatcagaaactgtgctacattcatcacatcatgggaaaggtgccagacgcttgcactgcttgcgacctggtcaatgtggacttggatgactgtgtttctgaacaataaatgacttaaaccaggtatggctgccgatggttatcttccagattggctcgaggacaaccttagtgaaggaattcgcgagtggtgggctttgaaacctggagcccctcaacccaaggcaaatcaacaacatcaagacaacgctcgaggtcttgtgcttccgggttacaaataccttggacccggcaacggactcgacaagggggagccggtcaacgcagcagacgcggcggccctcgagcacgacaaggcctacgaccagcagctcaaggccggagacaacccgtacctcaagtacaaccacgccgacgccgagttccaggagcggctcaaagaagatacgtcttttgggggcaacctcgggcgagcagtctttcaggccaaaaagaggcttcttgaacctcttggtctggttgaggaagcggctaagacggctcctggaaagaagaggcctgtagagcagtctcctcaggaaccggactcctccgcgggtattggcaaatcgggtgcacagcccgctaaaaagagactcaatttcggtcagactggcgacacagagtcagtcccagaccctcaaccaatcggagaacctcccgcagccccctcaggtgtgggatctcttacaatggcttcatgtggtggcgcaccagtggcagacaataacgaaggtgccgatggagtgggtagttcctcgggaaattggcattgcgattcccaatggctgggggacagagtcatcaccaccagcacccgaacctgggccctgcccacctacaacaatcacctctacaagcaaatctccaacagcacatctggaggatcttcaaatgacaacgcctacttcggctacagcaccccctgggggtattttgacttcaacagattccactgccacttctcaccacgtgactggcagcgactcatcaacaacaactggggattccggcctaagcgactcaacttcaagctcttcaacattcaggtcaaagaggttacggacaacaatggagtcaagaccatcgccaataaccttaccagcacggtccaggtcttcacggactcagactatcagctcccgtacgtgctcgggtcggctcacgagggctgcctcccgccgttcccagcggacgttttcatgattcctcagtacgggtatctgacgcttaatgatggaagccaggccgtgggtcgttcgtccttttactgcctggaatatttcccgtcgcaaatgctaagaacgggtaacaacttccagttcagctacgagtttgagaacgtacctttccatagcagctacgctcacagccaaagcctggaccgactaatgaatccactcatcgaccaatacttgtactatctctcaaagactattaacggttctggacagaatcaacaaacgctaaaattcagtgtggccggacccagcaacatggctgtccagggaagaaactacatacctggacccagctaccgacaacaacgtgtctcaaccactgtgactcaaaacaacaacagcgaatttgcttggcctggagcttcttcttgggctctcaatggacgtaatagcttgatgaatcctggacctgctatggccagccacaaagaaggagaggaccgtttctttcctttgtctggatctttaatttttggcaaacaaggaactggaagagacaacgtggatgcggacaaagtcatgataaccaacgaagaagaaattaaaactactaacccggtagcaacggagtcctatggacaagtggccacaaaccaccagagtgcccaagcacaggcgcagaccggctgggttcaaaaccaaggaatacttccgggtatggtttggcaggacagagatgtgtacctgcaaggacccatttgggccaaaattcctcacacggacggcaactttcacccttctccgctgatgggagggtttggaatgaagcacccgcctcctcagatcctcatcaaaaacacacctgtacctgcggatcctccaacggccttcaacaaggacaagctgaactctttcatcacccagtattctactggccaagtcagcgtggagatcgagtgggagctgcagaaggaaaacagcaagcgctggaacccggagatccagtacacttccaactattacaagtctaataatgttgaatttgctgttaatactgaaggtgtatatagtgaaccccgccccattggcaccagatacctgactcgtaatctgtaattgcttgttaatcaataaaccgtttaattcgtttcagttgaactgcggcc

SEQ ID NO: 590 - DNA, 2601 bp, Artificial Sequence
  source: /note="Description of Artificial Sequence: Synthetic polynucleotide"
ccatcgacgtcagacgcggaagcttcgatcaactacgcggacaggtaccaaaacaaatgttctcgtcacgtgggcatgaatctgatgctgtttccctgcagacaatgcgagagactgaatcagaattcaaatatctgcttcactcacggtgtcaaagactgtttagagtgctttcccgtgtcagaatctcaacccgtttctgtcgtcaaaaaggcgtatcagaaactgtgctacattcatcacatcatgggaaaggtgccagacgcttgcactgcttgcgacctggtcaatgtggacttggatgactgtgtttctgaacaataaatgacttaaaccaggtatggctgccgatggttatcttccagattggctcgaggacaaccttagtgaaggaattcgcgagtggtgggctttgaaacctggagcccctcaacccaaggcaaatcaacaacatcaagacaacgctcgaggtcttgtgcttccgggttacaaataccttggacccggcaacggactcgacaagggggagccgatcaacgcagcagacgcggcggccctcgagcacgacaaggcctacgaccagcagctcaaggccggagacaacccgtacctcaagtacaaccacgccgacgccgagttccaggagcggctcaaagaagatacgtcttttgggggcaacctcgggcgagcagtcttccaggccaaaaagaggcttcttgaacctcttggtctggttgaggaagcggctaagacggctcctggaaagaagaggcctgtagagcagtctcctcaggaaccggactcctccgcgggtattggcaaatcgggtgcacagcccgctaaaaagagactcaatttcggtcagactggcgacacagagtcagtcccagaccctcaaccaatcggagaacctcccgcagccccctcaggtgtgggatctcttacaatggcttcaggtggtggcgcaccagtggcagacaataacgaaggtgccgatggagtgggtagttcctcgggaaattggcattgcgattcccaatggctgggggacagagtcatcaccaccagcacccgaacctgggccctgcccacctacaacaatcacctctacaagcaaatctccaacagcacatctggaggatcttcaaatgacaacgcctacttcggctacagcaccccctgggggtattttgacttcaacagattccactgccacttctcaccacgtgactggcagcgactcatcaacaacaactggggattccggcctaagcgactcaacttcaagctcttcaacattcaggtcaaagaggttacggacaacaatggagtcaagaccatcgccaataaccttaccagcacggtccaggtcttcacggactcagactatcagctcccgtacgtgctcgggtcggctcacgagggctgcctcccgccgttcccagcggacgttttcatgattcctcagtacgggtatctgacgcttaatgatggaagccaggccgtgggtcgttcgtccttttactgcctggaatatttcccgtcgcaaatgctaagaacgggtaacaacttccagttcagctacgagtttgagaacgtacctttccatagcagctacgctcacagccaaagcctggaccgactaatgaatccactcatcgaccaatacttgtactatctctcaaagactattaacggttctggacagaatcaacaaacgctaaaattcagtgtggccggacccagcaacatggctgtccagggaagaaactacatacctggacccagctaccgacaacaacgtgtctcaaccactgtgactcaaaacaacaacagcgaatttgcttggcctggagcttcttcttgggctctcaatggacgtaatagcttgatgaatcctggacctgctatggccagccacaaagaaggagaggaccgtttctttcctttgtctggatctttaatttttggcaaacaaggaactggaagagacaacgtggatgcggacaaagtcatgataaccaacgaagaagaaattaaaactactaacccggtagcaacggagtcctatggacaagtggccacaaaccaccagagtgcccaagcacaggcgcagaccggctgggttcaaaaccaaggaatacttccgggtatggtttggcaggacagagatgtgtacctgcaaggacccatttgggccaaaattcctcacacgtacggcaactttcacccttctccgctgatgggagggtttggaatgaagcacccgcctcctcagatcctcatcaaaaacacacctgtacctgcggatcctccaacggccttcaacaaggacaagctgaactctttcatcacccagtattctactggccaagtcagcgtggagatcgagtgggagctgcagaaggaaaacagcaagcgctggaacccggagatccagtacacttccaactattacaagtctaataatgttgaatttgctgttaatactgaaggtgtatatagtgaaccccgccccattggcaccagatacctgactcgtaatctgtaattgcttgttaatcaataaaccgtttaattcgtttcagttgaactgcggcc

SEQ ID NO: 591 - DNA, 2601 bp, Artificial Sequence
  source: /note="Description of Artificial Sequence: Synthetic polynucleotide"
ccatcgacgtcagacgcggaagcttcgatcaactacgcggacaggtaccaaaacaaatgttctcgccacgtgggcatgaatctgatgctgtttccctgcagacaatgcgagagactgaatcagaattcaaatatctgcttcactcacggtgtcaaagactgtttagagtgctttcccgtgtcagaatctcaacccgtttctgtcgtcaaaaaggcgtatcagaaactgtgctacattcatcacatcatgggaaaggtgccagacgcttgcactgcttgcgacctggtcaatgtggacttggatgactgtgtttctgaacaataaatgacttaaaccaggtatggctgccgatggttatcttccagattggctcgaggacaaccttagtgaaggaattcgcgagtggtgggctttgaaacctggagcccctcaacccaaggcaaatcaacaacatcaagacaacgctcgaggtcttgtgcttccgggttacaaataccttggacccggcaacggactcgacaagggggagccggtcaacgcagcagacgcggcggccctcgagcacgacaaggcctacgaccagcagctcaaggccggagacaacccgtacctcaagtacaaccacgccgacgccgagttccaggagcggctcaaagaagatacgtcttttgggggcaacctcgggcgagcagtcttccaggccaaaaagaggcttcttgaacctcttggtctggttgaggaagcggctaagacggctcctggaaagaagaggcctgtagagcagtctcctcaggaaccggactcctccgcgggtattggcaaatcgggtgcacagcccgctaaaaagagactcaatttcggtcagactggcgacacagagtcagtcccagaccctcaaccaatcggagaacctcccgctgccccctcaggtgtgggatctcttacaatggcttcaggtggtggcgcaccagtggcagacaataacgaaggtgccgatggagtgggtagttcctcgggaaattggcattgcgattcccaatggctgggggacagagtcatcaccaccagcacccgaacctgggccctgcccacctacaacaatcacctctacaagcaaatctccaacagcacatctggaggatcttcaaatgacaacgcctacttcggctacagcaccccctgggggtattttgacttcaacagattccactgccacttctcaccacatgactggcagcgactcatcaacaacaactggggattccggcctaagcgactcaacttcaagctcttcaacattcaggtcaaagaggttacggacaacaatggagtcaagaccatcgccaataaccttaccagcacggtccaggtcttcacggactcagactatcagctcccgtacgtgctcgggtcggctcacgagggctgcctcccgccgttcccagcggacgttttcatgattcctcagtacgggtatctgacgcttaatgatggaagccaggccgtgggtcgttcgtccttttactgcctggaatatttcccgtcgcaaatgctaagaacgggtaacaacttccagttcagctacgagtttgagaacgtacctttccatagcagctacgctcacagccaaagcctggaccgactaatgaatccactcatcgaccaatacttgtactatctctcaaagactattaacggttctggacagaatcaacaaacgctaaaattcaatgtggccggacccagcaacatggctgtccagggaagaaactacatacctggacccagctaccgacaacaacgtgtctcaaccactgtgactcaaaacaacaacagcgaatttgcctggcctagagcttcttcttgggctctcaatggacgtaatagcttgatgaatcctggacctgctatggccagccacaaagaaggagaggaccgtttctttcctttgtctggatctttaatttttggcaaacaaggaactggaagagacaacgtggatgcggacaaagtcatgataaccaacgaagaagaaattaaaactactaacccggtagcaacggagtcctatggacaagtggccacaaaccaccagagtgcccaagcacaggcgcagaccggctgggttcaaaaccaaggaatacttccgggtatggtttggcaggacagagatgtgtacctgcaaggacccatttgggccaaaattcctcacacggacggcaactttcacccttctccgctgatgggagggtttggaatgaagcacccgcctcctcagatcctcatcaaaaacacacctgtacctgcggatcctccaacggccttcaacaaggacaagctgaactctttcatcacccagtattctactggccaagtcagcatggagatcgagtgggagctgcagaaggaaaacagcaagcgctggaacccggagatccagtacacttccaactattacaagtctaataatgttgaatttgctgttaatactgaaggtgtatatagtgaaccccgccccattggcaccagatacctgactcgtaatctgtaattgcttgttaatcaataaaccgtttaattcgtttcagttgaactgcggcc

SEQ ID NO: 592 - DNA, 2601 bp, Artificial Sequence
  source: /note="Description of Artificial Sequence: Synthetic polynucleotide"
ccatcgacgtcagacgcggaagcttcgatcaactacgcggacaggtaccaaaacaaatgttctcgtcacgtgggcatgaatctgatgctgtttccctgcagacaatgcgagagactgaatcagaattcaaatatctgcttcactcacggtgtcaaagactgtttagagtgctttcccgtgtcagaatctcaacccgtttctgtcgtcaaaaaggcgtatcagaaactgtgctacattcatcacatcatgggaaaggtgccagacgcttgcactgcttgcgacctggtcaatgtggacttggatgactgtgtttctgaacaataaatgacttaaaccaggtatggctgccgatggttatcttccagattggctcgaggacaaccttagtgaaggaattcgcgagtggtgggctttgaaacctggagcccctcaacccaaggcaaatcaacaacatcaagacaacgctcgaggtcttgtgcttccgggttacaaataccttggacccggcaacggactcgacaagggggagccggtcaacgcagcagacgcggcggccctcgagcacgacaaggcctacgaccagcagctcaaggccggagacaacccgtacctcaagtacaaccacgccgacgccgagttccaggagcggctcaaagaagatacgtcttttgggggcaacctcgggcgagcagtcttccaggccaaaaagaggcttcttgaacctcttggtctggttgaggaagcggctaagacggctcctggaaagaagaggcctgtagagcagtctcctcaggaaccggactcctccgcgggtattggcaaatcgggtgcacagcccgctaaaaagagactcaatttcggtcagactggcgacacagagtcagtcccagaccctcaaccaatcggagaacctcccgcagccccctcaggtgtgggatctcttacaatggcttcaggtggtggcgcaccagtggcagacaataacgaaggtgccgatggagtgggtagttcctcgggaaattggcattgcgattcccaatggctgggggacagagtcatcaccaccagcacccgaacctgggccctgcccacctacaacaatcacctctacaagcaaatctccaacagcacatctggaggatcttcaaatgacaacgcctacttcggctacagcaccccctgggggtattttgacttcaacagattccactgccacttctcaccacgtgactggcagcgactcatcaacaacaactggggattccggcctaagcgactcaacttcaagctcttcaacattcaggtcaaagaggttacggacaacaatggagtcaagaccatcgccaataaccttaccagcacggtccaggtcttcacggactcagactatcagctcccgtacgtgctcgggtcggctcacgagggctgcctcccgccgttcccagcggacgttttcatgattcctcagtacgggtatctgacgcttaatgatggaagccaggccgtgggtcgttcgtccttttactgcctggaatatttcccgtcgcaaatgctaagaacgggtaacaacttccagttcagctacgagtttgagaacgtacctttccatagcagctacgctcacagccaaagcctggaccgactaatgaatccactcatcgaccaatacttgtactatctctcaaagactattaacggttctggacagaatcaacaaacgctaaaattcagtgtggccggacccagcaacatggctgtccagggaagaaactacatacctggacccagctaccgacaacaacgtgtctcaaccactgtgactcaaaacaacaacagcgaatttgcttggcctagagcttcttcttgggctctcaatggacgtaatagcttgatgaatcctggacctgctatggccagccacaaagaaggagaggaccgtttctttcctttgtctggatctttaatttttggcaaacaaggaactggaagagacaacgtggatgcggacaaagtcatgataaccaacgaagaagaaattaaaactactaacccggtagcaacggagtcctatggacaagtggccacaaaccaccagagtgcccaagcacaggcgcagaccggctgggttcaaaaccaaggaatacttccgggtatggtttggcaggacagagatgtgtacctgcaaggacccatttgggccaaaattcctcacacggacggcaactttcacccttctccgctgatgggagggtttggaatgaagcacccgcctcctcagatcctcatcaaaaacacacctgtacctgcggatcctccaacggccttcaacaaggacaagctgaactctttcatcacccagtattctactggccaagtcagcgtggagatcgagtgggagctgcagaaggaaaacagcaagcgctggaacccggagatccagtacacttccaactattacaagtctaataatgttgaatttgctgttaatactgaaggtgtatatagtgaaccccgccccattggcaccagatacctgactcgtaatctgtaattgcttgttaatcaataaaccgtttaattcgtttcagttgaactgcggcc

SEQ ID NO: 593 - DNA, 2601 bp, Artificial Sequence
  source: /note="Description of Artificial Sequence: Synthetic polynucleotide"
ccatcgacgtcagacgcggaagcttcgatcaactacgcggacaggtaccaaaacaaatgttctcgtcacgtgggcatgaatctgatgctgtttccctgcagacaatgcgagagactgaatcagaattcaaatatctgcttcactcacggtgtcaaagactgtttagagtgctttcccgtgtcagaatctcaacccgtttctgtcgtcaaaaaggcgtatcagaaactgtgctacattcatcacatcatgggaaaggtgccagacgcttgcactgcttgcgacctggtcaatgtggacttggatgactgtgtttctgaacaataaatgacttaaaccaggtatggctgccgatggttatcttccagattggctcgaggacaaccttagtgaaggaattcgcgagtggtgggctttgaaacctggagcccctcaacccaaggcaaatcaacaacatcaagacaacgctcgaggtcttgtgcttccgggttacaaataccttggacccggcaacggactcgacaagggggagccggtcaacgcagcagacgcggcggccctcgagcacgacaaggcctacgaccagcagctcaaggccggagacaacccgtacctcaagtacaaccacgccgacgccgagttccaggagcggctcaaagaagatacgtcttttgggggcaacctcgggcgagcagtcttccaggccaaaaagaggcttcttgaacctcttggtctggttgaggaagcggctaagacggctcctggaaagaagaggcctgtagagcagtctcctcaggaaccggactcctccgcgggtattggcaaatcgggtgcacagcccgctaaaaagagactcaatttcggtcagactggcgacacagagtcagtcccagaccctcaaccaatcggagaacctcccgcagccccctcaggtgtgggatctcttacaatggcttcaggtggtggcgcaccagtggcagacaataacgaaggtgccgatggagtgggtagttcctcgggaaattggcattgcgattcccaatggctgggggacagagtcatcaccaccagcacccgaacctgggccctgcccacctacaacaatcacctctacaagcaaatctccaacagcacatctggaggatcttcaaatgacaacgcctacttcggctacagcaccccctgggggtattttgacttcaacagattccactgccacttctcaccacgtgactggcagcgactcatcaacaacaactggggattccggcctaagcgactcaacttcaagctcttcaacattcaggtcaaagaggttacggacaacaatggagtcaagaccatcgccaataaccttaccagcacggtccaggtcttcacggactcagactatcagctcccgtacgtgctcgggtcggctcacgagggctgcctcccgccgttcccagcggacgttttcatgattcctcagtacgggtatctgacgcttaatgatggaagccaggccgtgggtcgttcgtccttttactgcctggaatatttcccgtcgcaaatgctaagaacgggtaacaacttccagttcagctacgagtttgagaacgtacctttccatagcagctacgctcacagccaaagcctggaccgactaatgaatccactcatcgaccaatacttgtactatctctcaaagactattaacggttctggacagaatcaacaaacgctaaaattcagtgtggccggacccagcaacatggctgtccagggaagaaactacatacctggacccagctaccgacaacaacgtgtctcaaccactgtgactcaaaacaacaacagcgaatttgcttggcctagagcttcttcttgggctctcaatggacgtaatagcttgatgaatcctggacctgctatggccagccacaaagaaggagaggaccgtttctttcctttgtctggatctttaatttttggcaaacaaggaactggaagagacaacgtggatgcggacaaagtcatgataaccaacgaagaagaaattaaaactactaacccggtagcaacggagtcctatggacaagtggccacaaaccaccagagtgcccaagcacaggcgcagaccggctgggttcaaaaccaaggaatacttccgggtatggtttggcaggacagagatgtgtacctgcaaggacccatttgggccaaaattcctcacacggacggcaactttcacccttctccgctgatgggagggtttggaatgaagcacccgcctcctcagatcctcatcaaaaacacacctgtacctgcggatcctccaacggccttcaacaaggacaagctgaactctttcatcacccagtattctactggccaagtcagcgtggagatcgagtgggagcggcagaaggaaaacagcaagcgctggaacccggagatccagtacacttccaactattacaagtctaataatgttgaatttgctgttaatactgaaggtgtatatagtgaaccccgccccattggcaccagatacctgactcgtaatctgtaattgcttgttaatcaataaaccgtttaattcgtttcagttgaactgcggcc

SEQ ID NO: 594 - DNA, 2601 bp, Artificial Sequence
  source: /note="Description of Artificial Sequence: Synthetic polynucleotide"
ccatcgacgtcagacgcggaagcttcgatcaactacgcggacaggtaccaaaacaaatgttctcgtcacgtgggcatgaatctgatgctgtttccctgcagacaatgcgagagactgaatcagaattcaaatatctgcttcactcacggtgtcaaagactgtttagagtgctttcccgtgtcagaatctcaacccgtttctgtcgtcaaaaaggcgtatcagaaactgtgctacattcatcacatcatgggaaaggtgccagacgcttgcactgcttgcgacctggtcaatgtggacttggatgactgtgtttctgaacaataaatgacttaaaccaggtatggctgccgatggttatcttccagattggctcgaggacaaccttagtgaaggaattcgcgagtggtgggctttgaaacctggagcccctcaacccaaggcaaatcaacaacatcaagacaacgctcgaggtcttgtgcttccgggttacaaataccttggacccggcaacggactcgacaagggggagccggtcaacgcagcagacgcggcggccctcgagcacgacaaggcctacgaccagcagctcaaggccggagacaacccgtacctcaagtacaaccacgccgacgccgagttccaggagcggctcaaagaagatacgtcttttgggggcaacctcgggcgagcagtcttccaggccaaaaagaggcttcttgaacctcttggtctggttgaggaagcggctaagacggctcctggaaagaagaggcctgtagagcagtctcctcaggaaccggactcctccgcgggtattggcaaatcgggtgcacagcccgctaaaaagagactcaatttcggtcagactggcgacacagagtcagtcccagaccctcaaccaatcggagaacctcccgcagccccctcaggtgtgggatctcttacaatggcttcaggtggtggcgcaccagtggcagacaataacgaaggtgccgatggagtgggtagttcctcgggaaattggcattgcgattcccaatggctgggggacagagtcatcaccaccagcacccgaacctgggccctgcccacctacaacaatcacctctacaagcaaatctccaacagcacatctggaggatcttcaaatgacaacgcctacttcggctacagcaccccctgggggtattttgacttcaacagattccactgccacttctcaccacgtgactggcagcgactcatcaacaacaactggggattccggcctaagcgactcaacttcaagctcttcaacattcaggtcaaagaggttacggacaacaatggagtcaagaccatcgccaataaccttaccagcacggtccaggtcttcgcggactcagactatcagctcccgtacgtgctcgggtcggctcacgagggctgcctcccgccgttcccagcggacgttttcatgattcctcagtacgggtatctgacgcttaatgatggaagccaggccgtgggtcgttcgtccttttactgcctggaatatttcccgtcgcaaatgctaagaacgggtaacaacttccagttcagctacgagtttgagaacgtacctttccatagcagctacgctcacagccaaagcctggaccgactaatgaatccactcatcgaccaatacttgtactatctctcaaagactattaacggttctggacagaatcaacaaacgctaaaattcagtgtggccggacccagcaacatggctgtccagggaagaaactacatacctggacccagctaccgacaacaacgtgtctcaaccactgtgactcaaaacaacaacagcgaatttgcttggcctagagcttcttcttgggctctcaatggacgtaatagcttgatgaatcctggacctgctatggccagccacaaagaaggagaggaccgtttctttcctttgtctggatctttaatttttggcaaacaaggaactggaagagacaacgtggatgcggacaaagtcatgataaccaacgaagaagaaattaaaactactaacccggtagcaacggagtcctatggacaagtggccacaaaccaccagagtgcccaagcacaggcgcagaccggctgggttcaaaaccaaggaatacttccgggtatggtttggcaggacagagatgtgtacctgcaaggacccatttgggccaaaattcctcacacggacggcaactttcacccttctccgctgatgggagggtttggaatgaagcacccgcctcctcagatcctcatcaaaaacacacctgtacctgcggatcctccaacggccttcaacaaggacaagctgaactctttcatcacccagtattctactggccaagtcagcgtggagatcgagtgggagctgcagaaggaaaacagcaagcgctggaacccggagatccagtacacttccaactattacaagtctaataatgttgaatttgctgttaatactgaaggtgtatatagtgaaccccgccccattggcaccagatacctgactcgtaatctgtaattgcttgttaatcaataaaccgtttaattcgtttcagttgaactgcggcc

SEQ ID NO: 595 - DNA, 2601 bp, Artificial Sequence
  source: /note="Description of Artificial Sequence: Synthetic polynucleotide"
ccatcgacgtcagacgcggaagcttcgatcaactacgcggacaggtaccaaaacaaatgttctcgtcacgtgggcatgaatctgatgctgtttccctgcagacaatgcgagagactgaatcagaattcaaatatctgcttcactcacggtgtcaaagactgtttagagtgctttcccgtgtcagaatctcaacccgtttctgtcgtcaaaaaggcgtatcagaaactgtgctacattcatcacatcatgggaaaggtgccagacgcttgcactgcttgcgacctggtcaatgtggacttggatgactgtgtttctgaacaataaatgacttaaaccaggtatggctgccgatggttatcttccagattggctcgaggacaaccttagtgaaggaattcgcgagtggtgggctttgaaacctggagcccctcaacccaaggcaaatcaacaacatcaagacaacgctcgaggtcttgtgcttccgggttacaaataccttggacccggcaacggactcgacaagggggagccggtcaacgcagcagacgcggcggccctcgagcacgacaaggcctacgaccagcagctcaaggccggagacaacccgtacctcaagtacaaccacgccgacgccgagttccaggagcggctcaaagaagatacgtcttttgggggcaacctcgggcgagcagtcttccaggccaaaaagaggcttcttgaacctcttggtctggttgaggaagcggctaagacggctcctggaaagaagaggcctgtagagcagtctcctcaggaaccggactcctccgcgggtattggcaaatcgggtgcacagcccgctaaaaagagactcaatttcggtcagactggcgacacagagtcagtcccagaccctcaaccaatcggagaacctcccgcagccccctcaggtgtgggatctcttacaatggcttcaggtggtggcgcaccagtggcagacaataacgaaggtgccgatggagtgggtagttcctcgggaaattggcattgcgattcccaatggctgggggacagagtcatcaccaccagcacccgaacctgggccctgcccacctacaacaatcacctctacaagcaaatctccaacagcacatctggaggatcttcaaatgacaacgcctacttcggctacagcaccccctgggggtattttgacttcaacagattccactgccacttctcaccacgtgactggcagcgactcatcaacaacaactggggattccggcctaagcgactcaacttcaagctcttcaacattcaggtcaaagaggttacggacaacaatggagtcaagaccatcgccaataaccttaccagcacggtccaggtcttcacggactcagactatcagctcccgtacgtgctcgggtcggctcacgagggctgcctcccgccgttcccagcggacgttttcatgattcctcagtacgggtatctgacgcttaatgatggaagccaggccgtgggtcgttcgtccttttactgcctggaatatttcccgtcgcaaatgctaagaacgggtaacaacttccagttcagctacgagtttgagaacgtacctttccatagcagctacgctcacagccaaagcctggaccgactaatgaatccactcatcgaccaatacttgtactatctctcaaagactattaacggttctggacagaatcaacaaacgctaaaattcagtgtggccggacccagcaacatggctgtccagggaagaaactacatacctggacccagctaccgacaacaacgtgtctcaaccactgtgactcaaaacaacaacagcgaaattgcttggcctagagcttcttcttgggctctcaatggacgtaatagcttgatgaatcctggacctgctatggccagccacaaagaaggagaggaccgtttctttcctttgtctggatctttaatttttggcaaacaaggaactggaagagacaacgtggatgcggacaaagtcatgataaccaacgaagaagaaattaaaactactaacccagtagcaacggagtcctatggacaagtggccacaaaccaccagagtgcccaagcacaggcgcagaccggctgggttcaaaaccaaggaatacttccgggtatggtttggcaggacagagatgtgtacctgcaaggacccatttgggccaaaattcctcacacggacggcaactttcacccttctccgctgatgggagggtttggaatgaagcacccgcctcctcagatcctcatcaaaaacacacctgtacctgcggatcctccaacggccttcaacaaggacaagctgaactctttcatcacccagtattctactggccaagtcagcgtggagatcgagtgggagctgcagaaggaaaacagcaagcgctggaacccggagatccagtacacttccaactattgcaagtctaataatgttgaatttgctgttaatactgaaggtgtatatagtgaaccccgccccattggcaccagatacctgactcgtaatctgtaattgcttgttaatcaataaaccgtttaattcgtttcagttgaactgcggcc

SEQ ID NO: 596 - DNA, 2601 bp, Artificial Sequence
  source: /note="Description of Artificial Sequence: Synthetic polynucleotide"
ccatcgacgtcagacgcggaagcttcgatcaactacgcggacaggtaccaaaacaaatgttctcgtcacgtgggcatgaatctgatgctgtttccctgcagacaatgcgagagactgaatcagaattcaaatatctgcttcactcacggtgtcaaagactgtttagagtgctttcccgtgtcagaatctcaacccgtttctgtcgtcaaaaaggcgtatcagaaactgtgctacattcatcacatcatgggaaaggtgccagacgcttgcactgcttgcgacctggtcaatgtggacttggatgtctgtgtttctgaacaataaatgacttaaaccaggtatggctgccgatggttatcttccagattggctcgaggacaaccttagtgaaggaattcgcgagtggtgggctttgaaacctggagcccctcaacccaaggcaaatcaacaacatcaagacaacgctcgaggtcttgtgcttccgggttacaaataccttggacccggcaacggactcgataagggggagccggtcaacgcagcagacgcggcggccctcgagcacgacaaggcctacgaccagcagctcaaggccggagacaacccgtacctcaagtacaaccacgccgacgccgagttccaggagcggctcaaagaagatacgtcttttgggggcaacctcgggcgagcagtcttccaggccaaaaagaggcttcttgaacctcttggtctggttgaggaagcggctaagacggctcctggaaagaagaggcctgtagagcagtctcctcaggaaccggactcctccgcgggtattggcaaatcgggtgcacagcccgctaaaaagagactcaatttcggtcagactggcgacacagagtcagtcccagaccctcaaccaatcggagaacctcccgcagccccctcaggtgtgggatctcttacaatggcttcaggtggtggcgcaccagtggcagacaataacgaaggtgccgatggagtgggtagttcctcgggaaattggcattgcgattcccaatggctgggggacagagtcatcaccaccagcacccgaacctgggccctgcccacctacaacaatcacctctacaagcaaatctccaacagcacatctggaggatcttcaaatgacaacgcctacttcggctacagcaccccctgggggtattttgacttcaacagattccactgccacttctcaccacgtgactggcagcgactcatcaacaacaactggggattccggcctaagcgactcaacttcaagctcttcaacattcaggtcaaagaggttacggacaacaatggagtcaagaccatcgccaataaccttaccagcacggtccaggtcttcacggactcagactatcagctcccgtacgtgctcgggtcggctcacgagggctgcctcccgccgttcccagcggacgttttcatgattcctcagtacgggtatctgacgcttaatgatggaagccaggccgtgggtcgttcgtccttttactgcctggaatatttcccgtcgcaaatgctaagaacgggtaacaacttccagttcagctacgagtttgagaacgtacctttccatagcagctacgctcacagccaaagcctggaccgactaatgaatccactcatcgaccaatacttgtactatctctcaaagactattaacggttctggacagaatcaacaaacgctaaaattcagtgtggccggacccagcaacatggctgtccagggaagaaactacatacctggacccagctaccgacaacaacgtgtctcaaccactgtgactcaaaacaacaacagcgaatttgcttggcctagagcttcttcttgggctctcaatggacgtaatagcttgatgaatcctggacctgctatggccagccacaaagaaggagaggaccgtttctttcctttgtctggatctttaatttttggcaaacaaggaactggaagagacaacgtggatgcggacaaagtcatgataaccaacgaagaagaaattaaaactactaacccggtagcaacggagtcctatggacaagtggccacaaaccaccagagtgcccaagcacaggcgcagaccggctgggttcaaaaccaaggaatacttccgggtatggtttggcaggacagagatgtgtacctgcaaggacccatttgggccaaaattcctcacacggacggcaactttcacccttctccgctgatgggagggtttggaatgaagcacccgcctcctcagatcctcatcaaaaacacacctgtacctgcggatcctccaacggccttcaacaaggacaagctgaactctttcatcacccagtattctactggccaagtcagcgtggagatcgagtgggagctgcagaaggaaaacagcaagcgctggaacccggagatccagtacacttccaactattacaagtctaataatgttgaatttgctgttaatactgaaggtgtatatagtgaaccccgccccattggcaccagatacctgactcgtaatctgtaattgcttgttaatcaataaaccgtttaattcgtttcagttgaactgcggcc

SEQ ID NO: 597 - protein, 736 aa, Artificial Sequence
  source: /note="Description of Artificial Sequence: Synthetic polypeptide"
MTADGYLPDWLEDNLSEGIREWWALKPGAPQPKANQQHQDNARGLVLPGYKYLGPGNGLDKGEPVNAADAAALEHDKAYDQQLKAGDNPYLKYNHADAEFQERLKEDTSFGGNLGRAVFQAKKRLLEPLGLVEEAAKTAPGKKRPVEQSPQEPDSSAGIGKSGAQPAKKRLNFGQTGDTESVPDPQPIGEPPAAPSGVGSLTMASGGGAPVADNNEGADGVGSSSGNWHCDSQWLGDRVITTSTRTWALPTYNNHLYKQISNSTSGGSSNDNAYFGYSTPWGYFDFNRFHCHFSPRDWQRLINNNWGFRPKQLNFKLFNIQVKEVTDNNGVKTIANNLTSTVQVFTDSDYQLPYVLGSAHEGCLPPFPADVFMIPQYGYLTLNDGSQAVGRSSFYCLEYFPSQMLRTGNNFQFSYEFENVPFHSSYAHSQSLDRLMNPLIDQYLYYLSKTINGSGQNQQTLKFSVAGPSNMAVQGRNYIPGPSYRQQRVSTTVTQNNNSEFAWPGASSWALNGRNSLMNPGPAMASHKEGEDRFFPLSGSLIFGKQGTGRDNVDADKVMITNEEEIKTTNPVATESYGQVATNHQSAQAQAQTGWVQNQGILPGMVWQDRDVYLQGPIWAKIPHTDGNFHPSPLMGGFGMKHPPPQILIKNTPVPADPPTAFNKDKLNSFITQYSTGQVSVEIEWELQKENSKRWNPEIQYTSNYYKSNNVEFAVNTEGVYSEPRPIGTRYLTRNL

SEQ ID NO: 598 - protein, 736 aa, Artificial Sequence
  source: /note="Description of Artificial Sequence: Synthetic polypeptide"
MAADGYLPDWLEDNLSEGIREWWALKPGAPQPKANQQHQDNARGLVLPGYKYLGPGNGLDKGEPVNAADAAALEHDKAYDQQLKAGDNPYLKYNHADAEFQERLKEDTSFGGNLGRAVFQAKKRLLEPLGLVEEAAKTAPGKKRPVEQSPQEPDSSAGIGKSGAQPAKKRLNFGQTGDTESVPDPQPIGEPPAAPSGVGSLTMASGGGAPVADNNEGADGVGSSSGNWHCDSQWLGDRVITTSTRTWALPTYNNHLYKQISNSTSGGSSNDNAYFGYSTPWGYFDFNRFHCHFSPRDWQRLINNNWGFRPKRLNFKLFNIQVKEVTDNNGVKTIANNLTSTVQVFTDSDYQLPYVLGSAHEGCLPPFPADVFMIPQYGYLTLNDGSQAVGRSSFYCLEYFPSQMLRTGNNFQFSYEFENVPFHSSYAHSQSLDRLMNPLIDQYLYYLSKTINGSGQNQQTLKFSVAGPSNMAVQGRNYIPGPSYRQQRVSTTVTQNNNSEFAWPGASSWALNGRNSLMNPGPAMASHKEGEDRFFPLSGSLIFGKQGTGRDNVDADKVMITNEEEIKTTNPVATESYGQVATNHQSAQAQAQTGWVQNQGILPGMVWQDRDVYLQGPIWAKIPHTGGNFHPSPLMGGFGMKHPPPQILIKNTPVPADPPTAFNKDKLNSFITQYSTGQVSVEIEWELQKENSKRWNPEIQYTSNYYKSNNVEFAVNTGGVYSEPRPIGTRYLTRNL

SEQ ID NO: 599 - protein, 736 aa, Artificial Sequence
  source: /note="Description of Artificial Sequence: Synthetic polypeptide"
MAADGYLPDWLEDNLSEGIREWWALKPGAPQPKANQQHQDNARGLVLPGYKYLGPGNGLDKGEPVNAADAAALEHDKAYDQQLKAGDNPYLKYNHADAEFQERLKEDTSFGGNLGRAVFQAKKRLLEPLGLVEEAAKTAPGKKRPVEQSPQEPDSSAGIDKSGAQPAKKRLNFGQTGDTESVPDPQPIGEPPAAPSGVGSLTMASGGGAPVADNNEGADGVGSSSGNWHCDSQWLGDRVITTSTRTWALPTYNNHLYKQISNSTSGGSSNDNAYFGYSTPWGYFDFNRFHCHFSPRDWQRLINNNWGFRPKRLNFKLFNIQVKEVTDNNGVKTIANNLTSTVQVFTDSDYQLPYVLGSAHEGCLPPFPADVFMIPQYGYLTLNDGSQAVGRSSFYCLEYFPSQMLRTGNNFQFSYEFENVPFHSSYAHSQSLDRLMNPLIDQYLYYLSKTINGSGQNQQTLKFSVAGPSNMAVQGRNYIPGPSYRQQRVSTTVTQNNNSEFAWPGASSWALNGRNSLMNPGPAMASHKEGEDRFFPLSGSLIFGKQGTGRDNVDADKVMITNEEEIKTTNPVATESYGQVATNHQSAQAQAQTGWVQNQGILPGMVWQDRDVYLQGPIWAKIPHTDGNFHPSPLMGGFGMKHPPPQILIKNTPVPADPPTAFNKDKLNSFITQYSTGQVSVEIEWELQKENSKRWNPEIQYTSNYYKSNNVEFAVNTEGVYSEPRPIGTRYLTRNL

SEQ ID NO: 600 - protein, 736 aa, Artificial Sequence
  source: /note="Description of Artificial Sequence: Synthetic polypeptide"
MAADGYLPDWLEDNLSEGIREWWALKPGAPQPKANQQHQDNARGLVLPGYKYLGPGNGLDKGEPVNAADAAALEHDKAYDQQLKAGDNPYLKYNHADAEFQERLKEDTSFGGNLGRAVLQAKKRLLEPLGLVEEAAKTAPGKKRPVEQSPQEPDSSAGIGKSGAQPAKKRLNFGQTGDTESVPDPQPIGEPPAAPSGVGSLTMASGGGAPVADNNEGADGVGSSSGNWHCDSQWLGDRVITTSTRTWALPTYNNHLYKQISNSTSGGSSNDNAYFGYSTPWGYFDFNRFHCHFSPRDWQRLINNNWGFRPKRLNFKLFNIQVKEVTDNNGVKTIANNLTSTVQVFTDSDYQLPYVLGSAHEGCLPPFPADVFMIPQYGYLTLNDGSQAVGRSSFYCLEYFPSQMLRTGNNFQFSYEFENVPFHSSYAHSQSLDRLMNPLIDQYLYYLSKTINGSGQNQQTLKFSVAGSSNMAVQGRNYIPGPSYRQQRVSTTVTQNNNSEFAWPGASSWALNGRNSLMNPGPAMASHKEGEDRFFPLSGSLIFGKQGTGRDNVDADKVMITNEEEIKTTNPVATESYGQVATNHQSAQAQAQTGWVQNQGILPGMVWQDRDVYLQGPIWAKIPHTDGNFHPSPLMGGFGMKHPPPQILIKNTPVPADPPTAFNKDKLNSFITQYSTGQVSVEIEWELQKENSKRWNPEIQYTSNYYKSNNVEFAVNTEGVYSEPRPIGTRYLTRNL

SEQ ID NO: 601 - protein, 736 aa, Artificial Sequence
  source: /note="Description of Artificial Sequence: Synthetic polypeptide"
MAADGYLPDWLEDNLSEGIREWWALKPGAPQPKANQQHQDNARGLVLPGYKYLGPGNGLDKGEPVNAADAAALEHDRAYDQQLKAGDNPYLKYNHADAEFQERLKEDTSFGGNLGRAVFQAKKRLLEPLGLVEEAAKTAPGKKRPVEQSPQEPDSSAGIGKSGAQPAKKRLNFGQTGDTESVPDPQPIGEPPAAPSGVGSLTMASGGGAPVADNNEGADGVGSSSGNWHCDSQWLGDRVITTSTRTWALPTYNNHLYKQISNSTSGGSSNDNAYFGYSTPWGYFDFNRFHCHFSPRDWQRLINNNWGFRPKRLNFKLFNIQVKEVTDNNGVKTIANNLTSTVQVFTDSDYQLPYVLGSAHEGCLPPFPADVFMIPQYGYLTLNDGSQAVGRSSFYCLEYFPSQMLRTGNNFQFSYEFENVPFHSSYAHSQSLDRLMNPLIDQYLYYLSKTINGSGQNQQTLKFSVAGPSNMAVQGRNYIPGPSYRQQRVSTTVTQNNNSEFAWPGASSWALNGRNSLMNPGPAMASHKEGEDRFFPLSGSLIFGKQGTGRDNVDADKVMITNEEEIKTTNPVATESYGQVATNHQSAQAQAQTGWVQNQGILPGMVWQDRDVYLQGPIWAKIPHTDGNFHPSPLMGGFGMKHPPPQILIKNTPVPADPPTAFNKDKLNSFITQYSTGQVSVEIEWELQKKNSKRWNPEIQYTSNYYKSNNVEFAVNTEGVYSEPRPIGTRYLTRNL

SEQ ID NO: 602 - protein, 736 aa, Artificial Sequence
  source: /note="Description of Artificial Sequence: Synthetic polypeptide"
MAADGYLPDWLEDNLSEGIREWWALKPGAPQPKANQQHQDNARGLVLPGYKYLGPGNGLDKGEPVNAADAAALEHDKAYDQQLKAGDNPYLKYNHADAEFQERLKEDTSFGGNLGRAVFQAKKRLLEPLGLVEEAAKTAPGKKRPVEQSPQEPDSSAGIGKSGAQPAKKRLNFGQTGDTESVPDPQPIGEPPAAPSGVGSLTMASGGGAPVADNNEGADGVGSSSGNWHCDSQWLGDRVITTSTRTWALPTYNNHLYKQISNSTSGGSSNDNAYFGYSTPWGYFDFNRFHCHFSPRDWQRLINNNWGFRPKRLNFKLFNIQVKEVTDNNGVKTIANNLTSTVQVFTDSDYQLPYVLGSAHEGCLPPFPADVFMIPQYGYLTLNDGSQAVGRSSFYCLEYFPSQMLRTGNNFQFSYEFENVPFHSSYAHSQSLDRLMNPLIDQYLYYLSKTINGSGQNQQTLKFSVAGPSNMAVQGRNYIPGPSYRQQRVSTTVTQNNNSEFAWPGASSWALNGRNSLMNPGPAMASHKEGEDRFFPLSGSLIFGKQGTGRDNVDADKVMITNEEEIKTTNPVATESYGQVATNHQSAQARAQTGWVQNQGILPGMVWQDRDVYLQGPIWAKIPHTDGNFHPSPLMGGFGMKHPPPQILIKNTPVPADPPTAFNKDKLNSFITQYSTGQVSVEIEWELQKENSKRWNPEIQYTSNYYKSNNVEFAVNTEGVYSEPRPIGTRYLTRNL

SEQ ID NO: 603 - protein, 736 aa, Artificial Sequence
  source: /note="Description of Artificial Sequence: Synthetic polypeptide"
MAADGYLPDWLEDNLSEGIREWWALKPGAPQPKANQQHQDNARGLVLPGYKYLGPGNGLDKGEPVNAVDAAALEHDKAYDQQLKAGDNPYLKYNHADAEFQERLKEDTSFGGNLGRAVFQAKKRLLEPLGLVEEAAKTAPGKKRPVEQSPQEPDSSAGIGKSGAQPAKKRLNFGQTGDTESVPDPQPIGEPPAAPSGVGSLTMASGGGAPVADNNEGADGVGSSSGNWHCDSQWLGDRVITTSTRTWALPTYNNHLYKQISNSTSGGSSNDNAYFGYSTPWGYFDFNRFHCHFSPRDWQRLINNNWGFRPKRLNFKLFNIQVKEVTDNNGVKTIANNLTSTVQVFTDSDYQLPYVLGSAHEGCLPPFPADVFMIPQYGYLTLNDGSQAVGRSSFYCLEYFPSQMLRTGNNFQFSYEFENVPFHSSYAHSQSLDRLMNPLIDQYLYYLSKTINGSGQNQQTLKFSVAGPSNMAVQGRNYIPGPSYRQQRVSTTVTQNNNSEFAWPGASSWALNGRNSLMNPGPAMASHKEGEDRFFPLSGSLIFGKQGTGRDNVDADKVMITNEEEIKTTNPVATESYGQVATNHQSAQAQAQTGWVQNQGILPGMVWQDRDVYLQGPIWAKIPHTDGNFHPSPLMGGFGMKHPPPQILIKNTPVPADPPTAFNKDKLNSFITQYSTGQVSVEIEWELQKENSKRWNPEIQYTSNYYKSNNVEFAVNTEGVYSEPRPIGTRYLTRNL

SEQ ID NO: 604 - protein, 736 aa, Artificial Sequence
  source: /note="Description of Artificial Sequence: Synthetic polypeptide"
MAADGYLPDWLEDNLSEGIREWWALKPGAPQPKANQQHQDNARGLVLPGYKYLGPGNGLDKGEPVNAADAAALEHDKAYDQQLKAGDNPYLKYNHADAEFQERLKEDTSFGGNLGRAVFQAKKRLLEPLGLVEEAAKTAPGKKRPVEQSPREPDSSAGIGKSGAQPAKKRLNFGQTGDTESVPDPQPIGEPPAAPSGVGSLTMASGGGAPVADNNEGADGVGSSSGNWHCDSQWLGDRVITTSTRTWALPTYNNHLYKQISNSTSGGSSNDNAYFGYSTPWGYFDFNRFHCHFSPRDWQRLINNNWGFRPKRLNFKLFNIQVKEVTDNNGVKTIANNLTSTVQVFTDSDYQLPYVLGSAHEGCLPPFPADVFMIPQYGYLTLNDGSQAVGRSSFYCLEYFPSQMLRTGNNFQFSYEFENVPFHSSYAHSQSLDRLMNPLIDQYLYYLSKTINGSGQNQQTLKFSVAGPSNMAVQGRNYIPGPSYRQQRVSTTVTQNNNSEFAWPGASSWALNGRNSLMNPGPAMASHKEGEDRFFPLSGSLIFGKQGTGRDNVDADKVMITNEEEIKTTNPVATESYGQVATNHQSAQAQAQTGWVQNQGILPGMVWQDRDVYLQGPIWAKIPHTDGNFHPSPLMGGFGMKHPPPQILIKNTPVPADPPTAFNKDKLNSFITQYSTGQVSVEIEWELQKENSKRWNPEIQYTSNYYKSNNVEFAVNTEGVYSEPRPIGTRYLTRNL

SEQ ID NO: 605 - protein, 736 aa, Artificial Sequence
  source: /note="Description of Artificial Sequence: Synthetic polypeptide"
MAADGYLPDWLEDNLSEGIREWWALKPGAPQPKANQQHQDNARGLVLPGYKYLGPGNGLDKGEPVNAADAAALEHDKAYDQQLKAGDNPYLKYNHADAEFQERLKEDTSFGGNLGRAVFQAKKRLLEPLGLVEEAAKTAPGKKRPVEQSPQEPDSSAGIGKSGAQPAKKRLNFGQTGDTESVPDPQPIGEPPAAPSGVGSLTMASCGGAPVADNNEGADGVGSSSGNWHCDSQWLGDRVITTSTRTWALPTYNNHLYKQISNSTSGGSSNDNAYFGYSTPWGYFDFNRFHCHFSPRDWQRLINNNWGFRPKRLNFKLFNIQVKEVTDNNGVKTIANNLTSTVQVFTDSDYQLPYVLGSAHEGCLPPFPADVFMIPQYGYLTLNDGSQAVGRSSFYCLEYFPSQMLRTGNNFQFSYEFENVPFHSSYAHSQSLDRLMNPLIDQYLYYLSKTINGSGQNQQTLKFSVAGPSNMAVQGRNYIPGPSYRQQRVSTTVTQNNNSEFAWPGASSWALNGRNSLMNPGPAMASHKEGEDRFFPLSGSLIFGKQGTGRDNVDADKVMITNEEEIKTTNPVATESYGQVATNHQSAQAQAQTGWVQNQGILPGMVWQDRDVYLQGPIWAKIPHTDGNFHPSPLMGGFGMKHPPPQILIKNTPVPADPPTAFNKDKLNSFITQYSTGQVSVEIEWELQKENSKRWNPEIQYTSNYYKSNNVEFAVNTEGVYSEPRPIGTRYLTRNL

SEQ ID NO: 606 - protein, 736 aa, Artificial Sequence
  source: /note="Description of Artificial Sequence: Synthetic polypeptide"
MAADGYLPDWLEDNLSEGIREWWALKPGAPQPKANQQHQDNARGLVLPGYKYLGPGNGLDKGEPINAADAAALEHDKAYDQQLKAGDNPYLKYNHADAEFQERLKEDTSFGGNLGRAVFQAKKRLLEPLGLVEEAAKTAPGKKRPVEQSPQEPDSSAGIGKSGAQPAKKRLNFGQTGDTESVPDPQPIGEPPAAPSGVGSLTMASGGGAPVADNNEGADGVGSSSGNWHCDSQWLGDRVITTSTRTWALPTYNNHLYKQISNSTSGGSSNDNAYFGYSTPWGYFDFNRFHCHFSPRDWQRLINNNWGFRPKRLNFKLFNIQVKEVTDNNGVKTIANNLTSTVQVFTDSDYQLPYVLGSAHEGCLPPFPADVFMIPQYGYLTLNDGSQAVGRSSFYCLEYFPSQMLRTGNNFQFSYEFENVPFHSSYAHSQSLDRLMNPLIDQYLYYLSKTINGSGQNQQTLKFSVAGPSNMAVQGRNYIPGPSYRQQRVSTTVTQNNNSEFAWPGASSWALNGRNSLMNPGPAMASHKEGEDRFFPLSGSLIFGKQGTGRDNVDADKVMITNEEEIKTTNPVATESYGQVATNHQSAQAQAQTGWVQNQGILPGMVWQDRDVYLQGPIWAKIPHTYGNFHPSPLMGGFGMKHPPPQILIKNTPVPADPPTAFNKDKLNSFITQYSTGQVSVEIEWELQKENSKRWNPEIQYTSNYYKSNNVEFAVNTEGVYSEPRPIGTRYLTRNL

SEQ ID NO: 607 - protein, 736 aa, Artificial Sequence
  source: /note="Description of Artificial Sequence: Synthetic polypeptide"
MAADGYLPDWLEDNLSEGIREWWALKPGAPQPKANQQHQDNARGLVLPGYKYLGPGNGLDKGEPVNAADAAALEHDKAYDQQLKAGDNPYLKYNHADAEFQERLKEDTSFGGNLGRAVFQAKKRLLEPLGLVEEAAKTAPGKKRPVEQSPQEPDSSAGIGKSGAQPAKKRLNFGQTGDTESVPDPQPIGEPPAAPSGVGSLTMASGGGAPVADNNEGADGVGSSSGNWHCDSQWLGDRVITTSTRTWALPTYNNHLYKQISNSTSGGSSNDNAYFGYSTPWGYFDFNRFHCHFSPHDWQRLINNNWGFRPKRLNFKLFNIQVKEVTDNNGVKTIANNLTSTVQVFTDSDYQLPYVLGSAHEGCLPPFPADVFMIPQYGYLTLNDGSQAVGRSSFYCLEYFPSQMLRTGNNFQFSYEFENVPFHSSYAHSQSLDRLMNPLIDQYLYYLSKTINGSGQNQQTLKFNVAGPSNMAVQGRNYIPGPSYRQQRVSTTVTQNNNSEFAWPRASSWALNGRNSLMNPGPAMASHKEGEDRFFPLSGSLIFGKQGTGRDNVDADKVMITNEEEIKTTNPVATESYGQVATNHQSAQAQAQTGWVQNQGILPGMVWQDRDVYLQGPIWAKIPHTDGNFHPSPLMGGFGMKHPPPQILIKNTPVPADPPTAFNKDKLNSFITQYSTGQVSMEIEWELQKENSKRWNPEIQYTSNYYKSNNVEFAVNTEGVYSEPRPIGTRYLTRNL

SEQ ID NO: 608 - protein, 736 aa, Artificial Sequence
  source: /note="Description of Artificial Sequence: Synthetic polypeptide"
MAADGYLPDWLEDNLSEGIREWWALKPGAPQPKANQQHQDNARGLVLPGYKYLGPGNGLDKGEPVNAADAAALEHDKAYDQQLKAGDNPYLKYNHADAEFQERLKEDTSFGGNLGRAVFQAKKRLLEPLGLVEEAAKTAPGKKRPVEQSPQEPDSSAGIGKSGAQPAKKRLNFGQTGDTESVPDPQPIGEPPAAPSGVGSLTMASGGGAPVADNNEGADGVGSSSGNWHCDSQWLGDRVITTSTRTWALPTYNNHLYKQISNSTSGGSSNDNAYFGYSTPWGYFDFNRFHCHFSPRDWQRLINNNWGFRPKRLNFKLFNIQVKEVTDNNGVKTIANNLTSTVQVFTDSDYQLPYVLGSAHEGCLPPFPADVFMIPQYGYLTLNDGSQAVGRSSFYCLEYFPSQMLRTGNNFQFSYEFENVPFHSSYAHSQSLDRLMNPLIDQYLYYLSKTINGSGQNQQTLKFSVAGPSNMAVQGRNYIPGPSYRQQRVSTTVTQNNNSEFAWPRASSWALNGRNSLMNPGPAMASHKEGEDRFFPLSGSLIFGKQGTGRDNVDADKVMITNEEEIKTTNPVATESYGQVATNHQSAQAQAQTGWVQNQGILPGMVWQDRDVYLQGPIWAKIPHTDGNFHPSPLMGGFGMKHPPPQILIKNTPVPADPPTAFNKDKLNSFITQYSTGQVSVEIEWELQKENSKRWNPEIQYTSNYYKSNNVEFAVNTEGVYSEPRPIGTRYLTRNL

SEQ ID NO: 609 - protein, 736 aa, Artificial Sequence
  source: /note="Description of Artificial Sequence: Synthetic polypeptide"
MAADGYLPDWLEDNLSEGIREWWALKPGAPQPKANQQHQDNARGLVLPGYKYLGPGNGLDKGEPVNAADAAALEHDKAYDQQLKAGDNPYLKYNHADAEFQERLKEDTSFGGNLGRAVFQAKKRLLEPLGLVEEAAKTAPGKKRPVEQSPQEPDSSAGIGKSGAQPAKKRLNFGQTGDTESVPDPQPIGEPPAAPSGVGSLTMASGGGAPVADNNEGADGVGSSSGNWHCDSQWLGDRVITTSTRTWALPTYNNHLYKQISNSTSGGSSNDNAYFGYSTPWGYFDFNRFHCHFSPRDWQRLINNNWGFRPKRLNFKLFNIQVKEVTDNNGVKTIANNLTSTVQVFTDSDYQLPYVLGSAHEGCLPPFPADVFMIPQYGYLTLNDGSQAVGRSSFYCLEYFPSQMLRTGNNFQFSYEFENVPFHSSYAHSQSLDRLMNPLIDQYLYYLSKTINGSGQNQQTLKFSVAGPSNMAVQGRNYIPGPSYRQQRVSTTVTQNNNSEFAWPRASSWALNGRNSLMNPGPAMASHKEGEDRFFPLSGSLIFGKQGTGRDNVDADKVMITNEEEIKTTNPVATESYGQVATNHQSAQAQAQTGWVQNQGILPGMVWQDRDVYLQGPIWAKIPHTDGNFHPSPLMGGFGMKHPPPQILIKNTPVPADPPTAFNKDKLNSFITQYSTGQVSVEIEWERQKENSKRWNPEIQYTSNYYKSNNVEFAVNTEGVYSEPRPIGTRYLTRNL

SEQ ID NO: 610 - protein, 736 aa, Artificial Sequence
  source: /note="Description of Artificial Sequence: Synthetic polypeptide"
MAADGYLPDWLEDNLSEGIREWWALKPGAPQPKANQQHQDNARGLVLPGYKYLGPGNGLDKGEPVNAADAAALEHDKAYDQQLKAGDNPYLKYNHADAEFQERLKEDTSFGGNLGRAVFQAKKRLLEPLGLVEEAAKTAPGKKRPVEQSPQEPDSSAGIGKSGAQPAKKRLNFGQTGDTESVPDPQPIGEPPAAPSGVGSLTMASGGGAPVADNNEGADGVGSSSGNWHCDSQWLGDRVITTSTRTWALPTYNNHLYKQISNSTSGGSSNDNAYFGYSTPWGYFDFNRFHCHFSPRDWQRLINNNWGFRPKRLNFKLFNIQVKEVTDNNGVKTIANNLTSTVQVFADSDYQLPYVLGSAHEGCLPPFPADVFMIPQYGYLTLNDGSQAVGRSSFYCLEYFPSQMLRTGNNFQFSYEFENVPFHSSYAHSQSLDRLMNPLIDQYLYYLSKTINGSGQNQQTLKFSVAGPSNMAVQGRNYIPGPSYRQQRVSTTVTQNNNSEFAWPRASSWALNGRNSLMNPGPAMASHKEGEDRFFPLSGSLIFGKQGTGRDNVDADKVMITNEEEIKTTNPVATESYGQVATNHQSAQAQAQTGWVQNQGILPGMVWQDRDVYLQGPIWAKIPHTDGNFHPSPLMGGFGMKHPPPQILIKNTPVPADPPTAFNKDKLNSFITQYSTGQVSVEIEWELQKENSKRWNPEIQYTSNYYKSNNVEFAVNTEGVYSEPRPIGTRYLTRNL

SEQ ID NO: 611 - protein, 736 aa, Artificial Sequence
  source: /note="Description of Artificial Sequence: Synthetic polypeptide"
MAADGYLPDWLEDNLSEGIREWWALKPGAPQPKANQQHQDNARGLVLPGYKYLGPGNGLDKGEPVNAADAAALEHDKAYDQQLKAGDNPYLKYNHADAEFQERLKEDTSFGGNLGRAVFQAKKRLLEPLGLVEEAAKTAPGKKRPVEQSPQEPDSSAGIGKSGAQPAKKRLNFGQTGDTESVPDPQPIGEPPAAPSGVGSLTMASGGGAPVADNNEGADGVGSSSGNWHCDSQWLGDRVITTSTRTWALPTYNNHLYKQISNSTSGGSSNDNAYFGYSTPWGYFDFNRFHCHFSPRDWQRLINNNWGFRPKRLNFKLFNIQVKEVTDNNGVKTIANNLTSTVQVFTDSDYQLPYVLGSAHEGCLPPFPADVFMIPQYGYLTLNDGSQAVGRSSFYCLEYFPSQMLRTGNNFQFSYEFENVPFHSSYAHSQSLDRLMNPLIDQYLYYLSKTINGSGQNQQTLKFSVAGPSNMAVQGRNYIPGPSYRQQRVSTTVTQNNNSEIAWPRASSWALNGRNSLMNPGPAMASHKEGEDRFFPLSGSLIFGKQGTGRDNVDADKVMITNEEEIKTTNPVATESYGQVATNHQSAQAQAQTGWVQNQGILPGMVWQDRDVYLQGPIWAKIPHTDGNFHPSPLMGGFGMKHPPPQILIKNTPVPADPPTAFNKDKLNSFITQYSTGQVSVEIEWELQKENSKRWNPEIQYTSNYCKSNNVEFAVNTEGVYSEPRPIGTRYLTRNL

SEQ ID NO: 612 - protein, 736 aa, Artificial Sequence; identical to SEQ ID NO: 608
  source: /note="Description of Artificial Sequence: Synthetic polypeptide"

SEQ ID NO: 613 - DNA, 2208 bp, Artificial Sequence
  source: /note="Description of Artificial Sequence: Synthetic polynucleotide"
atggctgccgatggttatcttccagattggctcgaggacaaccttagtgaaggaattcgcgagtggtgggctttgaaacctggagcccctcaacccaaggcaaatcaacaacatcaagacaacgctcgaggtcttgtgcttccgggttacaaataccttggacccggcaacggactcgacaagggggagccggtcaacgcagcagacgcggcggccctcgagcacgacaaggcctacgaccagcagctcaaggccggagacaacccgtacctcaagtacaaccacgccgacgccgagttccaggagcggctcaaagaagatacgtcttttgggggcaacctcgggcgagcagtcttccaggccaaaaagaggcttcttgaacctcttggtctggttgaggaagcggctaagacggctcctggaaagaagaggcctgtagagcagtctcctcaggaaccggactcctccgcgggtattggcaaatcgggtgcacagcccgctaaaaagagactcaatttcggtcagactggcgacacagagtcagtcccagaccctcaaccaatcggagaacctcccgcagccccctcaggtgtgggatctcttacaatggcttcaggtggtggcgcaccagtggcagacaataacgaaggtgccgatggagtgggtagttcctcgggaaattggcattgcgattcccaatggctgggggacagagtcatcaccaccagcacccgaacctgggccctgcccacctacaacaatcacctctacaagcaaatctccaacagcacatctggaggatcttcaaatgacaacgcctacttcggctacagcaccccctgggggtattttgacttcaacagattccactgccacttctcaccacgtgactggcagcgactcatcaacaacaactggggattccggcctaagcgactcaacttcaagctcttcaacattcaggtcaaagaggttacggacaacaatggagtcaagaccatcgccaataaccttaccagcacggtccaggtcttcacggactcagactatcagctcccgtacgtgctcgggtcggctcacgagggctgcctcccgccgttcccagcggacgttttcatgattcctcagtacgggtatctgacgcttaatgatggaagccaggccgtgggtcgttcgtccttttactgcctggaatatttcccgtcgcaaatgctaagaacgggtaacaacttccagttcggctacgagtttgagaacgtacctttccatagcagctacgctcacagccaaagcctggaccgactaatgaatccactcatcgaccaatacttgtactatctctcaaagactattaacggttctggacagaatcaacaaacgctaaaattcagtgtggccggacccagcaacatggctgtccagggaagaaactacatacctggacccagctaccgacaacaacgtgtctcaaccactgtgactcaaaacaacaacagcgaatttgcttggcctggagcttcttcttgggctctcaatggacgtaatagcttgatgaatcctggacctgctatggccagccacaaagaaggagaggaccgtttctttcctttgtctggatctttaatttttggcaaacaaggaactggaagagacaacgtggatgcggacaaagtcatgataaccaacgaagaagaaattaaaactactaacccggtagcaacggagtcctatggacaagtggccacaaaccaccagagtgcccaagcacaggcgcagaccggctgggttcaaaaccaaggaatacttccgggtatggtttggcaggacagagatgtgtacctgcaaggacccatttgggccaaaattcctcacacggacggcaactttcacccttctccgctgatgggagggtttggaatgaagcacccgcctcctcagatcctcatcaaaaacacacctgtacctgcggatcctccaacggccttcaacaaggacaagctgaactctttcatcacccagtattctactggccaagtcagcgtggagatcgagtgggagctgcagaaggaaaacagcaagcgctgggacccggagatccagtacacttccaactattacaagtctaataatgttgaatttgctgttaatactgaaggtgtatatagtgaaccccgccccattggcaccagatacctgactcgtaatctg

SEQ ID NO: 614 - DNA, 2208 bp, Artificial Sequence
  source: /note="Description of Artificial Sequence: Synthetic polynucleotide"
atggctgccgatggttatcttccagattggctcgaggacaaccttagtgaaggaattcgcgagtggtgggctttgaaacctggagcccctcaacccaaggcaaatcaacaacatcaagacaacgctcgaggtcttgtgcttccgggttacaaataccttggacccggcaacggactcgacaagggggagccggtcaacgcagcagacgcggcggccctcgagcacgacaaggcctacgaccagcagctcaaggccggagacaacccgtacctcaagtacaaccacgccgacgccgagttccaggagcggctcaaagaagatacgtcttttgggggcaacctcgggcgagcagtcttccaggccaaaaagaggcttcttgaacctcttggtctggttgaggaagcggctaagacggctcctggaaagaagaggcctgtagagcagtctcctcaggaaccggactcctccgcgggtattggcaaatcgggtgcacagcccgctaaaaagagactcaatttcggtcagactggcgacacagagtcagtcccagaccctcaaccaatcggagaacctcccgcagccccctcaggtgtgggatctcttacaatggcttcaggtggtggcgcaccagtggcagacaataacgaaggtgccgatggagtgggtagttcctcgggaaattggcattgcgattcccaatggctgggggacagagtcatcaccaccagcacccgaacctgggccctgcccacctacaacaatcacctctacaagcaaatctccaacagcacatctggaggatcttcaaatgacaacgcctacttcggctacagcaccccctgggggtattttgacttcaacagattccactgccgcttctcaccacgtgactggcagcgactcatcaacaacaactggggattccggcctaagcgactcaacttcaagctcttcaacattcaggtcaaagaggttacggacaacaatggagtcaagaccatcgccaataaccttaccagcacggtccaggtcttcacggactcagactatcagctcccgtacgtgctcgggtcggctcacgagggctgcctcccgccgttcccagcggacgttttcatgattcctcagtacgggtatctgacgcttaatgatggaagccaggccgtgggtcgttcgtccttttactgcctggaatatttcccgtcgcaaatgctaagaacgggtaacaacttccagttcagctacgagtttgagaacgtacctttccatagcagctacgctcacagccaaagcctggaccgactaatgaatccactcatcgaccaatacttgtactatctctcaaagactattaacggttctggacagaatcaacaaacgctaaaattcagtgtggccggacccagcaacatggctgtccagggaagaaactacatacctggacccagctaccgacaacaacgtgtctcaaccactgtgactcaaaacaacaacagcgaatttgcttggcctggagcttcttcttgggctctcaatggacgtaatagcttgatgaatcctggacctgctatggccagccacaaagaaggagaggaccgtttctttcctttgtctggatctttaatttttggcaaacaaggaactggaagagacaacgtggatgcggacaaagtcatgataaccaacgaagaagaaattaaaactactaacccggtagcaacggagtcctatggacaagtggccacaaaccaccagagtgcccaagcacaggcgcagaccggctgggttcaaaaccaaggaatacttccgggtatggtttggcaggacagagatgtgtacctgcaaggacccatttgggccaaaattcctcacacggacggcaactttcacccttctccgctgatgggagggtttggaatgaagcacccgcctcctcagatcctcatcaaaaacgcccctgtacctgcggatcctccaacggccttcaacaaggacaagctgaactctttcatcacccagtattctactggccaagtcagcgtggagatcgagtgggagctgcagaaggaaaacagcaagcgctggaacccggagatccagtacacttccaactattacaagtctaataatgttgaatttgctgttaatactgaaggtgtatatagtgaaccccgccccattggcaccagatacctgactcgtaatctg

SEQ ID NO: 615 - DNA, 2208 bp, Artificial Sequence
  source: /note="Description of Artificial Sequence: Synthetic polynucleotide"
atggctgccgatggttatcttccagattggctcgaggacaaccttagtgaaggaattcgcgagtggtgggctttgaaacctggagcccctcaacccaaggcaaatcaacaacatcaagacaacgctcgaggtcttgtgcttccgggttacaaataccttggacccggcaacggactcgacaagggggagccggtcagcgcagcagacgcggcggccctcgagcacgacaaggcctacgaccagcagctcaaggccggagacaacccgtacctcaagtacaaccacgccgacgccgagttccaggagcggctcaaagaagatacgtcttttgggggcaacctcgggcgagcagtcttccaggccaaaaagaggcttcttgaacctcttggtctggttgaggaagcggctaagacggctcctggaaagaagaggcctgtagagcagtctcctcaggaaccggactcctccgcgggtattggcaaatcgggtgcacagcccgctaaaaagagactcaatttcggtcagactggcgacacagagtcagtcccagaccctcaaccaatcggagaacctcccgcagccccctcaggtgtgggatctcttacaatggcttcaggtggtggcgcaccagtggcagacaataacgaaggtgccgatggagtgggtagttcctcgggaaattggcattgcgattcccaatggctgggggacagagtcatcaccaccagcacccgaacctgggccctgcccacctacaacaatcacctctacaagcaaatctccaacagcacatctggaggatcttcaaatgacaacgcctacttcggctacagcaccccctgggggtattttgacttcaacagattccactgccacttctcaccgcgtgactggcagcgactcatcaacaacaactggggattccggcctaagcgactcaacttcaagctcttcaacattcaggtcaaagaggttacggacaacaatggagtcaagaccatcgccaataaccttaccagcacggtccaggtcttcacggactcagactatcagctcccgtacgtgctcgggtcggctcacgagggctgcctcccgccgttcccagcggacgttttcatgattcctcagtacgggtatctgacgcttaatgatggaagccaggccgtgggtcgttcgtccttttactgcctggaatatttcccgtcgcaaatgctaagaacgggtaacaacttccagttcagctacgagtttgagaacgtacctttccatagcagctacgctcacagccaaagcctggaccgactaatgaatccactcatcgaccaatacttgtactatctctcaaagactattaacggttctggacagaatcaacaaacgctaaaattcagtgtggccggacccagcaacatggctgtccagggaagaaactacatacctggacccagctaccgacaacaacgtgtctcaaccactgtgactcaaaacaacaacagcgaatttgcttggcctggagcttcttcttgggctctcaatggacgtaatagcttgatgaatcctggacctgctatggccagccacaaagaaggagaggaccgtttctttcctttgtctggatctttaatttttggcaaacaaggaactggaagagacaacgtggatgcggacaaagtcatgataaccaacgaagaagaaattaaaactactaacccggtagcaacggagtcctatggacaagtggccacaaaccaccagagtgcccaagcacaggcgcagaccggctgggttcaaaaccaaggaatacttccgggtatggtttggcaggacagagatgtgtacctgcaaggacccatttgggccaaaattcctcacacggacggcaactttcacccttctccgctgatgggagggtttggaatgaagcacccgcctcctcagatcctcatcaaaaacacacctgtacctgcggatcctccaacggccttcaacaaggacaagctgaactctttcatcacccagtattctactggccaagtcagcgtggagatcgagtgggagctgcagaaggaaaacagcaagcgctggaacccggagatccagtacacttccaactattacaagtctaataatgttgaatttgctgttaatactgaaggtgtatatagtgaaccccgccccattggcaccagatacctgactcgtaatctg

SEQ ID NO: 616 - DNA, 2208 bp, Artificial Sequence
  source: /note="Description of Artificial Sequence: Synthetic polynucleotide"
atggctgccgatggttatcttccagattggctcgaggacaaccttagtgaaggaattcgcgagtggtgggctttgaaacctggagcccctcaacccaaggcaaatcaacaacatcaagacaacgctcgaggtcttgtgcttccgggttacaaataccttggacccggcaacggactcgacaagggggagccggtcaacgcagcagacgcggcggccctcgagcacgacaaggcctacgaccagcagctcaaggccggagacaacccgtacctcaagtacaaccacgccgacgccgagttccaggagcggctcaaagaagatacgtcttttgggggcaacctcgggcgagcagtcttccaggccaaaaagaggcttcttgaacctcttggtctggttgaggaagcggctaagacggctcctggaaagaagaggcctgtagagcagtctcctcaggaaccggactcctccgcgggtattggcaaatcgggtgcacagcccgctaaaaagagactcaatttcggtcagactggcgacacagagtcagtcccagaccctcaaccaatcggagaacctcccgcagccccctcaggtgtgggatctcttacaatggcttcaggtggtggcgcaccagtggcagacaataacgaaggtgccgatggagtgggtagttcctcgggaaattggcattgcgattcccaatggctgggggacagagtcatcaccaccagcacccgaacctgggccctgcccacctacaacaatcacctctacaagcaaatctccaacagcacatctggaggatcttcaaatgacaacgcctacttcggctacagcaccccctgggggtattttgacttcaacagattccactgccacttctcaccacgtgactggcagcgactcatcaacaacaactggggattccggcctaagcgactcaacttcaagctcttcaacattcaggtcaaagaggttacggacaacaatggagtcaagaccatcgccaataaccttaccagcacggtccaggtcttcacggactcagactatcagctcccgtacgtgctcgggtcggctcacgagggctgcctcccgccgttcccagcggacgttttcatgattcctcagtacgggtatctgacgcttaatgatggaagccaggccgtgggtcgttcgtccttttactgcctggaatatttcccgtcgcaaatgctaagaacgggtaacaacttccagttcagctacgagtttgagaacgtacctttccatagcagctacgctcacagccaaagcctggaccgactaatgaatccactcatcgaccaatacttgtactatctctcaaagactattaacggttctggacagaatcaacaaacgctaaaattcagtgtggccggacccagcaacacggctgtccagggaagaaactacatacctggacccagctaccgacaacaacgtgtctcaaccactgtgactcaaaacaacaacagcgaatttgcttggcctggagcttcttcttgggctctcaatggacgtaatagcttgatgaatcctggacctgctatggccagccacaaagaaggagaggaccgtttctttcctttgtctggatctttaatttttggcaaacaaggaactggaagagacaacgtggatgcggacaaagtcatgataaccaacgaagaagaaattaaaactactaacccggtagcaacggagtcctatggacaagtggccacaaaccaccagagtgcccaagcacaggcgcagaccggctgggttcaaaaccaaggaatacttccgggtatggtttggcaggacagagatgtgtacctgcaaggacccatttgggccaaaattcctcacacggacggcaactttcacccttctccgctgatgggagggtttggaatgaagcacccgcctcctcagatcctcatcaaaaacacacctgtacctgcggatcctccaacggccttcaacaaggacaagctgaactctttcatcacccagtattctactggccaagtcagcgtggagatcgagtgggagctgcagaaggaaaacagcaagcgctggaacccggagatccagtacacttccaactattacaagtctaataatgttgaatttgctgttaatactgaaggtgtatatagtgaaccccgccccattggcaccagatacctgactcgtaatctg

SEQ ID NO: 617 - DNA, 2208 bp, Artificial Sequence
  source: /note="Description of Artificial Sequence: Synthetic polynucleotide"
atggctgccgatggttatcttccagattggctcgaggacaaccttagtgaaggaattcgcgagtggtgggctttgaaacctggagcccctcaacccaaggcaaatcaacaacatcaagacaacgctcgaggtcttgtgcttccgggttacaaataccttggacccggcaacggactcgacaagggggagccggtcaacgcagcagacgcggcggccctcgagcacgacaaggcctacgaccagcagctcaaggccggagacaacccgtacctcaagtacaaccacgccgacgccgagttccaggagcggctcaaagaagatacgtcttttgggggcaacctcgggcgagcagtcttccaggccaaaaagaggcttcttgaacctcttggtctggttgaggaagcggctaagacggctcctggaaagaagaggcctgtagagcagtctcctcaggaaccggactcctccgcgggtattggcaaatcgggtgcacagcccgctaaaaagagactcaatttcggtcagactggcgacacagagtcagtcccagaccctcaaccaatcggagaacctcccgcagccccctcaggtgtgggatctcttacaatggcttcaggtggtggcgcaccagtggcagacaataacgaaggtgccgatggagtgggtagttcctcgggaaattggcattgcgattcccaatggctgggggacagagtcatcaccaccagcacccgaacctgggccctgcccacctacaacaatcacctctacaagcaaatctccaacagcacatctggaggatcttcaaatgacaacgcctacttcggctacagcaccccctgggggtattttgacttcaacagattccactgccacttctcaccacgtgactggcagcgactcatcaacaacaactggggattccggcctaagcggctcaacttcaagctcttcaacattcaggtcaaagaggttacggacaacaatggagtcaagaccatcgccaataaccttaccagcacggtccaggtcttcacggactcagactatcagctcccgtacgtgctcgggtcggctcacgagggctgcctcccgccgttcccagcggacgttttcatgattcctcagtacgggtatctgacgcttaatgatggaagccaggccgtgggtcgttcgtccttttactgcctggaatatttcccgtcgcaaatgctaagaacgggtagcaacttccagttcagctacgagtttgagaacgtacctttccatagcagctacgctcacagccaaagcctggaccgactaatgaatccactcatcgaccaatacttgtactatctctcaaagactattaacggttctggacagaatcaacaaacgctaaaattcagtgtggccggacccagcaacatggctgtccagggaagaaactacatacctggacccagctaccgacaacaacgtgtctcaaccactgtgactcaaaacaacaacagcgaatttgcttggcctggagcttcttcttgggctctcaatggacgtaatagcttgatgaatcctggacctgctatggccagccacaaagaaggagaggaccgtttctttcctttgtctggatctttaatttttggcaaacaaggaactggaagagacaacgtggatgcggacaaagtcatgataaccaacgaagaagaaattaaaactactaacccggcagcaacggagtcctatggacaagtggccacaaaccaccagagtgcccaagcacaggcgcagaccggctgggttcaaaaccaaggaatacttccgggtatggtttggcaggacagagatgtgtacctgcaaggacccatttgggccaaaattcctcacacggacggcaactttcacccttctccgctgatgggagggtttggaatgaagcacccgcctcctcagatcctcatcaaaaacacacctgtacctgcggatcctccaacggccttcaacaaggacaagctgaactctttcatcacccagtattctactggccaagtcagcgtggagatcgagtgggagctgcagaaggaaaacagcaagcgctggaacccggagatccagcacacttccaactattacaagtctaataatgttgaatttgctgttaatactgaaggtgtatatagtgaaccccgccccattggcaccagatacctgactcgtaatctg

SEQ ID NO: 618 - DNA, 2208 bp, Artificial Sequence
  source: /note="Description of Artificial Sequence: Synthetic polynucleotide"
atggctgccgatggttatcttccagattggctcgaggacaaccttagtgaaggaattcgcgagtggtgggctttgaaacctggagcccctcaacccaaggcaaatcaacaacatcaagacaacgctcgaggtcttgtgcttccgggttacaaataccttggacccggcaacggactcgacaagggggagccggtcaacgcagcagacgcggcggccctcgagcacgacaaggcctacgaccagcagctcaaggccggagacaacccgtacctcaagtacaaccacgccgacgccgagttccaggagcggctcaaagaagatacgtcttttgggggcaacctcgggcgagcagtcttccaggccaaaaagaggcttcttgaacctcttggtctggttgaggaagcggctaagacggctcctggaaagaagaggcctgtagagcagtctcctcaggaaccggactcctccgcgggtattggcaaatcgggtgcacagcccgctaaaaagagactcaatttcggtcagactggcgacacagagtcagtcccagaccctcaaccaatcggagaacctcccgcagccccctcaggtgtgggatctcttacaatggcttcaggtggtggcgcaccagtggcagacaataacgaaggtgccgatggagtgggtagttcctcgggaaattggcattgcgattcccaatggctgggggacagagtcatcaccaccagcacccgaacctgggccctgcccacctacaacaatcacctctacaagcaaatctccaacagcacatctggaggatcttcaaatgacaacgcctacttcggctacagcaccccctgggggtattttgacttcaacagattccactgccacttctcaccacgtgactggcagcgactcatcaacaacaactggggattccggcctaagcgactcaacttcaggctcttcaacattcaggtcaaagaggttacggacaacaatggagtcaagaccatcgccaataaccttaccagcacggtccaggtcttcacggactcagactatcagctcccgtacgtgctcgggtcggctcacgagggctgcctcccgccgttcccagcggacgttttcatgattcctcagtacgggtatctgacgcttaatgatggaagccaggccgtgggtcgttcgtccttttactgcctggaatatttcccgtcgcaaatgctaagaacgggtaacaacttccagttcagctacgagtttgagaacgtacctttccatagcagctacgctcacagccaaagcctggaccgactaatgaatccactcatcgaccaatacttgtactatctctcaaagactattaacggttctggacagaatcaacaaacgctaaaattcagtgtggccggacccagcaacatggctgtccagggaagaaactacatacctggacccagctaccgacaacaacgtgtctcaaccactgtgactcaaaacaacaacagcgaatttgcttggcctggagcttcttcttgggctctcaatggacgtaatagcttgatgaatcctggacctgctatggccagccacaaagaaggagaggaccgtttctttcctttgtctggatctttaatttttggcaaacaaggaactggaagagacaacgtggatgcggacaaagtcatgataaccaacgaagaagaaattaaaactactaacccggtagcaacggagtcctatggacaagtggccacaaaccaccagagtgcccaagcacaggcgcagaccggctgggttcaaagccaaggaatacttccgggtatggtttggcaggacagagatgtgtacctgcaaggacccatttgggccaaaattcctcacacggacggcaactttcacccttctccgctgatgggagggtttggaatgaagcacccgcctccccagatcctcatcaaaaacacacctgtacctgcggatcctccaacggccttcaacaaggacaagctgaactctttcatcacccagtattctactggccaagtcagcgtggagatcgagtgggagctgcagaaggaaaacagcaagcgctggaacccggagatccagtacacttccaactattacaagtctaataatgttgaatttgctgttaatactgaaggtgtatatagtgaaccccgccccattggcaccagatacctgactcgtaatctg

SEQ ID NO: 619 - DNA, 2205 bp, Artificial Sequence
  source: /note="Description of Artificial Sequence: Synthetic polynucleotide"
atggctgccgatggttatcttccagattggctcgaggacaaccttagtgaaggaattcgcgagtggtgggctttgaaacctggagcccctcaacccaaggcaaatcaacaacatcaagacaacgcccgaggtcttgtgcttccgggttacaaataccttggacccggcaacggactcgacaagggggagccggtcaacgcagcagacgcggcggccctcgagcacgacaaggcctacgaccagcagctcaaggccggagacaacccgtacctcaagtacaaccacgccgacgccgagttccaggagcggctcaaagaagatacgtcttttgggggcaacctcgggcgagcagtcttccaggccaaaaagaggcttcttgaacctcttggtctggttgaggaagcggctaagacggctcctggaaagaagaggcctgtagagcagtctcctcaggaaccggactcctccgcgggtattggcaaatcgggtgcacagcccgctaaaaagagactcaatttcggtcagactggcgacacagagtcagtcccagaccctcaaccaatcggagaacctcccgcagccccctcaggtgtgggatctcttacaatggcttcaggtggtggcgcaccagtggcagacaataacgaaggtgccgatggagtgggtagttcctcgggaaattggcattgcgattcccaatggctgggggacagagtcatcaccaccagcacccgaacctgggccctgcccacctacaacaatcacctctacaagcaaatctccaacagcacatctggaggatcttcaaatgacaacgcctacttcggctacagcaccccctggaggtattttgacttcaacagattccactgccacttctcaccacgtgactggcagcgactcatcaacaactggggattccggcctaagcgactcaacttcaagctcttcaacattcaggtcaaagaggttacggacaacaatggagtcaagaccatcgccaataaccttaccagcacggtccaggccttcacggactcagactatcagctcccgtacgtgctcgggtcggctcacgagggctgcctcccgccgttcccagcggacgttttcatgattcctcagtacgggtatctgacgcttaatgatggaagccaggccgtgggtcgttcgtccttttactgcctggaatatttcccgtcgcaaatgctaagaacgggtaacaacttccagttcagctacgagtttgagaacgtacctttccatagcagctacgctcacagccaaagcctggaccgactaatgaatccactcatcgaccaatacttgtactatctctcaaagactattaacggttctggacagaatcaacaaacgctaaaattcagtgtggccggacccagcaacatggctgtccagggaagaaactacatacctggacccagctaccgacaacaacgtgtctcaaccactgtgactcaaaacaacaacagcgaatttgcttggcctggagcttcttcttgggctctcaatggacgtaatagcttgatgaatcctggacctgctatggccagccacaaagaaggagaggaccgtttctttcctttgtctggatctttaatttttggcaaacaaggaactggaagagacaacgtggatgcggacaaagtcatgataaccaacgaagaagaaattaaaactactaacccggtagcaacggagtcctatggacaagtggccacaaaccaccagagtgcccaagcacaggcgcagaccggctgggttcaaaaccaaggaatacttccgggtatggtttggcaggacagagatgtgtacctgcaaggacccatttgggccaaaattcctcacacggacggcaactttcacccttctccgctgatgggagggtttggaatgaagcacccgcctcctcagatcctcatcaaaaacacacctgtacctgcggatcctccaacggccttcaacaaggacgagctgaactctttcatcacccagtattctactggccaagtcagcgtggagatcgagtgggagctgcagaaggaaaacagcaagcgctggaacccggagatccagtacacttccaactattacaagtctaataatgttgaatttgctgttaatactgaaggtgtatatagtgaaccccgccccattggcaccagatacctgactcgtaatctg

SEQ ID NO: 620 - DNA, 2205 bp, Artificial Sequence
  source: /note="Description of Artificial Sequence: Synthetic polynucleotide"
atggctgccgatggttatcttccagattggctcgaggacaaccttagtgaaggaattcgcgagtggtgggctttgaaacctggagcccctcaacccaaggcaaatcaacaacatcaagacaacgctcgaggtcttgtgcttccgggttacaaataccttggacccggcaacggactcgacaagggggagccggtcaacgcagcagacgcggcggccctcgagcacgacaaggcctacgaccagcagctcaaggccggagacaacccgtacctcaagtacaaccacgccgacgccgagttccaggagcggctcaaagaagatacgtcttttgggggcaacctcgggcgagcagtcttccaggacaaaaagaggcttcttgaacctcttggtctggttgaggaagcggctaagacggctcctggaaagaagaggcctgtagagcagtctcctcaggaaccggactcctccgcgggtattggcaaatcgggtgcacagcccgctaaaaagagactcaatttcggtcagactggcgacacagagtcagtcccagaccctcaaccaatcggagaacctcccgcagccccctcaggtgtgggatctcttacaatggcttcaggtggtggcgcaccagtggcagacaataacgaaggtgccgatggagtgggtagttcctcgggaaattggcattgcgattcccaatggctgggggacagagtcatcaccaccagcacccgaacctgggccctgcccacctacaacaatcacctctacaagcaaatctccaacagcacatctggaggatcttcaaatgacaacgcctacttcggctacagcaccccctgggggtattttgacttcaacagattccactgccacttctcaccacgtgactggcagcgactcatcaacaactggggattccggcctaagcgactcaacttcaagctcttcaacattcaggtcaaagaggttacggacaacaatggagtcaagaccatcgccaataaccttaccagcacggtccaggtcttcacggactcagactatcagctcccgtacgtgctcgggtcggctcacgagggctgcctcccgccgttcccagcggacgttttcatgattcctcagtacgggtatctgacgcttaatgatggaagccaggccgtgggtcgttcgtccttttactgcctggaatatttcccgtcgcaaatgctaagaacgggtaacaacttccaattcagctacgagtttgagaacgtacctttccatagcagctacgctcacagccaaagcctggaccgactaatgaatccactcatcgaccaatacttgtactatctctcaaagactattaacggttctggacagaatcaacaaacgctaaaattcagtgtggccggacccagcaacatggctgtccagggaagaaactacatacctggacccagctaccgacaacaacgtgtctcaaccactgtgactcaaaacaacaacagcgaatttgcttggcctggagcttcttcttgggctctcaatggacgtaatagcttgatgaatcctggacctgctatggccagccacaaagaaggagaggaccgtttctttcctttgtctggatctttaatttttggcaaacaaggaactggaagagacaacgtggatgcggacaaagtcatgataaccaacgaagaagaaattaaaactactaacccggtagcaacggagtcctatggacaagtggccacaaaccaccagagtgcccaagcacaggcgcagaccggctgggttcaaaaccaaggaatacttccgggtatggtttggcaggacagagatgtgtacctgcaaggacccatttgggccaaaattcctcacacggacggcaactttcacccttctccgctgatgggagggtttggaatgaagcacccgcctcctcagatcctcatcaaaaacacacctgtacctgcggatcctccaacggccttcaacaaggacaagctgaactctttcatcacccagtattctactggccaagtcagcgtggagatcgagtgggagctgcagaaggaaaacagcaagcgctggaacccggagatccagtacacttccaactattacaagtctaataatgttgaatttgctgttaatactgaaggtgtatatagtgaaccccgccccattggcaccagatacctgactcgtaatctg

SEQ ID NO: 621 - DNA, 2208 bp, Artificial Sequence
  source: /note="Description of Artificial Sequence: Synthetic polynucleotide"
atggctgccgatggttatcttccagattggctcgaggacaaccttagtgaaggaattcgcgagtggtgggctttgaaacctggagcccctcaacccaaggcaaatcaacaacatcaagacaacgctcgaggtcttgtgcttccgggttacaaataccttggacccggcaacggactcgacaagggggagccggtcaacgcagcagacgcggcggccctcgagcacgacaaggcctacgaccagcagctcaaggccggagacaacccgtacctcaagtacaaccacgccgacgccgagttccaggagcggctcaaagaagatacgtcttttgggggcaacctcgggcgagcagtcttccaggccaaaaagaggcttcttgaacctcttggtctggttgaggaagcggctaagacggctcctggaaagaagaggcctgtagagcagtctcctcaggaaccggactcctccgcgggtattggcaaatcgggtgcacagcccgctaaaaagagactcaatttcggtcagactggcgacacagagtcagtcccagaccctcaaccaatcggagaacctcccgcagccccctcaggtgtgggatctcttacaatggcttcaggtggtggcgcaccagtggcagacaataacgaaggtgccgatggagtgggtagttcctcgggaaattggcattgcgattcccaatggctgggggacagagccatcaccaccagcacccgaacctgggccctgcccacctacaacaatcacctctacaagcaaatctccaacagcacatctggaggatcttcaaatgacaacgcctacttcggctacagcaccccctgggggtattttgacttcaacagattccactgccacttctcaccacgtgactggcagcggctcatcaacaacaactggggattccggcctaagcgactcaacttcaagctcttcaacattcaggtcaaagaggttacggacaacaatggagtcaagaccatcgccaataaccttaccagcacggtccaggtcttcacggactcagactatcagctcccgtacgtgctcgggtcggctcacgagggctgcctcccgccgttcccagcggacgttttcatgattcctcagtacgggtatctgacgcttaatgatggaagccaggccgtgggtcgttcgtccttttactgcctggaatatttcccgtcgcaaatgctaagaacgggtaacaacttccagttcagctacgagtttgagaacgtacctttccatagcagctacgctcacagccaaagcctggaccgactaatgaatccactcatcgaccaatacttgtactatctctcaaagactattaacggttctggacagaatcaacaaacgctaaaattcagtgtggccggacccagcaacatggctgtccagggaagaaactacatacctggacccagctaccgacaacaacgtgtctcaaccactgtgactcaaaacaacaacagcgaatttgcttggcctggagcttcttcttgggctctcaatggacgtaatagcttgatgaatcctggacctgctatggccagccacaaagaaggagaggaccgtttctttcctttgtctggatctttaatttttggcaaacaaggaactggaagagacaacgtggatgcggacaaagtcatgacaaccaacgaagaagaaattaaaactactaacccggtagcaacggagtcctatggacaagtggccacaaaccaccagagtgcccaagcacaggcgcagaccggctgggttcaaaaccaaggaatacttccgggtatggtttggcaggacagagatgtgtacctgcaaggacccatttgggccaaaattcctcacacggacggcaactttcacccttctccgctgatgggagggtttggaatgaagcacccgcctcctcagatcctcatcaaaaacacacctgtacctgcggatcctccaacggccttcaacaaggacaagctgaactctttcatcacccagtattctactggccaagtcagcgtggagatcgagtgggagctgcagaaggaaaacagcaagcgctggaacccggagatccagtacacttccaactattacaagtctaataatgttgaatttgctgttaatactgaaggtgtatatagtgaaccccgccccattggcaccagatacctgactcgtaatctg

SEQ ID NO: 622 - DNA, 2208 bp, Artificial Sequence
  source: /note="Description of Artificial Sequence: Synthetic polynucleotide"
atggctgccgatggttatcttccagattggctcgaggacaaccttagtgaaggaattcgcgagtggtgggctttgaaacctggagcccctcaacccaaggcaaatcaacaacatcaagacaacgctcgaggtcttgtgcttccgggttacaaataccttggacccggcaacggactcgacaagggggagccggtcaatgcagcagacgcggcggccctcgagcacgacaaggcctacgaccagcagctcaaggccggagacaacccgtacctcaagtacaaccacgccgacgccgagttccaggagcggctcaaagaagatacgtcttttgggggcaacctcgggcgagcagtcttccagaccaaaaagaggcttcttgaacctcttggtctggttgaggaagcggctaagacggctcctggaaagaagaggcctgtagagcagtctcctcaggaaccgggctcctccgcgggtattggcaaatcgggtgcacagcccgctaaaaagagactcaatttcggtcagactggcgacacagagtcagtcccagaccctcaaccaatcggagaacctcccgcagccccctcaggtgtgggatctcttacaatggcttcaggtggtggcgcaccagtggcagacaataacgaaggtgccgatggagtgggtagttcctcgggaaattggcattgcgattcccaatggctgggggacagagtcatcaccaccagcacccgaacctgggccctgcccacctacaacaatcacctctacaagcaaatctccaacagcacatctggaggatcttcaaatgacaacgcctacttcggctacagcaccccctgggggtattttgacttcaacagattccactgccacttctcaccacgtgactggcagcgactcatcaacaacaactggggattccggcctaagcgactcaacttcaagctcttcaacattcaggtcaaagaggttacggacaacaatggagtcaagaccatcgccaataaccttaccagcacggtccaggtcttcacggactcagactatcagctcccgtacgtgctcgggtcggctcacgagggctgcctcccgccgttcccagcggacgttttcatgattcctcagtacgggtatctgacgcttaatgatggaagccaggccgtgggtcgttcgtccttttactgcctggaatatttcccgtcgcaaatgctaagaacgggtaacaacttccagttcagctacgagtttgagaacgtacctttccatagcagctacgctcacagccaaagcctggaccgactaatgaatccactcatcgaccaatacttgcactatctctcaaagactattaacggttctggacagaatcaacaaacgctaaaattcagtgtggccggacccagcaacatggctgtccagggaagaaactacatacctggacccagctaccgacaacaacgtgtctcaaccactgtgactcaaaacaacaacagcgaatttgcttggcctggagcttcttcttgggctctcaatggacgtaatagcttgatgaatcctggacctgctatggccagccacaaagaaggagaggaccgtttctttcctttgtctggatctttaatttttggcaaacaaggaactggaagagacaacgtggatgcggacaaagtcatgataaccaacgaagaagaaattaaaactactaacccggtagcaacggagtcctatggacaagtggccacaaaccaccagagtgcccaagcacaggcgcagaccggctgggttcaaaaccaaggaatacttccgggtatggtttggcaggacagagatgtgtacctgcaaggacccatttgggccaaaattcctcacacggacggcaactttcacccttctccgctgatgggagggtttggaatgaagcacccgcctcctcagatcctcatcaaaaacacacctgtacctgcggatcctccaacggccttcaacaaggacaagctgaactctttcatcacccagtattctactggccaagtcagcgtggagatcgagtgggagctgcagaaggaaaacagcaagcgctggaacccggagatccagtacacttccaactattacaagtctaataatgttgaatttgctgttaatactgaaggtgtatatagtgaaccccgccccattggcaccagatacctgactcgtaatctg

SEQ ID NO: 623 - DNA, 2208 bp, Artificial Sequence
  source: /note="Description of Artificial Sequence: Synthetic polynucleotide"
atggctgccgatggttattttccagattggctcgaggacaaccttagtgaaggaattcgcgagtggtgggctttgaaacctggagcccctcaacccaaggcaaatcaacaacatcaagacaacgctcgaggtcttgtgcttccgggttacaaataccttggacccggcaacggactcgacaagggggagccggtcaacgcagcagacgcggcggccctcgagcacgacaaggcctacgaccagcagctcaaggccggagacaacccgtacctcaagtacaaccacgccgacgccgagttccaggagcggctcaaagaagatacgtcttttgggggcaacctcgggcgagcagtcttccaggccaaaaagaggcttcttgaacctcttggtctggttgaggaagcggctaagacggctcctggaaagaagaggcctgtagagcagtctcctcaggaaccggactcctccgcgggtattggcaaatcgggtgcacagcccgctaaaaagagactcaatttcggtcagactggcgacacagagtcagtcccagaccctcaaccaatcggagaatctcccgcagccccctcaggtgtgggatctcttacaatggcttcaggtggtggcgcaccagtggcagacaataacgaaggtgccgatggagtgggtagttcctcgggaaattggcattgcgattcccaatggctgggggacagagtcatcaccaccagcacccgaacctgggccctgcccacctacaacaatcacctctacaagcaaatctccaacagcacatctggaggatcttcaaatgacaacgcctacttcggctacagcaccccctgggggtattttgacttcaacagattccactgccacttctcaccacgtgactggcagcgactcatcaacaacaactggggattccggcctaagcgactcaacttcaagctcttcaacattcaggtcaaagaggttacggacaacaatggagtcaagaccatcgccaataaccttaccagcacggtccaggtcttcacggactcagactatcagctcccgtacgtgctcgggtcggctcacgagggctgcctcccgccgttcccagcggacgttttcatgattcctcagtacgggtatctgacgcttaatgatggaagccaggccgtgggtcgttcgtccttttactgcctggaatatctcccgtcgcaaatgctaagaacgggtaacaacttccagttcagctacgagtttgagaacgtacctttccatagcagctacgctcacagccaaagcctggaccgactaatgaatccactcatcgaccaatacttgcactatctctcaaagactattaacggttctggacagaatcaacaaacgctaaaattcagtgtggccggacccagcaacatggctgtccagggaagaaactacatacctggacccagctaccgacaacaacgtgtctcaaccactgtgactcaaaacaacaacagcgaatttgcttggcctggagcttcttcttgggctctcaatggacgtaatagcttgatgaatcctggacctgctgtggccagccacaaagaaggagaggaccgtttctttcctttgtctggatctttaatttttggcaaacaaggaactggaagagacaacgtggatgcggacaaagtcatgataaccaacgaagaagaaattaaaactactaacccggtagcaacggagtcctatggacaagtggccacaaaccaccagagtgcccaagcacaggcgcagaccggctgggttcaaaaccaaggaatacttccgggtatggtttggcaggacagagatgtgtacctgcaaggacccatttgggccaaaattcctcacacggacggcaactttcacccttctccgctgatgggagggtttggaatgaagcacccgcctcctcagatcctcatcaaaaacacacctgtacctgcggatcctccaacggccttcaacaaggacaagctgaactctttcatcacccagtattctactggccaagtcagcgtggagatcgagtgggagctgcagaaggaaaacagcaagcgctggaacccggagatccagtacacttccaactattacaagtctaataatgttgaatttgctgttaatactgaaggtgtatatagtgaaccccgccccattggcaccagatacctgactcgtaatctg

SEQ ID NO: 624 - DNA, 2208 bp, Artificial Sequence
  source: /note="Description of Artificial Sequence: Synthetic polynucleotide"
atggctgccgatggttatcttccagattggctcgaggacaaccttagtgaaggaattcgcgagtggtgggctttgaaacctggagcccctcaacccaaggcaaatcaacaacatcaagacaacgctcgaggtcttgtgcttccgggttacaaataccttggacccggcaacggactcgacaagggggagccggtcaacgcagcagacgcggcggccctcgagcacgacaaggcctacgaccagcagctcaaggccggagacaacccgtacctcaagtacaaccacgccgacgccgagttccaggagcggctcaaagaagatacgtcttttgggggcaacctcgggcgagcagtcttccaggccaaaaagaggcttcttgaacctcttggtccggttgaggaagcggctaagacggctcctggaaagaagaggcctgtagagcagtctcctcaggaaccggactcctccgcgggtattggcaaatcgggtgcacagcccgctaaaaagagactcaatttcggtcagactggcgacacagagtcagtcccagaccctcaaccaatcggagaacctcccgcagccccctcaggtgtgggatctcttacaatggcttcaggtggtggcgcaccagtggcagacaataacgaaggtgccgatggagtgggtagttcctcgggaaattggcattgcgattcccaatggctgggggacagagtcatcaccaccagcacccgaacctgggccctgcccacctacaacaatcacctctacaagcaaatctccaacagcacatctggaggatcttcaaatgacaacgcctacttcggctacagcaccccctgggggtattttgacttcaacagattccactgccacttctcaccacgtgactggcagcgactcatcaacaacaactggggattccggcctaagcgactcaacttcaagctcttcaacattcaggtcaaagaggttacggacaacaatggagtcaagaccatcgccaataaccttaccagcacggtccaggtcttcacggactcagactatcagctcccgtacgtgctcgggtcggctcacgagggctgcctcccgccgttcccagcggacgttttcatgattcctcagtacgggtatctgacgcttaatgatggaagccaggccgtgggtcgttcgtccttttactgcctggaatatttcccgtcgcaaatgctaagaacgggtaacaacttccagttcagctacgagtttgagaacgtacctttccatagcagctacgctcacagccaaagcctggaccgactaatgaatccactcatcgaccaatacttgtactatctctcaaagactattaacggttctggacagaatcaacaaacgctaaaattcagtgtggccggacccagcaacatggctgtccagggaagaaactacatacctggacccagctaccgacaacaacgtgtctcaaccactgtgactcaaaacaacaacagcgaatttgcttggcctggagcttcttcttgggctctcaatggacgtaatagcttgatgaatcctggacctgctatggccagccacaaagaaggagaggaccgtttctttcctttgtctggatctttaatttttggcaaacaaggaactggaagagacaacgtggatgcggacaaagtcatgataaccaacgaagaagaaattaaaactactaacccggtagcaacggagtcctatggacaagcggccacaaaccaccagagtgcccaagcacaggcgcagaccggctgggttcaaaaccaaggaatacttccgggtatggtttggcaggacagagatgtgtacctgcaaggacccatttgggccaaaattcctcacacggacggcaactttcacccttctccgctgatgggagggtttggaatgaagcacccgcctcctcagatcctcatcaaaaacacacctgtacctgcggatcctccaacggccttcaacaaggacaagctgaactctttcatcacccagtattctactggccaagtcagcgtggagatcgagtgggagctgcagaaggaaaacagcaagcgctggaacccggagatccagtacacttccaactattacaagtctaataatgttgaatttgctgttaatactgaaggtgtatatagtgaaccccgccccattggcaccagatacctgactcgtaatctg

SEQ ID NO: 625 - DNA, 2208 bp, Artificial Sequence
  source: /note="Description of Artificial Sequence: Synthetic polynucleotide"
atggctgccgatggttatcttccagattggctcgaggacaaccttagtgaaggaattcgcgagtggtgggctttgaaacctggagcccctcaacccaaggcaaatcaacaacatcaagacaacgctcggggtcttgtgcttccgggttacaaataccttggacccggcaacggactcgacaagggggagccggtcaacgcagcagacgcggcggccctcgagcacgacaaggcctacgaccagcagctcaaggccggagacaacccgtacctcaagtacaaccacgccgacgccgagttccaggagcggctcaaagaagatacgtcttttgggggcaacctcgggcgagcagtcttccaggccaaaaagaggcttcttgaacctcttggtccggttgaggaagcggctaagacggctcctggaaagaagaggcctgtagagcagtctcctcaggaaccggactcctccgcgggtattggcaaatcgggtgcacagcccgctaaaaagagactcaatttcggtcagactggcgacacagagtcagtcccagaccctcaaccaatcggagaacctcccgcagccccctcaggtgtgggatctcttacaatggcttcaggtggtggcgcaccagtggcagacaataacgaaggtgccgatggagtgggtagttcctcgggaaattggcattgcgattcccaatggctgggggacagagtcatcaccaccagcacccgaacctgggccctgcccacctacaacaatcacctctacaagcaaatctccaacagcacatctggaggatcttcaaatgacaacgcctacttcggctacagcaccccctgggggtattttgacttcaacagattccactgccacttctcaccacgtgactggcggcgactcatcaacaacaactggggattccggcctaagcgactcaacttcaagctcttcaacattcaggtcaaagaggttacggacaacaatggagtcaagaccatcgccaataaccttaccagcacggtccaggtcttcacggactcagactatcagctcccgtacgtgctcgggtcggctcacgagggctgcctcccgccgttcccagcggacgttttcatgattcctcagtacgggtatctgacgcttaatgatggaagccaggccgtgggtcgttcgtccttttactgcctggaatatttcccgtcgcaaatgctaagaacgggtaacaacttccagttcagctacgagtttgagaacgtacctttccatagcagctacgctcacagccaaagcctggaccgactaatgaatccactcatcgaccaatacttgtactatctctcaaagactattaacggttctggacagaatcaacaaacgctaaaattcagtgtggccggacccagcaacatggctgtccagggaagaaactacatacctggacccagctaccgacaacaacgtgtctcaaccactgtgactcaaaacaacaacagcgaatttgcttggcctggagcttcttcttgggctctcaatggacgtaatagcttgatgaatcctggacctgctatggccagccacaaagaaggagaggaccgtttctttcctttgtctggatctttaatttttggcaaacaaggaactggaagagacaacgtggatgcggacaaagtcatgataaccaacgaagaagaaattaaaactactaacccggtagcaacggagtcctatggacaagtggccacaaaccaccagagtgcccaagcacaggcgcagaccggctgggttcaaaaccaaggaatacttccgggtatggtttggcaggacagagatgtgtacctgcaaggacccatttgggccaaaattcctcacacggacggcaactttcacccttctccgctgatgggagggtttggaatgaagcacccgcctcctcagatcctcatcaaaaacacacctgtacctgcggatcctccaacggccttcaacaaggacaagctgaactctttcatcacccagtattctactggccaagtcagcgtggagatcgagtgggagctgcagaaggaaaacagcaagcgctggaacccggagatccagtacacttccaactattacaagtctaataatgttgaatttgctgttaatactgaaggtgtatatagtgaaccccgccccattggcaccagatacctgactcgtaatctg

SEQ ID NO: 626 - DNA, 2208 bp, Artificial Sequence
  source: /note="Description of Artificial Sequence: Synthetic polynucleotide"
atggctgccgatggttatcttccagattggctcgaggacaaccttagtgaaggaattcgcgagtggtgggctttgaaacctggagcccctcaacccaaggcaaatcaacaacatcaagacaacgctcgaggtcttgtgcttccgggttacaaataccttggacccggcaacggactcgacaagggggagccggtcaacgcagcagacgcggcggccctcgagcacgacaaggcctacgaccagcagctcaaggccggagacaacctgtacctcaagtacaaccacgccgacgccgagttccaggagcggctcaaagaagatacgtcttttgggggcaacctcgggcgagcagtcttccaggccaaaaagaggcttcttgaacctcttggtctggttgaggaagcggctaagacggctcctggaaagaagaggcctgtagagcagtctcctcaggaaccggactcctccgcgggtattggcaaatcgggtgcacagcccgctaaaaagagactcaatttcggtcagactggcgacacagagtcagtcccagaccctcaaccaatcggagaacctcccgcagccccctcaggtgtgggatctcttacaatggcttcaggtggtggcgcaccagtggcagacaataacgaaggtgccgatggagtgggtagttcctcgggaaattggcattgcgattcccaatggctgggggacagagtcatcaccaccagcacccgaacctgggccctgcccacctacaacaatcacctctacaagcaaatctccaacagcacatctggaggatcttcaaatgacaacgcctacttcggctacagcaccccctgggggtattttgacttcaacagattccactgccacttctcaccacgtgactggcagcgactcatcaacaacaactggggattccggcctaagcgactcaacttcaagctcttcaacattcaggtcaaagaggttacggacaacaatggagtcaagaccatcgccaataaccttaccagcacggtccaggtcttcacggactcagactatcagctcccgtacgtgctcgggtcggctcacgagggctgcctcccgccgttcccagcggacgttttcatgattcctcagtacgggtatctgacgcttaatgatggaagccaggccgtgggtcgttcgtccttttactgcctggaatatttcccgtcgcaaatgctaagaacgggtaacaacttccagttcagctacgagtttgagaacgtacctttccatagcagctacgctcacagccaaagcctggaccgactaatgaatccactcatcgaccaatacttgcactatctctcaaagactattaacggttctggacagaatcaacaaacgctaaaattcagtgtggccggacccagcaacatggctgtccagggaagaaactacatacctggacccagctaccgacaacaacgtgtctcaaccactgtgactcaaaacaacaacagcgaatttgcttggcctggagcttcttcttgggctctcaatggacgtaatagcttgatgaatcctggacctgctatggccagccacaaagaaggagaggaccgtttctttcctttgtctggatctttaatttttggcaaacaaggaactggaagagacaacgtggatgcggacaaagtcatgataaccaacgaagaagaaattaaaactactaacccggtagcaacggagtcctatggacaagtggccacaaaccaccagagtgcccaagcacaggcgcagaccggctgggttcaaaaccaaggaatacttccgggtatggtttggcaggacagagatgtgtacctgcaaggacccatttgggccaaaattcctcacacggacggcaactttcacccttctccgctgatgggagggtttggaatgaagcacccgcctcctcagatcctcatcaaaaacacacctgtacctgcggatcctccaacggccttcaacaaggacaagctgaactctttcatcacccagtattctactggccaagtcagcgtggagatcgagtgggagctgcagaaggaaaacagcaagcgctggaacccggagatccagtacacttccaactattacaagtctaataatgttgaatttgctgttaatactgaaggtgtatatagtgaaccccgccccattggcaccagatacctgactcgtaatctg

SEQ ID NO: 627 - DNA, 2208 bp, Artificial Sequence
  source: /note="Description of Artificial Sequence: Synthetic polynucleotide"
atggctgccgatggttatcttccagattggctcgaggacaaccttagtgaaggaattcgcgagtggtgggctttgaaacctggagcccctcaacccaaggcaaatcaacaacatcaagacaacgctcgaggtcttgtgcttccgggttacaaataccttggacccggcaacggactcgacaagggggagccggtcaacgcagcagacgcggcggccctcgagcacgacaaggcctacgaccagcagctcaaggccggagacaacccgtacctcaagtacaaccacgccgacgccgagttccaggagcggctcaaagaagatacgtcttttgggggcaacctcgggcgagcagtcttccaggccaaaaagaggcttcttgaacctcttggtctggttgaggaagcggctaagacggctcctggaaagaagaggcctgtagagcagtctcctcaagaaccggactcctccgcgggtattggcaaatcgggtgcacagcccgctaaaaagagactcaatttcggtcagactggcgacacagagtcagtcccagaccctcaaccaatcggagaacctcccgcagccccctcaggtgtgggatctcttacaatggcttcaggtggtggcgcaccagtggcagacaataacgaaggtgccgatggagtgggtagttcctcgggaaattggcattgcgattcccaatggctgggggacagagtcatcaccaccagcacccgaacctgggccctgcccacctacaacaatcacctctacaagcaaatctccaacagcacatctggaggatcttcaaatgacaacgcctacttcggctacagcaccccctgggggtattttgacttcaacagattccactgccacttctcaccacgtgactggcagcgactcatcaacaacaactggggattccggcctaagcgactcaacttcaagctcttcaacattcaggtcaaagaggttacggacaacaatggagtcaagaccatcgccaataaccttaccagcacggtccaggtcttcacggactcagactatcagctcccgtacgtgctcgggtcggctcacgagggctgcctcccgccgttcccagcggacgttttcatgattcctcagtacgggtatctgacgcttaatgatggaagccaggccgtgggtcgttcgtccttttactgcctggaatatttcccgtcgcaaatgctaagaacgggtaacaacttccagttcagctacgagtttgagaacgtacctttccatagcagctacgctcacagccaaagcctggaccgactaatgaatccactcatcgaccaatacttgcactatctctcaaagactattaacggttctggacagaatcaacaaacgctaaaattcagtgtggccggacccagcaacatggctgtccagggaagaaactacatacctggacccagctaccgacaacaacgtgtctcaaccactgtgactcaaaacaacaacagcgaatttgcttggcctggagcttcttcttgggctctcaatggacgtaatagcttgatgaatcctggacctgctatggccagccacaaagaaggagaggaccgtttctttcctttgtctggatctttaatttttggcaaacaaggaactggaagagacaacgtggatgcggacaaagtcatgataaccaacgaagaagaaattaaaactactaacccggtagcaacggagtcctatggacaagtggccacaaaccaccagagtgcccaagcacaggcgcagaccggctgggttcaaaaccaaggaatacttccgggtatggtttggcaggacagagatgtgtacctgcaaggacccatttgggccaaaattcctcacacggacggcaactttcacccttctccgctgatgggagggtttggaatgaagcacccgcctcctcagatcctcatcaaaaacacacctgtacctgcggatcctccaacggccttcaacaaggacaagctgaactctttcatcacccagtattctactggccaagtcagcgtggagatcgagtgggagctgcagaaggaaaacagcaagcgctggaacccggagatccagtacacttccaactattacaagtctaataatgttgaatttgctgttaatactgaaggtgtatatagtgaaccccgccccattggcaccagatacctgactcgtaatctg

SEQ ID NO: 628 - DNA, 2208 bp, Artificial Sequence
  source: /note="Description of Artificial Sequence: Synthetic polynucleotide"
  modified_base (1325)..(1325): a, c, g or t
atggctgccgatggttatcttccagattggctcgaggacaaccttagtgaaggaattcgcgagtggtgggctttgaaacctggagcccctcaacccaaggcaaatcaacaacatcaagacaacgctcgaggtcttgtgcttccgggttacaaataccttggacccggcaacggactcgacaagggggagccggtcaacgcagcagacgcggcggccctcgagcacgacaaggcctacgaccagcagctcaaggccggagacaacccgtacctcaagtacaaccacgccgacgccgagttccaggagcggctcaaagaagatacgtcttttgggggcaacctcgggcgagcagtcttccaggccaaaaagaggcttcttgaacctcttggtctggttgaggaagcggctaagacggctcctggaaagaagaggcctgtagagcagtctcctcaggaaccggactcctccgcgggtattggcaaatcgggtgcacagcccgctaaaaagagactcaatttcggtcagactggcgacacagagtcagtcccagaccctcaaccaatcggagaacctcccgcagccccctcaggtgtgggatctcttacaatggcttcaggtggtggcgcaccagtggcagacaataacgaaggtgccgatggagtgggtagttcctcgggaaattggcattgcgattcccaatggctgggggacagagtcatcaccaccagcacccgaacctgggccctgcccacctacaacaatcacctctacaagcaaatctccaccagcacatctggaggatcttcaaatgacaacgcctacttcggctacagcaccccctgggggtattttgacttcaacagattccactgccacttctcaccacgtgactggcagcgactcatcaacaacaactggggattccggcctaagcgactcaacttcaagctcttcaacattcaggtcaaagaggttacggacaacaatggagtcaagaccatcgccaataaccttaccagcacggtccaggtcttcacggactcagactatcagctcccgtacgtgctcgggtcggctcacgagggctgcctcccgccgttcccagcggacgttttcatgattcctcagtacgggtatctgacgcttaatgatggaagccaggccgtgggtcgttcgtccttttactgcctggaatatttcccgtcgcaaatgctaagaacgggtaacaacttccagttcagctacgagtttgagaacgtacctttccatagcagctacgctcacagccaaagcctggaccgactaatgaatccactcatcgaccnatacttgcactatctctcaaagactattaacggttctggacagaatcaacaaacgctaaaattcagtgtggccggacccagcaacatggctgtccagggaagaaactacatacctggacccagctaccgacaacaacgtgtctcaaccactgtgactcaaaacaacaacagcgaatttgcttggcctggagcttcttcttgggctctcaatggacgtaatagcttgatgaatcctggacctgctatggccagccacaaagaaggagaggaccgtttctttcctttgtctggatctttaatttttggcaaacaaggaactggaagagacaacgtggatgcggacaaagtcatgataaccaacgaagaagaaattaaaactactaacccggtagcaacggagtcctatggacaagtggccacaaaccaccagagtgcccaagcacaggcgcagaccggctgggttcaaaaccaaggaatacttccggatatggtttggcaggacagagatgtgtacctgcaaggacccatttgggccaaaattcctcacacggacggcaactttcacccttctccgctgatgggagggtttggaatgaagcacccgcctcctcagatcctcatcaaaaacacacctgtacctgcggatcctccaacggccttcaacaaggacaagctgaactctttcatcacccagtattctactggccaagtcagcgtggagatcgagtgggagctgcagaaggaaaacagcaagcgctggaacccggagatccagtacacttccaactattacaagtctaataatgttgaatttgctgttaatactgaaggtgtatatagtgaaccccgccccattggcaccagatacctgactcgtaatctg

SEQ ID NO: 629 - DNA, 2208 bp, Artificial Sequence
  source: /note="Description of Artificial Sequence: Synthetic polynucleotide"
atggctgccgatggttatcttccagattggctcgaggacaaccttagtgaaggaattcgcgagtggtgggctttgaaacctggagcccctcaacccaaggcaaatcaacaacatcaagacaacgctcgaggtcttgtgcttccgggttacaaataccttggacccggcaacggactcgacaagggggagccggtcaacgcagcagacgcggcggccctcgagcacgacaaggcctacgaccagcagctcaaggccggagacaacccgtacctcaagtacaaccacgccgacgccgagttccaggagcggctcaaagaagatacgtcttttgggggcaacctcgggcgagcagtcttccaggccaaaaagaggcttcttgaacctcttggtctggttgaggaagcggctaagacggctcctggaaagaagaggcctgtagagcagtctcctcaggaaccggactcctccgcgggtattggcaaatcgggtgcacagcccgctaaaaagagactcaatttcggtcagactggcgacacagagtcagtcccagaccctcaaccaatcggagaacctcccgcagccccctcaggtgtgggatctcttacaatggcttcaggtggtggcgcaccagtggcagacaataacgaaggtgccgatggagtgggtagttcctcgggaaattggcattgcgattcccaatggctgggggacagagtcatcaccaccagcacccgaacctgggccctgcccacctacaacaatcacctctacaagcaaatctccaacagcacatctggaggatcttcaaatgacaacgcctacttcggctacagcaccccctgggggtattttgacttcaacagattccactgccacttctcaccacgtgactggcagcgactcatcaacaacaactggggattccggcctaagcgactcaacttcaagctcttcaacattcaggtcaaagaggttacggacaacaatggagtcaagaccatcgccaataaccttaccagcacggtccaggtcttcacggactcagactatcagctcccgtacgtgctcgggtcggctcacgagggctgcctcccgccgttcccagcggacgttttcatgattcctcagtacgggtatctgacgcttaatgatggaagccaggccgtgggtcgttcgtccttttactgcctggaatatttcccgtcgcaaatgctaagaacgggtaacaacttccagttcagctacgagtttgagaacgtacctttccatagcagctacgctcacagccaaagcctggaccgactaatgaatccactcatcgaccaatacttgcactatctctcaaagactattaacggttctggacagaatcaacaaacgctaaaattcagtgtggccggacccagcaacatggctgtccagggaagaaactacatacctggacccagctaccgacaacaacgtgtctcaaccactgtgactcaaaacaacaacagcgaatttgcttggcctggagcttcttcttgggctctcaatggacgtaatagcttgatgaatcctggacctgctatggccagctacaaagaaggagaggacagtttctttcctttgtctggatctttaatttttggcaaacaaggaactggaagagacaacgtggatgcggacaaagtcatgataaccaacgaagaagaaattaaaactactaacccggtagcaacggagtcctatggacaagtggccacaaaccaccagagtgcccaagcacaggcgcagaccggctgggttcaaaaccaaggaatacttccgggtatggtttggcaggacagagatgtgtacctgcaaggacccatttgggccaaaattcctcacacggacggcaactttcacccttctccgctgatgggagggtttggaatgaagcacccgcctcctcagaccctcatcaaaaacacacctgtacctgcggatcctccaacggccttcaacaaggacaagctgaactctttcatcacccagtattctactggccaagtcagcgtggagatcgagtgggagctgcagaaggaaaacagcaagcgctggaacccggagatccagtacacttccaactattacaagtctaataatgttgaatttgctgttaatactgaaggtgtatatagtgaaccccgccccattggcaccagatacctgactcgtaatctg

SEQ ID NO: 630 - DNA, 2208 bp, Artificial Sequence; identical to SEQ ID NO: 613
  source: /note="Description of Artificial Sequence: Synthetic polynucleotide"

SEQ ID NO: 631 - DNA, 2208 bp, Artificial Sequence
  source: /note="Description of Artificial Sequence: Synthetic polynucleotide"
atggctgccgatggttatcttccagattggctcgaggacaaccttagtgaaggaattcgcgagtggtgggctttgaaacctggagcccctcaacccagggcaaatcaacaacatcaagacaacgctcgaggtcttgtgcttccgggttacaaataccttggacccggcaacggactcgacaagggggagccggtcaacgcagccgacgcggcggccctcgagcacgacaaggcctacgaccagcagctcaaggccggagacaacccgtacctcaagtacaaccacgccgacgccgagttccaggagcggctcaaagaagatacgtcttttgggggcaacctcgggcgagcagtcttccaggccaaaaagaggcttcttgaacctcttggtctggttgaggaagcggctaagacggctcctggaaagaagaggcctgtagagcagtctcctcaggaaccggactcctccgcgggtattggcaaatcgggtgcacagcccgctaaaaagagactcaatttcggtcagactggcgacacagagtcagtcccagaccctcaaccaatcggagaacctcccgcagccccctcaggtgtgggatctcttacaatggcttcaggtggtggcgcaccagtggcagacaataacgaaggtgccgatggagtgggtagttcctcgggaaattggcattgcgattcccaatggctgggggacagagtcatcaccaccagcacccgaacctgggccctgcccacctacaacaatcacctctacaagcaaatctccaacagcacatctggaggatcttcaaatgacaacgcctacttcggctacagcaccccctgggggtattttgacttcaacagattccactgccacttctcaccacgtgactggcagcgactcatcaacaacaactggggattccggcctaagcgactcaacttcaagctcttcaacattcaggtcaaagaggttacggacaacaatggagtcaagaccatcgccaataaccttaccagcacggtccaggtcttcacggactcagactgtcagctcccgtacgtgctcgggtcggctcacgagggctgcctcccgccgttcccagcggacgttttcatgattcctcagtacgggtatctgacgcttaatgatggaagccaggccgtgggtcgttcgtccttttactgcctggaatatttcccgtcgcaaatgctaagaacgggtaacaacttccagttcagctacgagtttgagaacgtacctttccatagcagctacgctcacagccaaagcctggaccgactaacgaatccactcatcgaccaatacttgtactatctctcaaagactattaacggttctggacagaatcaacaaacgctaaaattcagtgtggccggacccagcaacatggctgtccagggaagaaactacatacctggacccagctaccgacaacaacgtgtctcaaccactgtgactcaaaacaacaacagcgaatttgcttggcctggagcttcttcttgggctctcaatggacgtaatagcttgatgaatcctggacctgctatggccagccacaaagaaggagaggaccgtttctttcctttgtctggatctttaatttttggcaaacaaggaactggaagagacaacgtggatgcggacaaagtcatgataaccaacgaagaagaaattaaaactactaacccggtagcaacggagtcccatggacaagtggccacaaaccaccagagtgcccaagcacaggcgcagaccggctgggttcaaaaccaaggaatacttccgggtatggtttggcaggacagagatgtgtacctgcaaggacccatttgggccaaaattcctcacacggacggcaactttcacccttctccgctgatgggagggtttggaatgaagcacccgcctcctcagatcctcatcaaaaacacacctgtacctgcggatcctccaacggccttcaacaaggacaagctgaactctttcatcacccagtattctactggccaagtcagcgtggagatcgagtgggagctgcagaaggaaaacagcaagcgctggaacccggagatccagtacacttccaactattacaagtctaataatgttgaatttgctgttaatactgaaggtgtatatagtgaaccccgccccattggcaccagatacctgactcgtaatctg

SEQ ID NO: 632 - DNA, 2208 bp, Artificial Sequence
  source: /note="Description of Artificial Sequence: Synthetic polynucleotide"
atggctgccgatggttatcttccagattggctcgaggacaaccttagtgaaggaattcgcgagtggtgggctttgaaacctggagcccctcaacccaaggcaaatcaacaacatcaagacaacgctcgaggtcttgtgcttccgggttacaaataccttggacccggcaacggactcgacaagggggagccggtcaacgcagcagacgcggcggccctcgagcacgacaaggcctacgaccagcagctcaaggccggagacaacccgtacctcaagtacaaccacgccgacgccgagttccaggagcggctcaaagaagatacgtcttttgggggcaacctcgggcgagcagtcttccaggccaaaaagaggcttcttgaacctcttggtctggttgaggaagcggctaagacggctcctggaaagaagaggcctgtagagcagtctcctcaggaaccggactcctccgcgggtattggcaaatcgggtgcacagcccgctaagaagagactcaatttcggtcagactggcgacacagagtcagtcccagaccctcaaccaatcggagaacctcccgcagccccctcaggtgtgggatctcttacaatggcttcaggtggtggcgcaccagtggcagacaataacgaaggtgccgatggagtgggtagttcctcgggaaattggcattgcgattcccaatggctgggggacagagtcatcaccaccagcacccgaacctgggccctgcccacctacaacaatcacctctacaagcaaatctccaacagcacatctggaggatcttcaaatgacaacgcctacttcggctacagcaccccctgggggtattttgacttcaacagattccactgccacttctcaccacgtgactggcagcgactcatcaacaacaactggggattccggcctaagcgactcaacttcaagctcttcaacattcaggtcaaagaggttacggacaacaatggagtcaagaccatcgccaataaccttaccagcacggtccaggtcttcacggactcagactatcagctcccgtacgtgctcgggtcggctcacgagggctgcctcccgccgttcccagcggacgttttcatgattcctcagtacgggtatctgacgcttaatgatggaagccaggccgtgggtcgttcgtccttttactgcctggaatatttcccgtcgcaaatgctaagaacgggtaacaacttccagttcagctacgagtttgagaacgtacctttccatagcagctacgctcacagccaaagcctggaccgactaatgaatccacccatcgaccaatacttgtactatctctcaaagactattaacggttctggacagaatcaacaaacgctaaaattcagtgtggccggacccagcaacatggctgtccagggaagaaactacatacctggacccagctaccgacaacaacgtgtctcaaccactgtgactcaaaacaacaacagcgaatttgcttggcctggagcttcttcttgggctctcaatggacgtaatagcttgatgaatcctggacctgctatggccagccacaaagaaggagaggaccgtttctttcctttgtctggatctttaatttttggcaaacaaggaactggaagagacaacgtggatgcggacaaagtcatgataaccaacgaagaagaaattaaaactactaacccggtagcaacggagtcctatggacaagtggccacaaaccaccagagtgcccaagcacaggcgcagaccggctgggttcaaaaccaaggaatacttccgggtatggtttggcaggacagagatgtgtacctgcaaggacccatttgggccaaaattcctcacacggacggcaactttcacccttctccgctgatgggagggtttggaatgaagcacccgcctcctcagatcctcatcaaaaacacacctgtacctgcggatcctccaacggccttcaacaaggacaagctgaactctttcatcacccagtattctactggccaagtcagcgtggagatcgagtgggagctgcagaaggaaaacagcaagcgctggaacccggagatccagtacacttccaactattacaagtctaataatgttgaatttgctgttaatactgaaggtgtatatggtgaaccccgccccattggcaccagatacctgactcgtaatctg

SEQ ID NO: 633 - DNA, 2208 bp, Artificial Sequence
  source: /note="Description of Artificial Sequence: Synthetic polynucleotide"
atggctgccgatggttatcttccagattggctcgaggacaaccttagtgaaggaattcgcgagtggtgggctttgaaacctggagcccctcaacccaaggcaaatcaacaacatcaagacaacgctcgaggtcttgtgcttccgggttacaaataccttggacccggcaacggactcgacaagggggagccggtcaacgcagcagacgcggcggccctcgagcacgacaaggcctacgaccagcagctcaaggccggagacaacccgtacctcaagtacaaccacgccgacgccgagttccaggagcggctcaaagaagatacgtcttttgggggcaacctcgggcgagcagtcttccaggccaaaaagaggcttcttgaacctcttggtctggttgaggaagcggctaagacggctcctggaaagaagaggcctgtagagcagtctcctcaggaaccggactcctccgcgggtattggcaaatcgggtgcacagcccgctaaaaagagactcaatttcggtcagactggcgacacagagtcagtcccagaccctcaaccaatcggagaacctcccgcagccccctcaggtgtgggatctcttacaatggcttcaggtggtggcgcaccagtggcagacaataacgaaggtgccgatggagtgggtagttcctcgggaaattggcattgcgattcccaatggctgggggacagagtcatcaccaccagcacccgaacctgggccctgcccacctacaacaatcacctctacaagcaaatctccaacagcacatctggaggatcttcaaatgacaacgcctacttcggctacagcaccccctgggggtattttgacttcaacagattccactgccacttctcaccacgtgaccggcagcgactcatcaacaacaactggggattccggcctaagcgactcaacttcaagctcttcaacattcaggtcaaagaggttacggacaacaatggagtcaagaccatcgccaataaccttaccagcacggtccaggtcttcacggactcagactatcagctcccgtacgtgctcgggtcggctcacgagggctgcctcccgccgttcccagcggacgttttcatgattcctcagtacgggtatctgacgcttaatgatggaagccaggccgtgggtcgttcgtccttttactgcctggaatatttcccgtcgcaaatgctaagaacgggtaacaacttccagttcagctacgagtttgagaacgtacctttccatagcagctacgctcacagccaaagcctggaccgactaatgaatccactcatcgaccaatacttgtactatctctcaaagactattaacggttctggacagaatcaacaaacgctaaaattcagtgtggccggacccagcaacatggctgtccagggaagaaactacatacctggacccagctaccgacaacaacgtgtctcaaccactgtgactcaaaacaacaacagcgaatttgcttggcctggagcttcttcttgggctctcaatggacgtaatagcttgatgaatcctggacctgctatggccagccacaaagaaggagaggaccgtttctttcctttgtctggatctttaatttttggcaaacaaggaactggaagagacaacgtggatgcggacaaagtcatgataaccaacgaagaagaaattaaaactactaacccggtagcaacggagtcctatggacaagtggccacaaaccaccagagtgcccaagcacaggcgcagaccggctgggttcaaaaccaaggaatacttccgggtatggtttggcaggacagagatgtgtacctgcaaggacccatttgggccaaaattcctcacacggacggcaactttcacccttctccgctgatgggagggtttggaatgaagcacccgcctcctcagatcctcatcaaaaacacacctgtacctgcggatcctccaacggccttcaacaaggacaagctgaactctttcatcacccagtattctactggccaagtcagcgtggagatcgagtgggagctgcagaaggaaaacagcaagcgctggaacccggagatccagtacacttccaactattacaagtctaataatgttgaatttgctgttaatactgaaggtgtatatagtgaaccccgccccattggcaccagatacctgactcgtaatctg

SEQ ID NO: 634 - DNA, 2208 bp, Artificial Sequence
  source: /note="Description of Artificial Sequence: Synthetic polynucleotide"
atggctgccgatggttatcttccagattggctcgaggacaaccttagtgaaggaattcgcgagtggtgggctttgaaacctggagcccctcaacccaaggcaaatcaacaacatcaagacaacgctcgaggtcttgtgcttccgggttacaaataccttggacccggcaacggactcgacaagggggagccggtcaacgcagcagacgcggcagccctcgagcacgacaaggcctacgaccagcagctcaaggccggagacaacccgtacctcaagtacaaccacgccgacgccgagttccaggagcggctcaaagaagatacgtcttttgggggcaacctcgggcgagcagtcttccaggccaaaaagaggcttcttgaacctcttggtctggttgaggaagcggctaagacggctcctggaaagaagaggcctgtagagcagtctcctcaggaaccggactcctccgcgggtattggcaaatcgggtgcacagcccgctaaaaagagactcaatttcggtcagactggcgacacagagtcagtcccagaccctcaaccaatcggagaacctcccgcagccccctcaggtgtgggatctcttacaatggcttcaggtggtggcgcaccagtggcagacaataacgaaggtgccgatggagtgggtagttcctcgggaaattggcattgcaattcccaatggctgggggacagagtcatcaccaccagcacccgaacctgggccctgcccacctacaacaatcacctctacaagcaaatctccaacagcacatctggaggatcttcaaatgacaacgcctacttcggctacagcaccccctgggggtattttgacttcaacagattccactgccacttctcaccacgtgactggcagcgactcatcaacaacaactggggattccggcctaagcgactcaacttcaagctcttcaacattcaggtcaaagaggttacggacaacaatggagtcaagaccatcgccaataaccttaccagcacggtccaggtcttcacggactcagactatcagctcccgtacgtgctcgggtcggctcacgagggctgcctcccgccgttcccagcggacgttttcatgattcctcagtacgggtatctgacgcttaatgatggaagccaggccgtgggtcgttcgtccttttactgcctggaatatttcccgtcgcaaatgctaagaacgggtaacaacttccagttcagctacgagtttgagaacgtacctttccatagcagctacgctcacagccaaagcctggaccgactaatgaatccactcatcgaccaatacttgtactatctctcaaagactattaacggttctggacagaatcaacaaacgctaaaattcagtgtggccggacccggcaacatggctgtccagggaagaaactacatacctggacccagctaccgacaacaacgtgtctcaaccactgtgactcaaaacaacaacagcgaatttgcttggcctggagcttcttcttgggctctcaatggacgtaatagcttgatgaatcctggacctgctatggccagccacaaagaaggagaggaccgtttctttcctttgtctggatctttaatttttggcaaacaaggaactggaagagacaacgtggatgcggacaaagtcatgataaccaacgaagaagaaattaaaactactaacccggtagcaacggagtcctatggacaagtggccacaaaccaccagagtgcccaagcacaggcgcagaccggctgggttcaaaaccaaggaatacttccgggtatggtttggcaggacagagatgtgtacctgcaaggacccatttgggccaaaattcctcacacggacggcaactttcacccttctccgctgatgggagggtttggaatgaagcacccgcctcctcagatcctcatcaagaacacacctgtacctgcggatcctccaacggccttcaacaaggacaagctgaactctttcatcacccagtattctactggccaagtcagcgtggagatcgagtgggagctgcagaaggaaaacagcaagcgctggaacccggagatccagtacacttccaactattacaagtctaataatgttgaatttgctgttaatactgaaggtgtatatagtgaaccccgccccattggcaccagatacctgactcgtaatctg

SEQ ID NO: 635 - DNA, 2208 bp, Artificial Sequence
  source: /note="Description of Artificial Sequence: Synthetic polynucleotide"
atggctgccgatggttatcttccagattggctcgaggacaaccttagtgaaggaattcgcgagtggtgggctttgaaacctggagcccctcaacccaaggcaaatcaacaacatcaagacaacgctcgaggtcttgtgcttccgggttacagataccttggacccggcaacggactcgacaagggggagccggtcaacgcagcagacgcggcggccctcgagcacgacaaggcctacgaccagcagctcaaggccggagacaacccgtacctcaagtacaaccacgccgacgccgagttccaggagcggctcaaagaagatacgtcttttgggggtaacctcgggcgagcagtcttccaggccaaaaagaggcttcttgaacctcttggtctggttgaggaagcggctaagacggctcctggaaagaagaggcctgtagagcagtctcctcaggaaccggactcctccgcgggtatcggcaaatcgggtgcacagcccgctaaaaagagactcaatttcggtcagactggcgacacagagtcagtcccagaccctcaaccaatcggagaacctcccgcagccccctcaggtgtgggatctcttacaatggcttcaggtggtggcgcaccagtggcagacaataacgaaggtgccgatggagtgggtagttcctcgggaaattggcattgcgattcccaatggctgggggacagagtcatcaccaccagcacccgaacctgggccctgcccacctacaacaatcacctctacaagcaaatctccaacagcacatctggaggatcttcaaatgacaacgcctacttcggctacagcaccccctgggggtattttgacttcaacagattccactgccacttctcaccacgtgactggcagcgactcatcaacaacaactggggattccggcctaagcgactcaacttcaagctcttcaacattcaggtcaaagaggttacggacaacaatggagtcaagaccgtcgccaataaccttaccagcacggtccaggtcttcacggactcagactatcagctcccgtacgtgctcgggtcggctcacgagggctgcctcccgccgttcccagcggacgttttcatgattcctcagtacgggtatctgacgcttaatgatggaagccaggccgtgggtcgttcgtccttttactgcctggaatatttcccgtcgcaaatgctaagaacgggtaacaacttccagttcagctacgagtttgagaacgtacctttccatagcagctacgctcacagccaaagcctggaccgactaatgaatccactcatcgaccaatacttgtactatctctcaaagactattaacggttctggacagaatcaacaaacgctaaaattcagtgtggccggacccagcaacatggctgtccagggaagaaactacatacctggacccagctaccgacaacaacgtgtctcaaccactgtgactcaaaacaacaacagcgaatttgcttggcctggagcttcttcttgggctctcaatggacgtaatagcttgatgaatcctggacctgctatggccagccacaaagaaggagaggaccgtttctttcctttgtctggatctttaatttttggcaaacaaggaactggaagagacaacgtggatgcggacaaagtcatgataaccaacgaagaagaaattaaaactactaacccggtagcaacggagtcctatggacaagtggccacaaaccaccagagtgcccaagcacaggcgcagaccggctgggttcaaaaccaaggaatacttccgggtatggtttggcaggacagagatgtgtacctgcaaggacccatttgggccaaaattcctcacacggacggcaactttcacccttctccgctgatgggagggtttggaatgaagcacccgcctcctcagatcctcatcaaaaacacacctgtacctgcggatcctccaacggccttcaacaaggacaagctgaactctttcatcacccagtattctactggccaagtcagcgtggagatcgagtgggagctgcagaaggaaaacagcaagcgctggaacccggagatccagtacacttccaactattacaagtctaataatgttgaatttgctgttaatactgaaggtgtatatagtggaccccgccccattggcaccagatacctgactcgtaatctg

SEQ ID NO: 636 - DNA, 2208 bp, Artificial Sequence
  source: /note="Description of Artificial Sequence: Synthetic polynucleotide"
atggctgccgatggttatcttccagattggctcgaggacaaccttagtgaaggaattcgcgagtggtgggctttgaaacctggagcccctcaacccaaggcaaatcaacaacatcaagacaacgctcgaggtcttgtgcttccgggttacaaataccttggacccggcaacggactcgacaagggggagccggtcaacgcagcagacgcggcggccctcgagcacgacaaggcctacgaccagcagctcaaggccggagacaacccgtacctcaagtacaaccacgccgacgccgagttccaggagcggctcaaagaagatacgtcttttgggggcaacctcgggcgagcagtcttccaggccaaaaagaggcttcttgaacctcttggtctggttgaggaagcggctaagacggctcctggaaagaagaggcctgtagagcagtctcctcaggaaccggactcctccgcgggtattggcaaatcgggtgcacagcccgctaaaaagagactcaatttcggtcagactggcgacacagagtcagtcccagaccctcaaccaatcggagaacctcccgcagccccctcaggtgtgggatctcttacaatggcttcaggtggtggcgcaccagtggcagacaataacgaaggtgccgatggagtgggtagttcctcgggaaattggcattgcgattcccaatggctgggggacagagtcatcaccaccagcacccgaacctgggccctgcccacctacaacaatcacctctacaagcaaatctccaacagcacatctggaggatcttcaaatgacaacgcctacttcggctacagcaccccctgggggtattttgacttcaacagattccactgccacttctcaccacgtgactggcagcgactcatcaacaacaactggggattccggcctaagcgactcaacttcaagctcttcaacattcaggtcaaagaggttacggacaacaatggagtcaagaccatcgccaataaccttaccagcacggtccaggtcttcacggactcagactatcagctcccgtacgtgctcgggtcggctcacgagggctgcctcccgccgttcccagcggacgttttcatgattcctcagtacgggtatctgacgcttaatgatggaagccaggccgtgggtcgttcgtccttttactgcctggaatatttcccgtcgcaaatgctaagaacgggtaacaacttccagttcagctacgagtttgagaacgtacctttccatagcagctacgctcacagccaaagcctggaccgactaatgaatccactcatcgaccaatacttgtactatctctcaaagactattaacggttctggacagaatcaacaaacgctaaaattcagtgtggccggacccagcaacatggctgtccagggaagaaactacatacctggacccagctaccgacaacaacgtgtctcaaccactgtgactcaaaacaacaacagcgaatttgcttggcctggagcttcttcttgggctctcaatggacgtaatagcttgatgaatcctggacctgctatggccagccacaaagaaggagaggaccgtttctttcctttgtctggatctttaatttttggcaaacaaggaactggaagagacaacgtggatgcggacaaagtcatgataaccaacgaagaagaaattaaaactactaacccggtagcaacggagtcctatggacaagtggccacaaaccaccagagtgcccaagcacaggcgcagaccggctgggttcaaaaccaaggaatacttccgggtatggtttggcaggacagagatgtgtacctgcaaggacccatttgggccaaaattcctcacacggacggcaactttcacccttctccgctgatgggagggtttggaatgaagcacccgcctcctcagatcctcatcaaaaacacacctgtacctgcggatcctccaacggccttcaacaaggacaagctgaactctttcatcacccagtattctactggccaagtcagcgtggagatcgagtgggagctgcagaaggaaaacagcaagcgctggaacccggagatccagtacacttccaactattacaagtctaataatgttgaatttgctgttaatactgaaggtgtatatagtgaaccccgccccattggcaccagatacctgactcgtaatctg

SEQ ID NO: 637 - DNA, 2208 bp, Artificial Sequence
  source: /note="Description of Artificial Sequence: Synthetic polynucleotide"
atggctgccgatggttatcttccagattggctcgaggacaaccttagtgaaggaattcgcgagtggtgggctttgaaacctggagcccctcaacccaaggcaaatcaacaacgtcaagacaacgctcgaggtcttgtgcttccgggttacaaataccttggacccggcaacggactcgacaagggggagccggtcaacgcagcagacgcggcggccctcgagcacgacaaggcctacgaccagcagctcaaggccggaggcaacccgtgcctcaagtacaaccacgccgacgccgagttccaggagcggctcaaagaagatacgtcttttgggggcaacctcgggcgagcagtcttccaggccaaaaagaggcttcttgaacctcttggtctggttgaggaagcggctaagacggctcctggaaagaagaggcctgtagagcagtctcctcaggaaccggactcctccgcgggtattggcagatcgggtgcacagcccgctaaaaagagactcaatttcggtcagactggcgacacagagtcagtcccagaccctcaaccaatcggagaacctcccgcagccccctcaggtgtgggatctcttacaatggcttcaggtggtggcgcaccagtggcagacaataacgaaggtgccgatggagtgggtagttcctcgggaaattggcattgcgattcccaatggctgggggacagagtcatcaccaccagcacccgaacctgggccctgcccacctacaacaatcacctctacaagcaaatctccaacagcacatctggaggatcttcaaatgacaacgcctacttcggctacagcaccccctgggggtattttgacttcaacagattccactgccacttctcaccacgtgactggcagcgactcatcaacaacaactggggattccggcctaagcgactcaacttcaagctcttcaacattcaggtcaaagaggttacggacaacaatggagtcaaggccatcgccaataaccttaccagcacggtccaggtcttcacggactcagactatcagctcccgtacgtgctcgggtcggctcacgagggctgcctcccgccgttcccagcggacgttttcatgattcctcagtacgggtatctgacgcttaatgatggaagccaggccgtgggtcgttcgtccttttactgcctggaatatttcccgtcgcaaatgctaagaacgggtaacaacttccagttcagctacgagtttgagaacgtacctttccatagcagctacgctcacagccaaagcctggaccgactaatgaatccactcatcgaccaatacttgtactatctctcaaagactattgacggttctggacagaatcaacaaacgctaaaattcagtgtggccggacccagcaacatggctgtccagggaagaaactacatacctggacccagctaccgacaacaacgtgtctcaaccactgtgactcaaaacaacaacagcgaatttgcttggcctggagcttcttcttgggctctcaatggacgtaatagcttgatggatcctggacctgctatggccagccacaaagaaggagaggaccgtttctttcctttgtctggatctttaatttttggcaaacaaggaactggaagagacaacgtggatgcggacaaagtcatgataaccaacgaagaagaaattaaaactactaacccggtagcaacggagtcctatggacaagtggccacaaaccaccagagtgcccaagcacaggcgcagaccggctgggttcaaaaccaaggaatacttccgggtatggtttggcaggacagagatgtgtacctgcaaggacccatttgggccaaaattcctcacacgggcggcaactttcacccttctccgctgatgggagggtttggaatgaagcacccgcctcctcagatcctcatcaaaaacacacctgtacctgcggatcctccaacggccttcaacaaggacaagctgaactctttcatcacccagtattctactggccaagtcagcgtggagatcgagtgggagctgcagaaggaaaacagcaagcgctggaacccggagatccagtacacttccaactattacaagtctaataatgttgaatttgctgttaatactgaaggtgtatatagtgaaccccgccccattggcaccagatacctgactcgtaatctg

SEQ ID NO: 638 - DNA, 2208 bp, Artificial Sequence
  source: /note="Description of Artificial Sequence: Synthetic polynucleotide"
atggctgccgatggttatcttccagattggctcgaggacaaccttagtgaaggaattcgcgagtggtgggctttgaaacctggagcccctcaacccaaggcaaatcaacaacatcaagacaacgctcgaggtcttgtgcttccgggttacaaataccttggacccggcaacggactcgacaagggggagccggtcaacgcagcagacgcggcggccctcgagcacgacaaggcctacgaccagcagctcaaggccggagacaacccgtacctcaagtacaaccacgccgacgccgagttccaggagcggctcaaagaagatacgtcttttgggggcaacctcgggcgagcagtcttccaggccaaaaagaggcttcttgaacctcttggtctggttgaggaagcggctaagacggctcctggaaagaagaggcctgtagagcagtctcctcaggaaccggactcctccgcgggtattggcaaatcgggtgcacagcccgctaaaaagagactcaatttcggtcagactggcgacacagagtcagtcccagaccctcaaccaatcggagaacctcccgcagccccctcaggtgtgggatctcttacaatggcttcaggtggtggcgcaccagtggcagacaataacgaaggtgccgatggagtgggtagttcctcgggaaattggcattgcgattcccaatggctgggggacagagtcatcaccaccagcacccgaacctgggccctgcccacctacaacaatcacctctacaagcaaatctccaacagcacatctggaggatcttcaaatgacaacgcctacttcggctacagcaccccctgggggtattttgacttcaacagattccactgccacttctcaccacgtgactggcagcgactcatcaacaacaactggggattccggcctaagcgactcaacttcaagctcttcaacattcaggtcaaagaggttacggacaacaatggagtcaagaccatcgccaataaccttaccagcacggtccaggtcttcacggactcagactatcagctcccgtacgtgctcgggtcggctcacgagggctgcctcccgccgttcccagcggacgttttcatgattcctcagtacgggtatctgacgcttaatgatggaagccaggccgtgggtcgttcgtccttttactgcctggaatatttcccgtcgcaaatgctaagaacgggtaacaacttccagttcagctacgagtttgagaacgtacctttccatagcagctacgctcacagccaaagcctggaccgactaatgaatccactcatcgaccaatacttgtactatctctcaaagactattaacggttctggacagaatcaacaaacgctaaaattcagtgtggccggacccagcaacatggctgtccagggaagaaactacatacctggacccagctaccgacaacaacgtgtctcaaccactgtgactcaaaacaacaacagcgaatttgcttggcctggagcttcttcttgggctctcaatggacgtaatagcttgatgaatcctggacctgctatggccagccacaaagaaggagaggaccgtttctttcctttgtctggatctttaatttttggcaaacaaggaactggaagagacaacgtggatgcggacaaagtcatgataaccaacgaagaagaaattaaaactactaacccggtagcaacggagtcctatggacaagtggccacaaaccaccagagtgcccaagcacaggcgcagaccggctgggttcaaaaccaaggaatacttccgggtatggtttggcaggacagagatgtgtacctgcaaggacccatttgggccaaaattcctcacacggacggcaactttcacccttctccgctgatgggagggtttggaatgaagcacccgcctcctcagatcctcatcaaaaacacacctgtacctgcggatcctccaacggccttcaacaaggacaagctgaactctttcatcacccagtattctactggccaagtcagcgtggagatcgagtgggagctgcagaaggaaaacagcaagcgctggaacccggagatccagtacacttccaactattacaagcctaataatgttgaatttgctgttaatactgaaggtgtatatagtgaaccccgccccattggcaccagatacctgactcgtaatctg

SEQ ID NO: 639 - DNA, 2208 bp, Artificial Sequence
  source: /note="Description of Artificial Sequence: Synthetic polynucleotide"
atggctgccgatggttatcttccagattggctcgaggacaaccttagtgaaggaattcgcgagtggtgggctttgaaacctggagcccctcaacccaaggcaaatcaacaacatcaagacaacgctcgaggtcttgtgcttccgggttacaaataccttggacccggcaacggactcgacaagggggagccggtcaacgcagcagacgcggcggccctcgagcacaacaaggcctacgaccagcagctcaaggccggagacaacccgtacctcaagtgcaaccacgccgacgccgagttccaggagcggctcaaagaagatacgtcttttgggggcaacctcgggcgagcagtcttccaggccaaaaagaggcctcttgaacctcttggtctggttgaggaagcggctaagacggctcctggaaagaagaggcctgtagagcagtctcctcaggaaccggactcctccgcgggtattggcaaatcgggtgcacagcccgctaaaaagagactcaatttcggtcagactggcgacacagagtcagtcccagaccctcaaccaatcggagaacctcccgcagccccctcaggtgtgagatctcttacaatggcttcaggtggtggcgcaccagtggcagacaataacgaaggtgccgatggagtgggtagttcctcgggaaattggcattgcgattcccaatggctgggggacagagtcatcaccaccagcacccgaacctgggccctgcccacctacaacaatcacctctacaagcaaatctccaacagcacatctggaggatcttcaaatgacaacgcctacctcggctacagcaccccctgggggtattttgacttcaacagattccactgccacttctcaccacgtgactggcagcgactcatcaacaacaactggggattccggcctaagcgactcaacttcaagctcttcaacattcaggtcaaagaggttacggacaacaatggagtcaagaccatcgccaataaccttaccagcacggtccaggtcttcacggactcagactatcagctcccgtacgtgctcgggtcggctcacgagggctgcctcccgccgttcccagcggacgttttcatgattcctcagtacgggtatctgacgcttaatgatggaagccaggccgtgggtcgttcgtccttttactgcctggaatatttcccgtcgcaaatgctaagaacgggtaacaacttccagttcagctacgagtttgagaacgtacctttccatagcagctacgctcacagccaaagcctggaccgactaatgaatccactcatcgaccaatacttgtactatctctcaaagactattaacggttctggacagaatcaacaaacgctaaaattcagtgtggccggacccagcaacatggctgtccagggaagaaactacatacctggacccagctaccgacaacaacgtgtctcaaccactgtgactcaaaacaacaacagcgaatttgcttggcctggagcttcttcttgggctctcaatggacgtaatagcttgatgaatcctggacctactatggccagccacaaagaaggagaggaccgtttctttcctttgtctggatctttaatttttggcaaacaaggaactggaagagacaacgtggatgcggacaaagtcatgataaccaacgaagaagaaattaaaactactaacccggtagcaacggagtcctatggacaagtggccacaaaccaccagagtgcccaagcacaggcgcagaccggctgggttcaaaaccaaggaatacttccgggtatggtttggcaggacagagatgtgtacctgcaaggacccatttgggccaaaattcctcacacggacggcaactttcacccttctccgctgatgggagggtttggaatgaagcacccgcctcctcagatcctcatcaaaaacacacctgtacctgcggatcctccaacggccttcaacaaggacaagctgaactctttcatcacccagtattctactggccaagtcagcgtggagatcgagtgggagctgcagaaggaaaacagcaagcgctggaacccggagatccagtacacttccaactattacaagtctaataatgttgaatttgctgttaatactgaaggtgtatatagtgaaccccgccccattggcaccagatacctgactcgtaatctg

SEQ ID NO: 640 - DNA, 2208 bp, Artificial Sequence
  source: /note="Description of Artificial Sequence: Synthetic polynucleotide"
atggctgccgatggttatcttccagattggctcgaggacaaccttagtgaaggaattcgcgagtggtgggctttgaaacctggagcccctcaacccaaggcaaatcaacaacatcaagacaacgctcgaggtcttgtgcttccgggttacaaataccttggacccggcaacggactcgacaagggggagccggtcaacgcagcagacgcggcggccctcgtgcacgacaaggcctacgaccagcagctcaaggccggagacaacccgtacctcaagtgcaaccacgccgacgccgagttccaggagcggctcaaagaagatacgtcttttgggggcaacctcgggcgagcagtcttccaggccaaaaagaggcttcttgaacctcttggtctggttgaggaagcggctaagacggctcctggaaagaagaggcctgtagagcagtctcctcaggaaccggactcctccgcgggtattggcaaatcgggtgcacagcccgctaaaaagagactcaatttcggtcagactggcgacacagagtcagtcccagaccctcaaccaatcggagaacctcccgcagccccctcaggtgtgggatctcttacaatggcttcaggtggtggcgcaccagtggcagacaataacgaaggtgccgatggagtgggtagttcctcgggaaattggcattgcgattcccaatggctgggggacagagtcatcaccaccagcacccgaacctgggccctgcccacctacaacaatcacctctacaagcaaatctccaacagcacatctggaggatcttcaaatgacaacgcctacctcggctacagcaccccctgggggtattttgacttcaacagattccactgccacttctcaccacgtgactggcagcgactcatcaacaacaactggggattccggcctaagcgactcaacttcaagctcttcaacattcaggtcaaagaggttacggacaacaatggagtcaagaccatcgccaataaccttaccagcacggtccaggtcttcacggactcagactatcagctcccgtacgtgctcgggtcggctcacgagggctgcctcccgccgttcccagcggacgttttcacgattcctcagtacgggtatctgacgcttaatgatggaagccaggccgtgggtcgttcgtccttttactgcctggaatatttcccgtcgcaaatgctaagaacgggtaacaacttccagttcagctacgagtttgagaacgtacctttccatagcagctacgctcacagccaaagcctggaccgactaatgaatccactcatcgaccaatacttgtactatctctcaaagactattaacggttctggacagaatcaacaaacgctaaaattcagtgtggccggacccagcaacatggctgtccagggaagaaactacatacctggacccagctaccgacaacaacgtgtctcaaccactgtgactcaaaacaacaacagcgaatttgcttggcctggagcttcttcttgggctctcaatggacgtaatagcttgatgaatcctggacctgctatggccagccacaaagaaggagaggaccgtttctttcctttgtctggatctttaatttttggcaaacaaggaactggaagagacaacgtggatgcggacaaagtcatgataaccaacgaagaagaaattaaaactactaacccggtagcaacggagtcctatggacaagtggccacaaaccaccagagtgcccaagcacaggcgcagaccggctgggttcaaaaccaaggaatacttccgggtatggtttggcaggacagagatgtgtacctgcaaggacccatttgggccaaaattcctcacacggacggcaactttcacccttctccgctgatgggagggtttggaatgaagcacccgcctcctcagatcctcatcaaaaacacacctgtacctgcggatcctccaacggccttcaacaaggacaagctgaactctttcatcacccagtattctactggccaagtcagcgtggagatcgagtgggagctgcagaaggaaaacagcaagcgctggaacccggagatccagtacacttccaactattacaagtctaataatgttgaatttgctgttaatactgaaggtgtatatagtgaaccccgccccattgggccccgatacctgactcgtaatttt

SEQ ID NO: 641 - DNA, 2208 bp, Artificial Sequence
  source: /note="Description of Artificial Sequence: Synthetic polynucleotide"
atggctgccgatggttatcttccagattggctcgaggacaaccttagtgaaggaattcgcgagtggtgggctttgaaacctggagcccctcaacccaaggcaaatcaacaacatcaagacaacgctcgaggtcttgtgcttccgggttacaaataccttggacccggcaacggactcgacaagggggagccggtcaacgcagcagacgcggcggccctcgagcacaacaaggcctacgaccagcagctcaaggccggagacaacccgtacctcaagtgcaaccacgccgacgccgagttccaggagcggctcaaagaagatacgtcttttgggggcaacctcgggcgagcagtcttccaggccaaaaagaggcttcttgaacctcttggtctggttgaggaagcggctaagacggctcctggaaagaagaggcctgtagagcagtctcctcaggaaccggactcctccgcgggtattggcaaatcgggtgcacagcccgctaaaaagagactcaatttcggtcagactggcgacacagagtcagtcccagaccctcaaccaatcggagaacctcccgcagccccctcaggtgtgagatctcttacaatggcttcaggtggtggcgcaccagtggcagacaataacgaaggtgccgatggagtgggtagttcctcgggaaattggcattgcgattcccaatggctgggggacagagtcatcaccaccagcacccgaacctgggccctgcccacctacaacaatcacctctacaagcaaatctccaacagcacatctggaggatcttcaaatgacaacgcctacctcggctacagcaccccctgggggtattttgacttcaacagattccactgccacttctcaccacgtgactggcagcgactcatcaacaacaactggggattccggcctaagcgactcaacttcaagctcttcaacattcaggtcaaagaggttacggacaacaatggagtcaagaccatcgccaataaccttaccagcacggtccaggtcttcacggactcagactatcagctcccgtacgtgctcgggtcggctcacgagggctgcctcccgccgttcccagcggacgttttcatgattcctcagtacgggtatctgacgcttaatgatggaagccaggccgtgggtcgttcgtccttttactgcctggaatatttcccgtcgcaaatgctaagaacgggtaacaacttccagttcagctacgagtttgagaacgtacctttccatagcagctacgctcacagccaaagcctggaccgactaatgaatccactcatcgaccaatacttgtactatctctcaaagactattaacggttctggacagaatcaacaaacgctaaaattcagtgtggccggacccagcaacatggctgtccagggaagaaactacatacctggacccagctaccgacaacaacgtgtctcaaccactgtgactcaaaacaacaacagcgaatttgcttggcctggagcttcttcttgggctctcaatggacgtaatagcttgatgaatcctggacctgctatggccagccacaaagaaggagaggaccgtttctttcctttgtctggatctttaatttttggcaaacaaggaactggaagagacaacgtggatgcggacaaagtcatgataaccaacgaagaagaaattaaaactactaacccggtagcaacggagtcctatggacaagtggccacaaaccaccagagtgcccaagcacaggcgcagaccggctgggttcaaaaccaaggaatacttccgggtatggtttggcaggacagagatgtgtacctgcaaggacccatttgggccaaaattcctcacacggacggcaactttcacccttctccgctgatgggagggtttggaatgaagcacccgcctcctcagatcctcatcaaaaacacacctgtacctgcggatcctccaacggccttcaacaaggacaagctgaactctttcatcacccagtattctactggccaagtcagcgtggagatcgagtgggagctgcagaaggaaaacagcaagcgctggaacccggagatccagtacacttccaactattacaagtctaataatgttgaatttgctgttaatactgaaggtgtatatagtgaaccccgccccattggcaccagatacctgactcgtaatctg

SEQ ID NO: 642 - DNA, 2208 bp, Artificial Sequence
  source: /note="Description of Artificial Sequence: Synthetic polynucleotide"
atggctgccgatggttatcttccagattggctcgaggacaaccttagtgaaggaattcgcgagtggtgggctttgaaacctggagcccctcaacccaaggcaaatcaacaacatcaagacaacgctcgaggtcttgtgcttccgggttacaaataccttggacccggcaacggactcgacaagggggagccggtcaacgcagcagacgcggcggccctcgagcacgacaaggcctacgaccagcagctcaaggccggagacaacccgtacctcaagtgcaaccacgccgacgccgagttccaggagcggctcaaagaagatacgtcttttgggggcaacctcgggcgagcagtcttccaggccaaaaagaggcttcttgaacctcttggtctggttgaggaagcggctaagacggctcctggaaagaagaggcctgtagagcagtctcctcaggaaccggactcctccgcgggtattggcaaatcgggtgcacagcccgctaaaaagagactcaatttcggtcagactggcgacacagagtcagtcccagaccctcaaccaatcggagaacctcccgcagccccctcaggtgtgggatctcttacaatggcttcaggcggtggcgcaccagtggcagacaataacgaaggtgccgatggagtgggtagttcctcgggaaattggcattgcgattcccaatggctgggggacagagtcatcaccaccagcacccgaacctgggccctgcccacctacaacaatcacctctacaagcaaatctccaacagcacatctggaggatcttcaaatgacaacgcctacctcggctacagcaccccctgggggtattttgacttcaacagattccactgccacttctcaccacgtgactggcagcgactcatcaacaacaactggggattccggcctaagcgactcaacttcgagctcttcaacattcaggtcaaagaggttacggacaacaatggagtcaagaccatcgccaataaccttaccagcacggtccaggtcttcacggactcagactatcagctcccgtacgtgctcgggtcggctcacgagggctgcctcccgccgttcccagcggacgttttcatgattcctcagtacgggtatctgacgcttaatgatggaagccaggccgtgggtcgttcgtccttttactgcctggaatatttcccgtcgcaaatgctaagaacgggtaacaacttccagtccagctacgagtttgagaacgtacctttccatagcagctacgctcacagccaaagcctggaccgactaatgaatccactcatcgaccaatacttgtactatctctcaaagactattaacggttctggacagaatcaacaaacgctaaaattcagtgtggccggacccagcaacatggctgtccagggaagaaactacatacctggacccagctaccgacaacaacgtgcctcaaccactgtgactcaaaacaacaacagcgaatttgcttggcctggagcttcttcttgggctctcaatggacgtaatagcttgatgaatcctggacctgctatggccagccacaaagaaggggaggaccgtttctttcctttgtctggatctttaatttttggcaaacaaggaactggaagagacaacgtggatgcggacaaagtcatgataaccaacgaagaagaaattaaaactactaacccggtagcaacggagtcctatggacaagtggccacaaaccaccagagtgcccaagcacaggcgcagaccggctgggttcaaaaccaaggaatacttccgggtatggtttggcaggacagagatgtgtacctgcaaggacccatttgggccaaaattcctcacacggacggcaactttcacccttctccgctgatgggagggtttggaatgaagcacccgcctcctcagatcctcatcaaaaacacacctgtacctgcggatcctccaacggccttcaacaaggacaagctgaactctttcatcacccagtattctactggccaagtcagcgtggagatcgagtgggagctgcagaaggaaaacagcaagcgctggaacccggagatccagtacacttccaactattacaagtctaataatgttgaatttgctgttaatactgaaggtgtatatagtgaaccccgccccattggcaccagatacctgactcgtaatctg

SEQ ID NO: 643 - DNA, 2208 bp, Artificial Sequence
  source: /note="Description of Artificial Sequence: Synthetic polynucleotide"
atggctgccgatggttatcttccagattggctcgaggacaaccttagtgaaggaattcgcgagtggtgggctttgaaacctggagcccctcaacccaaggcaaatcaacaacatcaagacaacgctcgaggtcttgtgcttccgggttacaaataccttggacccggcaacggactcgacaagggggagccggtcaacgcagcagacgcggcggccctcgagcacgacaaggcctacgaccagcagctcaaggccggagacaacccgtacctcaagtgcaaccacgccgacgccgagttccaggagcggctcaaagaagatacgtcttttgggggcaacctcgggcgagcagtcttccaggccaaaaagaggcttcttgaacctcttggtctggttgaggaagcggctaagacggctcctggaaagaagaggcctgtagagcagtctcctcaggaaccggactcctccgcgggtattggcaaatcgggtgcacagcccgctaaaaagagactcaatttcggtcagactggcgacacagagtcagtcccagaccctcaaccaatcggagaacctcccgcagcccccccaggtgtgggatctcttacaatggcttcaggtggtggcgcaccagtggcggacaataacgaaggtgccgatggagtgggtagttcctcgggaaattggcattgcgattcccaatggctgggggacagagtcatcaccaccagcacccgaacctgggccctgcccacctacaacaatcacctctacaagcaaatctccaacagcacatctggaggatcttcaaatgacaacgcctacctcggctacagcaccccctgggggtattttgacttcaacagattccactgccacttctcaccacgtgactggcagcgactcatcaacaacaactggggattccggcctaagcgactcaacttcaagctcttcaacattcaggtcaaagaggttacggacaacaatggagtcaagaccatcgccaataaccttaccagcacggtccaggtcttcacggactcagactatcagctcccgtacgtgctcgggtcggctcacgagggctgcctcccgccgttcccagcggacgttttcatgattcctcagtacgggtatctgacgcttaatgatggaagccaggccgtgggtcgttcgtccttttactgcctggaatatttcccgtcgcaaatgctaagaacgggtaacaacttccagttcagctacgagtttgagaacgtacctttccatagcagctacgctcacagccaaagcctggaccgactaatgaatccactcatcgaccaatacttgtactatctctcaaagactattagcggttctggacagaatcaacaaacgctaaaattcagtgtggccggacccagcaacatggctgtccagggaagaaactacatacctggacccagctaccgacaacaacgtgtctcaaccactgtgactcaaaacaacagcagcgaatttgcttggcctggagcttcttcttgggctctcaatggacgtaatagcttgatgaatcctggacctgctatggccagccacaaagaaggagaggaccgtttctttcctttgtctggatctttaatttttggcaaacaaggaactggaagagacaacgtggatgcggacaaagtcatgataaccaacgaagaagaaattaaaactactaacccggtagcaacggagtcctatggacaagtggccacaaaccaccagagtgcccaagcacaggcgcagaccggctgggttcaaaaccaaggaatactttcgggtatggtttggcaggacagagatgtgtacctgcaaggacccatttgggccaaaattcctcacacggacggcaactttcacccttctccgctgatgggagggtttggaatgaagcacccgcctcctcagatcctcatcaaaaacacacctgtacctgcggatcctccaacggccttcaacaaggacaagctgaactctttcatcacccagtattctactggccaagtcagcgtggagatcgagtgggagctgcagaaggaaaacagcaagcgctggaacccggagatccagtacacttccaactattacaagtctaataatgttgaatttgctgttaatactgaaggtgtatatagtgaaccccgccccattggcaccagatacctgactcgtaatctg

SEQ ID NO: 644 - DNA, 2208 bp, Artificial Sequence
  source: /note="Description of Artificial Sequence: Synthetic polynucleotide"
atggctgccgatggttatcttccagattggctcgaggacaaccttagtgaaggaattcgcgagtggtgggctttgaaacctggagcccctcaacccaaggcaaatcaacaacatcaagacaacgctcgaggtcttgtgcttccgggttacaaataccttggacccggcaacggactcgacaagggggagccggtcaacgcagcagacgcggcggccctcgagcacgacaaggcctacgaccagcagctcaaggccggagacaacccgtacctcaagtgcaaccacgccgacgccgagttccaggagcggctcaaagaagatacgtcttttgggggcaacctcgggcgagcagtcttccaggccaaaaagaggcttcttgaacctcttggtctggttgaggaagcggctaagacggctcctggaaagaagaggcctgtagagcagtctcctcaggaaccggactcctccgcgggtattggcaaatcgggtgcacagcccgctaaaaagagactcaatttcggtcagactggcgacacagagtcagtcccagaccctcaaccaatcggagaacctcccgcagccccctcaggtgtgggatctcttacaatggcttcaggtggtggcgcaccagtggcagacaataacgaaggtgccgatggagtgggtagttcctcgggaaattggcattgcgattcccaatggctgggggacagagtcatcaccaccagcacccgaacctgggccctgcccacctacaacaatcacctctacaagcaaatctccaacagcacatctggaggatcttcaaatgacaacgcctacctcggctacagcaccccctgggggtattttgacttcaacagattccactgccacttctcaccacgtgactggcagcgactcatcaacaacaactggggattccggcctaagcgactcaacttcaagctcttcaacattcaggtcaaagaggttacggacaacaatggagtcaagaccatcgccaataaccttaccagcacggtccaggtcttcacggactcagactatcagctcccgtacgtgctcgggtcggctcacgagggctgcctcccgccgttcccagcggacgttttcatgattcctcagtacgggtatctgacgcttaatgatggaagccaggccgtgggtcgttcgtccttttactgcctggaatatttcccgtcgcaaatgctaagaacgggtaacaacttccagttcagctacgagtttgagaacgtacctttccatagcagctacgctcacagccaaagcctggaccgactaatgaatccactcatcgaccaatacttgtactatctctcaaagactattaacggttctggacagaatcaacaaacgctaaaattcagtgtggccggacccagcaacatggctgtccagggaagaaactacatacctggacccagctaccgacaacaacgtgtctcaaccactgtgactcaaaacaacaacagcgaatttgcttggcctggagcttcttcttgggctctcaatggacgtaatagcttgatgaatcctggacctgctatggccagccacaaagaaggagaggaccgtttctttcctttgtctggatctttaatttttggcaaacaaggaactggaagagacaacgtggatgcggacaaagtcatgataaccaacgaagaagaaattaaaactactaacccggtagcaacggagtcctatggacaagtggccacaaaccaccagagtgcccaagcacaggcgcagaccggctgggttcaaaaccaaggaatacttccgggtatggtttggcaggacagagatgtgtacctgcaaggacccatttgggccaaaattcctcacacggacggcaactttcacccttctccgctgatgggagggtttggaatgaagcacccgcctcctcagatcctcatcaaaaacacacctgtacctgcggatcctccaacggccttcaacaaggacaagctgaactctttcatcacccagtattctactggccaagtcagcgtggagatcgagtgggagctgcagaaggaaaacagcaagcgctggaacccggagatccagtacacttccaactattacaagtctaataatgttgaatttgctgttaatactgaaggtgtatatagtgaaccccgccccattggcaccagatacctgactcgtaatctg

SEQ ID NO: 645 - DNA, 2208 bp, Artificial Sequence; identical to SEQ ID NO: 644
  source: /note="Description of Artificial Sequence: Synthetic polynucleotide"

SEQ ID NO: 646 - DNA, 2208 bp, Artificial Sequence
  source: /note="Description of Artificial Sequence: Synthetic polynucleotide"
atggctgccgatggttatcttccagattggctcgaggacaaccttagtgaaggaattcgcgagtggtgggctttgaaacctggagcccctcaacccaaggcaaatcaacaacatcaagacaacgctcgaggtcttgtgcttccgggttacaaataccttggacccggcaacggactcgacaagggggagccggtcaacgcagcagacgcggcggccctcgagcacgacaaggcctacgaccagcagctcaaggccggagacaacccgtacctcaagtgcaaccacgccgacgccgagttccaggagcggctcaaagaagatacgtcttttgggggcaacctcgggcgagcagtcttccaggccaaaaagaggcttcttgaacctcttggtctggttgaggaagcggctaagacggctcctggaaagaagaggcctgtagagcagtctcctcaggaaccggactcctccgcgggtattggcaaatcgggtgcacagcccgctaaaaagagactcaatttcggtcagactggcgacacagagtcagtcccagaccctcaaccaatcggagaacctcccgcagccccctcaggtgtgggatctcttacaatggcttcaggtggtggcgcaccagtggcagacaataacgaaggtgccgatggagtgggtagttcctcgggaaattggcattgcgattcccaatggctgggggacagagtcatcaccaccagcacccgaacctgggccctgcccacctacaacaatcacctctacaagcaaatctccaacagcacatctggaggatcttcaaatgacaacgcctacctcgactacagcaccccctgggggtattttgacttcaacagattccactgccacttctcaccacgtgactggcagcggctcatcaacaacaactggggattccggcctaagcgactcaacttcaagctcttcaacattcaggtcaaagaggttacggacaacaatggagtcaagaccatcgccaataaccttaccagcacggtccaggtcttcacggactcagactatcagctcccgtacgtgctcgggtcggctcacgagggctgcctcccgccgttcccagcggacgttttcatgattcctcagtacgggtatctgacgcttaatgatggaagccaggccgtgggtcgttcgtccttttactgcctggaatatttcccgtcgcaaatgctaagaacgggtaacaacttccagttcagctacgagtttgagaacgtacctttccatagcagctacgctcacagccaaagcctggaccgactaatgaatccactcatcgaccaatacttgtactatctctcaaagactattaacggttctggacagaatcaacaaacgctaaaattcagtgtggccggacccagcaacatggctgtccagggaagaaactacatacctggacccagctaccgacaacaacgtgtctcaaccactgtgactcaaaacaacaacagcgaatttgcttggcctggagcttcttcttgggctctcaatggacgtaatagcttgatgaatcctggacctgctatggccagccacaaagaaggagaggaccgtttctttcctttgtctggatctttaatttttggcaaacaaggaactggaagagacaacgtggatgcggacaaagtcatgataaccaacgaagaagaaattaaaactactaacccggtagcaacggagtcctatggacaagtggccacaaaccaccagagtgcccaagcacaggcgcagaccggctgggttcaaaaccaaggaatacttccgggtatggtttggcagggcagagatgtgtacctgcaaggacccatttgggccaaaattcctcacacggacggcaactttcacccttctccgctgatgggagggtttggaatgaagcacccgcctcctcagatcctcatcaaaaacacacctgtacctgcggatcctccaacggccttcaacaaggacaagctgaactctttcatcacccagtattctactggccaagtcagcgtggagatcgagtgggagctgcagaaggaaaacagcaagcgctggaacccggagatccagtacacttccaactattacaagtctaataatgttgaatttgctgttaatactgaaggtgtatatagtgaaccccgccccattggcaccagatacctgactcgtaatctg

SEQ ID NO: 647 - DNA, 2208 bp, Artificial Sequence; identical to SEQ ID NO: 644
  source: /note="Description of Artificial Sequence: Synthetic polynucleotide"

SEQ ID NO: 648 - DNA, 2208 bp, Artificial Sequence
  source: /note="Description of Artificial Sequence: Synthetic polynucleotide"
atggctgccgatggttatcctccagattggctcgaggacaaccttagtgaaggaattcgcgagtggtgggctttgaaacctggagcccctcaacccaaggcaaatcaacaacatcaagacaacgctcgaggtcttgtgcttccgggttacaaataccttggacccggcaacggactcgacaagggggagccggtcaacgcagcagacgcggcggccctcgagcacgacaaggcctacgaccagcagctcaaggccggggacaacccgcacctcaagtacaaccacgccgacgccgagttccaggagcggctcaaagaagatacgtcttttgggggcaacctcgggcgagcagtcttccaggccaaaaagaggcttcttgaacctcttggtctggttgaggaagcggctaagacggctcctggaaagaagaggcccgtagagcagtctcctcaggaaccggactcctccgcgggtattggcaaatcgggtgcacagcccgctaagaagagactcaatttcggtcagactggcgacactgagtcagtcccagaccctcaaccaatcggagaacctcccgcagccccctcaggtgtgggatctcttacaatggcttcaggtggtggcgcaccagtggcagacaataacgaaggtgccgatggagtgggtagttcctcgggaaattggcattgcgattcccaatggctgggggacagagtcatcaccaccagcacccgaacctgggccctgcccacctacaacaatcacctctacaagcaaatctccaacagcacatctggaggatcttcaaatgacaacgcctacttcggctacagcaccccctgggggtattttgacttcaacagattccactgccacttctcaccacgtgactggcagcgactcatcaacaacaactggggattccggcctaagcgactcaacttcaagctcttcaacattcaggtcaaagaggttacggacaacaatggagtcaagaccatcgccaataaccttaccagcacggtccaggtcttcacggactcagactatcagctcccgtacgtgctcgggtcggctcacgagggctgcctcccgccgttcccagcggacgttttcatgattcctcagtacgggtatctgacgcttaatgatggaagccaggccgtgggtcgttcgtccttttactgcctggaatatttcccgtcgcaaatgctaagaacgggtaacaacttccagttcagctacgagtttgagaacgtacctttccatagcagctacgctcacagccaaagcctggaccgactaatgaatccactcatcgaccaatacttgtactatctctcaaagactattaacggttctggacagaatcaacaaacgctaaaattcagtgtggccggacccagcaacatggctgtccagggaagaaactacatacctggacccagctaccgacaacaacgtgtctcaaccactgtgactcaaaacaacaacagcgaatttgcttggcctggagcttcttcttgggctctcaatggacgtaatagcttgatgaatcctggacctgctatggccagccacaaagaaggagaggaccgtttctttcctttgtctggatctttaatttttggcaaacaaggaactggaagagacaacgtggatgcggacaaagtcatgataaccaacgaagaagaaattaaaactactaacccggtagcaacggagtcctatggacaagtggccacaaaccaccagagtgcccaagcacaggcgcagaccggctgggttcaaaaccaaggaatacttccgggtatggtttggcaggacagagatgtgtacctgcaaggacccatttgggccaaaattcctcacacggacggcaactttcacccttctccgctgatgggagggtttggagtgaagcacccgcctcctcagatcctcatcaaaaacacacctgtacctgcggatcctccaacggccttcaacaaggacaggctgaactctttcatcacccagtattctactggccaagtcagcgtggagatcgagtgggagctgcagaaggaaaacagcaagcgctggaacccggagatccagtacacttccaactattacaagtctaataatgttgaatttgctgttaatactgaaggtgtatatagtgaaccccgccccattggcaccagatacctgactcgtaatctg

SEQ ID NO: 649 - DNA, 2208 bp, Artificial Sequence
  source: /note="Description of Artificial Sequence: Synthetic polynucleotide"
atggctgccgatggttatcttccagattggctcgaggacaaccttagtgaaggaattcgcgagtggtgggctttgaaacctggagcccctcaacccaaggcaaatcaacaacatcaagacaacgctcgaggtcttgtgcttccgggttacaaataccttggacccggcaacggactcgacaagggggagccggtcaacgcagcagacgcggcggccctcgagcacgacaaggcctacgaccagcagctcaaggccggagacaacccgtacctcaagtacaaccacgccgacgccgagttccaggagcggctcaaagaagatacgtcttttgggggcaacctcgggcgagcagtcttccaggccaaaaagaggcttcttgaacctcttggtctggttgaggaagcggctaagacggctcctggaaagaagaggcctgtagagcagtctcctcaggaaccggactcctccgcgggtattggcaaatcgggtgcacagcccgctaaaaagagactcaatttcggtcagactggcgacacagagtcagtcccagaccctcaaccaatcggagaacctcccgcagccccctcaggtgtgggatctcttacaatggcttcaggtggtggcgcaccagtggcggacaataacgaaggtgccgatggagtgggtagttcctcgggaaattggcattgcgattcccaatggctgggggacagagtcatcaccaccagcacccgaacctgggccctgcccacctacaacaatcacctctacaagcaaatctccaacagcacatctggaggatcttcaaatgacaacgcctacttcggctacagcaccccctgggggtattttgacttcaacagattccactgccacttctcaccacgtgactggcagcgactcatcaacaacaactggggattccggcctaagcgactcaacttcaagctcttcaacattcaggtcaaagaggttacggacaacaatggagtcaagaccatcgccaataaccttaccagcacggtccaggtcttcacggactcagactatcagctcccgtacgtgctcgggtcggctcacgagggctgcctcccgccgttcccagcggacgttttcatgattcctcagtacgggtatctgacgcttaatgatggaagccaggccgtgggtcgttcgtccttttactgcctggaatatttcccgtcgcaaatgctaagaacgggtaacaacttccagttcagctacgagtttgagaacgtacctttccatagcagctacgctcacagccaaagcctggaccgactaatgaatccactcatcgaccaatacttgtactatctctcaaagactattaacggttctggacagaatcaacaaacgctaaaattcagtgtggccggacccagcaacatggctgtccagggaagaaactacatacctggacccagctaccgacaacaacgtgtctcaaccactgtgactcaaaacaacaacagcgaatttgcttggcctggagcttcttcttgggctctcaatggacgtaatagtttgatgaatcctggacctgctatggccagccacaaagaaggagaggaccgtttctttcctttgtctggatctttaatttttggcaaacaaggaactggaagagacaacgtggatgcggacaaagtcatgataaccaacgaagaagaaattaaaactactaacccggtagcaacggagtcctatggacaagtggccacaaaccaccagagtgcccaagcacaggcgcagaccggctgggttcaaaaccaaggaatacttccgggtatggtttggcaggacagagatgtgtacctgcaaggacccatttgggccaaaattcctcacacggacggcaactttcacccttctccgctgatgggagggtttggagtgaagcacccgcctcctcagatcctcatcaaaaacacacctgtacctgcggatcctccaacggccttcaacaaggacaagctgaactctttcatcacccagtattctactggccaagtcagcgtggagatcgagtgggagctgcagaaggaaaacagcaagcgctggaacccggagatccagtacacttccaactattacaagtctaataatgttgaatttgctgttaatactgaaggtgtatatagtgaaccccgccccattggcaccagatacctgactcgtaatctg

SEQ ID NO: 650 - DNA, 2208 bp, Artificial Sequence
  source: /note="Description of Artificial Sequence: Synthetic polynucleotide"
atggctgccgatggttatcttccagattggctcgaggacaaccttagtgaaggaattcgcgagtggtgggctttgaaacctggagcccctcaacccaaggcaaatcaacaacatcaagacaacgctcgaggtcttgtgcttccgggttacaaataccttggacccggcaacggactcgacaagggggagccggtcaacgcagcagacgcggcggccctcgagcacgacaaggcctacgaccagcagctcaaggccggagacaacccgtacctcaagtacaaccacgccgacgccgagttccaggagcggctcaaagaagatacgtcttttgggggcaacctcgggcgagcagtcttccaggccaaaaagaggcttcttgaacctcttggtctggttgaggaagcggctaagacggctcctggaaagaagaggcctgtagagcagtctcctcaggaaccggactcctccgcgggtattggcaaatcgggtgcacagcccgctaaaaagagactcaatttcggtcagactggcgacacagagtcagtcccagaccctcaaccaatcggagaacctcccgcagccccctcaggtgtgggatctcttacaatggcttcaggtggtggcgcaccagtggcagacaataacgaaggtgccgatggagtgggtagttcctcgggaaattggcattgcgattcccaatggctgggggacagagtcatcaccaccagcacccgaacctgggccctgcccacttacaacaatcacctctacaagcaaatctccaacagcacatctggaggatcttcaaatgacaacgcctacttcggctacagcaccccctgggggtattttgacttcaacagattccactgccacttctcaccacgtgactggcagcgactcaccaacaacaactggggattccggcctaagcgactcaacttcaagctcttcaacattcaggtcaaagaggttacggacaacaatggagtcaagaccatcgccaataaccttaccagcacggtccaggtcttcacggactcagactatcagctcccgtacgtgctcgggtcggctcacgagggctgcctcccgccgttcccagcggacgttttcatgattcctcagtacgggtatctgacgcttaatgatggaagccaggccgtgggtcgttcgtccttttactgcctggaatatatcccgtcgcaaatgctaagaacgggtaacaacttccagttcagctacgagtttgagaacgtacctttccatagcagctacgctcacagccaaagcctggaccgactaatgaatccactcatcgaccaatacttgtactatctctcaaagactattaacggttctggacagaatcaacaaacgctaaaattcagtgtggccggacccagcaacatggctgtccagggaagaaactacatacctggacccagctaccgacaacaacgtgtctcaaccactgtgactcaaaacaacaacagcgaatttgcttggcctggagcttcttcttgggctctcaatggacgtaatagcttgatgaatcctggacctgctatggccagccacaaagaaggagaggaccgtttctttcctttgtctggatctttaatttttggcaaacaaggaactggaagagacaacgtggatgcggacaaagtcatgataaccaacgaagaagaaattaaaactactaacccggtagcaacggagtcctatggacaagtggccacaaaccaccagagtgcccaagcacaggcgcagaccggctgggttcaaaaccaaggaatacttccgggtatggtttggcaggacagagatgtgtacctgcaaggacccatttgggccaaaattcctcacacggacggcaactttcacccttctccgctgatgggagggtttggagtgaagcacccgcctcctcagatcctcatcaaaaacacacctgtacctgcggatcctccaacggccttcaacaaggacaagctgaactctttcatcacccagtattctactggccaagtcagcgtggagatcgagtgggagctgcagaaggaaaacagcaagcgctggaacccggagatccagtacacttccaactattacaagtctaataatgttgaatttgctgttaatactgaaggtgtatatagtgaaccccgccccattggcaccagatacctgactcgtaatctg

SEQ ID NO: 651 - DNA, 2208 bp, Artificial Sequence
  source: /note="Description of Artificial Sequence: Synthetic polynucleotide"
atggctgccgatggttatcttccagattggctcgaggacaaccttagtgaaggaattcgcgagtggtgggctttgaaacctggagcccctcaacccaaggcaaatcaacaacatcaagacaacgctcgaggtcttgtgcttccgggttacaaataccttggacccggcaacggactcgacaagggggagccggtcaacgcagcagacgcggcggccctcgagcacgacaaggcctacgaccagcagctcaaggccggagacaacccgtacctcaagtacaaccacgccgacgccgagttccaggagcggctcaaagaagatacgtcttttgggggcaacctcgggcgagcagtcttccaggccaaaaagaggcttcttgaacctcttggtctggttgaggaagcggctaagacggctcctggaaagaagaggcctgtagagcagtctcctcaggaaccggactcctccgcgggtattggcaaatcgggtgcacagcccgctaaaaagagactcaatttcggtcagactggcgacacagagtcagtcccagaccctcaaccaatcggagaacctcccgcagccccctcaggtgtgggatctcttacaatggcttcaggtggtggcgcaccagtggcagacaataacgaaggtgccgatggagtgggtagttcctcgggaaattggcattgcgattcccaatggctgggggacagagtcatcaccaccagcacccgaacctgggccctgcccacctacaacaatcacctctacaagcaaatctccaacagcacatctggaggatcttcaaatgacaacgcctacttcggctacagcaccccctgggggtattttgacttcaacagattccactgccacttctcaccacgtgactggcagcgactcatcaacaacaactggggattccggcctaagcgactcaacttcaagctcttcaacattcaggtcaaagaggttacggacaacaatggagtcaagaccatcgccaataaccttaccagcacggtccaggtcttcacggactcagactatcagctcccgtacgtgctcgggtcggctcacgagggctgcctcccgccgttcccagcggacgttttcatgattcctcagtacgggtatctgacgcttaatgatggaagccaggccgtgggtcgttcgtccttttactgcctggaatatttcccgtcgcaaatgctaagaacgggtaacaacttccagtttagctacgagtttgagaacgtacctttccatagcagctacgctcacagccaaagcctggaccgactaatgaatccactcatcgaccaatacttgtactatctctcaaagactattaacggttctggacagaatcaacaaacgctaaaattcagtgtggccggacccagcaacatggctgtccagggaagaaactacatacctggacccagctaccgacaacaacgtgtctcaaccactgtgactcaaaacaacaacagcgaatttgcttggcctggagcttcttcttgggctctcaatggacgtaatagcttgatgaatcctggacctgctatggccagccacaaagaaggagaggaccgtttctttcctttgtctggatctttaatttctggcaaacaaggaactggaagagacaacgtggatgcgaacaaagtcatgataaccaacgaagaagaaattaaaactactaacccggtagcaacggagtcctatggacaagtggccacaaaccaccagagtgcccaagcacaggcgcagaccggctgggttcaaaaccaaggaatacttccgggtatggtttggcaggacagagatgtgtacctgcaaggacccatttgggccaaaattcctcacacggacggcaactttcacccttctccgctgatgggagggtttgaaatgaagcacccgcctcctcagatcctcatcaaaaacacacctgtacctgcggatcctccaacggccttcaacaaggacaagctgaactctttcatcacccagtattctactggccaagtcagcgtggagatcgagtgggagctgcagaaggaaaacagcaagcgctggaacccggagatccagtacacttccaactattacaagtctaataatgttgaatttgctgttaatactgaaggtgtatatagtgaaccccgccccattggcaccagatacctgactcgtaatctg

SEQ ID NO: 652 - DNA, 2208 bp, Artificial Sequence
  source: /note="Description of Artificial Sequence: Synthetic polynucleotide"
atggctgccgatggttatcttccagattggctcgaggacaaccttagtgaaggaattcgcgagtggtgggctttgaaacctggagcccctcaacccaaggcaaatcaacaacatcaagacaacgctcgaggtcttgtgcttccgggttacaaataccttggacccggcaacggactcgacaagggggagccggtcaacgcagcagacgcggcggccctcgagcacgacaaggcctacgaccagcagctcaaggccggagacaacccgtacctcaagtacaaccacgccgacgccgagttccaggagcggctcaaagaagatacgtcttttgggggcaacctcgggcgagcagtcttccaggccaaaaagaggcttcttgaacctcttggtctggttgaggaagcggctaagacggctcctggaaagaagaggcctgtagagcagtctcctcaggaaccggactcctccgcgggtattggcaaatcgggtgcacagcccgctaaaaagagactcaatttcggtcagactggcgacacagagtcagtcccagaccctcaaccaatcggagaacctcccgcagccccctcaggtgtgggatctcttacaatagcttcaggtggtggcgcaccagtggcagacaataacgaaggtgccgatggagtgggtagttcctcgggaaattggcattgcgattcccaatggctgggggacagagtcatcaccaccagcacccgaacctgggccctgcccacctacaacaatcacctctacaagcgaatctccaacagcacatctggaggatcttcaaatgacaacgcctacttcggctacagcaccccctgggggtattttgacttcaacagattccactgccacttctcaccacgtgactggcagcgactcatcaacaacaactggggattccggcctaagcgactcaacttcaagcttttcaacattcgggtcaaagaggttacggacaacaatggagtcaagaccatcaccaataaccttaccagcacggtccaggtcttcacggactcagactatcagctcccgtacgtgcttgggtcggctcacgagggctgcctcccgccgttcccagcggacgttttcatgattcctcagtacgggtatctgacgcttaatgatggaagccaggccgtgggtcgttcgtccttttactgcctggaatatttcccgtcgcaaatgctaagaacgggtaacaacttccagttcagctacgagtttgagaacgtacctttccatagcagctacgctcacagccaaagcctggaccgactaatgaatccactcatcgaccaatacttgtactatctctcaaagactattaacggttctggacagaatcaacaaacgctaaaattcagtgtggccggacccagcaacatggctgtccagggaagaaactacatacctggacccagctaccgacaacaacgtgtctcaaccactgtgactcgaaacaacaacagcgaatttgcttggcctggagcttcttcttgggctctcaatggacgtaatagcttgatgaatcctggacctgctatggccagccacaaagaaggagaggaccgtttctttcctttgtctggatctttaatttttggcaaacaaggaactggaagagacaacgtggatgcggacaaagtcatgataaccaacgaagaagaaattaaaactactaacccggtagcaacggagtcctatggacaagtggccacaaaccaccagagtgcccaagcacaggcgcagaccggctgggttcaaaaccaaggaatacttccgggtatggtttggcaggacagagatgtgtacctgcaaggacccatttgggccaaaattcctcacacggacggcaactttcacccttctccgctgatgggagggtttggagtgaagcacccgcctcctcagatcctcatcaaaaacacacctgtacctgcggatcctccaacggccttcaacaaggacaagctgaactctttcatcacccagtattctactggccaagtcagcgtggagatcgagtgggagctgcagaaggaaaacagcaagcgctggaacccggagatccagtacacttccaactattacaagtctaataatgttgaatttgctgttaatactgaaggtgtatatagtgaaccccgccccattggcaccagatacctgactcgtaatctg

SEQ ID NO: 653 - DNA, 2208 bp, Artificial Sequence
  source: /note="Description of Artificial Sequence: Synthetic polynucleotide"
atggctgccgatggttatcttccagattggctcgaggacaaccttagtgaaggaattcgcgagtggtgggctttgaaacctggagcccctcaacccaaggcaaatcaacaacatcaagacaacgctcgaggtcttgtgcttccgggttacaaataccttggacccggcaacggactcgacaagggggagccggtcaacgcagcagacgcggcggccctcgagcacgacaaggcctacgaccagcagctcaaggccggagacaacccgtacctcaagtacaaccacgccgacgccgagttccaggagcggctcaaagaagatacgtcttttgggggcaacctcgggcgagcagtcttccaggccaaaaagaggcttcttgaacctcttggtctggttgaggaagcggctaagacggctcctggaaagaagaggcctgtagagcagtctcctcaggaaccggactcctccgcgggtattggcaaatcgggcgcacagcccgctaaaaagagactcaatttcggtcagactggcgacacagagccagtcccagaccctcaaccaatcggagaacctcccgcagccccctcaggtgtgggatctcttacaatggcttcaggtggtggcgcaccagtggcagacaataacgaaggtgccgatggagtgggtagttcctcgggaaattggcattgcgattcccaatggctgggggacagagtcatcaccaccagcacccgaacctgggccctgcccacctacaacaatcacctctacaagcaaatctccaacagcacatctggaggatcttcaaatgacaacgcctacttcggctacagcaccccctgggggtattttgacttcaacagattccactgccacttctcaccacgtgactggcagcgactcatcaacaacaactggggattccggcctaagcgactcaacttcaagctcttcaacattcaggtcaaagaggttacggacaacaatggagtcaagaccatcgccaataaccttaccagcacggtccaggtcttcacggactcagactatcagctcccgtacgtgctcgggtcggctcacgagggctgcctcccgccgttcccagcgggcgttttcatgattcctcagtacgggtatctgacgcttaatgatggaagccaggccgtgggtcgttcgtccttttactgcctggaatatttcccgtcgcaaatgctaagaacgggtaacaacttccagttcagctacgagtttgagaacgtacctttccatagcagctacgctcacagccaaagcctggaccgactaatgaatccactcatcgaccaatacttgtactatctctcaaagactattaacggttctggacagaatcaacaaacgctaaaattcagtgtggccggacccagcaacatggctgtccagggaagaaactacatacctggacccagctaccgacaacaacgtgtctcaaccactgcgactcaaaacaacaacagcgaatttgcttggcctggagcttcttcttgggctctcaatggacgtaatagcttgatgaatcctggacctgctatggccagccacaaagaaggagaggaccgtttctttcctttgtctggatctttaatttttggcaaacaaggaactggaagagacaacgtggatgcggacaaagtcatgataaccaacgaagaagaaattaaaactactaacccggtagcaacggagtcctatggacaagtggccacaaaccaccagagtgcccaagcacaggcgcagaccggctgggttcaaaaccaaggaatacttccgggtatggtttggcaggacagagatgtgtacctgcaaggacccatttgggccaaaattcctcacacggacggcaactttcacccttctccgctgatgggagggtttggaatgaagcacccgcctcctcagatcctcatcaaaaacacacctgtacctgcggatcctccaacggccttcaacaaggacaagctgaactctttcatcacccagtattctactggccaagtcagcgtggagatcgagtgggagctgcagaaggaaaacagcaagcgctggaacccggagatccagtacacttccaactattacaagtctaataatgttgaatttgctgttaatactgaaggtgtatatagtgaaccccgccccattggcaccagatacctgactcgtaatctg

SEQ ID NO: 654 - DNA, 2208 bp, Artificial Sequence
  source: /note="Description of Artificial Sequence: Synthetic polynucleotide"
atggctgccgatggttatcttccagattggctcgaggacaaccttagtgaaggaattcgcgagtggtgggctttgaaacctggagcccctcaacccaaggcaaatcaacaacatcaagacaacgctcgaggtcttgtgcttccgggttacaaataccttggacccggcaacggactcgacaagggggagccggtcaacgcagcagacgcggcggccctcgagcacgacaaggcctacgaccagcagctcaaggccggagacaacccgtacctcaagtacaaccacgccgacgccgggttccaggagcggctcaaagaagatacgtcttttgggggcaacctcgggcgagcagtcttccaggccaaaaagaggcttcttgaacctcttggtctggttgaggaagcggctaagacggctcctggaaagaagaggcctgtagagcagtctcctcaggaaccggactcctccgcgggtattggcaaatcgggtgcacagcccgctaaaaagagactcaatttcggtcagactggcgacacagagtcagtcccagtccctcaaccaatcggagaacctcccgcagccccctcaggtgtgggatctcttacaatggcttcaggtggtggcgcaccagtggcagacaataacgaaggtgccgatggagtgggtagttcctcgggaaattggcattgcgattcccaatggctgggggacagagtcatcaccaccagcacccgaacctgggccctgcccacctacaacaatcacctctacaagcaaatctccaacagcacatctggaggatcttcaaatgacaacgcctacttcggctacagcaccccctgggggtattttgacttcaacagattccactgccacttctcaccacgtgactggcagcgactcatcaacaacaactggggattccggcctaagcgactcaacttcaagctcttcaacattcaggtcaaagaggttacggacaacaatggagtcaagaccatcgccaataaccttaccagcacggtccaggtcttcacggactcagactatcagctcccgtacgtgctcgggtcggctcacgagggctgcctcccgccgttcccagcggacgttttcatgattcctcagtacgggtatctgacgcttaatgatggaagccaggccgtgggtcgttcgtccttttactgcctggaatatttcccgtcgcaaatgctaagaacgggtaacaacttccagttcagctacgagtttgagaacgtacctttccatagcagctacgctcacagccaaagcctggaccgactaatgaatccactcatcgaccaatacttgtactatctctcaaagactattaacggttctggacagaatcaacaaacgctaaaattcagtgtggccggacccagcaacatggctgtccagggaagaaactacatacctggacccagctaccgacaacaacgtgtctcaaccactgtgactcaaaacaacaacagcgaatttgcttggcctggagcttcttcttgggctctcaatggacgtaatagcttgatgaatcctggacctgctatggccagccacaaagaaggagaggaccgtttctttcctttgtctggatctttaatttttggcaaacaaggagctggaagagacaacgtggatgcggacaaagtcatgataaccaacgaagaagaaattaaaactactaacccggtagcaacggagtcctatggacaagtggccacaaaccaccagagtgcccaagcacaggcgcagaccggctgggttcaaaaccaaggaatacttccgggtatggtttggcaggacagagatgtgtacctgcaaggacccatttgggccaaaattcctcacacggacggcaactttcacccttctccgctgatgggagggtttggaatgaagcacccgcctcctcagatcctcatcaaaaacacacctgtacctgcggatcctccaacggccttcaacaaggacaagctgaactctttcatcacccagtattctactggccaagtcagcgtggagatcgagtgggagctgcagaaggaaaacagcaagcgctggaacccggagatccagtacacttccaactattacaagtctaataatgttgaatttgctgttaatactgaaggtgtatatagtgaaccccgccccattggcaccagatacctgactcgtaatctg

SEQ ID NO: 655 - DNA, 2208 bp, Artificial Sequence
  source: /note="Description of Artificial Sequence: Synthetic polynucleotide"
  modified_base (377)..(377): a, c, g or t
atggctgccgatggttatcttccagattggctcgaggacaaccttagtgaaggaattcgcgagaggtgggctttgaaacctggagcccctcaacccaaggcaaatcaacaacatcaagacaacgctcgaggtcttgtgcttccgggttacaaataccttggacccggcaacggactcgacaagggggagccggtcaacgcagcagacgcggcggccctcgagcacgacaaggcctacgaccagcagctcaaggccggagacaacccgtacctcaagtacaaccacgccgacgccgagttccaggagcggctcaaagaagatacgtcttttgggggcaacctcgggcgagcagtcttccaggccaaaaagaggcttcntgaacctcttggtctggttgaggaagcggctaagacggctcctggaaagaagaggcctgtagagcagtctcctcaggaaccggactcctccgcgggtattggcaaatcgggtgcacagcccgctaaaaagagactcaatttcggtcagactggcgacacagagtcagtcccagaccctcaaccaatcggagaacctcccgcagccccctcaggtgtgggatctcttacaatggcttcaggtggtggcgcaccagtggcagacaataacgaaggtgccgatggagtgggtagttcctcggggaattggcattgcgattcccaatggctgggggacagagtcatcaccaccagcacccgaacctgggccctgcccacctacaacaatcacctctacaagcaaatctccaacagcacatctggaggatcttcaaatgacaacgcctacttcggctacagcaccccctgggggtattttgacttcaacagattccactgccacttctcaccacgtgactggcagcgactcatcaacaacaactggggattccggcctaagcgactcaacttcaagctcttcaacattcaggtcaaagaggttacggacaacaatggagtcaagaccatcgccaataaccttaccagcacggtccaggtcttcacggactcagactatcagctcccgtacgtgctcgggtcggctcacgagggctgcctcccgccgttcccagcggacgttttcatgattcctcagtacgggtatctgacgcttaatgatggaagccaggccgtgggtcgttcgtccttttactgcctggaatatttcccgtcgcaaatgctaagaacgggtaacaacttccagttcagctacgagtttgagaacgtacctttccatagcagctacgctcacagccaaagcccggaccgactaatgaatccactcatcgaccaatacttgtactatctctcaaagactattaacggttctggacagaatcaacaaacgctaaaattcagtgtggccggacccagcaacatggctgtccagggaagaaactacatacctggacccagctaccgacaacaacgtgtctcaaccactgtgactcaaaacaacaacagcgaatttgcttggcctggagcttcttcttgggctctcaatggacgtaatagcttgatgaatcctggacctgctatggccagccacaaagaaggagaggaccgtttctttcctttgtctggatctttaatttttggcaaacaaggaactggaagagacaacgtggatgcggacaaagtcatgataaccaacgaagaagaaattaaaactactaacccggtagcaacggagtcctatggacaagtggccacaaaccaccagagtgcccaagcacaggcgcagaccggctgggttcaaaaccaaggaatacttccgggtatggtttggcaggacagagatgtgtacctgcaaggacccatttgggccaaaattcctcacacggacggcaactttcacccttctccgctgatgggagggtttggagtgaagcacccgcctcctcagatcctcatcaaaaacacacctgtacctgcggatcctccaacggccttcaacaaggacaagctgaactctttcatcacccagtattctactggccaagtcagcgtggagatcgagtgggagctgcagaaggaaaacagcaagcgctggaacccggagatccagtacacttccaactattacaagtctaataatgttgaatttgctgttaatactgaaggtgtatatagtgaaccccgccccattggcaccagatacctgactcgtaatctg

SEQ ID NO: 656 - DNA, 2208 bp, Artificial Sequence
  source: /note="Description of Artificial Sequence: Synthetic polynucleotide"
atggctgccgatggttatcttccagattggctcgaggacaaccttagtgaaggaattcgcgagtggtgggctttgaaacctggagcccctcaacccaaggcaaatcaacaacatcaagacaacgctcgaggtcttgtgcttccgggttacaaataccttggacccggcaacggactcgacaagggggagccggtcaacgcagcagacgcggcggccctcgagcacgacaaggcctacgaccagcagctcaaggccggagacaacccgtacctcaagtacaaccacgccgacgccgagttccaggagcggctcaaagaagatacgtcttttgggggcaacctcgggcgagcagtcttccaggccaaaaagaggcttcttgaacctcttggtctggttgaggaagcggctaagacggctcctggaaagaagaggcctgtagagcagtctcctcaggaaccggactcctccgcgggtattggcaaatcgggtgcacagcccgctaaaaagagactcaatttcggtcagactggcgacacagagtcagtcccagaccctcaaccaatcggagaacctcccgcagccccctcaggtgtgggatctcttacaatggcttcaggtggtggcgcaccagtggcagacaataacgaaggtgccgatggagtgggtagttcctcgggaaattggcattgcgattcccaatggctgggggacagagtcatcaccaccagcacccgaacctgggccctgcccacctacaacaatcacctctacaagcaaatctccaacagcacatctggaggatcttcaaatgacaacgcctacctcggctacagcaccccctgggggtattttgacttcaacagattccactgccacttctcaccacgtgactggcagcgactcatcaacaacaactggggattccggcctaagcgactcaacttcaagctcttcaacattcaggtcaaagaggttacggacaacaatggagtcaagaccatcgccaataaccttaccagcacggtccaggtcttcacggactcagactatcagctcccgtacgtgctcgggtcggctcacgagggctgcctcccgccgttcccagcggacgttttcatgattcctcagtacgggtatctgacgcttaatgatggaagccaggccgtgggtcgttcgtccttttactgcctggaatatttcccgtcgcaaatgctaagaacgggtaacaacttccagttcagctacgagtttgagaacgtacctttccatagcagctacgctcacagccaaagcctggaccgactaatgaatccactcatcgaccaatacttgtactatctctcaaagactattaacggttctggacagaatcaacaaacgctaaaattcagtgtggccggacccagcaacatggctgtccagggaagaaactacatacctggacccagctaccgacaacaacgtgtctcaaccactgtgactcaaaacaacaacagcgaatttgcttggcctggagcttcttcttgggctctcaatggacgtaatagcttgatgaatcctggacctgctatggccagccacaaagaaggagaggaccgtttctttcctttgtctggatctttaatttttggcaaacaaggaactggaagagacaacgtggatgcggacaaagtcatgataaccaacgaagaagaaattaaaactactaacccggtagcaacggagtcctatggacaagtggccacaaaccaccagagtgcccaagcacaggcgcagaccggctgggttcaaaaccaaggaatacttccgggtatggtttggcaggacagagatgtgtacctgcaaggacccatttgggccaaaattcctcacacggacggcaactttcacccttctccgctgatgggagggtttggaatgaagcacccgcctcctcagatcctcatcaaaaacacacctgtacctgcggatcctccaacggccttcaacaaggacaagctgaactctttcatcacccagtattctactggccaagtcagcgtggagatcgagtgggagctgcagaaggaaaacagcaagcgctggaacccggagatccagtacacttccaactattacaagtctaataatgttgaatttgctgttaatactgaaggtgtatatagtgaaccccgccccattggcaccagatacctgactcgtaatctg

SEQ ID NO: 657 - DNA, 2208 bp, Artificial Sequence
  source: /note="Description of Artificial Sequence: Synthetic polynucleotide"
atggctgccgatggttatcttccagattggctcgaggacaaccttagtgaaggaattcgcgagtggtgggctttgaaacctggagcccctcaacccaaggcaaatcaacaacatcaagacaacgctcgaggtcttgtgcttccgggttacaaataccttggacccggcaacggactcgacaagggggagccggtcaacgcagcagacgcggcggccctcgagcacgacaaggcctacgaccagcagctcaaggccggagacaacccgtacctcaagtacaaccacgccgacgccgagttccaggagcggctcaaagaagatacgtcttttgggggcaacctcgggcgagcagtcttccaggccaaaaagaggcttcttgaacctcttggtctggttgaggaagcggctaagacggctcctggaaagaagaggcctgtagagcagtctcctcaggaaccggactcctccgcgggtattggcaaatcgggtgcacagcccgctaaaaagagactcaatttcggtcagactggcgacacagagtcagtcccagaccctcaaccaatcggagaacctcccgcagccccctcaggtgtgggatctcttacaatggcttcaggtggtggcgcaccagtggcagacaataacgaaggtgccgatggagtgggtagttcctcgggaaattggcattgcgattcccaatggctgggggacagagtcatcaccaccagcacccgaacctgggccctgcccacctacaacaatcacctctacaagcaaatctccaacagcacatctggaggatcttcaaatgacaacgcctacttcggctacagcaccccctgggggtattttgacttcaacagattccactgccacttctcaccacgtgactggcagcgactcatcaacaacaactggggattccggcctaagcgactcaacttcaagctcttcaacattcaggtcaaagaggttacggacaacaatggagtcaagaccatcgccaataaccttaccagcacggtccaggtcttcacggactcagactatcagctcccgtacgtgctcgggtcggctcacgagggctgcctcccgccgttcccagcggacgttttcatgattcctcagtacgggtatctgacgcttaatgatggaagccaggccgtgggtcgttcgtccttttactgcctggaatatttcccgtcgcaaatgctaagaacgggtaacaacttccagttcagctacgagtttgagaacgtacctttccatagcagctacgctcacagccagagcctggaccgactaatgaatccactcatcgaccaatacttgtactatctctcaaagactattaacggttctggacagaatcaacaaacgctaaaattcagtgtggccggacccagcaacatggctgtccagggaagaaactacatacctggacccagctaccgacaacaacgtgtctcaaccactgtgactcaaaacaacaacagcgaatttgcttggcctggagcttcttcttgggctctcaatggacgtaatagcttgatgaatcctggacctgctatggccagccacaaagaaggagaggaccgtttctttcctttgtctggatctttaatttttggcaaacaaggaactggaagagacaacgtggatgcggacaaagtcatgataaccaacgaagaagaaattaaaactactaacccggtagcaacggagtcctatggacaagtggccacaaaccaccagagtgcccaagcacaggcgcagaccggctgggttcaaaaccaaggaatacttccgggtatggtttggcaggacagagatgtgtacctgcaaggacccatttgggccaaaattcctcacacggacggcaactttcacccttctccgctgatgggagggtttggaatgaagcacccgcctcctcagatcctcatcaaaaacacacctgtacctgcggatcctccaacggccttcaacaaggacaagctggactctttcatcacccagtattctactggccaagtcagcgtggagatcgagtgggagctgcagaaggaaaacagcaagcgctggaacccggtgatccagtacacttccaactattacaagtctaataatgttgaatttgctgttaatactgaaggtgtatatagtgaaccccgccccattggcaccagatacctgactcgtaatctg

SEQ ID NO: 658 - DNA, 2208 bp, Artificial Sequence
  source: /note="Description of Artificial Sequence: Synthetic polynucleotide"
atggctgccgatggttatcttccagattggctcgaggacaacctctctgagggcattcgcgagtggtgggacttgaaacctggagccccgaagcccaaagccaaccagcaaaagcaggacgacggccggggtctggtgcttcctggctacaagtacctcggacccttcaacggactcgacaagggggagcccgtcaacgcggcggacgcagcggccctcgagcacgacaaggcctacgaccagcagctcaaagcgggtgacaatccgtacctgcggtataaccacgccgacgccgagtttcaggagcgtctgcaagaagatacgtcttttgggggcaacctcgggcgagcagtcttccaggccaagaagcgggttctcgaacctctcggtctggttgaggaaggcgctaagacggctcctggaaagaaacgtccggtagagcagtcgccacaagagccagactcctcctcgggcatcggcaagacaggccagcagcccgctaaaaagagactcaattttggtcagactggcgactcagagtcagtccccgatccacaacctctcggagaacctccagcaacccccgctgctgtggggcctactacaatggcttcaggcggtggcgcaccaatggcagacaataacgaaggcgtcgacggagtgggtaatgcctcaggaaattggcattgcgattccacatggctgggcgacagagtcatcaccaccagcacccgcacctgggccttgcccacctacaataaccacctctacaagcaaatctccagtgcttcaacgggggccagcaacgacaaccactacttcggctacagcaccccctgggggtattttgatttcaacagattccactgccacttttcaccacgtgactggcagcgactcatcaacaacaattggggattccggcccaagagactcaacttcaaactcttcaacatccaagtcaaggaggtcacgacgaatgatggcgttacaaccatcgctaataaccttaccagcacggttcaagtcttctcggactcggagtaccagcttccgtacgtcctcggctctgcgcaccagggctgcctccctccgttcccggcggacgtgttcatgattccgcaatacggctacctgacgctcaacaatggcagccaagccgtgggacgttcatccttttactgcctggaatatttcccttctcagatgctgagaacgggcaacaactttaccttcagctacacctttgaggaagtgcctttccacagcagctacgcgcacagccagagcctggaccggctgatgaatcctctcatcgaccaatacctgtattacctgaacagaactcaaaatcagtccggaagtgcccaaaacaaggacttgctgtttagccgtgggtctccagctggcatgtctgttcagcccaaaaactggctacctggaccctgttatcggcagcagcgcgtttctaaaacaaaaacagacaacaacaacagcaattttacctggactggtgcttcaaaatataacctcaatgggcgtgaatccatcatcaaccctggcactgctatggcctcacacaaagacgacgaagacaagttctttcccatgagcggtgtcatgatttttggaaaagagagcgccggagcttcaaacactgcattggacaatgtcatgattacagacgaagaggaaattaaagccactaaccctgtggccaccgaaagatttgggaccgtggcagtcaatttccagagcagcagcacagaccctgcgaccggagatgtgcatgctatgggagcattacctggcatggtgtggcaagatagagacgtgtacctgcagggtcccatttgggccaaaattcctcacacagatggacactttcacccgtctcctcttatgggcggctttggactcaagaacccgcctcctcagatcctcatcaaaaacacgcctgttcctgcgaatcctccggcggagttttcagccacaaagcttgcttcattcatcacccaatactccacaggacaagtgagtgtggaaattgaatgggagctgcagaaagaaaacagcaagcgctggaatcccgaagtgcagtacacatccaattatgcaaaatctgccaacgttgattttactgtggacaacaatggactttatactgagcctcgccccattggcacccgttaccttacccgtcccctg

SEQ ID NO: 659 - DNA, 2208 bp, Artificial Sequence
  source: /note="Description of Artificial Sequence: Synthetic polynucleotide"
atggctgccgatggttatcttccagattggctcgaggacaacctctctgagggcattcgcgagtggtgggacttgaaacctggagccccgaagcccaaagccaaccagcaaaagcaggacgacggccggggtctggtgcttcctggctacaagtacctcggacccttcaacggactcgacaagggggagcccgtcaacgcggcggacgcagcggccctcgagcacgacaaggcctacgaccagcagctcaaagcgggtgacaatccgtacctgcggtataaccacgccgacgccgagtttcaggagcgtctgcaagaagatacgtcttttgggggcaacctcgggcgagcagtcttccaggccaagaagcgggttctcgaacctctcggtctggttgaggaaggcgctaagacggctcctggaaagagacgtccggtagagcagtcgccacaagagccagactcctcctcgggcatcggcaagacaggccagcagcccgctaaaaagagactcaattttggtcagactggcgactcagagtcagtccccgatccacaacctctcggagaacctccagcaacccccgctgctgtgggacctactacaatggcttcaggcggtggcgcaccaatggcagacaataacgaaggcgccgacggagtgggtaatgcctcaggaaattggcattgcgattccacatggctgggcgacagagtcatcaccaccagcacccgcacctgggccttgcccacctacaataaccacctctacaagcaaatctccagtgcttcaacgggggccagcaacgacaaccactacttcggctacagcaccccctgggggtattttgatttcaacagattccactgccacttttcaccacgtgactggcagcgactcatcaacaacaattggggattccggcccaagagactcaacttcaaactcttcaacatccaagtcaaggaggtcacgacgaatgatggcgtcacaaccatcgctaataaccttaccagcacggttcaagtcttctcggactcggagtaccagcttccgtacgtcctcggctctgcgcaccagggctgcctccctccgttcccggcggacgtgttcatgattccgcaatacggctacctgacgctcaacaatggcagccaagccgtgggacgttcatccttttactgcctggaatatttcccttctcagatgctgagaacgggcaacaactttaccttcagctacacctttgaggaagtgcctttccacagcagctacgcgcacagccagagcctggaccggctgatgaatcctctcatcgaccaatacctgtattacctgaacagaactcaaaatcagtccggaagtgcccaaaacaaggacttgctgtttagccgtgggtctccagctggcatgtctgttcagcccaaaaactggctacctggaccctgttatcggcagcagcgcgtttctaaaacaaaaacagacaacaacaacagcaattttacctggactggtgcttcaaaatataacctcaatgggcgtgaatccatcatcaaccctggcactgctatggcctcacacaaagacgacgaagacaagttctttcccatgagcggtgtcatgatttttggaaaagagagcgccggagcttcaaacactgcattggacaatgtcatgattacagacgaagaggaaattaaagccactaaccctgtggccaccgaaagatttgggaccgtggcagtcaatttccagagcagcagcacagaccctgcgaccggagatgtgcatgctatgggagcattacctggcatggtgtggcaagatagagacgtgtacctgcagggtcccatttgggccaaaattcctcacacagatggacactttcacccgtctcctcttatgggcggctttggactcaagaacccgcctcctcagatcctcatcaaaaacacgcctgttcctgcgaatcctccggcggagttttcagctacaaagtttgcttcgttcatcacccaatactccacaggacaagtgagtgtggaaattgaatgggagctgcagaaagaaaacagcaagcgctggaatcccgaagtgcagtacacatccaattatgcaaaatctgccaacgttgattttactgtggacaacaatggactttatactgagcctcgccccattggcacccgttaccttacccgtcccctg

SEQ ID NO: 660 - DNA, 2208 bp, Artificial Sequence
  source: /note="Description of Artificial Sequence: Synthetic polynucleotide"
atggctgccgatggttatcttccagattggctcgaggacaacctctctgagggcattcgcgagtggtgggacttgaaacctggagccccgaagcccaaagccaaccagcaaaagcaggacgacggccggggtctggtgcttcctggctacaagtacctcggacccttcaacggactcgacaagggggagcccgtcaacgcggcggacgcagcggccctcgagcacgacaaggcctacgaccagcagctcaaagcgggtgacaatccgtacccgcggtataaccacgccgacgccgagtttcaggagcgtctgcaagaagatacgtcttttgggggcaacctcgggcgagcagtcttccaggccaagaagcgggttctcgaacctctcggtctggttggggaaggcgctaagacggctcctggaaagaaacgtccggtagagcagtcgccacaagagccagactcctcctcgggcatcggcaagacaggccagcagcccgctaaaaagagactcaattttggtcagactggcgactcagagtcagtccccgatccacaacctctcggagaacctccagcaacccccgctgctgtgggacctactacaatggcttcaggcggtggcgcaccaatggcagacaataacgaaggcgccgacggagtgggtaatgcctcaggaaattggcattgcgattccacatggctgggcgacagagtcatcaccaccagcacccgcacctgggccttgcccacctacaataaccacctctacaagcaaatctccagtgcttcaacgggggccagcaacgacaaccactacttcggctacagcaccccctgggggtattttgatttcaacagattccactgccacttttcaccacgtgactggcagcgactcatcaacaacaattggggattccggcccaagagactcaacttcaaactcttcaacatccaagtcaaggaggtcacgacgaatgatggcgtcacaaccatcgctaataaccttaccagcacggttcaagtcttctcggactcggagtaccagcttccgtacgtcctcggctctgcgcaccagggctgcctccctccgttcccggcggacgtgttcatgattccgcaatacggctacctgacgctcaacaatggcagccaagccgtgggacgttcatccttttactgcctggaatatttcccttctcagatgctgagaacgggcaacaactttaccttcagctacacctttgaggaagtgcctttccacagcagctacgcgcacagccagagcctggaccggctgatgaatcctcccatcgaccaatacctgtattacctgaacagaactcaaaatcagtccggaagtgcccaaaacaaggacttgctgtttagccgtgggtctccagctggcatgtctgttcagcccaaaaactggctacctggaccctgttatcggcagcagcgcgtttctaaaacaaaaacagacaacaacaacagcaattttacctggactggtgcttcaaaatataacctcaatgggcgtgaatccatcatcaaccctggcactgctatggcctcacacaaagacgacgaagacaagttctttcccatgagcggtgtcatgatttttggaaaagagagcgccggagcttcaaacactgcattggacaatgtcatgattacagacgaagaggaaattaaagccactaaccctgtggccaccgaaagatttgggaccgtggcagtcaatttccagagcagcagcacagaccctgcgaccggagatgtgcatgctatgggagcattacctggcatggtgtggcaagatagagacgtgtacctgcagggtcccatttgggccaaaattcctcacacagatggacactttcacccgtctcctcttatgggcggctttggactcaagaacccgcctcctcagatcctcatcaaaaacacgcctgttcctgcgaatcctccggcggagttttcagctacaaagtttgcttcattcatcacccaatactccacaggacaagtgagtgtggaaattgaatgggagctgcagaaagaaaacagcaagcgctggaatcccgaagtgcagtacacatccaattatgcaaaatctgccaacgttgattttactgtggacaacaatggactttatactgagcctcgccccattggcacccgttaccttacccgtcccctg

SEQ ID NO: 661 - DNA, 2208 bp, Artificial Sequence
  source: /note="Description of Artificial Sequence: Synthetic polynucleotide"
atggctgccgatggttatcttccagattggctcgaggacaacctctctgagggcattcgcgagtggtgggacttgaaacctggagccccgaagcccaaagccaaccagcaaaagcaggacgacggccggggtctggtgcttcctggctacaagtacctcggacccttcaacggactcgacaagggggagcccgtcaacgcggcggacgcagcggccctcgagcacgacaaggcctacgaccagcagctcaaagcgggtgacaatccgtacctgcggtataaccacgccgacgccgagtttcaggagcgtctgcaagaagatacgtcttttgggggcaacctcgggcgagcagtcttccaggccaagaagcgggttctcgaacctctcggtctggttgaggaaggcgctaagacggctcctggaaagaaacgtccggtagagcagtcgccacaagagccagactcctcctcgggcatcggcaagacaggccagcagcccgctaaaaagagactcaattttggtcagactggcgactcagagtcagtccccgatccacgacctctcggagaacctccagcaacccccgctgctgtgggacctactacaatggcttcaggcggtggcgcaccaatggcagacaataacgaaggcgccgacggagtgggtaatgcctcaggaaattggcattgcgattccacatggctgggcgacagagtcatcaccaccagcacccgcacctgggccttgcccacctacaataaccacctctacaagcaaatctccagtgcttcaacgggggccagcaacgacaaccactacttcggctacagcaccccctgggggtattttgatttcaacagattccactgccacttttcaccacgcgactggcagcgactcatcaacaacaattggggattccggcccaagagactcaacttcaaactcttcaacatccaagtcaaggaggtcacgacgaatgatggcgtcacaaccatcgctaataaccttaccagcacggttcaagtcttctcggactcggagtaccagcttccgtacgtcctcggctctgcgcaccagggctgcctccctccgttcccggcggacgtgttcatgattccgcaatacggctacctgacgctcaacaatggcagccaagccgtgggacgttcatccttttactgcctggaatatttcccttctcagatgctgagaacgggcaacaactttaccttcagctacacctttgaggaagtgcctttccacagcagctacgcgcacagccagagcctggaccggctgatgaatcctctcatcgaccaatacctgtattacctgaacagaactcaaaatcagtccggaagtgcccaaaacaaggacttgctgtttagccgtgggcctccagctggcatgtctgttcagcccaaaaactggctacctggaccctgttatcggcagcagcgcgtttctaaaacaaaaacagacaacaacaacagcaattttacctggactggtgcttcaaaatataacctcaatgggcgtgaatccatcatcaaccctggcactgctatggcctcacacaaagacgacgaagacaagttctttcccatgagcggtgtcatgatttttggaaaagagagcgccggagcttcaaacactgcattggacaatgtcatgattacggacgaagaggaaattaaagccactaaccctgtggccaccgaaagatttgggaccgtggcagtcaatttccagagcagcagcacagaccctgcgaccggagatgtgcatgctatgggagcattacctggcatggtgtggcaagatagagacgtgtacctgcagggtcccatttgggccaaaattcctcacacagatggacactttcacccgtctcctcttatgggcggctttggactcaagaacccgcctcctcagatcctcatcaaaaacacgcctgttcctgcgaatcctccggcggagttttcagctacaaagtttgcttcattcatcacccaatactccacaggacaagtgagtgtggaaattgaatgggagctgcagaaagaaaacagcaagcgctggaatcccgaagtgcagtacacatccaattatgcaaaatctgccaacgttgattttactgtggacaacaatggactttatactgagcctcgccccattggcacccgttaccttacccgtcccctg

SEQ ID NO: 662 - DNA, 2208 bp, Artificial Sequence
  source: /note="Description of Artificial Sequence: Synthetic polynucleotide"
atggctgccgatggttatcttccagattggctcgaggacaacctctctgagggcattcgcgagtggtgggacttgaaacctggagccccgaagcccaaagccaaccagcaaaagcaggacgacggccggggtctggtgcttcctggctacaagtacctcggacccttcaacggactcgacaagggggagcccgtcaacgcggcggacgcagcggccctcgagcacgacaaggcctacgaccagcagctcaaagcgggtgacaatccgtacctgcggtataaccacgccgacgccgagtttcaggagcgtctgcaagaagatacgtcttttgggggcaacctcgggcgagcagtcttccaggccaagaagcgggttctcgaacctctcggtctggttgaggaaggcgctaagacggctcctggaaagaaacgtccggtagagcagtcgccacaagagccagactcctcctcgggcatcggcaagacaggccagcagcccgctaaaaagagactcaattttggtcagactggcggctcagagtcagtccccgatccacaacctctcggagaacctccagcaacccccgctgctgtgggacctactacaatggcttcaggcggtggcgcaccaatggcagacaataacgaaggcgccgacggagtgggtaatgcctcaggaaattggcattgcgattccacatggctgggcgacagagtcatcaccaccagcacccgcacctgggccttgcccacctacaataaccacctctacaagcaaatctccagtgcttcaacgggggccagcaacgacaaccactacttcggctacagcaccccctgggggtattttgatttcaacagattccactgccacttttcaccacgtgactggcagcgactcatcaacaacaattggggattccggcccaagagactcaacttcaaactcttcaacatccaagtcaaggaggtcacgacgaatgatggcgtcacaaccatcgctaataaccttaccagcacggttcaagtcttctcggactcggagtaccagcttccgtacgtcctcggctctgcgcaccagggctgcctccctccgttcccggcggacgtgttcatgattccgcaatacggctacctgacgctcaacaatggcagccaagccgtgggacgttcatccttttactgcctggaatatttcccttctcagatgctgagaacgggcaacaactttaccttcagctacacctttgaggaagtgcctttccacagcagctacgcgcacagccagagcctggaccggctgatgaatcctcccatcgaccaatacctgtattacctgaacagaactcaaaatcagtccgggagtgcccaaaacaaggacttgctgtttagccgtgggtctccagctggcatgtctgttcagcccaaaaactggctacctggaccctgttatcggcagcagcgcgtttctaaaacaaaaacagacaacaacaacagcaattttacctggactggtgcttcaaaatataacctcaatgggcgtgaatccatcatcaaccctggcactgctatggcctcacacaaagacgacgaagacaagttctttcccatgagcggtgtcatgatttttggaaaagagagcgccggagcttcaaacactgcattggacaatgtcatgattacagacgaagaggaaattaaagccactaaccctgtggccaccgaaagatttgggaccgtggcagtcaatttccagagcagcagcacagaccctgcgaccggagatgtgcatgctatgggagcattacctggcatggtgtggcaagatagagacgtgtacctgcagggtcccatttgggccaaaattcctcacacagatggacactttcacccgtctcctcttatgggcggctttggactcaagaacccgcctcctcagatcctcatcaaaaacacgcctgttcctgcgaatcctccggcggagttttcagctacaaagtttgcttcattcatcacccaatactccacaggacaagtgagtgtggaaattgaatgggagctgcagaaagaaaacagcaagcgctggaatcccgaagtgcagtacacatccaattatgcaaaatctgccaacgttgactttactgtggacaacaatggactttatactgagcctcgccccattggcacccgttaccttacccgtcccctg

SEQ ID NO: 663 - DNA, 2208 bp, Artificial Sequence
  source: /note="Description of Artificial Sequence: Synthetic polynucleotide"
atggctgccgatggttatcttccagattggctcgaggacaacctctctgagggcattcgcgagtggtgggacttgaaacctggagccccgaagcccaaagccaaccagcaaaagcaggacgacggccggggtctggtgcttcctggctacaagtacctcggacccttcaacggactcgacaagggggagcccgtcaacgcggcggacgcagcggccctcgagcacgacaaggcctacgaccagcagctcaaagcgggtgacaatccgtacctgcggtataaccacgccgacgccgagtttcaagagcgtctgcaagaagatacgtcttttgggggcaacctcgggcgagcagtcttccaggccaagaagcgggttctcgaacctctcggtctggttgaggaaggcgctaagacggctcctggaaagaaacgtccggtagagcagtcgccacaagagccagactcctcctcgggcatcggcaagacaggccagcagcccgctaaaaagagactcaattttggtcagactggcgactcagagtcagtccccgatccgcaacctctcggagaacctccagcaacccccgctgctgtgggacctactacaatggcttcaggcggtggcgcaccaatggcagacaataacgaaggcgccgacggagtgggtaatgcctcaggaaattggcattgcgattccacatggctgggcgacagagtcatcaccaccagcacccgcacctgggccttgcccacctacaataaccacctctacaagcaaatctccagtgcttcaacgggggccagcaacgacaaccactacttcggctacagcaccccctgggggtattttgatttcaacagattccactgccacttttcaccacgtgactggcagcgactcatcaacaacaattggggattccggcccaagagactcaacttcaaactcttcaacatccaagtcaaggaggtcacgacgaatgatggcgtcacaaccatcgctaataaccttaccagcacggttcaagtcttctcggactcggagtaccagcttccgtacgtcctcggctctgcgcaccagggctgcctccctccgttcccggcggacgtgttcatgattccgcaatacggctacctgacgctcaacaatggcagccaagccgtgggacgttcatccttttactgcctggaatatttcccttctcagatgctgagaacgggcaacaactttaccttcagctacacctttgaggaagtgcctttccacagcagctacgcgcacagccagagcctggaccggctgatgaatcctctcatcgaccaatacctgtattacctgaacagaactcaaaatcagtccggaagtgcccaaaacaaggacttgctgtttagccgtgggtctccagctggcatgtctgttcagcccaaaaactggctacctggaccctgttatcggcagcagcgcgtttctaaaacaaaaacagacaacaacaacagcaattttacctggactggtgcttcaaaatataacctcaatgggcgtgaatccatcatcaaccctggcactgctgtggcctcacacaaagacgacgaagacaagttctttcccatgagcggtgtcatgatttttggaaaagagagcgccggagcttcaaacactgcattggacaatgtcatgattacagacgaagaggaaattaaagccactaaccctgtggccaccgaaagatttgggaccgtggcagtcaatttccagagcagcagcacagaccctgcgaccggagatgtgcatgctatgggagcattacctggcatggtgtggcaagatagagacgtgtacctgcagggtcccatttgggccaaaattcctcacacagatggacactttcacccgtctcctcttatgggcggctttggactcaagaacccgcctcctcagatcctcatcaaaaacacgcctgttcctgcgaatcctccggcggagttttcagctacaaagtttgcttcattcatcacccaatactccacaggacaagtgagtgtggaaattgaatgggagctgcagaaagaaaacagcaagcgctggaatcccgaagtgcagtacacatccaattatgcaaaatctgccaacgttgattttactgtggacaacaatggactttatactgagcctcgccccattggcacccgttaccttacccgtcccctg

SEQ ID NO: 664 - DNA, 2208 bp, Artificial Sequence
  source: /note="Description of Artificial Sequence: Synthetic polynucleotide"
atggctgccgatggttatcttccagattggctcgaggacaacctctctgagggcattcgcgagtggtgggacttgaaacctggagccccgaagcccaaagccaaccagcaaaagcaggacgacggccggggtctggtgcttcctggctacaagtacctcggacccttcaacggactcgacaagggggagcccgtcaacgcggcggacgcagcggccctcgagcacgacaaggcctacgaccagcagctcaaagcgggtgacaatccgtacctgcggtataaccacgccgacgccgagtttcaggagcgtctgcaagaagatacgtcttttgggggcaacctcgggcgagcagtcttccaggccaagaagcgggttctcgaacctctcggtctggttgaggaaggcgctaagacggctcctggaaagaaacgtccggtagagcagtcgccacaagagccagactcctcctcgggcatcggcaagacaggccagcagcccgctaaaaagagactcaattttggtcagactggcgactcagagtcagtccccgatccacaacctctcggagaacctccagcaacccccgctgctgtgggacctactacaatggcttcaggcggtggcgcaccaatggcagacaataacgaaggcgccgacggagtgggtaatgcctcaggaaattggcattgcgattccacatggctgggcgacagagtcatcaccaccagcacccgcacctgggccttgcccacctacaataaccacctctacaagcaaatctccagtgcttcaacgggggccagcaacgacaaccactacttcggctacagcaccccctgggggtattttgatttcaacagattccactgccacttttcaccacgtgactggcagcaactcatcaacaacaattggggattccggcccaagagactcaacttcaaactcttcaacatccaagtcaaggaggtcacgacgaatgatggcgtcacaaccatcgctaataaccttaccagcacggttcaagtcttctcggactcggagtaccagcttccgtacgtcctcggctctgcgcaccagggctgcctccctccgttcccggcggacgtgttcatgattccgcaatacggctacctgacgctcaacaatggcagccaagccgtgggacgttcatccttttactgcctggaatatttcccttctcagatgctgagaacgggcaacaactttaccttcagctacacctttgaggaagtgcctttccacagcagctacgcgcacagccagagcctggaccggctgatgaatcctctcatcgaccaatacctgtattacctgaacagaactcaaaatcagtccggaagtgcccaaaacaaggacttgctgtttagccgtgggtctccagctggcatgtctgttcagcccaaaaactggctacctggaccctgttatcggcagcagcgcgtttctaaaacaaaaacagacaacaacaacagcaattttacctggactggtgcttcaaaatataacctcaatgggcgtgaatccatcatcaaccctggcactgctatggcctcacacaaagacgacgaagacaagttctttcccatgagcggtgtcatgatttttggaaaagagagcgccggagcttcaaacactgcattggacaatgtcatgattacagacgaagaggaaattaaagccactaaccctgtggccaccgaaagatttgggaccgtggcagtcaatttccagagcaccagcacagaccctgcgaccggagatgtgcatgctatgggagcattacctggcatggtgtggcaagatagagacgtgtacctgcagggtcccatttgggccaaaattcctcacacagatggacactttcacccgtctcctcttatgggcggctttggactcaagaacccgcctcctcagatcctcatcaaaaacacgcctgttcctgcgaatcctccggcggagttttcagctacaaagtttgcttcattcatcacccaatactccacaggacaagtgagtgtggaaattgaatgggagctgcagaaagaaaacagcaagcgctggaatcccgaagtgcagtacacatccaattatgcaaaatctgccgacgttgattttactgtggacaacaatggactttatactgagcctcgccccattggcacccgttaccttacccgtcccctg

SEQ ID NO: 665 - DNA, 2208 bp, Artificial Sequence
  source: /note="Description of Artificial Sequence: Synthetic polynucleotide"
atggctgccgatggttatcttccagattggctcgaggacaacctctctgagggcattcgcgagtggtgggacttgaaacctggagccccgaagcccaaagccaaccagcaaaagcaggacgacggccggggtctggtgcttcctggctacaagtacctcggacccttcaacggactcgacaagggggagcccgtcaacgcggcggacgcagcggccctcgagcacgacaaggcctacgaccagcagctcaaagcgggtgacaatccgtacctgcggtataaccacgccgacgccgagtttcaagagcgtctgcaagaagatacgtcttttgggggcaacctcgggcgagcagtcttccaggccaagaagcgggttctcgaacctctcggtctggttgaggaaggcgctaagacggctcctggaaagaaacgtccggtagagcagtcgccacaagagccagactcctcctcgggcatcggcaagacaggccagcagcccgctaaaaagagactcaattttggtcagactggcgactcagagtcagtccccgatccgcaacctctcggagaacctccagcaacccccgctgctgtgggacctactacaatggcttcaggcggtggcgcaccaatggcagacaataacgaaggcgccgacggagtgggtaatgcctcaggaaattggcattgcgattccacatggctgggcgacagagtcatcaccaccagcacccgcacctgggccttgcccacctacaataaccacctctacaagcaaatctccagtgcttcaacgggggccagcaacgacaaccactacttcggctacagcaccccctgggggtattttgatttcaacagattccactgccacttttcaccacgtgactggcagcgactcatcaacaacaattggggattccggcccaagagactcaacttcaaactcttcaacatccaagtcaaggaggtcacgacgaatgatggcgtcacaaccatcgctaataaccttaccagcacggttcaagtcttctcggactcggagtaccagcctccgtacgtcctcggctctgcgcaccagggctgcctccctccgttcccggcggacgtgttcatgattccgcaatacggccacctgacgctcaacaatggcagccaagccgtgggacgttcatccttttactgcctggaatatttcccttctcagatgctgagaacgggcaacaactttaccttcagctacacctttgaggaagtgcctttccacagcagctacgcgcacagccagagcctggaccggctgacgaatcctctcatcgaccaatacctgtattacctgaacagaactcaaaatcagtccggaagtgcccaaaacaaggacttgctgtttagccgtgggtctccagctggcatgtctgttcagcccaaaaactggctacctggaccctgttatcggcagcagcgcgtttctaaaacaaaaacagacaacaacaacagcaattttacctggactggtgcttcaaaatataacctcaatgggcgtgaatccatcatcaaccctggcactgctatggcctcacacaaagacgacgaagacaagttctttcccatgagcggtgtcatgatttttggaaaagagagcgccggagcttcaaacactgcattggacaatgtcatgattacagacgaagaggaaattaaagccactaaccctgtggccaccgaaagatttgggaccgtggcagtcaatttccagagcagcagcacagaccctgcgaccggagatgtgcatgctatgggagcattacctggcatggtgtggcaagatagagacgtgtacctgcagggtcccatttgggccaaaattcctcacacagatggacactttcacccgtctcctcttatgggcggctttggactcaagaacccgcctcctcagatcctcatcaaaaacacgcctgttcctgcgaatcctccggcggagttttcagctacaaagtttgcttcattcatcacccaatactccacaggacaagtgagtgtggaaattgaatgggagctgcagaaagaaaacagcaagcgctggaatcccgaagtgcagtacacatccaattatgcaaaatctgccaacgttgattttactgtggacaacaatggactttatactgagcctcgccccattggcacccgttaccttacccgtcccctg

SEQ ID NO: 666 - DNA, 2208 bp, Artificial Sequence
  source: /note="Description of Artificial Sequence: Synthetic polynucleotide"
atggctgccgatggttatcttccagattggctcgaggacaacctctctgagggcattcgcgagtggtgggacttgaaacctggagccccgaagcccaaagccaaccagcaagagcaggacgacggccggggtctggtgcttcctggctacaagtacctcggacccttcaacggactcgacaagggggagcccgtcaacgcggcggacgcagcggccctcgagcacgacaaggcctacgaccagcagctcaaagcgggtgacaatccgtacctgcggtataaccacgccgacgccgagtttcaggagcgtctgcaagaagatacgtcttttgggggcaacctcgggcgagcagtcttccaggccaagaagcgggttctcgaacctctcggtctggttgaggaaggcgctaagacggctcctggaaagaaacgtccggtagagcagtcgccacaagagccagactcctcctcgggcatcggcaagacaggccagcagcccgctaaaaagagactcaattttggtcagactggcgactcagagtcagtccccgatccacaacctctcggagaacctccagcaacccccgctgctgtgggacctactacaatggcttcaggcggtggcgcaccaatggcagacaataacgaaggcgccgacggagtgggtaatgcctcaggaaattggcattgcgattccacatggctgggcgacagagtcatcaccaccagcacccgcacctgggccttgcccacctacaataaccacctctacaagcaaatctccagtgcttcaacgggggccagcaacgacaaccactacttcggctacagcaccccctgggggtattttgatttcaacagattccactgccacttttcaccacgtgactggcagcgactcatcaacaacaattggggattccggcccaagagactcaacttcaaactcttcaacatccaagtcaaggaggtcacgacgaatgatggcgtcacaaccatcgctaataaccttaccagcacggttcaagtcttctcggactcggagtaccagcttccgtacgtcctcggctctgcgcaccagggctgcctccctccgttcccggcggacgtgttcatgattccgcaatacggctacctgacgctcaacaatggcagccaagccgtgggacgttcatccttttactgcctggaatatttcccttctcagatgctgagaacgggcaacaactttaccttcagctacacctttgaggaagtgcctttccacagcagctacgcgcacagccagagcctggaccggctgatgaatcctctcatcgaccaatacctgtattacctgaacagaactcaaaatcagtccggaagtgcccaaaacaaggacttgctgtttagccgtgggtctccagctggcatgtctgttcagcccaaaaactggctacctggaccctgttatcggcagcagcgcgtttctaaaacaaaaacagacaacaacaacagcaattttacctggactggtgcttcaaaatataacctcaatgggcgtgaatccatcatcaaccctggcactgctatggcctcacacaaagacgacgaagacaagttctttcccatgagcggtgtcatgatttttggaaaagagagcgccggagcttcaaacactgcattggacaatgtcatgattacagacgaagaggaaattaaagccactaaccctgtggccaccgaaagatttgggaccgtggcagtcaatttccagagcagcagcacagaccctgcgaccggagatgtgcatgctacgggaacattacctggcatggtgtggcaagatagagacgtgtacctgcagggtcccatttgggccaaaattcctcacacagatggacactttcacccgtctcctcttatgggcggctttggactcaagaacccgcctcctcagatcctcatcaaaaccacgcctgttcctgcgaatcctccggcggagttttcagctacaaagtttgcttcattcatcacccagtactccacaggacaagtgagtgtggaaattgaatgggagctgcagaaagaaaacagcaagcgctggaatcccgaagtgcagtacacatccaattatgcaaaatctgccaacgttgattttactgtggacgacaatggactttatactgagcctcgccccattggcacccgttaccttacccgtcccctg

SEQ ID NO: 667 - DNA, 2208 bp, Artificial Sequence
  source: /note="Description of Artificial Sequence: Synthetic polynucleotide"
atggctgccgatggttatcttccagattggctcgaggacaacctctctgagggcattcgcgagtggtgggacttgaaacctggagccccgaagcccaaagccaaccagcaaaagcaggacgacggccggggtctggtgcttcctggctacaagtacctcggacccttcaacggactcgacaagggggagcccgtcaacgcggcggacgcagcggccctcgagcacgacaaggcctacgaccagcagctcaaagcgggtgacaatccgtacctgcggtataaccacgccgacgccgagtttcaggagcgtctgcaagaagatacgtcttttgggggcaacctcgggcgagcagtcttccaggccaagaagcgggttctcgaacctctcggtctggttgaggaaggcgctaagacggctcctggaaagaaacgtccggtagagcagtcgctacaagagccagactcctcctcgggcatcggcaagacaggccagcagcccgctaaaaagagactcaattttggtcagactggcgactcagagtcagtccccgatccacaacctctcggagaacctccagcaacccccgctgctgtgggacctactacaatggcttcaggcggtggcgcaccaatggcagacaataacgaaggcgccgacggagtgggtaatgcctcaggaaattggcattgcgattccacatggctgggcgacagagtcatcaccaccagcacccgcacctgggccttgcccacctacaataaccacctctacaagcaaatctccagtgcttcaacgggggccagcaacgacaaccactacttcggctacagcaccccctgggggtattttgatttcaacagattccactgccacttttcaccacgtgactggcagcgactcatcaacaacaattggggattccggcccaagagactcaacttcaaactcttcaacatccaagtcaaggaggtcacgacgaatgatggcgtcacaaccatcgctaataaccttaccagcacggttcaagtcttctcggactcggagtaccagcttccgtacgtcctcggctctgcgcaccagggctgcctccctccgttcccggcggacgtgttcatgattccgcaatacggctacctgacgctcaacaatggcagccaagccgtgggacgttcatccttttactgcctggaatatttcccttctcagatgctgagaacgggcaacaactttaccttcagctacacctttgaggaagtgcctttccacagcagctacgcgcacagccagagcctggaccggctgatgaatcctctcatcgaccaatacctgtattacctgaacagaactcaaaatcagtccggaagtgcccaaaacaaggacttgctgtttagccgtgggtctccagctggcatgtctgttcagcccaaaaactggctacctggaccctgttatcggcagcagcgcgtttctaaaacaaaaacagacaacgacaacagcaattttacctggactggtgcttcaaaatataacctcaatgggcgtgaatccatcatcaaccctggcactgctatggcctcacacaaagacgacgaagacaagttctttcccatgagcggtgtcatgatttttggaaaagagagcgccggagcttcaaacactgcattggacaatgtcatgattacagacgaagaggaaattaaagccactaaccctgtggccaccgaaagatttgggaccgtggcagtcaatttccagagcagcagcacagaccctgcgaccggagatgtgcatgctatgggagcattacctggcatggtgtggcaagatagagacgtgtacctgcagggtcccatttgggccaaaattcctcacacagatggacactttcacccgtctcctcttatgggcggctttggactcaagaacccgcctcctcagatcctcatcaaaaacacgcctgttcctgcgaatcctccggcggagttttcagctacaaagtttgcttcattcatcacccaatactccacaggacaagtgagtgtggaaattgaatgggagctgcagaaagaaaacagcaagcgctggaatcccgaagtgcagtacacatccaattatgcaaaatctgccaacgttgattttactgtggacaacaatggactttatactgagcctcgccccattggcacccgttaccttacccgtcccctg

SEQ ID NO: 668 - DNA, 2208 bp, Artificial Sequence
  source: /note="Description of Artificial Sequence: Synthetic polynucleotide"
atggctgccgatggttatcttccagattggctcgaggacaacctctctgagggcattcgcgagtggtgggacttgaaacctggagctccgaagcccaaagccaaccagcaaaagcaggacgacggccggggtctggtgcttcctggctacaagtacctcggacccttcaacggactcgacaagggggagcccgtcaacgcggcggacgcagcggccctcgagcacgacaaggcctacgaccagcagctcaaagcgggtgacaatccgtacctgcggtataaccacgccgacgccgagtttcaggagcgtctgcaagaagatacgtcttttgggggcaacctcgggcgagcagtcttccaggccaagaagcgggttctcgaacctctcggtctggttgaggaaggcgctaagacggctcctggaaagaaacgtccggtagagcagtcgccacaagagccagactcctcctcgggcatcggcaagacaggccagcagcccgctaaaaagagactcaattttggtcagactggcgactcagagtcagtccccgatccacaacctctcggagaacctccagcaacccccgctgctgtgggacctactacaatggcttcaggcggtggcgcaccaatggcagacaataacgaaggcgccgacggagtgggtaatgcctcaggaaattggcattgcgattccacatggctgggcgacagagtcatcaccaccagcacccgcacctgggccttgcccacctacaataaccacctctacaagcaaatctccagtgcttcaacgggggccagcaacgacaaccactacttcggctacagcaccccctgggggtattttgatttcaacagattccactgccacttttcaccacgtgactggcagcgactcatcaacaacaattggggattccggcccaagagactcaacttcaaactcttcaacatccaagtcaaggaggtcacgacgaatgatggcgtcacaaccatcgctaataaccttaccagcacggttcaagtcttctcggactcggagtaccagcttccgtacgtcctcggctctgcgcaccagggctgcctccctccgttcccggcggacgtgttcatgattccgcaatacggctacctgacgctcaacaatggcagccaagccgtgggacgttcatccttttactgcctggaatatttcccttctcagatgctgagaacgggcaacaactttaccttcagctacacctttgaggaagcgcctttccacagcagctacgcgcacagccagagcctggaccggctgatgaatcctctcatcgaccaatacctgtattacctgaacagaactcaaaatcagtccggaagtgcccaaaacaaggacttgctgtttagccgtgggtctccagctggcatgtctgttcagcccaaaaactggctacctggaccctgttatcggcagcagcgcgtttctaaaacaaaaacagacaacaacaacagcaattttacctggactggtgcttcaaaatataacctcaatgggcgtgaatccatcatcaaccctggcactgctatggcctcacacaaagacgacgaagacaagttctttcccatgagcggtgtcatgatttttggaaaagagagcgccggagcttcaaacactgcattggacaatgtcatgattacagacgaagaggaaattaaagccactaaccctgtggccaccgaaagatttgggaccgtggcagtcaatttccagagcagcagcacagaccctgcgaccggagatgtgcatgctatgggagcattacctggcatggtgtggcaagatagagacgtgtacctgcagggtcccatttgggccaaaattcctcacacagatggacactttcacccgtctcctcttatgggcggctttggactcaagaacccgcctcctcagatcctcatcaaaaacacgcctgttcctgcgaatcctccggcggagttttcagctacaaagtttgcttcattcatcacccaatactccacaggacaagtgagtgtggaaattgaatgggagctgcagaaagaaaacagcaagcgctggaatcccgaagtgcagtacacatccaattatgcgaaatctgccaacgttgattttactgtggacaacaatggactttatactgagcctcgccccgttggcacccgttaccttacccgtcccctg

SEQ ID NO: 669 - DNA, 2208 bp, Artificial Sequence
  source: /note="Description of Artificial Sequence: Synthetic polynucleotide"
atggctgccgatggttatcttccagattggctcgaggacaacctctctgagggcattcgcgagtggtgggacttgaaacctggagccccgaagcccaaagccaaccagcaaaagcaggacgacggccggggtctggtgcttcctggctacaagtacctcggacccttcaacggactcgacaagggggagcccgtcaacgcggcggacgcagcggccctcgagcacgacaaggcctacgaccagcagctcaaagcgggtgacaatccatacctgcggtataaccacgccgacgccgagtttcaggagcgtctgcaagaaaatacgtcttttgggggcaacctcgggcgagcagtcttccaggccaagaagcgggttctcgaacctctcggtctggttgaggaaggcgctaagacggctcctggaaagaaacgtccggtagagcagtcgccacaagagccagactcctcctcgggcatcggcaagacaggccagcagcccgctaaaaagagactcaattttggtcagactggcgactcagagtcagtccccgatccacaacctctcggagaacctccagcaacccccgctgctgtgggacctactacaatggcttcaggcggtggcgcaccaatggcagacaataacgaaggcgccgacggagtgggtaatgcctcaggaaattggcattgcgattccacatggctgggcgacagagtcatcaccaccagcacccgcacctgggccttgcccacctacaataaccacctctacaagcaaatctccagtgcttcaacgggggccagcaacgacaaccactacttcggctacagcaccccctgggggtattttgatttcaacagattccactgccactttccaccacgtgactggcagcgactcatcaacaacaattggggattccggcccaagagactcaacttcaaactcttcaacatccaagtcaaggaggtcacgtcgaatgatggcgtcacaaccatcgctaataaccttaccagcacggttcaagtcttctcggactcggagtaccagcttccgtacgtcctcggctctgcgcaccagggctgcctccctccgttcccggcggacgtgttcatgattccgcaatacggctacctgacgctcaacaatggcagccaagccgtgggacgttcatccttttactgcctggaatatttcccttctcagatgctgagaacgggcaacaactttaccttcagctacacctttgaggaagtgcctttccacagcagctacgcgcacagccagagcctggaccggctgatgaatcctctcatcgaccaatacctgtattacctgaacagaactcaaaatcagtccggaagtgcccaaaacaaggacttgctgtttagccgtgggtctccagctggcatgtctgttcagcccaaaaactggctacctggtccctgttatcggcagcagcgcgtttctaaaacaaaaacagacaacaacaacagcaattttacctggactggtgcttcaaaatataacctcaatgggcgtgaatccatcatcaaccctggcactgctatggcctcacacaaagacgacgaagacaagttctttcccatgagcggtgtcatgatttttggaaaagagagcgccggagcttcaaacactgcattggacaatgtcatgattacagacgaagaggaaattaaagccactaaccctgtggccaccgaaagatttgggaccgtggcagtcaatttccagagcagcagcacagaccctgcgaccggagatgtgcatgctatgggagcattacctggcatggtgtggcaagatagagacgtgtacctgcagggtcccatttgggccaaaattcctcacacagatggacactttcacccgtctcctcttatgggcggctttggactcaagaacccgcctcctcagatcctcatcaaaaacacgcctgttcctgcgaatcctccggcggagttttcagctacaaagtttgcttcattcatcacccaatactccacaggacaagtgagtgtggaaattgaatgggagctgcagaaagaaaacagcaagcgctggaatcccgaagtgcagtacacatccaattatgcaaaatctgccaacgttgattttactgtggacaacaatggactttatactgagcctcgccccattggcacccgttaccttacccgtcccctg

SEQ ID NO: 670 - DNA, 2208 bp, Artificial Sequence
  source: /note="Description of Artificial Sequence: Synthetic polynucleotide"
atggctgccgatggttatcttccagattggctcgaggacaacctctctgagggcattcgcgagtggtgggacttgaaacctggagccccgaagcccaaagccaaccagcaaaagcaggacgacggccggggtctggtgcttcctggctacaagtacctcggacccttcaacggactcgacaagggggagcccgtcaacgcggcggacgcagcggccctcgagcacgacaaggcctacgaccagcagctcaaagcgggtgacaatccgtacctgcggtataaccacgccgacgccgagtttcaggagcgtctgcaagaagatacgtcttttgggggcaacctcgggcgagcagtcttccaggccaagaagcgggttctcgaacctctcggtctggttgaggaaggcgctaagacggctcctggaaagaaacgtccggtagagcagtcgccacaagagccagactcctcctcgggcatcggcaagacaggccagcagcccgctaaaaagagactcaattttggtcagactggcgactcagagtcagtccccgatccacaacctctcggagaacctccagcaacccccgctgctgtgggacctactacaatggcttcaggcggtggcgcaccaatggcagacaataacgaaggcgccgacggagtgggtaatgcctcaggaaattggcattgcgattccacatggctgggcgacagagtcatcaccaccagcacccgcacctgggccttgcccacctacaataaccacctctacaagcaaatctccagtgcttcaacgggggccagcaacgacaaccactacttcggctacagcaccccctgggggtattttgatttcaacagattccactgccacttttcaccacgtgactggcagcgactcatcaacaacaattggggattccggcccaagagactcaacttcaaactcttcaacatccaagtcaaggaggtcacgacgaatgatggcgtcacaaccatcgctaataaccttaccagcacggttcaagtcttctcggactcggagtaccagcttccgtacgtcctcggctctgcgcaccagggctgcctccctccgttcccggcggacgtgttcatgattccgcaatacggctacctgacgctcaacaatggcagccaagccgtgggacgttcatccttttactgcctggaatatttcccttctcagatgctgagaacgggcaacaactttaccttcagctacacctttgaggaagtgcctttccacagcagctacgcgcacagccagagcctggaccggctgatgaatcctctcatcgaccaatacctgtattacctgaacagaactcaaaatcagtccggaagtgcccaaaacaaggacttgctgtttagccgtgggtctccagctggcacgtctgttcagcccaaaaactggctacctggaccctgttatcggcagcagcgcgtttctaaaacaaaaacagacaacaacaacagcaattttacctggactggtgcttcaaaatataacctcaatgggcgtgaatccatcatcaaccctggcactgctatggcctcacacaaagacgacgaagacaagttctttcccatgagcggtgtcatgatttttggaaaagagagcgccggagcttcaaacactgcattggacaatgtcatgattacagacgaagaggaaattaaagccactaaccctgtggccaccgaaagatttgggaccgtggcagtcaatttccagagcagcagcacagaccctgcgaccggagatgtgcatgctatgggagcattacctggcatggtgtggcaagatagagacgtgtacctgcagggtcccatttgggccaaaattcctcacacagatggacactttcacccgtctcctcttatgggcggctttggactcaagaacccgcctcctcagatcctcatcaaaaacacgcctgttcctgcgaatcctccggcggagttttcagctacaaagtttgcttcattcatcacccaatactccacaggacaagtgagtgtggaaattgaatgggagctgcagaaagaaaacagcaagcgctggaatcccgaagtgcagtacacatccaattatgcaaaatctgccaacgttgattttactgtggacaacaatggactttatactgggcctcgccccattggcacccgttaccttacccgtcccctg

SEQ ID NO: 671 - DNA, 2208 bp, Artificial Sequence
  source: /note="Description of Artificial Sequence: Synthetic polynucleotide"
atggctgccgatggttatcttccagattggctcgaggacaacctctctgagggcattcgcgagtggtgggacttgaaacctggagccccgaagcccaaagccaaccagcaaaagcaggacgacggccggggtctggtgcttcctggctacaagtacctcggacccttcaacggactcgacaagggggagcccgtcaacgcggcggacgcagcggccctcgagcacgacaaggcctacgaccagcagctcaaagcgggtgacaatccgtacctgcggtataaccacgccgacgccgagtttcaggagcgtctgcaagaagatacgtcttttgggggcaacctcgggcgagcagtcttccaggccaagaagcgggttctcgaacctctcggtctggttgaggaaggcgctaagacggctcctggaaagaaacgtccggtagagcagtcgccacaagagccagactcctcctcgggcatcggcaagacaggccagcagcccgctaaaaagagactcaattttggtcagactggcgactcagagtcagtccccgatccacaacctctcggagaacctccagcaacccccgctgctgtgggacctactacaatggcttcaggcggtggcgcaccaatggcagacaataacgaaggcgccgacggagtgggtaatgccccaggaaattggcattgcgactccacatggctgggcgacagagtcatcaccaccagcacccgcacctgggccttgcccacctacaataaccacctctacaagcaaatctccagtgcttcaacgggggccagcaacgacaaccactacttcggctacagcaccccctgggggtattttgatttcaacagattccactgccacttttcaccacgtgactggcagcgactcatcaacaacaattggggattccggcccaagagactcaacttcaaactcttcaacatccaagtcaaggaggtcacgacgaatgatggcgtcacaaccatcgctaataaccttaccagcacggttcaagtcttctcggactcggagtaccagcttccgtacgtcctcggctctgcgcaccagggctgcctccctccgttcccggcggacgtgttcatgattccgcaatacggctacctgacgctcaacaatggcagccaagccgtgggacgttcatccttttactgcctggaatatttcccttctcagatgctgagaacgggcaacaactttaccttcagctacacctttgaggaagtgcctttccacagcagctacgcgcacagccagagcctggaccggctgatgaatcctctcatcgaccaatacctgtattacctgaacagaactcaaaatcagtccggaagtgcccaaaacaaggacttgctgtttagccgtgggtctccagctggcatgtctgttcagcccaaaaactggctacctggaccctgttatcggcagcagcgcgtttctaaaacaaaaacagacaacaacaacagcaattttacctggactggtgcttcaaaatataacctcaatgggcgtgaatccatcatcaaccctggcacagctatggcctcacacaaagacgacgaagacaagttctttcccatgagcggtgtcatgatttttggaaaagagagcgccggagcttcaaacactgcattggacaatgtcatgattacaggcgaagaggaaattaaagccactaaccctgtggccaccgaaagatttgggaccgtggcagtcaatttccagagcagcagcacagaccctgcgaccggagatgtgcatgctatgggagcattacctggcatggtgtggcaagatagagacgtgtacctgcagggtcccatttgggccaaaattcctcacacagatggacactttcacccgtctcctcttatgggcggctttggactcaagaacccgcctcctcagatcctcatcaaaaacacgcctgttcctgcgaatcctccggcggagttttcagctacaaagtttgcttcattcatcacccaatactccacaggacaagtgagtgtggaaattgaatgggagctgcagaaagaaaacagcaagcgctggaatcccgaagtgcagtacacatccaattatgcaaaatctgccaacgttgattttactgtggacaacaatggactttatactgagcctcgccccattggcacccgttaccttacccgtcccctg

SEQ ID NO: 672 - DNA, 2208 bp, Artificial Sequence
  source: /note="Description of Artificial Sequence: Synthetic polynucleotide"
atggctgccgatggttatcttccagattggctcgaggacaacctctctgagggcattcgcgagtggtgggacttgaaacctggagccccgaagcccaaagccaaccagcaaaagcaggacgacggccggggtctggtgcttcctggctacaagtacctcggacccttcaacagactcgacaagggggagcccgtcaacgcggcggacgcagcggccctcgagcacgacaaggcctacgaccagcagctcaaagcgggtgacaatccgtacctgcggtataaccacgccgacgccgagtttcaggagcgtctgcaagaagatacgtcttttgggggcaacctcgggcgagcagtcttccaggccaagaagcgggttctcgaacctctcggtctggttgaggaaggcgctaagacggctcctggaaggaaacgtccggtagagcagtcgccacaagagccagactcctcctcgggcatcggcaagacaggccagcagcccgctaaaaagagactcaattttggtcagactggcgactcagagtcagtccccgatccacaacctctcggagaacctccagcaacccccgctgctgtgggacctactacaatggcttcaggcggtggcgcgccaatggcagacaataacgaaggcgccgacggagtgggtaatgcctcaggaaattggcattgcgattccacatggctgggcgacagagtcatcaccaccagcacccgcacctgggccttgcccacctacaataaccacctctacaagcaaatctccagtgcttcaacgggggccagcaacgacaaccactacttcggctacagcaccccctgggggtattttgatttcaacagattccactgccacttttcaccacgtgactggcagcgactcatcaacaacaattggggattccggcccaagagactcaacttcaaactcttcaacatccaagtcaaggaggtcacgacgaatgatggcgtcacaaccatcgctaataaccttaccagcacggttcaagtcttctcggactcggagtaccagcttccgtacgtcctcggctctgcgcaccagggctgcctccctccgttcccggcggacgtgttcatgattccgcaatacggctacctgacgctcaacaatggcggccaagccgtgggacgttcatccttttactgcctggaatatttcccttctcagatgctgagaacgggcaacaactttaccttcagctacacctttgaggaagtgcctttccacagcagctacgcgcacagccagagcctggaccggctgatgaatcctctcatcgaccaatacctgtattacctgaacagaactcaaaatcagtccggaagtgcccaaaacaaggacttgctgtttagccgtgggtctccagctggcatgtctgttcagcccaaaaactggctacctggaccctgttatcggcagcagcgcgtttctaaaacaaaaacagacaacaacaacagcaattttacctggactggtgcttcaaaatatagcctcaatgggcgtgaatccatcatcaaccctggcactgctatggcctcacacaaagacgacgaagacaagttctttcccatgggcggtgtcatgatttttggaaaagagagcgccggagcttcaaacactgcattggacaatgccatgattacagacgaagaggaaattaaagccactaaccctgtggccaccgaaagatttgggaccgtggcagtcaatttccagagcagcagcacagaccctgcgaccggagatgtgcatgctatgggagcattacctggcatggtgtggcaagatagagacgtgtacctgcagggtcccatttgggccaaaattcctcacacagatggacactttcacccgtctcctcttatgggcggctttggactcaagaacccgcctcctcagatcctcatcaaaaacacgcctgttcctgcgaatcctccggcggagttttcagctacaaagtttgcttcattcatcacccaatactccacaggacaagtgagtgtggaaattgaatgggagctgcagaaagaaaacagcaagcgctggaatcccgaagtgcagtacacatccaattatgcaaaatctgccaacgttgattttactgtggacaacaatggactttatactgagcctcgccccattggcacccgttaccttacccgtcccctg

SEQ ID NO: 673 - DNA, 2208 bp, Artificial Sequence
  source: /note="Description of Artificial Sequence: Synthetic polynucleotide"
atggctgccgatggttatcttccagattggctcgaggacaacctctctgagggcattcgcgagtggtgggacttgaaacctggagccccgaagcccaaagccaaccagcaaaagcaggacgacggccggggtctggtgcttcctggctacaagtacctcggacccttcaacggactcgacaagggggagcccgtcaacgcggcggacgcagcggccctcgagcacgacaaggcctacgaccagcagctcaaagcgggtgacaatccgtacctgcggtataaccacgccgacgccgagtttcaggagcgtctgcaagaagatacgtcttttgggggcaacctcgggcgagcagtcttccaggccaagaagcgggttctcgaacctctcggtctggttgaggaaggcgctaagacggctcctggaaagaaacgtccggtagagcagtcgccacaagagccagactcctcctcgggcatcggcaagacaggccagcagcccgctaaaaagagactcaattttggtcagactggcgactcagagtcagtccccgatccacaacctctcggagaacctccagcaacccccgctgctgtgggacctactacaatggcttcaggcggtggcgcaccaatggcagacaataacgaaggcgccgacggagtgggtaatgcctcaggaaattggcattgcgattccacatggctgggcggcagagtcatcaccaccagcacccgcacctgggccttgcccacctacaataaccacctctacaagcaaatctccagtgcttcaacgggggccagcaacgacaaccactacttcggctacagcaccccctgggggtattttgatttcaacagattccactgccacttttcaccacgtgactggcagcgactcatcaacaacaattggggattccggcccaagagactcaacttcaaactcttcaacatccaagtcaaggaggtcacgacgaatgatggcgtcacaaccatcgctaataaccttaccagcacggttcaagtcttctcggactcggagtaccagcttccgtacgtcctcggctctgcgcaccagggctgcctccctccgttcccggcggacgtgttcatgattccgcaatacggctacctgacgctcaacaatggcagccaagccgtgggacgttcatccttttactgcctggaatatttcccttctcagatgctgagaacgggcaacaactctaccttcagctacacctttgaggaagtgcctttccacagcagctacgcgcacagccagagcctggaccggctgatgaatcctctcatcgaccaatacctgtattacctgaacagaactcaaaatcagtccggaagtgcccaaaacaaggacttgctgtttagccgtgggtctccagctggcatgtctgttcagcccaaaaactggctacctggaccctgttatcggcagcagcgcgtttctaaaacaaaaacagacaacaacaacagcaattttacctggactggtgcttcaaaatataacctcaatgggcgtgaatccatcatcaaccctggcactgctatggcctcacacaaagacgacgaagacaagttctttcccatgagcggtgtcatgatttttggaaaagagagcgccggagcttcaaacactgcattggacaatgtcatgattacagacgaagaggaaattaaagccactaaccctgtggccaccgaaagatttgggaccgtggcagtcaatttccagagcagcagcacagaccctgcgaccggagatgtgcatgctatgggaacattacctggcatggtgtggcaagatagagacgtgtacctgcagggtcccatttgggccaaaattcctcacacagatggacactttcacccgtctcctcttatgggcggctttggactcaagaacccgcctcctcagatcctcatcaaaaacacgcctgttcctgcgaatcctccggcggagttttcagctacaaagtttgcttcattcatcacccaatactccacaggacaagtgagtgtggaaattgaatgggagctgcagaaagaaaacagcaagcgctggaatcccgaagtgcagtacacatccaattatgcaaaatctgccaacgttgattttactgtggacaacaatggactttatactgagcctcgccccattggcacccgttaccttacccgtcccctg

SEQ ID NO: 674 - DNA, 2208 bp, Artificial Sequence
  source: /note="Description of Artificial Sequence: Synthetic polynucleotide"
atggctgccgatggttatctcccagattggctcgaggacaacctctctgagggcattcgcgagtggtgggacttgaaacctggagccccgaagcccaaagccaaccagcaaaagcaggacgacggccggggtctggtgcttcctggctacaagtacctcggacccttcaacggactcgacaagggggagcccgtcagcgcggcggacgcagcggccctcgagcacgacaaggcctacgaccagcagctcaaagcgggtgacaatccgtacctgcggtataaccacgccgacgccgagtttcaggagcgtctgcaagaagatacgtcttttgggggcaacctcgggcgagcagtcttccaggccaagaagcgggttctcgaacctctcggtctggttgaggaaggcgctaagacggctcctggaaagaaacgtccggtagagcagtcgccacaagagccagactcctcctcgggcatcggcaagacaggccagcagcccgctaaagagagactcaattttggtcagactggcgactcagagtcagtccccgatccacaacctctcggagaacctccagcaacccccgctgctgtgggacctactacaatggcttcaggcggtggcgcaccaatggcagacaataacgaaggcgccgacggagtgggtaatgcctcaggaaattggcattgcgattccacatggctgggcgacagagtcatcaccaccagcacccgcacctgggccttgcccacctacaataaccacctctacaagcaaatctccagtgcttcaacgggggccagcaacgacaaccactacttcggctacagcaccccctgggggtattttgatttcaacagattccactgccacttttcaccacgtgactggcagcgactcatcaacaacaattggggattccggcccaagagactcaacttcaaactcttcaacatccaagtcaaggaggtcacgacgaatgatggcgtcacaaccatcgccaataaccttaccagcacggttcaagtcttctcggactcggagtaccagcttccgtacgtcctcggctctgcgcaccagggctgcctccctccgttcccggcggacgtgttcatgattccgcaatacggctacctgacgctcaacaatggcagccaagccgtgggacgttcatccttttactgcctggaatatttcccttctcagatgctgagaacgggcaacaactttaccttcagctacacctttgaggaagtgcctttccacagcagctacgcgcacagccagagcctggaccggctgatgaatcctctcatcgaccaatacctgtattacctgaacagaactcaaaatcagtccggaagtgcccaaaacaaggacttgctgtttagccgtgggtctccagctggcatgtctgttcagcccaaaaactggctacctggaccctgttatcggcagcagcgcgtttctaaaacaaaaacagacaacaacaacagcaattttacctggactggtgcttcaaaatataacctcaatgggcgtgaatccatcatcaaccctggcactgctatggcctcacacaaagacgacgaagacaagttctttcccatgagcggtgtcatgatttttggaaaagagagcgccggagcttcaaacactgcattggacaatgtcatgattacagacgaagaggaaattaaagccactaaccctgtggccaccgaaagatttgggaccgtggcagtcaatttccagagcagcagcacagaccctgcgaccggagatgtgcatgctatgggagcattacctggcatggtgtggcaagatagagacgtgtacctgcagggtcccatttgggccaaaattcctcacacagatggacactttcacccgtctcctcttatgggcggctttggactcaagaacccgcctcctcagatcctcatcaaaaacacgcctgttcctgcgaatcctccggcggagttttcagctacaaagtttgcttcattcatcacccaatactccacaggacaagtgagtgtggaaattgaatgggagctgcagaaagaaaacagcaagcgctggaatcccgaagtgcagtacacatccaattatgcaaaatctgccaacgttgattttactgtggacaacaatggactttatactgagcctcgccccattggcacccgttaccttacccgtcccctg

SEQ ID NO: 675 - DNA, 2208 bp, Artificial Sequence
  source: /note="Description of Artificial Sequence: Synthetic polynucleotide"
atggctgccgatggttatcttccagattggctcgaggacaacctctctgagggcattcgcgagtggtgggacttgaaacctggagccccgaagcccaaagccaaccagcaaaagcaggacgacggccggggtctggtgcttcctggctacaagtacctcggacccttcaacggactcgacaagggggagcccgtcaacgcggcggacgcagcggccctcgagcacgacaaggcctacgaccagcagctcaaagcgggtgacaatccgtacctgcggtataaccacgccgacgccgagtttcaggagcgtctgcaagaagatacgtcttttgggggcaacctcgggcgagcagtcttccaggccaagaagcgggttctcgaacctctcggtctggttgaggaaggcgctaagacggctcctggaaagaaacgtccggtagagcagtcgccacaagagccagactcctcctcgggcatcggcaagacaggccagcagcccgctaaaaagagactcaattttggtcagactggcgactcagagtcagtccccgatccacaacctctcggagaacctccagcaacccccgctgctgtgggacctactacaatggcttcaggcggtggcgcaccaatggcagacaataacgaaggcgccgacggagtgggtaatgcctcaggaaattggcattgcgattccacatggctgggcgacagagtcatcaccaccagcacccgcacctgggccttgcccacctacaataaccacctctacaagcaaatctccagtgcttcaacgggggccagcaacgacaaccactacttcggctacagcaccccctgggggtattttgatttcaacagattccactgccacttttcaccacgtgactggcagcgactcatcaacaacaattggggattccggcccaagagactcaacttcaaactcttcaacatccaagtcaaggaggtcacgacgaatgatggcgtcacaaccatcgctaataaccttaccagcacggttcaagtcttctcggactcggagtaccagcttccgtacgtcctcggctctgcgcaccagggctgcctccctccgttcccggcggacgtgttcatgattccgcaatacggctacctgacgctcaacaatggcagccaagccgtgggacgttcatccttttactgcctggaatatttcccttctcagatgctgagaacgggcaacaactttaccttcagctacacctttgaggaagtgcctttccacagcagctacgcgcacagccagagcctggaccggctgatgaatcctctcatcgaccaatacctgtattacctgaacagaactcaaaatcagtccggaagtgcccaaaacaaggacttgctgtttagccgtgggtctccagctggcatgtctgttcagcccaaaaactggctacctggaccctgttatcggcagcagcgcgtttctaaaacaaaaacagacaacaacaacagcaattttacctggactggtgcttcaaaatataacctcaatgggcgtgaatccatcatcaaccctggcactgctatggcctcacacaaagacgacgaagacaagttctttcccatgagcggtgtcatgatttttggaaaagagagcgccggagcttcaaacactgcattggacaatgtcatgattacagacgaaggggaaattaaagccactaaccctgtggccaccgaaagatttgggaccgtggcagtcaatttccagagcagcagcacagaccctgcgaccggagatgtgcatgctatgggagcattacctggcatggtgtggcaagatagagacgtgtacctgcagggtcccatttgggccaaaattcctcacacagatggacactttcacccgtctcctcttatgggcggctttggactcaagaacccgcctcctcagatcctcatcaaaaacacgcctgttcctgcgaatcctccggcggagttttcagctacaaagtttgcttcattcatcacccaatactccacaggacaagtgagtgtggaaattgaatgggagctgcagaaagaaaacagcaagcgctggaatcccgaagtgcagtacacatccaattatgcaaaatctgccaacgttgattttactgtggacaacaatggactttatactgagcctcgccccattggcacccgttaccttacccgtcccctg

SEQ ID NO: 676 - DNA, 2208 bp, Artificial Sequence
  source: /note="Description of Artificial Sequence: Synthetic polynucleotide"
atggctgccgatggttatcttccagattggctcgaggacaacctctctgagggcattcgcgagtggtgggacttgaaacctggagccccgaaacctaaagccaaccagcaaaagcaggacgacggccggggtctggtgcttcctggctacaagtacctcggacccttcaacggactcgacaagggggagcccgtcaacgcggcggacgcagcggccctcgagcacgacaaggcctacgaccagcagctcaaagcgggtgacaatccgtacctgcggtataaccacgccgacgccgagtttcaggagcgtctgcaagaagatacgtcttttgggggcaacctcgggcgagcagtcttccaggccaagaagcgggttctcgaaccttttggtctggttgaggaaggcgctaagacggctcctggaaagaaacgtccggtagagcagtcgccacaagagccagactcctcctcgggcatcggcaagacaggccagcagcccgctaaaaagagactcaattttggtcagactggcgactcagagtcagtccccgacccacaacctctcggagaacctccagcaacccccgctgctgtgggacctactacaatggcttcaggcggtggcgcaccaatggcagacaataacgaaggcgccgacggagtgggtaatgcctcaggaaattggcattgcgattccacatggctgggcgacagagtcatcaccaccagcacccgcacctgggccttgcccacctacaataaccacctctacaagcaaatctccagtgcttcaacgggggccagcaacgacaaccactacttcggctacagcaccccctgggggtattttgatttcaacagattccactgccacttttcaccacgtgactggcagcgactcatcaacaacaattggggattccggcccaagagactcaacttcaagctcttcaacatccaagtcaaggaggtcacgacgaacgatggcgtcacgaccatcgctaataaccttaccagcacggttcaagtcttctcggattcagagtaccaactgccgtacgtcctcggctctgcgcaccagggctgcctccctccgttcccggcggacgtgtttatgattccgcagtacggctacctaacgctcaacaatggcagccaggccgtgggacgttcatccttttactgcccggaatatttcccttctcagatgctgagaacgggcaacaactttaccttcagctacacctttgaggaagtgcctttccacagcagctacgcgcacagccagagcctggaccggctgatgaatcctctcatcgaccaatacctgtattacctgaacagaactcaaaatcagtccggaagtgcccaaaacaaggacttgctgtttagccgtgggtctccagctggcatgtctgttcagcccaaaaactggctacctggaccctgttatcggcagcagcgcgtttctaaaacaaaaacagacaacaacaacagcaattttacctggactggtgcttcaaaatataacctcaatgggcgtgaatccatcatcaaccctggcactgctatggcctcacacaaagacgacaaagacaagttctttcccatgagcggtgtcatgatttttggaaaagagagcgccggagcttcaaatactgcattggacaatgtcatgatcacagatgaagaggaaattaaagccactaaccctgtggccaccgaaagatttgggaccgtggcagtcaatttccagagcagcaacacagaccccgcgaccggagatgtgcatgttatgggagccttacctggcatggtgtggcaagacagagacgtatacctgcagggtcccatttgggccaaaattcctcacacggatggacactttcacccgtctcctctcatgggcggctttggacttaagcacccgcctcctcaaatcctcatcaaaaacacgcctgttcctgcgaatcctccggcagagttttcggctacaaagtttgcttcattcatcacccagtactccacaggacaagtgagtgtggaaattgaatgggagctgcagaaagaaaacagcaagcgctggaatcccgaagtgcagtacacatccaattatgcaaaatctgccaacgttgatttcactgtggacaacaatggactttatactgagcctcgccccattggcacccgttaccttacccgtcccttg

SEQ ID NO: 677 - DNA, 2208 bp, Artificial Sequence
  source: /note="Description of Artificial Sequence: Synthetic polynucleotide"
atggctgccgatggttatcttccagattggctcgaggacaacctctctgagggcattcgcgagtggtgggacttgaaacctggagccccgaaacctaaagccaaccagcaaaagcaggacgacggccggggtctggtgcttcctggctacaagtacctcggacccttcaacggactcgacaagggggagcccgtcaacgcggcggacgcagcggccctcgagcacgacaaggcctacgaccagcagctcaaagcgggtgacaatccgtacctgcggtataaccacgccgacgccgagtttcaggagcgtctacaagaagatacgtcttttgggggcaacctcgggcgagcagtcttccaggccaagaagcgggttctcgaaccttttggtctggttgaggaaggcgctaagacggctcctggaaagaaacgtccggtagagcagtcgccacaagagccagactcctcctcgggcatcggcaagacaggccagcagcccgctaaaaagagactcaattttggtcagactggcgactcagagtcagtccccgacccacaacctctcggagaacctccagcaacccccgctgctgtgggacctactacaatggcttcaggcggtggcgcaccaatggcagacaataacgaaggcgccgacggagtgggtaatgcctcaggaaattggcattgcgattccacatggctgggcgacagagtcatcaccaccagcacccgcacctgggccttgcccacctacaataaccacctctacaagcaaatctccagtgcttcaacgggggccagcaacgacaaccactacttcggctacagcaccccctgggggtattttgatttcaacagattccactgccacttttcaccacgtgactggcagcgactcatcaacaacaattggggattccggcccaagagactcaacttcaagctcttcaacatccaagtcaaggaggtcacgacgaacgatggcgtcacgaccatcgctaataaccttaccagcacggttcaagtcttctcggattcagagtaccaactgccgtacgtcctcggctctgcgcaccagggctgcctccctccgttcccggcggacgtgttcatgattccgcagtacggctacctaacgctcaacaatggcagccaggccgtgggacgttcatccttttactgcctggaatatttcccttctcagatgctgagaacgggcaacaactttaccttcagctacacctttgaggaagtgcctttccacagcagctacgcgcacagccagagcctggaccggctgatgaatcctctcatcgaccaatacctgtattacctgaacagaactcaaaatcagtccggaagtgcccaaaacaaggacttgctgtttagccgtgggtctccagctggcatgtctgttcagcccaaaaactggctacctggaccctgttatcggcagcagcgcgtttctaaaacaaaaacagacaacaacaacagcaattttacctggactggtgcttcaaaatataacctcaatgggcgtgaatccatcatcaaccctggcactgctatggcctcacacaaagacgacaaagacaagttctttcccatgagcggtgtcatgatttttggaaaagagagcgccggagcttcaaatactgcattggacaatgtcatgatcacagatgaagaggaaattaaagccactaaccctgtggccaccgaaagatttgggaccgtggcagtcaatttccagagcagcgacacagaccccgcgaccggagatgtgcatgttatgggagccttacctggcatggtgtggcaagacagagacgtatacctgcagggtcccatttgggccaaaattcctcacacggatggacactttcacccgtctcctctcatgggcggctttggacttaagcacccgcctcctcaaatcctcatcaaaaacacgcctgttcctgcgaatcctccggcagagttttcggctacaaagtttgcttcattcatcacccagtactccacaggacaagtgagtgtggaaattgaatgggagctgcagaaagaaaacagcaagcgctggaatcccgaagtgcagtacacatccaattatgcaaaatctgccaacgttgatttcactgtggacaacaatggactttatactgagcctcgccccattggcacccgttaccttacccgtcccttg

SEQ ID NO: 678 - DNA, 2208 bp, Artificial Sequence
  source: /note="Description of Artificial Sequence: Synthetic polynucleotide"
atggctgccgatggttatcttccagattggctcgaggacaacctctctgagggcattcgcgagtggtgggacttgaaacctggagccccgaaacctaaagccaaccagcaaaagcagggcgacggccggggtctggtgcttcctggctacaagtacctcggacccttcaacggactcgacaagggggagcccgtcaacgcggcggacgcagcggccctcgagcacgacaaggcctacgaccagcagctcaaagcgggtgacaatccgtacctgcggtataaccacgccgacgccgagtttcaggagcgtctgcaagaagatacgtcttttgggggcaacctcgggcgagcagtcttccaggccaagaagcgggttctcgaaccttttggtctggttgaggaaggcgctaagacggctcctggaaagaaacgtccggtagagcagtcgccacaagagccagactcctcctcgggcatcggcaagacaggccagcagcccgctaaaaagagactcaattttggtcagactggcgactcagagtcagtccccgacccacaacctctcggagaacctccagcaacccccgctgctgtgggacctactacaatggcttcaggcggtggcgcaccaatggcagacaataacgaaggcgccgacggagtgggtaatgcctcaggaaattggcattgcgattccacatggctgggcgacagagtcatcaccaccaacactcgcacctgggccttgcccacctacaataaccacctctacaagcaaatctccagtgcttcaacgggggccagcaacgacaaccactacttcggctacagcaccccctgggggtattttgatttcaacagattccactgccacttttcaccacgtgactggcagcgactcatcaacaacaattggggattccggcccaagagactcaacttcaagctcttcaacatccaagtcaaggaggtcacgacgaacgatggcgtcacgaccatcgctaataaccttaccagcacggttcaagtcttctcggattcagagtaccaactgccgtacgtcctcggctctgcgcaccagggctgcctccctccgttcccggcggacgtgttcatgattccgcagtacggctacctaacgctcaacaatggcagccaggccgtgggacgttcatccttttactgcctggaatatttcccttctcagatgctgagaacgggcaacaactttaccttcagctacacctttgaggaagtgcctttccacagcagttacgggcacagccagagcctggaccggctgatgaatcttctcatcgaccaatacctgtattacctgaacagaactcaaaatcagtccggaagtgcccaaaacaaggacttgctgtttagccgtgggtctccagctggcatgtttgttcagcccaaaaactggctacctggaccctgttatcggcagcagcgcgtttctaaaacaaaaacagacaacaacaacagcaattttacctggactggtgcttcaaaatataacctcaatgggcgtgaatccatcatcaaccctggcactgctatggcctcacacaaagacgacgaagacaagttctttcccatgagcggtgtcatgatttttggaaaagagagcgccggagcttcaaatactgcattggacaatgtcatgatcacagatgaagaggaaattaaagccactaaccctgtggccaccgaaagatttgggaccgtggcagtcaatttccagagcagcagcacagaccccgcgaccggagatgtgcatgttatgggagccttacctggcatggtgtggcaagacagagacgtatacctgcagggtcccatttgggccaaaattcctcacacggatggacactttcacccgtctcctctcatgggcggctttggacttaagcacccgcctcctcaaatcctcatcaaaaacacgcctgttcctgcgaatcctccggcagagttttcggctacaaagtttgcttcattcatcacccagtactccacaggacaagtgagtgtggaaattgaatgggagctgcagaaagaaaacagcaagcgctggaatcccgaagtgcagtacacatccaattatgcaaaatctgccaacgttgatttcactgtggacaacaatggactttatactgagcctcgccccattggcacccgttaccttacccgtcccttg

SEQ ID NO: 679 - DNA, 2208 bp, Artificial Sequence
  source: /note="Description of Artificial Sequence: Synthetic polynucleotide"
atggctgccgatggttatcttccagattggctcgaggacaacctctctgagggcattcgcgagtggtgggacttgaaacctggagccccgaaacctaaagccaaccagcaaaagcaggacgacggccggggtctggtgcttcctggctacaagtacctcggacccttcaacggactcgacaagggggagcccgtcaacgcggcggacgcagcggccctcgagcacgacaaggcctacgaccagcagctcaaagcgggtgacaatccgtacctgcggtataaccacgccgacgccgagtttcaggagcgtctgcaagaagatacgtcttttgggggcaacctcgggcgagcagtcttccaggccaagaagcgggttctcgaaccttttggtctggttgaggaaggcgctaagacggctcctggaaagaaacgtccggtagagcagtcgccacaagagccagactcctcctcgggcatcggcaagacaggccagcagcccgctaaaaagagactcaattttggtcagactggcgactcagagtcagtccccgacccacaacctctcggagaacctccagcaacccccgctgctgtgggacctactacaatggcttcaggcggtggcgcaccaatggcagacaataacgaaggcgccgacggagtgggtaatgcctcaggaaattggcattgcgattccacatggctgggcgacagagtcatcaccaccaacacccgcacctgggccttgcccacctacaataaccacctctacaagcaaatctccagtgcttcaacgggggccagcaacgacaaccactacttcggctacagcaccccctgggggtattttgatttcaacagattccactgccacttttcaccacgtgactggcagcgactcatcaacaacaattggggattccggcccaagagactcaacttcaagctcttcaacatccaagtcaaggaggtcacgacgaacgatggcgtcacgaccatcgctaataaccttaccagcacggttcaagtcttctcggattcagagtaccaactgccgtacgtcctcggctctgcgcaccagggctgcctccctccgttcccggcggacgtgttcatgattccgcagtacggctacctaatgctcaacaatggcagccaggccgtgggacgttcatccttttactgcctggaatatttcccttctcagatgctgagaacgggcaacaactttaccttcagctacacctttgaggaagtgcctttccacagcagctacgcgcacagccagagcctggaccggctgatgaatcctctcatcgaccaatacctgtattacctgaacagaactcaaaatcagtccggaagtgcccaaaacaaggacttgctgtttagccgtgggtctccagctggcatgtctgttcagcccaaaaactggctacctggaccctgttatcggcagcagcgcgtttctaaaacaaaaacagacaacaacaacagcaattttacctggactggtgcttcaaaatataacctcaatgggcgtgaatccatcatcaaccctggcactgctatggcctcacacaaagacgacgaagacaagttctttcccatgagcggtgtcatgatttttggaaaagagagcgccggagcttcaaatactgcattggacaatgtcatgatcacagatgaagaggaaattaaagccactaaccctgcggccaccgaaagatttgggaccgtggcagtcaatttccagagcagcagcacagaccccgcgaccggagatgtgcatgttatgggagccttacctggcatggtgtggcaagacagagacgtatacctgcagggtcccatttgggccaaaattcctcacacggatggacactttcacccgtctcctctcatgggcggctttggacttaagcacccgcctcctcaaatcctcatcaaaaacacgcctgttcctgcgaatcctccggcagagttttcggctacaaagtttgcttcattcatcacccagtactccacaggacaagtgagtgtggaaattgaatgggagctgcagaaagaaaacagcaagcgctggaatcccgaagtgcagtacacatccaattatgcaaaatctgccaacgttgatttcactgtggacaacaatggactttatactgagcctcgccccattggcacccgttaccttacccgtcccttg

SEQ ID NO: 680 - DNA, 2208 bp, Artificial Sequence
  source: /note="Description of Artificial Sequence: Synthetic polynucleotide"
atggctgccgatggttatcttccagattggctcgaggacaacctctctgagggcattcgcgagtggtgggacttgaaacctggagccccgaaacctaaagccaaccagcaaaagcaggacgacggccggggtctggtgcttcctggctacaagtacctcggacccttcaacggactcgacaagggggagcccgtcaacgcggcggacgcagcggccctcgagcacgacaaggcctacgaccagcagctcaaagcgggtgacaatccgtacctgcggtataaccacgccgacgccgagtttcaggagcgtctgcaagaagatacgtcttttgggggcaacctcgggcgagcagtcttccaggccaagaagcgggttctcgaaccttttggtctggttgaggaaggcgctaagacggctcctggaaagaaacgtccggtagagcagtcgccacaagagccagactcctcctcgggcatcggcaagacgggccagcagcccgctaaaaagagactcaattttggtcagactggcgactcagagtcagtccccgacccacaacctctcggagaacctccagcaacccccgctgctgtgggacctactacaatggcttcaggcggtggcgcaccaatggcagacaataacgaaggcgccgacggagtgggtaatgcctcaggaaattggcattgcgattccacatggctgggcgacagagtcatcaccaccagcacccgcacctgggccttgcccacctacaataaccacctctacaagcaaatctccagtgcttcaacgggggccagcaacgacaaccactacttcggctacagcaccccctgggggtattttgatttcaacagattccactgccacttttcaccacgtgactggcagcgactcatcaacaacaattggggattccggcccaagagactcaacttcaagctcttcaacatccaagtcaaggaggtcacgacgaacgatggcgtcacgaccatcgctaataaccttaccagcacggttcaagtcttctcggattcagagtaccaactgccgtacgtcctcggctctgcgcaccagggctgcctccctccgttcccggcggacgtgttcatgattccgcagtacggctacctaacgctcaacaatggcagccaggccgtgggacgttcatccttttactgcctggaatatttcccttctcagatgctgagaacgggcaacaactttaccttcagctacacctttgaggaagtgcctttccacagcagctacgcgcacagccagagcctggaccggctgatgaatcctctcatcgaccaatacctgtattacctgaacagaactcaaaatcagtccggaagtgcccaaaacaaggacttgctgtttagccgtgggtctccagctggcatgtccgttcagcccaaaaactggctacctggaccctgttatcggcagcagcgcgtttctaaaacaaaaacagacaacaacaacagcaattttacctggactggtgcttcaaaatataacctcaatgggcgtgaatccatcatcaaccctggcactgctatggcctcacacaaagacgacgaagacaagttctttcccatgagcggtgtcatgatttttggaaaagagagcgccggagcttcaaatactgcattggacaatgtcatgatcacagatgaagaggaaattaaagccactaaccctgtggccaccgaaagatttgggaccgtggcagtcaatttccagagcagcagcacagaccccgcgaccggagatgtgcatgttatgggagccttacctggcatggtgtggcaagacagagacgtatacctgcagggtcccatttgggccaaaattcctcacacggatggacactttcacccgtctcctctcatgggcggctttggacttaagcacccgcctcctcaaatcctcatcaaaaacacgcctgttcctgcgaatcctccggcagagttttcggctacaaagtttgcttcattcatcacccagtactccacaggacaagtgagtgtggaaattgaatgggagctgcagaaagaaaacagcaagcgctggaatcccgaagtgcagtacacatccaattatgcaaaatctgccaacgttgatttcactgtggacaacaatggactttatactgagcctcgccccattggcacccgttaccttacccgtcccttg

SEQ ID NO: 681 - DNA, 2208 bp, Artificial Sequence
  source: /note="Description of Artificial Sequence: Synthetic polynucleotide"
  modified_base (305)..(305): a, c, g or t
atggctgccgatggttatcttccagattggctcgaggacaacctctctgagggcattcgcgagtggtgggacttgaaacctggagccccgaaacctaaagccaaccagcaaaagcaggacgacggccggggtctggtgcttcctggctacaagtacctcggacccttcaacggactcgacaagggggagcccgtcaacgcggcggacgcagcggccctcgagcacgacaaggcctacgaccagcagctcaaagcgggtgacaatccgtacctgcggtataaccacgccgacgccgagtttcaggngcgtctgcaagaagatacgtcttttgggggcaacctcgggcgagcagtcttccaggccaagaagcgggttctcgaaccttttggtctggttgaggaaggcgctaagacggctcctggaaagaaacgtccggtagagcagtcgccacaagagccagactcctcctcgggcatcggcaagacaggccagcagcccgctaaaaagagactcaattttggtcagactggcgactcagagtcagtccccgacccacaacctctcggagaacctccagcaacccccgctgctgtgggacctactacaatggcttcaggcggtggcgcaccaatggcagacaataacgaaggcgccgacggagtgggtaatgcctcaggaaattggcattgcgattccacatggctgggcggcagagtcatcaccaccagcacccgcacctgggccttgcccacctacaataaccacctctacaagcaaatctccagtgcttcaacgggggccagcaacgacaaccactacttcggccacagcaccccctgggggtattttgatttcaacagattccactgccacttttcaccacgtgactggcagcgactcatcaacaacaattggggattccggcccaagagactcaacttcaagctcttcaacatccaagtcaaggaggtcacgacgaacgatggcgtcacgaccatcgctaataaccttaccagcacggttcaagtcttctcggattcagagtaccaactgccgtacgtcctcggctctgcgcaccagggctgcctccctccgtccccggcggacgtgttcatgattccgcagtacggctacctaacactcaacaatggcagccaggccgtgggacgttcatccttttactgcctggaatatttcccttctcagatgctgagaacgggcaacaactttaccttcagctacacctttgaggaagtgcctttccacagcagctacgcgcacagccagagcctggaccggctgatgaatcctctcatcgaccaatacctgtattacctgaacagaactcaaaatcagtccggaagtgcccaaaacaaggacttgctgtttagccgtgggtctccagctggcatgtctgttcagcccaaaaactggctacctggaccctgttatcggcagcagcgcgtttctaaaacaaaaacagacaacaacaacagcaattttacctggactggtgcttcaaaatataacctcaatgggcgtgaatccatcatcaaccctggcactgctatggcctcacacaaagacgacaaagacaagttctttcccatgagcggtgtcatgatttttggaaaagagagcgccggagcttcaaatactgcattggacaatgtcatgatcacagatgaagaggaaattaaagccactaaccctgtggccaccgaaagatttgggaccgtggcagtcaatttccagagcagcaacacagaccccgcgaccggagatgtgcatgttatgggagccttacctggcatggtgtggcaagacagagacgtatacctgcagggtcccatttgggccaaaattcctcacacggatggacactttcacccgtctcctctcatgggcggctttggacttaagcacccgcctcctcaaatcctcatcaaaaacacgcctgttcctgcgaatcctccggcagagttttcggctacaaagtttgcttcattcatcacccagtactccacaggacaagtgagtgtggaaattgaatgggagctgcagaaagaaaacagcaagcgctggaatcccgaagtgcagtacacatccaattatgcaaaatctgccaacgttgatttcactgtggacaacaatggactttatactgagcctcgccccattggcacccgttaccttacccgtcccttg

SEQ ID NO: 682 - DNA, 2208 bp, Artificial Sequence
  source: /note="Description of Artificial Sequence: Synthetic polynucleotide"
atggctgccgatggttattttccagattggctcgaggacaacctttctgagggcattcgcgagtggtgggacttgaaacctggagccccgaaacctaaagccaaccagcaaaagcaggacgacggccggggtctggtgcttcctggctacaagtacctcggacccttcaacggactcgacaagggggagcccgtcaacgcggcggacgcagcggccctcgagcacgacaaggcctacgaccagcagctcaaagcgggtgacaatccgtacctgcggtataaccacgccgacgccgagtttcaggagcgtctgcaagaagatacgtcttttgggggcaacctcgggcgagcagtcttccaggccaagaagcgggttctcgaaccttttggtctggttgaggaaggcgctaagacggctcctggaaagaaacgtccggtagagcagtcgccacaagagccagactcctcctcgggcatcggcaggacaggccagcagcccgctaaaaagagactcaattttggtcagactggcgactcagagtcagtccccgacccacaacctctcggagaacctccagcgacccccgctgctgtgggacctactacaatggcttcaggcggtggcgcaccaatggcagacaataacgaaggtgccgacggagtgggtaatgcctcaggaaattggcattgcgattccacatggctgggcgacagagtcatcaccaccagcacccgcacctgggccttgcccacctacaataaccacctctacaagcaaatctccagtgcttcaacgggggccagcaacgacaaccactacttcggctacagcaccccctgggggtattttgatttcaacagattccactgccacttttcaccacgtgactggcagcgactcatcaacaacaattggggattccggcccaagagactcaacttcaagctcttcaacatccaagtcaaggaggtcacgacgaacgatggcgtcacgaccatcgctaataaccttaccagcacggttcaagtcttctcggattcagagtaccaactgccgtacgtcctcggctctgcgcaccagggctgcctccctccgttcccggcggacgtgttcatgattccgcagtacggctacctaacgctcaacaatggcagccaggccgtgggacgttcatccttttactgcctggaatatttcccttctcagatgctgagaacgggcaacaactttaccttcagctacacctttgaggaagtgcctttccacagcagctacgcgcacagccagagcctggaccggctgatgaatcctctcatcgaccaatacctgtattacctgaacagaactcaaaatcagtccggaagtgcccaaaacaaggacttgctgtttagccgtgggtctccagctggcatgtctgttcagcccaaaaactggctacctggaccctgttatcggcagcagcgcgtttctaaaacaaaaacagacaacaacaacagcaattttacctggactggtgcttcaaaatataacctcaatgggcgtgaatccatcatcaaccctggcactgctatggcctcacacaaagacgacgaagacaagttctttcccatgagcggtgtcatgatttttggaaaagagagcgccggagcttcaaatactgcattggacaatgtcatgatcacagatgaagaggaaattaaagccactaaccctgtggccaccgaaagatttgggaccgtggcagtcaatttccagagcagcagcccagaccccgcgaccggagatgtgcatgttatgggagccttacctggcatggtgtggcaagacagagacgtatacctgcagggtcccatttgggccaaaattcctcacacggatggacactttcacccgtctcctctcatgggcggctttggacttaagcacccgcctcctcaaatcctcatcaaaaacacgcctgttcctgcgaatcctccggcagagttttcggctacaaagtttgcttcattcatcacccagtactccacaggacaagtgagtgtggaaattgaatgggagctgcagaaagaaaacagcaagcgctggaatcccgaagtgcagtacacatccaattatgcaaaatctgccaacgttgatttcactgtggacaacaatggactttatagtgagcctcgccccattggcacccgttaccttacccgtcccttg

SEQ ID NO: 683 - DNA, 2208 bp, Artificial Sequence
  source: /note="Description of Artificial Sequence: Synthetic polynucleotide"
atggctgccgatggttatcttccagattggctcgaggacaacctctctgagggcattcgcgagtggtgggacttgaaacctggagccccgaaacctaaagccaaccagcaaaagcaggacgacggccggggtctggtgcttcctggctacaagtacctcggacccttcaacggactcgacaagggggagcccgtcaacgcggcggacgcagcggccctcgagcacgacaaggcctacgaccagcagctcaaagcgggtgacaatccgtacctgcggtataaccacgccgacgccgagtttcaggagcgtctgcaagaagatacgtcttttgggggcaacctcgggcgagcagtcttccaggccaagaagcgggttctcgaaccttttggtctggttgaggaaggcgctaagacggctcctggaaagaaacgtccggtagagcagtcgccacaagagccagactcctcctcgggcatcggcaagacaggccagcagcccgctaaaaagagactcaattttggtcagactggcgactcagagtcagtccccgacccacaacctctcggagaacctccagcaacccccgctgctgtgggacctactacaatggcttcaggcggtggcgcaccaatggcagacaataacgaaggcgccgacggagtgggtaatgcctcaggaaattggcattgcgattccacatggctgggcgacagagtcatcaccaccagcacccgcacctgggccttgcccacctacaataaccacctctacaagcaaacctccagtgcttcaacgggggccagcaacgacaaccactacttcggctacagcaccccctgggggtattttgatttcaacagattccactgccacttttcaccacgtgactggcagcgactcatcaacaacaattggggattccggcccaagagactcaacttcaagctcttcaacatccaagtcaaggaggtcacgacgaacgatggcgtcacgaccatcgctaataaccttaccagcacggttcaagtcttctcggattcagagtaccaactgccgtacgtcctcggctctgcgcaccagggctgcctccctccgttcccggcggacgtgttcatgattccgcagtacggctacctaacgctcaacaatggcagccaggccgtgggacgttcatccttttactgcctggaatatttcccttctcagatgctgagaacgggcaacaactttaccttcagctacacctttgaggaagtgcctttccacagcagctacgcgcacagccagagcctggaccggctgatgaatcctctcatcgaccaatacctgtattacctgaacagaactcaaaatcagtccggaagtgcccaaaacaaggacttgctgtttagccgtgggtctccagctggcatgtctgttcagcccaaaaactggctacctggaccctgttatcggcagcagcgcgtttctaaaacaaaaacagactacaacaacagcaattttacctggactggtgcttcaaaatataacctcaatgggcgtgaatccatcatcaaccctggcactgctatggcctcacacaaagacgacgaagacaagttctttcccatgagcggtgtcatgatttttggaaaagagagcgccggagcttcaaatactgcattggacaatgtcatgatcacagatgaagaggaaattaaagccactaaccctgtggccaccgaaagatttgggaccgtggcagtcaatttccagagcagcagcacagaccccgcgaccggagatgtgcatgttatgggagccttacctggcatggtgtggcaagacagagacgtatacctgcagggtcccatttgggccaaaattcctcacacggatggacactttcacccgtctcctctcatgggcggctttggacttaagcacccgcctcctcaaatcctcatcaaaaacacgcctgttcctgcgaatcctccggcagagttttcggctacaaagtttgcttcattcatcacccagtactccacaggacaagtgagtgtggaaattgaatgggagctgcagaaagaaaacagcaagcgctggaatcccgaagtgcagtacacatccaattatgcaaaatctgccaacgttgatttcactgtggacaacaatggactttatactgagcctcgccccattggcacccgttaccttacccgtcccttg

SEQ ID NO: 684 - DNA, 2208 bp, Artificial Sequence
  source: /note="Description of Artificial Sequence: Synthetic polynucleotide"
atggctgccgatggttatcctccagattggctcgaggacaacctctctgagggcattcgcgagtggtgggacttgaaacctggagtcccgaaacctaaagccaaccagcaaaagcaggacgacggccggggtctggtgcttcctggctacaagtacctcggacccttcaacggactcgacaagggggagcccgtcaacgcggcggacgcagcggccctcgagcacgacaaggcctacgaccagcagctcaaagcgggtgacaatccgtacctgcggtataaccacgccgacgccgagtttcaggagcgtctgcaagaagatacgtcttttgggggcaacctcgggcgagcagtcttccaggccaagaagcgggttctcgaaccttttggtctggttgaggaaggcgctaagacggctcctggaaagaaacgtccggtagagcagtcgccacaagagccagactcctcctcgggcatcggcaagacaggccagcagcccgctaaaaagagactcaattttggtcagactggcgactcagagtcagtccccgacccacaacctctcggagaacctccagcaacccccgctgctgtgggacctactacaatggcttcaggcggtggcgcaccaatggcagacaataacgaaggcgccgacggagtgggtaatgcctcaggaaattggcattgcgattccacatggctgggcgacagagtcatcaccaccagcacccgcacctgggccttgcccacctacaataaccacctctacaagcaaatctccagtgcttcaacgggggccagcaacgacaaccactacttcggctacagcaccccctgggggtattttgatttcaacagattccactgccacttttcaccacgtgactggcagcgactcatcaacaacaattggggattccggcccaagagactcaacttcaagctcttcaacatccaagtcaaggaggtcacgacgaacgatggcgtcacgaccatcgctaataaccttaccagcacggttcaagtcttctcggattcagagtaccaactgccgtacgtcctcggctctgcgcaccagggctgcctccctccgttcccggcggacgtgttcatgattccgcagtacggctacctaacgctcaacaatggcagccaggccgtgggacgttcatccttttactgcctggaatatttcccttctcagatgctgagaacgggcaacaactttaccttcagctacacctttgaggaagtgcctttccacagcagctacgcgcacagccagagcctggaccggctgatgaatcctctcatcgaccaatacctgtattacctgaacagaactcaaaatcagtccggaagtgcccaaaacaaggacttgctgtttagccgtgggtctccagctggcatgtctgttcagcccaaaaactggctacctggaccctgttatcggcagcagcgcgtttctaaaacaaaaacagacaacaacaacagcaattttacctggactggtgcttcaaaatataacctcaatgggcgtgaatccatcatcaaccctggcactgctatggcctcacacaaagacgacgaagacaagttctttcccatgagcggtgtcatgatttttggaaaagagagcgccggagcttcaaatactgcattggacaatgtcatgatcacagatgaagaggaaattaaagccactaaccctgtggccaccgaaagatttgggaccgtggcagtcaatttccagagcagcagcacagaccccgcgaccggagatgtgcatgttatgggagccttacctggcatggtgtggcaagacagagacgtatacctgcagggtcccatttgggccaaaattcctcacacggatggacactttcacccgtctcctctcatgggcggctttggacttaagcacccgcctcctcaaatcctcatcaaaaacacgcctgttcctgcgaatcctccggcagagttttcggctacaaagtttgcttcattcatcacccagtactccacaggacaagtgagtgtggaaattgaatgggagctgcagaaagaaaacagcaagcgctggaatcccgaagtgcagtacacatccaattatgcaaaatctgccaacgttgatttcactgtggacaacaatggactttatactgagcctcgccccattggcacccgttaccttacccgtcccttg

SEQ ID NO: 685 - DNA, 2196 bp, Artificial Sequence
  source: /note="Description of Artificial Sequence: Synthetic polynucleotide"
atggctgccgatggttatcttccagattggctcgaggacaacctctctgagggcattcgcgagtggtgggacttgaaacctggagccccgaaacctaaagccaaccagcaaaagcaggacgacggccggggtctggtgcttcctggctacaagtacctcggacccttcaacggactcgacaagggggagcccgtcaacgcggcggacgcagcggccctcgagcacgacaaggcctacgaccagcagctcaaagcgggtgacaatccgtacctgcggtataaccacgccgacgccgagtttcaggagcgtctgcaagaagatacgtcttttgggggcaacctcgggcgagcagtcttccaggccaagaagcgggttctcgaaccttttggtctggttgaggaaggcgctaagacggctcctggaaagaaacgtccggtagagcagtcgccacaagagccagactcctcctcgggcatcggcaagacaggccagcagcccgctaaaaagagactcaattttggtcagactggcgactcagagtcagtccccgacccacaacctctcggagaacctccagcaacccccgctgctgtgggacctactacaatggcttcaggcggtggcgcaccaatggcagacaataacgaaggcgccgacggagtgggtaatgcctcaggaaattggcattgcgattccacatggctgggcgacagagtcatcaccaccagcacccgcacctgggccttgcccacctacaataaccacctctacaagcaaatctccagtgcttcaacgggggccagcaacgacaaccactacttcggctacagcaccccctgggggtattttgatttcaacagattccactgccacttttcaccacgtgactggcagcgactcatcaacaacaattggggattccggcccaagagactcaacttcaagctcttcaacatccaagtcaaggaggtcacgacgaacgatggcgtcacgaccatcgctaataaccttaccagcacggttcaagccttctcggattcagagtaccaactgccgtacgtcctcggctctgcgcaccagggctgcctccctccgttcccggcggacgtgttcatgattccgcagtacggctacctaacgctcaacaatggcagccaggccgtgggacgttcatccttttactgcctggaatatttcccttctcagatgctgagaacgggcaacaactttaccttcagctacacctttgaggaagtgcctttccacagcagctacgcgcacagccagagcctggaccggctgatgaatcctctcatcgacccatacctgtattacctgaacagaactcaaaatcagtccggaagtgcccaaaacaaggacttgctgtttagccgtgggtctccagctggcatgtctgttcagcccaaaaactggctacctggaccctgttatcggcagcagcgcgtttctaaaacaaaaacagacaacaacaacagcaattttacctggactggtgcttcaaaatataacctcaatgggcgtgaatccatcatcaaccctggcactgctatggcctcacacaaagacgacgaagacaagttctttcccatgagcggtgtcatgatttttggaaaagagagcgccggagcttcaaatactgcattggacaatgtcatgatcacagatgaagaggaaattaaagccactaaccctgtggccaccgaaagatttgggaccgtggcagtcaatttccagagcagcagcacagaccccgcgaccggagatgtgcatgttatgggagccttacctggcatggtgtggcaagacagagacgtatacctgcagggtcccatttgggccaaaattcctcacacggatggacactttcacccgtctcctctcatgggcggctttggacttaagcacccgcctcctcaaatcctcatcaaaaacacgcctgttcctgcgaatcctccggcagagttttcggctacaaagtttgcttcattcatcacccagtactccacaggacaagtgagtgtggaaattgaatgggagctgcagaaagaaaacagcaagcgctggaatcccgaagtgcagtacacatccaattatgcaaaatctgccaacgttgatttcactgtggacaacaatggactttatactgagcctcgccccattggcacccgttacctt

SEQ ID NO: 686 - DNA, 2208 bp, Artificial Sequence
  source: /note="Description of Artificial Sequence: Synthetic polynucleotide"
atggctgccgatggttatcttccagattggctcgaggacaacctctctgagggcattcgcgagtggtgggacttgaaacctggagccccgaaacctaaagccaaccagcaaaagcaggacgacggccggggtctggtgcttcctggctacaagtacctcggacccttcaacggactcgacaagggggagcccgtcaacgcggcggacgcagcggccctcgagcacgacaaggcctacgaccagcagctcaaagcgggtgacaatccgtacctgcggtataaccacgccgacgccgagtttcaggagcgtctgcaagaagatacgtcttttgggggcaacctcgggcgagcagtcttccaggccaagaagcgggttctcgaaccttttggtctggttgaggaaggcgctaagacggctcctggaaagaaacgtccggtagagcagtcgccacaagagccagactcctcctcgggcatcggcaagacaggccagcagcccgctaaaaagagactcaattttggtcagactggcgactcagagtcagtccccgacccacaacctctcggagaacctccagcaacccccgctgctgtgggacctactacaatggcttcaggcggtggcgcaccaatggcagacaataacgaaggcgccgacggagtgggtaatgcctcaggaaattggcattgcgattccacatggctgggcgacagagtcatcaccaccagcacccgcacctgggccttgcccacctacaataaccacctctacaagcaaatctccagtgcttcaacgggggccagcaacgacaaccactacttcggctacagcaccccctgggggtattttgatttcaacagattccactgccacttttcaccacgtgactggcagcgactcatcaacaacaattggggattccggcccaagagactcaacttcaagctcttcaacatccaagtcaaggaggtcacgacgaacgatggcgtcacgaccatcgctaataaccttaccagcacggttcaagtcttctcggattcagagtaccaactgccgtacgtcctcggctctgcgcaccagggctgcctccctccgttcccggcggacgtgttcatgattccgcagtacggctacctaacgctcaacaatggcagccaggccgtgggacgttcatccttttactgcctggaatatttcccttctcagatgctgagaacgggcaacaactttaccttcagctacacctttgaggaagtgcctttccacagcagctacgcgcacagccagagcctggaccggctgatgaatcctctcatcgaccaatacctgtattacctgaacagaactcaaaatcagtccggaagtgcccaaaacaaggacttgctgtttagccgtgggtctccagctggcatgtctgttcagcccaaaaactggctacctggaccctgttatcggcagcagcgcgtttctaaaacaaaaacagacaacaacaacagcaattttacctggactggtgcttcaaaatataacctcaatgggcgtgaatccatcatcaaccctggcactgctatggcctcacacaaagacgacgaagacaagttctttcccatgagcggtgtcatgatttttggaaaagagagcgccggagcttcaaatactgcattggacaatgtcatgatcacagatgaagaggaaattaaagccactaaccctgtggccaccgaaagatttgggaccgtggcagtcaatttccagagcagcagcacagaccccgcgaccggagatgtgcatgttatgggagccttacctggcatggtgtggcaagacagagacgtatacctgcagggtcccatttgggccaaaattcctcacacggatggacactctcacccgtctcctctcatgggcggctttggacttaagcacccgcctcctcaaatcctcatcaaaaacacgcctgttcctgcgaatcctccggcagagttttcggctacaaagtttgcttcattcatcacccagtactccacaggacaagtgagtgtggaaattgaatgggagctgcagaaagaaaacagcaagcgctggaatcccgaagtgcagtacacatccaattatgcaaaatctgccaacgttgatttcactgtggacaacaatggactttatactgagcctcgccccattggcacccgttaccttacccgtcccttg

SEQ ID NO: 687 - DNA, 2208 bp, Artificial Sequence
  source: /note="Description of Artificial Sequence: Synthetic polynucleotide"
atggctgccgatggttatcttccagattggctcgaggacaacctctctgagggcattcgcgagtggtgggacttgaaacctggagccccgaaacctaaagccaaccagcaaaagcaggacgacggccggggtctggtgcttcctggctacaagtacctcggacccttcaacggactcgacaagggggagcccgtcaacgcggcggacgcagcggccctcgagcacgacaaggcctacgaccagcagctcaaagcgggtgacaatccgtacctgcggtataaccacgccgacgccgagtttcaggagcgtctgcaagaagatacgtcttttgggggcaacctcgggcgagcagtcttccaggccaagaagcgggttctcgaaccttttggtctggttgaggaaggcgctaagacggctcctggaaagaaacgtccggtagagcagtcgccacaagagccagactcctcctcgggcatcggcaagacaggccagcagcccgctaaaaagagactcaattttggtcagactggcgactcagagtcagtccccgacccacaacctctcggagaacctccagcaacccccgctgctgtgggacctactacaatggcttcaggcggtggcgcaccaatggcagacaataacgaaggcgccgacggagtgggtaatgcctcaggaaattggcattgcgattccacatggctgggcgacagagtcatcaccaccagcacccgcacctgggccttgcccacctacaataaccacctctacaagcaaatctccagtgcttcaacgggggccagcaacgacaaccactacttcggctacagcaccccctgggggtattttgatttcaacagattccactgccacttttcaccacgtgactggcagcgactcatcaacaacaattggggattccggcccaagagactcaacttcaagctcttcaacatccaagtcaaggaggtcacgacgaacgatggcgtcacgaccatcgctaataaccttaccagcacggttcaagtcttctcggattcagagtaccaactgccgtacgtcctcggctctgcgcaccagggctgcctccctccgttcccggcggacgtgttcatgattccgcagtacggctacctaacgctcaacaatggcagccaggccgtgggacgttcatccttttactgcctggaatatttcccttctcagatgctgagaacgggcaacaactttaccttcagctacacctttgaggaagtgcctttccacagcagctacgcgcacagccagagcctggaccggctgatgaatcctctcatcgacctatacctgtattacctgaacagaactcaaaatcagtccggaagtgcccaaaacaaggacttgctgtttagccgtgggtctccagctggcatgtctgttcagcccaaaaactggctacctggaccctgttatcggcagcagcgcgtttctaaaacaaaaacagacaacaacaacagcaattttacctggactggtgcttcaaaatataacctcaatgggcgtgaatccatcatcaaccctggcactgctatggcctcacacaaagacgacgaagacaagttctttcccatgagcggtgtcatgatttttggaaaagagagcgccggaacttcaaatactgcattggacaatgtcatgatcacagatgaagaggaaattaaagccactaaccctgtggccaccgaaagatttgggaccgtggcagtcaatttccagagcagcagcacagaccccgcgaccggagatgtgcatgttatgggagccttacctggcatggtgtggcaagacagagacgtatacctgcagggtcccatttgggccaaaattcctcacacggatggacactttcacccgtctcctctcatgggcggctttggacttaagcacccgcctcctcaaatcctcatcaaaaacacgcctgttcctgcgaatcctccggcagagttttcggctacaaagtttgcttcattcatcacccagtactccacaggacaagtgagtgtggaaattgaatgggagctgcagaaagaaaacagcaagcgctggaatcccgaagtgcagtacacatccaattatgcaaaatctgccaacgttgatttcactgtggacaacaatggactttatactgagcctcgccccattggcacccgttaccttacccgtcccttg

SEQ ID NO: 688 - DNA, 2208 bp, Artificial Sequence
  source: /note="Description of Artificial Sequence: Synthetic polynucleotide"
atggctgccgatggttatcttccagattggctcgaggacagcctctctgagggcattcgcgagtggtgggacttgaaacctggagccccgaaacctaaagccaaccagcaaaagcaggacgacggccggggtctggtgcttcctggctacaagtacctcggacccttcaacggactcgacaagggggagcccgtcaacgcggcggacgcagcggccctcgagcacgacaaggcctacgaccagcagctcaaagcgggtgacaatccgtacctgcggtataaccacgccgacgccgagtttcaggagcgtctgcaagaagatacgtcttttgggggcaacctcgggcgagcagtcttccaggccaagaagcgggttctcgaaccttttggtctggttgaggaaggcgctaagacggctcctggaaagaaacgtccggtagagcagtcgccacaagagccagactcctcctcgggcatcggcaagacaggccagcagcccgctaaaaagagactcaattttggtcagactggcgactcagagtcagtccccgacccacaacctctcggagaacctccagcaacccccgctgctgtgggacctactacgatggcttcaggcggtggcgcaccaatggcagacaataacgaaggcgccgacggagtgggtaatgcctcaggaaattggcattgcgattccacatggctgggcgacagagtcatcaccaccagcacccgcacctgggccttgcccacctacaataaccacctctacaagcaaatctccagtgcttcaacgggggccagcaacgacaaccactacttcggctacagcaccccctgggggtattttgatttcaacagattccactgccacttttcaccacgtgactggcagcgactcatcaacaacaattggggattccggcccaagagactcaacttcaagctcttcaacatccaagtcaaggaggtcacgacgaacgatggcgtcacgaccatcgctaataaccttaccagcacggttcaagtcttctcggattcagagtaccaactgccgtacgtcctcggctctgcgcaccagggctgcctccctccgttcccggcggacgtgttcatgattccgcagtacggctacctaacgcccaacaatggcagccaggccgtgggacgttcatccttttactgcctggaatatttcccttctcagatgctgagaacgggcaacaactttaccttcagctacacctttgaggaagtgcctttccacagcagctacgcgcacagccagagcctggaccggctgatgaatcctctcatcgaccaataccagtattacctgaacagaactcaaaatcagtccggaagtgcccaaaacaaggacttgctgtttagccgtgggtctccagctggcatgtctgttcagcccaaaaactggctacctggaccctgttatcggcagcagcgcgtttctaaaacaaaaacagacaacaacaacagcaattttacctggactggtgcttcaaaatataacctcaatgggcgtgaatccatcatcaaccctggcactgctatggcctcacacaaagacgacgaagacaagttctttcccatgagcggtgtcatgatttttggaaaagagagcgccggagcttcaaatactgcattggacaatgtcatgatcacagatgaagaggaaattaaagccactaaccctgtggccaccgaaagatttgggaccgtggcagtcaatttccagagcagcagcacagaccccgcgaccggagatgtgcatgttatgggagccttacctggcatggtgtggcaagacagagacgtatacctgcagggtcccatttgggccaaaattcctcacacggatggacactttcacccgtctcctctcatgggcggctttggacttaagcacccgcctcctcaaatcctcatcaaaaacacgcctgttcctgcgaatcctccggcagagttttcggctacaaagtttgcttcattcatcacccagtactccacaggacaagtgagtgtggaaattgaatgggagctgcagaaagaaaacagcaagcgctggaatcccgaagtgcagtacacatccaattatgcaaaatctgccaacgttgatttcactgtggacaacaatggactttatactgagcctcgccccattggcacccgttaccttacccgtcccttg

SEQ ID NO: 689 - DNA, 2208 bp, Artificial Sequence; identical to SEQ ID NO: 680
  source: /note="Description of Artificial Sequence: Synthetic polynucleotide"

SEQ ID NO: 690 - DNA, 2205 bp, Artificial Sequence
  source: /note="Description of Artificial Sequence: Synthetic polynucleotide"
atggctgccgatggttatcttccagattggctcgaggacactctctctgaaggaataagacagtggtggaagctcaaacctggcccaccaccaccaaagcccgcagagcggcataaggacgacagcaggggtcttgtgcttcctgggtacaagtacctcggacccttcaacggactcgacaagggagagccggtcaacgaggcagacgccgcggccctcgagcacgacaaagcctacgaccggcagctcgacagcggagacaacccgtacctcaagtacaaccacgccgacgcggagtttcaggagcgccttaaagaagatacgtcttttgggggcaacctcggacgagcagtcttccaggcgaaaaagagggttcttgaacctctgggcctggttgaggaacctgttaagacggctccgggaaaaaagaggccggtagagcactctcctgtggagccagactcctcctcgggaaccggaaaggcgggccagcagcctgcaagaaaaagattgaattttggtcagactggagacgcagactcagtacctgacccccagcctctcggacagccaccagcagccccctctggtctgggaactaatacgatggctacaggcagtggcgcaccaatggcagacaataacgagggcgccgacggagtgggtaattcctcgggaaattggcattgcgattccacatggatgggcgacagagtcatcaccaccagcacccgaacctgggccctgcccacctacaacaaccacctctacaaacaaatttccagccaatcaggagcctcgaacgacaatcactactttggctacagcaccccttgggggtattttgacttcaacagattccactgccacttttcaccacgtgactggcaaagactcatcaacaacaactggggattccgacccaagagactcaacttcaagctctttaacattcaagtcaaagaggtcacgcagaatgacggtacgacgacgattgccaataaccttaccagcacggttcaggtgtttactgactcggagtaccagctcccgtacgtcctcggctcggcgcatcaaggatgcctcccgccgttcccagcagacgtcttcatggtgccacagtatggatacctcaccctgaacaacgggagtcaggcagtaggacgctcttcattttactgcctggagtactttccttctcagatgctgcgtaccggaaacaactttaccttcagctacacttttgaggacgttcctttccacagcagctacgctcacagccagagtctggaccgtctcatgaatcctctcatcgaccagtacctgtattacttgagcagaacaaacactccaagtggaaccaccacgcagtcaaggcttcagttttctcgggccggagcgagtgacattcgggaccagtctaggaactggcttcctggaccctgttaccgccagcagcgagtatcaaagacatctgcggataacaacaacagtgaatactcgtggactggagctaccaagtaccacctcaatggcagagactctctggtgaatccgggcccggccatggcaagccacaaggacgatgaagaaaagttttttcctcagagcggggttctcatctttgggaagcaaggctcagagaaaacaaatgtggacattgaaaaggtcatgattacagacgaagaggaaatcaggacaaccaatcccgtggctacggagcagtatggttctgtatctaccaacctccagagaggcaacagacaagcagctaccgcagatgtcaacacacaaggcgttcttccaggcatggtctggcaggacagagatgtgtaccttcaggggcccatctgggcaaagattccacacacggacggacattttcacccctctcccctcatgggtggattcggacttaaacaccctcctccacagattctcatcaagaacaccccggtacctgcgaatccttcgaccaccttcagtgcggcaaagtttgcttccttcatcacacagtactccacgggacaggtcagcgtggagatcgagtgggagctgcagaaggaaaacagcaaacgctggaatcccgaaattcagtacacttccaactacaacaagtctgttaatgtggactttactgtggacactaatggcgtgtattcagagcctcgccccattggcaccagatacctgactcgtaatctg

SEQ ID NO: 691 - protein, 736 aa, Artificial Sequence
  source: /note="Description of Artificial Sequence: Synthetic polypeptide"
MAADGYLPDWLEDNLSEGIREWWALKPGAPQPKANQQHQDNARGLVLPDYKYLGPGNGLDKGEPVNAADVAALEHDKAYDQQLKAGDNPYLKYNHADAEFQERLKEDTSFGGNLGRAVFQAKKRLLEPLGLVEEAAKTAPGKKRPVEQSPQEPDSSAGIGKSGAQPAKKRLNFGQTGDTESVPDPQPIGEPPAAPSGVGSLTMASGGGAPVADNNEGADGVGSSSGNWHCDSQWLGDGVITTSTRTWALPTYNNHLYKQISNSTSGGSSNDNAYFGYSTPWGYFDFNRFHCHFSPRDWQRLINNNWGFRPKRLNFKLFNIQVKEVTDNNGVKTIANNLTSTVQVFTDSDYQLPYVLGSAHEGCLPPFPADVFMIPQYGYLTLNDGSQAVGRSSFYCLEYFPSQMLRTGNNFQFSYEFENVPFHSSYAHSQSLDRLMNPLIDQYLHYLPKTINGSGQNQQTLKFSVAGPSNMAVQGRNYIPGPSYRQQRVSTTVTQNNNSEFAWPGASSWALNGRNSLMNPGPAMASYKEGEDSFFPLSGSLIFGKQGTGRDNVDADKVMITNEEEIKTTNPVATESYGQVATNHQSAQAQAQTGWVQNQGILPGMVWQDRDVYLQGPIWAKIPHTDGNFHPSPLMGGFGMKHPPPQTLIKNTPVPADPPTAFNKDKLNSFITQYSTGQVSVEIEWELQKENSKRWNPEIQYTSNYYKSNNVEFAVNTEGVYSEPRPIGTRYLTRNL

SEQ ID NO: 692 - protein, 736 aa, Artificial Sequence
  source: /note="Description of Artificial Sequence: Synthetic polypeptide"
MAADGYLPDWLEDNLSEGIREWWALKPGAPQPKANQQHQDNARGLVLPGYKYLGPGNGLDKGEPVNAADAAALEHDKAYDQQLKAGDNPYLKYNHADAEFQERLKEDTSFGGNLGRAVFQAKRRLLEPLGLVEEAAKTAPGKKRPVEQSPQEPDSSAGIGKSGAQPAKKRLNFGQTGDTESVPDPQPIGEPPAAPSGVGSLTMASGGGAPVADNNEGADGVGSSSGNWHCDSQWLGDRVITTSTRTWALPTYNNHLYKQISNSTSGGSSNDNAYFGYSTPWGYFDFNRFHCHFSPRDWQRLINNNWGFRPKRLNFKLFNIQIKEVTDNNGVKTIANNLTSTVQVFTDLDYQLPYVLGSAHEGCLPPFPADVFMIPQYGYLTLNDGSQAVGRSSFYCLEYFPSQMLRTGNNFQFSYEFENVPFHSSYAHSQSLDRLMNPLIDQYLHYLSKTINGSGQNQQTLKFSVAGPSNMAVQGRNYIPGPSYRQQRVSTTVTQNNNSEFAWPGASSWALNGRNSLMNPGPAMASYKEGEDSFFPLSGSLIFGKQGTGRDNVDADKVMITNEEEIKTTNPVATESYGQVATNHQSAQAQAQTGWVQNQGILPGMVWQDRDVYLQGPIWAKIPHTDGNFHPSPLMGGFGMKHPPPQTLIKNTPVPADPPTAFNKDKLNSFITQYSTGQVSVEIEWELQKENSKRWNPEIQYTSNYYKSNNVEFAVNTEGVYSEPRPIGTRYLTRNL

SEQ ID NO: 693 - protein, 736 aa, Artificial Sequence
  source: /note="Description of Artificial Sequence: Synthetic polypeptide"
MAADGYLPDWLEDNLSEGIREWWALKPGAPQPKANQQHQDNARGLVLPGYKYLGPGNGLDKGEPVSAADAAALEHDKAYDQQLKAGDNPYLKYNHADAEFQERLKEDTSFGGNLGRAVFQAKKRLLEPLGLVEEAAKTAPGKKRPVEQSPQEPDSSAGIGKSGAQPAKKRLNFGQTGDTESVSDPQPIGEPPAAPSGVGSLTMASGGGAPVADNNEGADGVGSSSGNWHCDSQWLGDRVITTSTRTWALPTYNNHLYKQISNSTSGGSSNDNAYFGYSTPWGYFDFNRFHCHFSPRDWQRLINNNWGFRPKRLNFKLFNIQVKEVTDNNGVKTIANNLTSTVQVFTDSDYQLPYVLGSAHEGCLPPSPADVFMIPQYGYLTLNDGSQAVGRSSFYCLEYFPSQMLRTGNNFQFSYEFENVPFHSSYAHSQSLDRLMNPLIDQYLHYLSKTINGSGQNQQTLKFSVAGPSNMAVQGRNYIPGPSYRQQRVSTTVTQNNNSEFAWPGASSWALNGRNSLMNPGPAMASYKEGEDSFFPLSGSLIFGKQGTGRDDVDADKVIITNEEEIKTTNPVATESYGQVATNHQSAQAQAQTGWVQNQGILPGMVWQDRDVYLQGPIWAKIPHTDGNFHPSPLMGGFGMKHPPPQTLIKNTPVPADPPTAFNKDKLNSFITQYSTGQVSVEIEWELQKENSKRWNPEIQYTSNYYKSNNVEFAVNTEGVYSEPRPIGTRYLTRNL

SEQ ID NO: 694 - protein, 736 aa, Artificial Sequence
  source: /note="Description of Artificial Sequence: Synthetic polypeptide"
MAADGYLPDWLEDNLSEGIREWWALKPGAPQPKANQQHQDNARGLVLPGYKYLGPGNGLDKGEPVNAADAAALEHDKAYDQQLKAGDNPYLKYNHAGAEFQERLKEDTSFGGNLGRAVFQAKKRLLEPLGLVEEAAKTAPGKKRPVEQSPQEPDSSAGIGKSGAQPAKKRLNFGQTGDTESVPDPQPIGEPPAAPSGVGSLTMASGGGAPVADNNEGAGGVGSSSGNWHCDSQWLGDRVVTTSTRTWALPTYNNHLYKQISNSTSGGSSNDNAYFGYSTPWGYFDFNRFHCHFSPRDWQRLINNNWGFRPKRLNFKLFNIQVKEVTDNNGVKTIANNLTSTVQVFTDSDYQLPYVLGSAHGGCLPPFPADVFMIPQYGYLTLNDGSQAVGRSSFYCLEYFPSQMLRTGNNFQFSYEFENVPFHSSYAHSQSLDRLMNPLIDQYLHYLSKTINGSGQNQQTLKFSVAGPSNMAVQGRSYIPGPSYRQQRVSTTVTQNNNSEFAWPGASSWALNGRNSLMNPGPAMASYKEGEDSFFPLSGSLIFGKQGTGRDNVDADKVMITNEEEIKTTNPVATESYGQVATNHQSAQAQAQTGWVQNQGILPGMVWQDRDVYLQGPIWAKIPHTDGNFHPSPLMGGFGMKHPPPQTLIKNTPVPADPPTAFNKDKLNSFITQYSTGQVSVEIEWELQKENSKRWNPEIQYTSNYYKSNNVEFAVNTEGVYSEPRPIGTRYLTRNL

SEQ ID NO: 695 - protein, 736 aa, Artificial Sequence
  source: /note="Description of Artificial Sequence: Synthetic polypeptide"
MAADGYLPDWLEDNLSEGIREWWALKPGAPQPKANQQHQDNARGLVLPGYKYLGPGNGLDKGEPVNAADAAALEHDKAYDQQLKAGDNPYLKYNHADAEFQERLKEDTSFGGNLGRAVFQAKKRLLEPLGLVEEAAKTAPGKKRPVEQSPQEPDSSAGIGKSGAQPAKKRLNFGQTGDTESVPDPQPIGEPPAAPSGVGSLTMASGGGAPVADNNEGADGVGSSSGNWHCDSQWLGDRVVTTSTRTWALPTYNNHLYKQISNSTSGGSSNDNAYFGYSTPWGYFDFNRFHCHFSPRDWQRLINNNWGFRPKRLNFKLFNIQVKEVTDNNGVKTIANNLTSTVQVFTDSDYQLPYVLGSAHEGCLPPFPADVFMIPQYGYLTLNDGSQAVGRSSFYCLEYFPSQMLRTGNNFQFSYEFENVPFHSSHAHSQSLDRLMNPLIDQYLHYLSKTINGSGQNQQTLKFSVAGHSNMAVQGRNYIPGPSYRQQRVSTTVTQNNNSEFAWPGASSWALNGRNSLMNPGPAMASYKEGEDSFFPLSGSLIFGKQGTGRDNVDADKVMITNEEEIKTTNPVATESYGQVATNHQSAQAQAQTGWVQNQGILPGMVWQDRDVYLQGPIWAKIPHTDGNFHPSPLMGGFGMKHPPPQTLIKNTPVPADPPTAFNKDKLNSFITQYSTGQVSVEIGWELQKENSKRWNPEIQYTSNYYKSNNVEFAVNTEGVYSEPRPIGTRYLTRNL

SEQ ID NO: 696 - protein, 736 aa, Artificial Sequence
  source: /note="Description of Artificial Sequence: Synthetic polypeptide"
MAADGYLPDWLEDNLSEGIREWWALKPGAPQPKANQQHQDNARGLVLPGYKYLGPGNGLDKGEPVNAADAAALEHDKAYDQQLKAGDNPYLKYNHADAEFQERLKEDTSFGGNLGRAVFQAKKRLLEPLGLVEEAAKTAPGKKRPVEQSPQEPDSSAGIGKSGAQPAKKRLNFGQTGDTESVPDPQPIGEPPAAPSGVGSLTMASGGGAPVADNNEGADGVGSSSGNWHCDSQWLGDRVITTSTRTWALPTYNNRLYKQISNSTSGGSSNDNAYFGYSTPWGYFDFNRFHCHFSPRDWQRLINNNWGFRPKRLNFKPFNIQVKEVTDNNGVKTIANNLTSTVQVFTDSDYQLPYVLGSAHEGCLPPFPADVFMIPQYGYLTLNDGSQAVGRSSFYCLEYFPSQMLRTGNNFQFSYEFENVPFHSSYAHSQSLDRLMNPLIDQYLHYLSKTINGSGQNQQTLKFSVAGPSNMAVQGRNYIPGPSYRQQRVSTTVTQNNNSEFAWPGASSWALNGRNSLMNPGPAMASYKEGEDSFFPLSGSLIFGKQGTGRDNVDADKVMITNEEEIKTTNPVATESYGQVATNHQSAQAQAQTGWVQNQGILPGMVWQDRDVYLQGPIWAKIPHTDGNFHPSPLMGGFGMKHPPPQTLIKNTPVPADPPTAFNKDKLNSFITQYSTGQVSVEIEWELQKENSKRWNPEIQYTSNYYKSNNVEFAVNTEGVYSEPRPIGTRYLTRNL

SEQ ID NO: 697 - protein, 736 aa, Artificial Sequence
  source: /note="Description of Artificial Sequence: Synthetic polypeptide"
MAADGYLPDWLEDNLSEGIREWWALKPGAPQPKANQQHQDNARGLVLPGYKYLGPGNGLDKGEPVNAADAAALEHDKAYDQQLKAGDNPYLKYNHADAEFQERLKEDTSFGGNLGRAVFQAKKRLLEPLGLVEEAAKTAPGKKRPVEQSPQEPDSSAGIGKSGAQPAKKRLNFGQTGDTESVPDPQPIGEPPAAPSGVGSLTMASGGGAPVADNNEGADGVGSSSGNWHCDSQWLGDRVITTSTRTWALPTYNNHLYKQISNSTSGGSSNDNAYFGYSTPWGYFDFNRFHCHFSPRDWQRLINNNWGFRPKRLNFKLFNIQVKEVTDNNGVKTIANNLTSTVQVFTDSDYQLPYVLGSAHEGCLPPFPADVFMIPQYGYLTLNDGSQAVGRSSFYCLEYFPSQMLRTGNNFQFSYEFENVPFHSSYAHSQSLDRLMNPLIDQYLHYLSKTINGSGQNQQTLKFSVAGPSNMAVQGRNYIPGPSYRQQRVSTTVTQNNNSEFAWPGASSWALNGRNSLMNPGPAMASYKEGEDSFFPLSGSLIFGKQGTGRDNVDADKVMITNEEEIKTTNPVATESYGQVATNHQSAQAQAQTGWVQNQGILPGMVWQDRDVYLQGPIWAKIPHTDGNFHPSPLMGGFGMKHPPPQTLIKNTPVPADPPTAFNKDKLNSFITQYSTGQVSVEIEWELQKENSKRWNPEIQYTSNYYKSNNVEFAVNTEGVYSEPRPIGTRYLTRNL

SEQ ID NO: 698 - protein, 736 aa, Artificial Sequence; identical to SEQ ID NO: 697
  source: /note="Description of Artificial Sequence: Synthetic polypeptide"

SEQ ID NO: 699 - protein, 736 aa, Artificial Sequence
  source: /note="Description of Artificial Sequence: Synthetic polypeptide"
MAADGYLPDWLEDNLSEGIREWWDLKPGAPKPKANQQKQDDGRGLVLPGYKYLGPFNGLDKGEPVNAADAAALEHDKAYDQQLKAGDNPYLRYNHADAEFQERLQEDTSFGGNLGRAVFQAKKRVLEPFGLVEEGAKTAPGKKRPVEQSPQEPDSSSGIGKSGQQPAKKRLNFGQTGDSESVPDPQPLGEPPATPAALGPTTMASGGGAPMADNNEGADGVGNASGNWHCDSTWLGDRVITTSTRTWALPTYNNHLYKQISSASTGASNDNHYFGYSTPWGYFDFNRFHCHFSPRDWQRLINNNWGFRPKRLNFKLFNIQVKEVTTNDGVTTIANNLTSTVQVFSDSEYQLPYVLGSAHQGCLPPFPADVFMIPQYGYLTLNNGSKAVGRSSFYCLEYFPSQMLRTGNNFTFSYTFEEVPFHSSYAHSQSLDRLMNPLIDQYLYYLNRTQNQSGSAQNKDLLFSRGSPAGMSVQPKNWLPGPCYRQQRVSKTKTDNNNSNFTWTGASKYNLNGRESIINPGTAMASHKDDEDKFFPMSGVMIFGKESAGASNTALDNVMITDEEEIKATNPVATERFGTVAVNFQSSSTDPATGDVHVMGALPGMVWQDRDVYLQGPIWAKIPHTDGHFHPSPLMGGFGLKHPPPQILIKNTPVPANPPAEFSATKFASFITQYSTGQVSVEIEWELQKENSKRWNPEVQYTSNYAKSANVDFTVDNNGLYTEPRPIGTRYLTRPL

SEQ ID NO: 700 - protein, 736 aa, Artificial Sequence
  source: /note="Description of Artificial Sequence: Synthetic polypeptide"
MAADGYLPDWLEDNLSEGIREWWDLKPGAPKPKANQQKQDDGRGLVLPGYKYLGPFNGLDKGEPVNAADAAALEHDKAYDQQLKAGDNPYLRYNHADAEFQERLQEDTSFGGNLGRAVFQAKKRVLEPLGLVEEGAKTAPGKKRPVEQSPQEPDSSSGIGKTGQQPAKKRLNFGQTGDSESVPDPQPLGEPPATPAAVGPTTMASGGGAPMADNNEGADGVGNASGNWHCDSTWLGDRVITTSTRTWALPTYNNHLYKQISSTSTGASNDNHYFGYSTPWGYFDFNRFHCHFSPRDWQRLINNNWGFRPKRLNFKLFNIQVKEVTTNDGVTTIANNLTSTVQVFSDSEYQLPYVLGSAHQGCLPPFPADVFMIPQYGYLTLNNGSQAVGRSSFYCLEYFPSQMLRTGNNFTFSYTFEEVPFHSSYAHSQSLDRLMNPLIDQYLYYLNRTQNQSGSAQNKDLLFSRGSPAGMSVQPKNWLPGPCYRQQRVSKTKTDNNNSNFTWTGASKYNLNGRESIINPGTAVASHKDDEDKFFPMSGVMIFGKESAGASNTALDNVMITDEEEIKATNPVATERFGTVAVNFQSSSTDPATGDVHAMGALPGMVWQDRDVYLQGPIWAKIPHTDGHFHPSPLMGGFGLKNPPPQILIKNTPVPANPPAEFSATKFASFITQYSTGQVSVEIEWELQKENSKRWNPEVQYTSNYAKSANVDFTVDNNGLYTEPRPIGTRYLTRPL

SEQ ID NO: 701 - protein, 736 aa, Artificial Sequence
  source: /note="Description of Artificial Sequence: Synthetic polypeptide"
MAADGYLPDWLEDNLSEGIREWWALKPGAPQPKANQQHQDNARGLVLPGYKYLGPGNGLDKGEPVNAADAAALEHDKAYDQQLKAGDNPYLKYNHADAEFQERLKEDTSFGGNLGRAVFQAKKRLLEPLGLVEEAAKTAPGKKRPVEQSPQEPDSSAGIGKSGAQPAKKRLNFGQTGDTESVPDPQPIGEPPAAPSGVGSLTMASGGGAPVADNNEGADGVGSSSGNWHCDSQWLGDRVITTSTRTWALPTYNNHLYKQISNSTSGGSSNDNAYFGYSTPWGYFDFNRFHCHFSPRDWQRLINNNWGFRPKRLNFKLFNIQVKEVTDNNGVKTIANNLTSTVQVFTDSDYQLPYVLGSAHEGCLPPFPADVFMIPQYGYLTLNDGSQAVGRSSFYCLEYFPSQMLRTGNNFQFGYEFENVPFHSSYAHSQSLDRLMNPLIDQYLYYLSKTINGSGQNQQTLKFSVAGPSNMAVQGRNYIPGPSYRQQRVSTTVTQNNNSEFAWPGASSWALNGRNSLMNPGPAMASHKEGEDRFFPLSGSLIFGKQGTGRDNVDADKVMITNEEEIKTTNPVATESYGQVATNHQSAQAQAQTGWVQNQGILPGMVWQDRDVYLQGPIWAKIPHTDGNFHPSPLMGGFGMKHPPPQILIKNTPVPADPPTAFNKDKLNSFITQYSTGQVSVEIEWELQKENSKRWDPEIQYTSNYYKSNNVEFAVNTEGVYSEPRPIGTRYLTRNL

SEQ ID NO: 702 - protein, 736 aa, Artificial Sequence
  source: /note="Description of Artificial Sequence: Synthetic polypeptide"
MAADGYLPDWLEDNLSEGIREWWALKPGAPQPKANQQHQDNARGLVLPGYKYLGPGNGLDKGEPVNAADAAALEHDKAYDQQLKAGDNPYLKYNHADAEFQERLKEDTSFGGNLGRAVFQAKKRLLEPLGLVEEAAKTAPGKKRPVEQSPQEPDSSAGIGKSGAQPAKKRLNFGQTGDTESVPDPQPIGEPPAAPSGVGSLTMASGGGAPVADNNEGADGVGSSSGNWHCDSQWLGDRVITTSTRTWALPTYNNHLYKQISNSTSGGSSNDNAYFGYSTPWGYFDFNRFHCRFSPRDWQRLINNNWGFRPKRLNFKLFNIQVKEVTDNNGVKTIANNLTSTVQVFTDSDYQLPYVLGSAHEGCLPPFPADVFMIPQYGYLTLNDGSQAVGRSSFYCLEYFPSQMLRTGNNFQFSYEFENVPFHSSYAHSQSLDRLMNPLIDQYLYYLSKTINGSGQNQQTLKFSVAGPSNMAVQGRNYIPGPSYRQQRVSTTVTQNNNSEFAWPGASSWALNGRNSLMNPGPAMASHKEGEDRFFPLSGSLIFGKQGTGRDNVDADKVMITNEEEIKTTNPVATESYGQVATNHQSAQAQAQTGWVQNQGILPGMVWQDRDVYLQGPIWAKIPHTDGNFHPSPLMGGFGMKHPPPQILIKNAPVPADPPTAFNKDKLNSFITQYSTGQVSVEIEWELQKENSKRWNPEIQYTSNYYKSNNVEFAVNTEGVYSEPRPIGTRYLTRNL

SEQ ID NO: 703 - protein, 736 aa, Artificial Sequence
  source: /note="Description of Artificial Sequence: Synthetic polypeptide"
MAADGYLPDWLEDNLSEGIREWWALKPGAPQPKANQQHQDNARGLVLPGYKYLGPGNGLDKGEPVSAADAAALEHDKAYDQQLKAGDNPYLKYNHADAEFQERLKEDTSFGGNLGRAVFQAKKRLLEPLGLVEEAAKTAPGKKRPVEQSPQEPDSSAGIGKSGAQPAKKRLNFGQTGDTESVPDPQPIGEPPAAPSGVGSLTMASGGGAPVADNNEGADGVGSSSGNWHCDSQWLGDRVITTSTRTWALPTYNNHLYKQISNSTSGGSSNDNAYFGYSTPWGYFDFNRFHCHFSPRDWQRLINNNWGFRPKRLNFKLFNIQVKEVTDNNGVKTIANNLTSTVQVFTDSDYQLPYVLGSAHEGCLPPFPADVFMIPQYGYLTLNDGSQAVGRSSFYCLEYFPSQMLRTGNNFQFSYEFENVPFHSSYAHSQSLDRLMNPLIDQYLYYLSKTINGSGQNQQTLKFSVAGPSNMAVQGRNYIPGPSYRQQRVSTTVTQNNNSEFAWPGASSWALNGRNSLMNPGPAMASHKEGEDRFFPLSGSLIFGKQGTGRDNVDADKVMITNEEEIKTTNPVATESYGQVATNHQSAQAQAQTGWVQNQGILPGMVWQDRDVYLQGPIWAKIPHTDGNFHPSPLMGGFGMKHPPPQILIKNTPVPADPPTAFNKDKLNSFITQYSTGQVSVEIEWELQKENSKRWNPEIQYTSNYYKSNNVEFAVNTEGVYSEPRPIGTRYLTRNL

SEQ ID NO: 704 - protein, 736 aa, Artificial Sequence
  source: /note="Description of Artificial Sequence: Synthetic polypeptide"
MAADGYLPDWLEDNLSEGIREWWALKPGAPQPKANQQHQDNARGLVLPGYKYLGPGNGLDKGEPVNAADAAALEHDKAYDQQLKAGDNPYLKYNHADAEFQERLKEDTSFGGNLGRAVFQAKKRLLEPLGLVEEAAKTAPGKKRPVEQSPQEPDSSAGIGKSGAQPAKKRLNFGQTGDTESVPDPQPIGEPPAAPSGVGSLTMASGGGAPVADNNEGADGVGSSSGNWHCDSQWLGDRVITTSTRTWALPTYNNHLYKQISNSTSGGSSNDNAYFGYSTPWGYFDFNRFHCHFSPRDWQRLINNNWGFRPKRLNFKLFNIQVKEVTDNNGVKTIANNLTSTVQVFTDSDYQLPYVLGSAHEGCLPPFPADVFMIPQYGYLTLNDGSQAVGRSSFYCLEYFPSQMLRTGNNFQFSYEFENVPFHSSYAHSQSLDRLMNPLIDQYLYYLSKTINGSGQNQQTLKFSVAGPSNTAVQGRNYIPGPSYRQQRVSTTVTQNNNSEFAWPGASSWALNGRNSLMNPGPAMASHKEGEDRFFPLSGSLIFGKQGTGRDNVDADKVMITNEEEIKTTNPVATESYGQVATNHQSAQAQAQTGWVQNQGILPGMVWQDRDVYLQGPIWAKIPHTDGNFHPSPLMGGFGMKHPPPQILIKNTPVPADPPTAFNKDKLNSFITQYSTGQVSVEIEWELQKENSKRWNPEIQYTSNYYKSNNVEFAVNTEGVYSEPRPIGTRYLTRNL

SEQ ID NO: 705 - protein, 736 aa, Artificial Sequence
  source: /note="Description of Artificial Sequence: Synthetic polypeptide"
MAADGYLPDWLEDNLSEGIREWWALKPGAPQPKANQQHQDNARGLVLPGYKYLGPGNGLDKGEPVNAADAAALEHDKAYDQQLKAGDNPYLKYNHADAEFQERLKEDTSFGGNLGRAVFQAKKRLLEPLGLVEEAAKTAPGKKRPVEQSPQEPDSSAGIGKSGAQPAKKRLNFGQTGDTESVPDPQPIGEPPAAPSGVGSLTMASGGGAPVADNNEGADGVGSSSGNWHCDSQWLGDRVITTSTRTWALPTYNNHLYKQISNSTSGGSSNDNAYFGYSTPWGYFDFNRFHCHFSPRDWQRLINNNWGFRPKRLNFKLFNIQVKEVTDNNGVKTIANNLTSTVQVFTDSDYQLPYVLGSAHEGCLPPFPADVFMIPQYGYLTLNDGSQAVGRSSFYCLEYFPSQMLRTGSNFQFSYEFENVPFHSSYAHSQSLDRLMNPLIDQYLYYLSKTINGSGQNQQTLKFSVAGPSNMAVQGRNYIPGPSYRQQRVSTTVTQNNNSEFAWPGASSWALNGRNSLMNPGPAMASHKEGEDRFFPLSGSLIFGKQGTGRDNVDADKVMITNEEEIKTTNPAATESYGQVATNHQSAQAQAQTGWVQNQGILPGMVWQDRDVYLQGPIWAKIPHTDGNFHPSPLMGGFGMKHPPPQILIKNTPVPADPPTAFNKDKLNSFITQYSTGQVSVEIEWELQKENSKRWNPEIQHTSNYYKSNNVEFAVNTEGVYSEPRPIGTRYLTRNL

SEQ ID NO: 706 - protein, 736 aa, Artificial Sequence
  source: /note="Description of Artificial Sequence: Synthetic polypeptide"
MAADGYLPDWLEDNLSEGIREWWALKPGAPQPKANQQHQDNARGLVLPGYKYLGPGNGLDKGEPVNAADAAALEHDKAYDQQLKAGDNPYLKYNHADAEFQERLKEDTSFGGNLGRAVFQAKKRLLEPLGLVEEAAKTAPGKKRPVEQSPQEPDSSAGIGKSGAQPAKKRLNFGQTGDTESVPDPQPIGEPPAAPSGVGSLTMASGGGAPVADNNEGADGVGSSSGNWHCDSQWLGDRVITTSTRTWALPTYNNHLYKQISNSTSGGSSNDNAYFGYSTPWGYFDFNRFHCHFSPRDWQRLINNNWGFRPKRLNFRLFNIQVKEVTDNNGVKTIANNLTSTVQVFTDSDYQLPYVLGSAHEGCLPPFPADVFMIPQYGYLTLNDGSQAVGRSSFYCLEYFPSQMLRTGNNFQFSYEFENVPFHSSYAHSQSLDRLMNPLIDQYLYYLSKTINGSGQNQQTLKFSVAGPSNMAVQGRNYIPGPSYRQQRVSTTVTQNNNSEFAWPGASSWALNGRNSLMNPGPAMASHKEGEDRFFPLSGSLIFGKQGTGRDNVDADKVMITNEEEIKTTNPVATESYGQVATNHQSAQAQAQTGWVQSQGILPGMVWQDRDVYLQGPIWAKIPHTDGNFHPSPLMGGFGMKHPPPQILIKNTPVPADPPTAFNKDKLNSFITQYSTGQVSVEIEWELQKENSKRWNPEIQYTSNYYKSNNVEFAVNTEGVYSEPRPIGTRYLTRNL

SEQ ID NO: 707 - protein, 735 aa, Artificial Sequence
  source: /note="Description of Artificial Sequence: Synthetic polypeptide"
MAADGYLPDWLEDNLSEGIREWWALKPGAPQPKANQQHQDNARGLVLPGYKYLGPGNGLDKGEPVNAADAAALEHDKAYDQQLKAGDNPYLKYNHADAEFQERLKEDTSFGGNLGRAVFQAKKRLLEPLGLVEEAAKTAPGKKRPVEQSPQEPDSSAGIGKSGAQPAKKRLNFGQTGDTESVPDPQPIGEPPAAPSGVGSLTMASGGGAPVADNNEGADGVGSSSGNWHCDSQWLGDRVITTSTRTWALPTYNNHLYKQISNSTSGGSSNDNAYFGYSTPWRYFDFNRFHCHFSPRDWQRLINNWGFRPKRLNFKLFNIQVKEVTDNNGVKTIANNLTSTVQAFTDSDYQLPYVLGSAHEGCLPPFPADVFMIPQYGYLTLNDGSQAVGRSSFYCLEYFPSQMLRTGNNFQFSYEFENVPFHSSYAHSQSLDRLMNPLIDQYLYYLSKTINGSGQNQQTLKFSVAGPSNMAVQGRNYIPGPSYRQQRVSTTVTQNNNSEFAWPGASSWALNGRNSLMNPGPAMASHKEGEDRFFPLSGSLIFGKQGTGRDNVDADKVMITNEEEIKTTNPVATESYGQVATNHQSAQAQAQTGWVQNQGILPGMVWQDRDVYLQGPIWAKIPHTDGNFHPSPLMGGFGMKHPPPQILIKNTPVPADPPTAFNKDELNSFITQYSTGQVSVEIEWELQKENSKRWNPEIQYTSNYYKSNNVEFAVNTEGVYSEPRPIGTRYLTRNL

SEQ ID NO: 708 - protein, 735 aa, Artificial Sequence
  source: /note="Description of Artificial Sequence: Synthetic polypeptide"
MAADGYLPDWLEDNLSEGIREWWALKPGAPQPKANQQHQDNARGLVLPGYKYLGPGNGLDKGEPVNAADAAALEHDKAYDQQLKAGDNPYLKYNHADAEFQERLKEDTSFGGNLGRAVFQDKKRLLEPLGLVEEAAKTAPGKKRPVEQSPQEPDSSAGIGKSGAQPAKKRLNFGQTGDTESVPDPQPIGEPPAAPSGVGSLTMASGGGAPVADNNEGADGVGSSSGNWHCDSQWLGDRVITTSTRTWALPTYNNHLYKQISNSTSGGSSNDNAYFGYSTPWGYFDFNRFHCHFSPRDWQRLINNWGFRPKRLNFKLFNIQVKEVTDNNGVKTIANNLTSTVQVFTDSDYQLPYVLGSAHEGCLPPFPADVFMIPQYGYLTLNDGSQAVGRSSFYCLEYFPSQMLRTGNNFQFSYEFENVPFHSSYAHSQSLDRLMNPLIDQYLYYLSKTINGSGQNQQTLKFSVAGPSNMAVQGRNYIPGPSYRQQRVSTTVTQNNNSEFAWPGASSWALNGRNSLMNPGPAMASHKEGEDRFFPLSGSLIFGKQGTGRDNVDADKVMITNEEEIKTTNPVATESYGQVATNHQSAQAQAQTGWVQNQGILPGMVWQDRDVYLQGPIWAKIPHTDGNFHPSPLMGGFGMKHPPPQILIKNTPVPADPPTAFNKDKLNSFITQYSTGQVSVEIEWELQKENSKRWNPEIQYTSNYYKSNNVEFAVNTEGVYSEPRPIGTRYLTRNL

SEQ ID NO: 709 - protein, 736 aa, Artificial Sequence
  source: /note="Description of Artificial Sequence: Synthetic polypeptide"
MAADGYLPDWLEDNLSEGIREWWALKPGAPQPKANQQHQDNARGLVLPGYKYLGPGNGLDKGEPVNAADAAALEHDKAYDQQLKAGDNPYLKYNHADAEFQERLKEDTSFGGNLGRAVFQAKKRLLEPLGLVEEAAKTAPGKKRPVEQSPQEPDSSAGIGKSGAQPAKKRLNFGQTGDTESVPDPQPIGEPPAAPSGVGSLTMASGGGAPVADNNEGADGVGSSSGNWHCDSQWLGDRAITTSTRTWALPTYNNHLYKQISNSTSGGSSNDNAYFGYSTPWGYFDFNRFHCHFSPRDWQRLINNNWGFRPKRLNFKLFNIQVKEVTDNNGVKTIANNLTSTVQVFTDSDYQLPYVLGSAHEGCLPPFPADVFMIPQYGYLTLNDGSQAVGRSSFYCLEYFPSQMLRTGNNFQFSYEFENVPFHSSYAHSQSLDRLMNPLIDQYLYYLSKTINGSGQNQQTLKFSVAGPSNMAVQGRNYIPGPSYRQQRVSTTVTQNNNSEFAWPGASSWALNGRNSLMNPGPAMASHKEGEDRFFPLSGSLIFGKQGTGRDNVDADKVMTTNEEEIKTTNPVATESYGQVATNHQSAQAQAQTGWVQNQGILPGMVWQDRDVYLQGPIWAKIPHTDGNFHPSPLMGGFGMKHPPPQILIKNTPVPADPPTAFNKDKLNSFITQYSTGQVSVEIEWELQKENSKRWNPEIQYTSNYYKSNNVEFAVNTEGVYSEPRPIGTRYLTRNL

SEQ ID NO: 710 - protein, 736 aa, Artificial Sequence
  source: /note="Description of Artificial Sequence: Synthetic polypeptide"
MAADGYLPDWLEDNLSEGIREWWALKPGAPQPKANQQHQDNARGLVLPGYKYLGPGNGLDKGEPVNAADAAALEHDKAYDQQLKAGDNPYLKYNHADAEFQERLKEDTSFGGNLGRAVFQTKKRLLEPLGLVEEAAKTAPGKKRPVEQSPQEPGSSAGIGKSGAQPAKKRLNFGQTGDTESVPDPQPIGEPPAAPSGVGSLTMASGGGAPVADNNEGADGVGSSSGNWHCDSQWLGDRVITTSTRTWALPTYNNHLYKQISNSTSGGSSNDNAYFGYSTPWGYFDFNRFHCHFSPRDWQRLINNNWGFRPKRLNFKLFNIQVKEVTDNNGVKTIANNLTSTVQVFTDSDYQLPYVLGSAHEGCLPPFPADVFMIPQYGYLTLNDGSQAVGRSSFYCLEYFPSQMLRTGNNFQFSYEFENVPFHSSYAHSQSLDRLMNPLIDQYLHYLSKTINGSGQNQQTLKFSVAGPSNMAVQGRNYIPGPSYRQQRVSTTVTQNNNSEFAWPGASSWALNGRNSLMNPGPAMASHKEGEDRFFPLSGSLIFGKQGTGRDNVDADKVMITNEEEIKTTNPVATESYGQVATNHQSAQAQAQTGWVQNQGILPGMVWQDRDVYLQGPIWAKIPHTDGNFHPSPLMGGFGMKHPPPQILIKNTPVPADPPTAFNKDKLNSFITQYSTGQVSVEIEWELQKENSKRWNPEIQYTSNYYKSNNVEFAVNTEGVYSEPRPIGTRYLTRNL

SEQ ID NO: 711 - protein, 736 aa, Artificial Sequence
  source: /note="Description of Artificial Sequence: Synthetic polypeptide"
MAADGYFPDWLEDNLSEGIREWWALKPGAPQPKANQQHQDNARGLVLPGYKYLGPGNGLDKGEPVNAADAAALEHDKAYDQQLKAGDNPYLKYNHADAEFQERLKEDTSFGGNLGRAVFQAKKRLLEPLGLVEEAAKTAPGKKRPVEQSPQEPDSSAGIGKSGAQPAKKRLNFGQTGDTESVPDPQPIGESPAAPSGVGSLTMASGGGAPVADNNEGADGVGSSSGNWHCDSQWLGDRVITTSTRTWALPTYNNHLYKQISNSTSGGSSNDNAYFGYSTPWGYFDFNRFHCHFSPRDWQRLINNNWGFRPKRLNFKLFNIQVKEVTDNNGVKTIANNLTSTVQVFTDSDYQLPYVLGSAHEGCLPPFPADVFMIPQYGYLTLNDGSQAVGRSSFYCLEYLPSQMLRTGNNFQFSYEFENVPFHSSYAHSQSLDRLMNPLIDQYLHYLSKTINGSGQNQQTLKFSVAGPSNMAVQGRNYIPGPSYRQQRVSTTVTQNNNSEFAWPGASSWALNGRNSLMNPGPAVASHKEGEDRFFPLSGSLIFGKQGTGRDNVDADKVMITNEEEIKTTNPVATESYGQVATNHQSAQAQAQTGWVQNQGILPGMVWQDRDVYLQGPIWAKIPHTDGNFHPSPLMGGFGMKHPPPQILIKNTPVPADPPTAFNKDKLNSFITQYSTGQVSVEIEWELQKENSKRWNPEIQYTSNYYKSNNVEFAVNTEGVYSEPRPIGTRYLTRNL

SEQ ID NO: 712 - protein, 736 aa, Artificial Sequence
  source: /note="Description of Artificial Sequence: Synthetic polypeptide"
MAADGYLPDWLEDNLSEGIREWWALKPGAPQPKANQQHQDNARGLVLPGYKYLGPGNGLDKGEPVNAADAAALEHDKAYDQQLKAGDNPYLKYNHADAEFQERLKEDTSFGGNLGRAVFQAKKRLLEPLGPVEEAAKTAPGKKRPVEQSPQEPDSSAGIGKSGAQPAKKRLNFGQTGDTESVPDPQPIGEPPAAPSGVGSLTMASGGGAPVADNNEGADGVGSSSGNWHCDSQWLGDRVITTSTRTWALPTYNNHLYKQISNSTSGGSSNDNAYFGYSTPWGYFDFNRFHCHFSPRDWQRLINNNWGFRPKRLNFKLFNIQVKEVTDNNGVKTIANNLTSTVQVFTDSDYQLPYVLGSAHEGCLPPFPADVFMIPQYGYLTLNDGSQAVGRSSFYCLEYFPSQMLRTGNNFQFSYEFENVPFHSSYAHSQSLDRLMNPLIDQYLYYLSKTINGSGQNQQTLKFSVAGPSNMAVQGRNYIPGPSYRQQRVSTTVTQNNNSEFAWPGASSWALNGRNSLMNPGPAMASHKEGEDRFFPLSGSLIFGKQGTGRDNVDADKVMITNEEEIKTTNPVATESYGQAATNHQSAQAQAQTGWVQNQGILPGMVWQDRDVYLQGPIWAKIPHTDGNFHPSPLMGGFGMKHPPPQILIKNTPVPADPPTAFNKDKLNSFITQYSTGQVSVEIEWELQKENSKRWNPEIQYTSNYYKSNNVEFAVNTEGVYSEPRPIGTRYLTRNL

SEQ ID NO: 713 - protein, 736 aa, Artificial Sequence
  source: /note="Description of Artificial Sequence: Synthetic polypeptide"
MAADGYLPDWLEDNLSEGIREWWALKPGAPQPKANQQHQDNARGLVLPGYKYLGPGNGLDKGEPVNAADAAALEHDKAYDQQLKAGDNPYLKYNHADAEFQERLKEDTSFGGNLGRAVFQAKKRLLEPLGPVEEAAKTAPGKKRPVEQSPQEPDSSAGIGKSGAQPAKKRLNFGQTGDTESVPDPQPIGEPPAAPSGVGSLTMASGGGAPVADNNEGADGVGSSSGNWHCDSQWLGDRVITTSTRTWALPTYNNHLYKQISNSTSGGSSNDNAYFGYSTPWGYFDFNRFHCHFSPRDWRRLINNNWGFRPKRLNFKLFNIQVKEVTDNNGVKTIANNLTSTVQVFTDSDYQLPYVLGSAHEGCLPPFPADVFMIPQYGYLTLNDGSQAVGRSSFYCLEYFPSQMLRTGNNFQFSYEFENVPFHSSYAHSQSLDRLMNPLIDQYLYYLSKTINGSGQNQQTLKFSVAGPSNMAVQGRNYIPGPSYRQQRVSTTVTQNNNSEFAWPGASSWALNGRNSLMNPGPAMASHKEGEDRFFPLSGSLIFGKQGTGRDNVDADKVMITNEEEIKTTNPVATESYGQVATNHQSAQAQAQTGWVQNQGILPGMVWQDRDVYLQGPIWAKIPHTDGNFHPSPLMGGFGMKHPPPQILIKNTPVPADPPTAFNKDKLNSFITQYSTGQVSVEIEWELQKENSKRWNPEIQYTSNYYKSNNVEFAVNTEGVYSEPRPIGTRYLTRNL

SEQ ID NO: 714 - protein, 736 aa, Artificial Sequence
  source: /note="Description of Artificial Sequence: Synthetic polypeptide"
MAADGYLPDWLEDNLSEGIREWWALKPGAPQPKANQQHQDNARGLVLPGYKYLGPGNGLDKGEPVNAADAAALEHDKAYDQQLKAGDNLYLKYNHADAEFQERLKEDTSFGGNLGRAVFQAKKRLLEPLGLVEEAAKTAPGKKRPVEQSPQEPDSSAGIGKSGAQPAKKRLNFGQTGDTESVPDPQPIGEPPAAPSGVGSLTMASGGGAPVADNNEGADGVGSSSGNWHCDSQWLGDRVITTSTRTWALPTYNNHLYKQISNSTSGGSSNDNAYFGYSTPWGYFDFNRFHCHFSPRDWQRLINNNWGFRPKRLNFKLFNIQVKEVTDNNGVKTIANNLTSTVQVFTDSDYQLPYVLGSAHEGCLPPFPADVFMIPQYGYLTLNDGSQAVGRSSFYCLEYFPSQMLRTGNNFQFSYEFENVPFHSSYAHSQSLDRLMNPLIDQYLHYLSKTINGSGQNQQTLKFSVAGPSNMAVQGRNYIPGPSYRQQRVSTTVTQNNNSEFAWPGASSWALNGRNSLMNPGPAMASHKEGEDRFFPLSGSLIFGKQGTGRDNVDADKVMITNEEEIKTTNPVATESYGQVATNHQSAQAQAQTGWVQNQGILPGMVWQDRDVYLQGPIWAKIPHTDGNFHPSPLMGGFGMKHPPPQILIKNTPVPADPPTAFNKDKLNSFITQYSTGQVSVEIEWELQKENSKRWNPEIQYTSNYYKSNNVEFAVNTEGVYSEPRPIGTRYLTRNL

SEQ ID NO: 715 - protein, 736 aa, Artificial Sequence
  source: /note="Description of Artificial Sequence: Synthetic polypeptide"
MAADGYLPDWLEDNLSEGIREWWALKPGAPQPKANQQHQDNARGLVLPGYKYLGPGNGLDKGEPVNAADAAALEHDKAYDQQLKAGDNPYLKYNHADAEFQERLKEDTSFGGNLGRAVFQAKKRLLEPLGLVEEAAKTAPGKKRPVEQSPQEPDSSAGIGKSGAQPAKKRLNFGQTGDTESVPDPQPIGEPPAAPSGVGSLTMASGGGAPVADNNEGADGVGSSSGNWHCDSQWLGDRVITTSTRTWALPTYNNHLYKQISNSTSGGSSNDNAYFGYSTPWGYFDFNRFHCHFSPRDWQRLINNNWGFRPKRLNFKLFNIQVKEVTDNNGVKTIANNLTSTVQVFTDSDYQLPYVLGSAHEGCLPPFPADVFMIPQYGYLTLNDGSQAVGRSSFYCLEYFPSQMLRTGNNFQFSYEFENVPFHSSYAHSQSLDRLMNPLIDQYLHYLSKTINGSGQNQQTLKFSVAGPSNMAVQGRNYIPGPSYRQQRVSTTVTQNNNSEFAWPGASSWALNGRNSLMNPGPAMASHKEGEDRFFPLSGSLIFGKQGTGRDNVDADKVMITNEEEIKTTNPVATESYGQVATNHQSAQAQAQTGWVQNQGILPGMVWQDRDVYLQGPIWAKIPHTDGNFHPSPLMGGFGMKHPPPQILIKNTPVPADPPTAFNKDKLNSFITQYSTGQVSVEIEWELQKENSKRWNPEIQYTSNYYKSNNVEFAVNTEGVYSEPRPIGTRYLTRNL

SEQ ID NO: 716 - protein, 736 aa, Artificial Sequence
  source: /note="Description of Artificial Sequence: Synthetic polypeptide"
  MOD_RES (442)..(442): Any naturally occurring amino acid
MAADGYLPDWLEDNLSEGIREWWALKPGAPQPKANQQHQDNARGLVLPGYKYLGPGNGLDKGEPVNAADAAALEHDKAYDQQLKAGDNPYLKYNHADAEFQERLKEDTSFGGNLGRAVFQAKKRLLEPLGLVEEAAKTAPGKKRPVEQSPQEPDSSAGIGKSGAQPAKKRLNFGQTGDTESVPDPQPIGEPPAAPSGVGSLTMASGGGAPVADNNEGADGVGSSSGNWHCDSQWLGDRVITTSTRTWALPTYNNHLYKQISTSTSGGSSNDNAYFGYSTPWGYFDFNRFHCHFSPRDWQRLINNNWGFRPKRLNFKLFNIQVKEVTDNNGVKTIANNLTSTVQVFTDSDYQLPYVLGSAHEGCLPPFPADVFMIPQYGYLTLNDGSQAVGRSSFYCLEYFPSQMLRTGNNFQFSYEFENVPFHSSYAHSQSLDRLMNPLIDXYLHYLSKTINGSGQNQQTLKFSVAGPSNMAVQGRNYIPGPSYRQQRVSTTVTQNNNSEFAWPGASSWALNGRNSLMNPGPAMASHKEGEDRFFPLSGSLIFGKQGTGRDNVDADKVMITNEEEIKTTNPVATESYGQVATNHQSAQAQAQTGWVQNQGILPDMVWQDRDVYLQGPIWAKIPHTDGNFHPSPLMGGFGMKHPPPQILIKNTPVPADPPTAFNKDKLNSFITQYSTGQVSVEIEWELQKENSKRWNPEIQYTSNYYKSNNVEFAVNTEGVYSEPRPIGTRYLTRNL

SEQ ID NO: 717 - protein, 736 aa, Artificial Sequence; identical to SEQ ID NO: 697
  source: /note="Description of Artificial Sequence: Synthetic polypeptide"

SEQ ID NO: 718 - protein, 736 aa, Artificial Sequence; identical to SEQ ID NO: 701
  source: /note="Description of Artificial Sequence: Synthetic polypeptide"

SEQ ID NO: 719 - protein, 736 aa, Artificial Sequence
  source: /note="Description of Artificial Sequence: Synthetic polypeptide"
MAADGYLPDWLEDNLSEGIREWWALKPGAPQPRANQQHQDNARGLVLPGYKYLGPGNGLDKGEPVNAADAAALEHDKAYDQQLKAGDNPYLKYNHADAEFQERLKEDTSFGGNLGRAVFQAKKRLLEPLGLVEEAAKTAPGKKRPVEQSPQEPDSSAGIGKSGAQPAKKRLNFGQTGDTESVPDPQPIGEPPAAPSGVGSLTMASGGGAPVADNNEGADGVGSSSGNWHCDSQWLGDRVITTSTRTWALPTYNNHLYKQISNSTSGGSSNDNAYFGYSTPWGYFDFNRFHCHFSPRDWQRLINNNWGFRPKRLNFKLFNIQVKEVTDNNGVKTIANNLTSTVQVFTDSDCQLPYVLGSAHEGCLPPFPADVFMIPQYGYLTLNDGSQAVGRSSFYCLEYFPSQMLRTGNNFQFSYEFENVPFHSSYAHSQSLDRLTNPLIDQYLYYLSKTINGSGQNQQTLKFSVAGPSNMAVQGRNYIPGPSYRQQRVSTTVTQNNNSEFAWPGASSWALNGRNSLMNPGPAMASHKEGEDRFFPLSGSLIFGKQGTGRDNVDADKVMITNEEEIKTTNPVATESHGQVATNHQSAQAQAQTGWVQNQGILPGMVWQDRDVYLQGPIWAKIPHTDGNFHPSPLMGGFGMKHPPPQILIKNTPVPADPPTAFNKDKLNSFITQYSTGQVSVEIEWELQKENSKRWNPEIQYTSNYYKSNNVEFAVNTEGVYSEPRPIGTRYLTRNL

SEQ ID NO: 720 - protein, 736 aa, Artificial Sequence
  source: /note="Description of Artificial Sequence: Synthetic polypeptide"
MAADGYLPDWLEDNLSEGIREWWALKPGAPQPKANQQHQDNARGLVLPGYKYLGPGNGLDKGEPVNAADAAALEHDKAYDQQLKAGDNPYLKYNHADAEFQERLKEDTSFGGNLGRAVFQAKKRLLEPLGLVEEAAKTAPGKKRPVEQSPQEPDSSAGIGKSGAQPAKKRLNFGQTGDTESVPDPQPIGEPPAAPSGVGSLTMASGGGAPVADNNEGADGVGSSSGNWHCDSQWLGDRVITTSTRTWALPTYNNHLYKQISNSTSGGSSNDNAYFGYSTPWGYFDFNRFHCHFSPRDWQRLINNNWGFRPKRLNFKLFNIQVKEVTDNNGVKTIANNLTSTVQVFTDSDYQLPYVLGSAHEGCLPPFPADVFMIPQYGYLTLNDGSQAVGRSSFYCLEYFPSQMLRTGNNFQFSYEFENVPFHSSYAHSQSLDRLMNPPIDQYLYYLSKTINGSGQNQQTLKFSVAGPSNMAVQGRNYIPGPSYRQQRVSTTVTQNNNSEFAWPGASSWALNGRNSLMNPGPAMASHKEGEDRFFPLSGSLIFGKQGTGRDNVDADKVMITNEEEIKTTNPVATESYGQVATNHQSAQAQAQTGWVQNQGILPGMVWQDRDVYLQGPIWAKIPHTDGNFHPSPLMGGFGMKHPPPQILIKNTPVPADPPTAFNKDKLNSFITQYSTGQVSVEIEWELQKENSKRWNPEIQYTSNYYKSNNVEFAVNTEGVYGEPRPIGTRYLTRNL

SEQ ID NO: 721 - protein, 736 aa, Artificial Sequence
  source: /note="Description of Artificial Sequence: Synthetic polypeptide"
MAADGYLPDWLEDNLSEGIREWWALKPGAPQPKANQQHQDNARGLVLPGYKYLGPGNGLDKGEPVNAADAAALEHDKAYDQQLKAGDNPYLKYNHADAEFQERLKEDTSFGGNLGRAVFQAKKRLLEPLGLVEEAAKTAPGKKRPVEQSPQEPDSSAGIGKSGAQPAKKRLNFGQTGDTESVPDPQPIGEPPAAPSGVGSLTMASGGGAPVADNNEGADGVGSSSGNWHCDSQWLGDRVITTSTRTWALPTYNNHLYKQISNSTSGGSSNDNAYFGYSTPWGYFDFNRFHCHFSPRDRQRLINNNWGFRPKRLNFKLFNIQVKEVTDNNGVKTIANNLTSTVQVFTDSDYQLPYVLGSAHEGCLPPFPADVFMIPQYGYLTLNDGSQAVGRSSFYCLEYFPSQMLRTGNNFQFSYEFENVPFHSSYAHSQSLDRLMNPLIDQYLYYLSKTINGSGQNQQTLKFSVAGPSNMAVQGRNYIPGPSYRQQRVSTTVTQNNNSEFAWPGASSWALNGRNSLMNPGPAMASHKEGEDRFFPLSGSLIFGKQGTGRDNVDADKVMITNEEEIKTTNPVATESYGQVATNHQSAQAQAQTGWVQNQGILPGMVWQDRDVYLQGPIWAKIPHTDGNFHPSPLMGGFGMKHPPPQILIKNTPVPADPPTAFNKDKLNSFITQYSTGQVSVEIEWELQKENSKRWNPEIQYTSNYYKSNNVEFAVNTEGVYSEPRPIGTRYLTRNL

SEQ ID NO: 722 - protein, 736 aa, Artificial Sequence
  source: /note="Description of Artificial Sequence: Synthetic polypeptide"
MAADGYLPDWLEDNLSEGIREWWALKPGAPQPKANQQHQDNARGLVLPGYKYLGPGNGLDKGEPVNAADAAALEHDKAYDQQLKAGDNPYLKYNHADAEFQERLKEDTSFGGNLGRAVFQAKKRLLEPLGLVEEAAKTAPGKKRPVEQSPQEPDSSAGIGKSGAQPAKKRLNFGQTGDTESVPDPQPIGEPPAAPSGVGSLTMASGGGAPVADNNEGADGVGSSSGNWHCNSQWLGDRVITTSTRTWALPTYNNHLYKQISNSTSGGSSNDNAYFGYSTPWGYFDFNRFHCHFSPRDWQRLINNNWGFRPKRLNFKLFNIQVKEVTDNNGVKTIANNLTSTVQVFTDSDYQLPYVLGSAHEGCLPPFPADVFMIPQYGYLTLNDGSQAVGRSSFYCLEYFPSQMLRTGNNFQFSYEFENVPFHSSYAHSQSLDRLMNPLIDQYLYYLSKTINGSGQNQQTLKFSVAGPGNMAVQGRNYIPGPSYRQQRVSTTVTQNNNSEFAWPGASSWALNGRNSLMNPGPAMASHKEGEDRFFPLSGSLIFGKQGTGRDNVDADKVMITNEEEIKTTNPVATESYGQVATNHQSAQAQAQTGWVQNQGILPGMVWQDRDVYLQGPIWAKIPHTDGNFHPSPLMGGFGMKHPPPQILIKNTPVPADPPTAFNKDKLNSFITQYSTGQVSVEIEWELQKENSKRWNPEIQYTSNYYKSNNVEFAVNTEGVYSEPRPIGTRYLTRNL

SEQ ID NO: 723 - protein, 736 aa, Artificial Sequence
  source: /note="Description of Artificial Sequence: Synthetic polypeptide"
MAADGYLPDWLEDNLSEGIREWWALKPGAPQPKANQQHQDNARGLVLPGYRYLGPGNGLDKGEPVNAADAAALEHDKAYDQQLKAGDNPYLKYNHADAEFQERLKEDTSFGGNLGRAVFQAKKRLLEPLGLVEEAAKTAPGKKRPVEQSPQEPDSSAGIGKSGAQPAKKRLNFGQTGDTESVPDPQPIGEPPAAPSGVGSLTMASGGGAPVADNNEGADGVGSSSGNWHCDSQWLGDRVITTSTRTWALPTYNNHLYKQISNSTSGGSSNDNAYFGYSTPWGYFDFNRFHCHFSPRDWQRLINNNWGFRPKRLNFKLFNIQVKEVTDNNGVKTVANNLTSTVQVFTDSDYQLPYVLGSAHEGCLPPFPADVFMIPQYGYLTLNDGSQAVGRSSFYCLEYFPSQMLRTGNNFQFSYEFENVPFHSSYAHSQSLDRLMNPLIDQYLYYLSKTINGSGQNQQTLKFSVAGPSNMAVQGRNYIPGPSYRQQRVSTTVTQNNNSEFAWPGASSWALNGRNSLMNPGPAMASHKEGEDRFFPLSGSLIFGKQGTGRDNVDADKVMITNEEEIKTTNPVATESYGQVATNHQSAQAQAQTGWVQNQGILPGMVWQDRDVYLQGPIWAKIPHTDGNFHPSPLMGGFGMKHPPPQILIKNTPVPADPPTAFNKDKLNSFITQYSTGQVSVEIEWELQKENSKRWNPEIQYTSNYYKSNNVEFAVNTEGVYSGPRPIGTRYLTRNL

SEQ ID NO: 724 - protein, 736 aa, Artificial Sequence; identical to SEQ ID NO: 134
  source: /note="Description of Artificial Sequence: Synthetic polypeptide"

SEQ ID NO: 725 - protein, 736 aa, Artificial Sequence
  source: /note="Description of Artificial Sequence: Synthetic polypeptide"
MAADGYLPDWLEDNLSEGIREWWALKPGAPQPKANQQRQDNARGLVLPGYKYLGPGNGLDKGEPVNAADAAALEHDKAYDQQLKAGGNPCLKYNHADAEFQERLKEDTSFGGNLGRAVFQAKKRLLEPLGLVEEAAKTAPGKKRPVEQSPQEPDSSAGIGRSGAQPAKKRLNFGQTGDTESVPDPQPIGEPPAAPSGVGSLTMASGGGAPVADNNEGADGVGSSSGNWHCDSQWLGDRVITTSTRTWALPTYNNHLYKQISNSTSGGSSNDNAYFGYSTPWGYFDFNRFHCHFSPRDWQRLINNNWGFRPKRLNFKLFNIQVKEVTDNNGVKAIANNLTSTVQVFTDSDYQLPYVLGSAHEGCLPPFPADVFMIPQYGYLTLNDGSQAVGRSSFYCLEYFPSQMLRTGNNFQFSYEFENVPFHSSYAHSQSLDRLMNPLIDQYLYYLSKTIDGSGQNQQTLKFSVAGPSNMAVQGRNYIPGPSYRQQRVSTTVTQNNNSEFAWPGASSWALNGRNSLMDPGPAMASHKEGEDRFFPLSGSLIFGKQGTGRDNVDADKVMITNEEEIKTTNPVATESYGQVATNHQSAQAQAQTGWVQNQGILPGMVWQDRDVYLQGPIWAKIPHTGGNFHPSPLMGGFGMKHPPPQILIKNTPVPADPPTAFNKDKLNSFITQYSTGQVSVEIEWELQKENSKRWNPEIQYTSNYYKSNNVEFAVNTEGVYSEPRPIGTRYLTRNL

SEQ ID NO: 726 - protein, 736 aa, Artificial Sequence
  source: /note="Description of Artificial Sequence: Synthetic polypeptide"
MAADGYLPDWLEDNLSEGIREWWALKPGAPQPKANQQHQDNARGLVLPGYKYLGPGNGLDKGEPVNAADAAALEHDKAYDQQLKAGDNPYLKYNHADAEFQERLKEDTSFGGNLGRAVFQAKKRLLEPLGLVEEAAKTAPGKKRPVEQSPQEPDSSAGIGKSGAQPAKKRLNFGQTGDTESVPDPQPIGEPPAAPSGVGSLTMASGGGAPVADNNEGADGVGSSSGNWHCDSQWLGDRVITTSTRTWALPTYNNHLYKQISNSTSGGSSNDNAYFGYSTPWGYFDFNRFHCHFSPRDWQRLINNNWGFRPKRLNFKLFNIQVKEVTDNNGVKTIANNLTSTVQVFTDSDYQLPYVLGSAHEGCLPPFPADVFMIPQYGYLTLNDGSQAVGRSSFYCLEYFPSQMLRTGNNFQFSYEFENVPFHSSYAHSQSLDRLMNPLIDQYLYYLSKTINGSGQNQQTLKFSVAGPSNMAVQGRNYIPGPSYRQQRVSTTVTQNNNSEFAWPGASSWALNGRNSLMNPGPAMASHKEGEDRFFPLSGSLIFGKQGTGRDNVDADKVMITNEEEIKTTNPVATESYGQVATNHQSAQAQAQTGWVQNQGILPGMVWQDRDVYLQGPIWAKIPHTDGNFHPSPLMGGFGMKHPPPQILIKNTPVPADPPTAFNKDKLNSFITQYSTGQVSVEIEWELQKENSKRWNPEIQYTSNYYKPNNVEFAVNTEGVYSEPRPIGTRYLTRNL

SEQ ID NO: 727 - protein, 736 aa, Artificial Sequence
  source: /note="Description of Artificial Sequence: Synthetic polypeptide"
MAADGYLPDWLEDNLSEGIREWWALKPGAPQPKANQQHQDNARGLVLPGYKYLGPGNGLDKGEPVNAADAAALEHNKAYDQQLKAGDNPYLKCNHADAEFQERLKEDTSFGGNLGRAVFQAKKRPLEPLGLVEEAAKTAPGKKRPVEQSPQEPDSSAGIGKSGAQPAKKRLNFGQTGDTESVPDPQPIGEPPAAPSGVRSLTMASGGGAPVADNNEGADGVGSSSGNWHCDSQWLGDRVITTSTRTWALPTYNNHLYKQISNSTSGGSSNDNAYLGYSTPWGYFDFNRFHCHFSPRDWQRLINNNWGFRPKRLNFKLFNIQVKEVTDNNGVKTIANNLTSTVQVFTDSDYQLPYVLGSAHEGCLPPFPADVFMIPQYGYLTLNDGSQAVGRSSFYCLEYFPSQMLRTGNNFQFSYEFENVPFHSSYAHSQSLDRLMNPLIDQYLYYLSKTINGSGQNQQTLKFSVAGPSNMAVQGRNYIPGPSYRQQRVSTTVTQNNNSEFAWPGASSWALNGRNSLMNPGPTMASHKEGEDRFFPLSGSLIFGKQGTGRDNVDADKVMITNEEEIKTTNPVATESYGQVATNHQSAQAQAQTGWVQNQGILPGMVWQDRDVYLQGPIWAKIPHTDGNFHPSPLMGGFGMKHPPPQILIKNTPVPADPPTAFNKDKLNSFITQYSTGQVSVEIEWELQKENSKRWNPEIQYTSNYYKSNNVEFAVNTEGVYSEPRPIGTRYLTRNL

SEQ ID NO: 728 - protein, 736 aa, Artificial Sequence
  source: /note="Description of Artificial Sequence: Synthetic polypeptide"
MAADGYLPDWLEDNLSEGIREWWALKPGAPQPKANQQHQDNARGLVLPGYKYLGPGNGLDKGEPVNAADAAALVHDKAYDQQLKAGDNPYLKCNHADAEFQERLKEDTSFGGNLGRAVFQAKKRLLEPLGLVEEAAKTAPGKKRPVEQSPQEPDSSAGIGKSGAQPAKKRLNFGQTGDTESVPDPQPIGEPPAAPSGVGSLTMASGGGAPVADNNEGADGVGSSSGNWHCDSQWLGDRVITTSTRTWALPTYNNHLYKQISNSTSGGSSNDNAYLGYSTPWGYFDFNRFHCHFSPRDWQRLINNNWGFRPKRLNFKLFNIQVKEVTDNNGVKTIANNLTSTVQVFTDSDYQLPYVLGSAHEGCLPPFPADVFTIPQYGYLTLNDGSQAVGRSSFYCLEYFPSQMLRTGNNFQFSYEFENVPFHSSYAHSQSLDRLMNPLIDQYLYYLSKTINGSGQNQQTLKFSVAGPSNMAVQGRNYIPGPSYRQQRVSTTVTQNNNSEFAWPGASSWALNGRNSLMNPGPAMASHKEGEDRFFPLSGSLIFGKQGTGRDNVDADKVMITNEEEIKTTNPVATESYGQVATNHQSAQAQAQTGWVQNQGILPGMVWQDRDVYLQGPIWAKIPHTDGNFHPSPLMGGFGMKHPPPQILIKNTPVPADPPTAFNKDKLNSFITQYSTGQVSVEIEWELQKENSKRWNPEIQYTSNYYKSNNVEFAVNTEGVYSEPRPIGPRYLTRNF

SEQ ID NO: 729 - protein, 736 aa, Artificial Sequence
  source: /note="Description of Artificial Sequence: Synthetic polypeptide"
MAADGYLPDWLEDNLSEGIREWWALKPGAPQPKANQQHQDNARGLVLPGYKYLGPGNGLDKGEPVNAADAAALEHNKAYDQQLKAGDNPYLKCNHADAEFQERLKEDTSFGGNLGRAVFQAKKRLLEPLGLVEEAAKTAPGKKRPVEQSPQEPDSSAGIGKSGAQPAKKRLNFGQTGDTESVPDPQPIGEPPAAPSGVRSLTMASGGGAPVADNNEGADGVGSSSGNWHCDSQWLGDRVITTSTRTWALPTYNNHLYKQISNSTSGGSSNDNAYLGYSTPWGYFDFNRFHCHFSPRDWQRLINNNWGFRPKRLNFKLFNIQVKEVTDNNGVKTIANNLTSTVQVFTDSDYQLPYVLGSAHEGCLPPFPADVFMIPQYGYLTLNDGSQAVGRSSFYCLEYFPSQMLRTGNNFQFSYEFENVPFHSSYAHSQSLDRLMNPLIDQYLYYLSKTINGSGQNQQTLKFSVAGPSNMAVQGRNYIPGPSYRQQRVSTTVTQNNNSEFAWPGASSWALNGRNSLMNPGPAMASHKEGEDRFFPLSGSLIFGKQGTGRDNVDADKVMITNEEEIKTTNPVATESYGQVATNHQSAQAQAQTGWVQNQGILPGMVWQDRDVYLQGPIWAKIPHTDGNFHPSPLMGGFGMKHPPPQILIKNTPVPADPPTAFNKDKLNSFITQYSTGQVSVEIEWELQKENSKRWNPEIQYTSNYYKSNNVEFAVNTEGVYSEPRPIGTRYLTRNL

SEQ ID NO: 730 - protein, 736 aa, Artificial Sequence
  source: /note="Description of Artificial Sequence: Synthetic polypeptide"
MAADGYLPDWLEDNLSEGIREWWALKPGAPQPKANQQHQDNARGLVLPGYKYLGPGNGLDKGEPVNAADAAALEHDKAYDQQLKAGDNPYLKCNHADAEFQERLKEDTSFGGNLGRAVFQAKKRLLEPLGLVEEAAKTAPGKKRPVEQSPQEPDSSAGIGKSGAQPAKKRLNFGQTGDTESVPDPQPIGEPPAAPSGVGSLTMASGGGAPVADNNEGADGVGSSSGNWHCDSQWLGDRVITTSTRTWALPTYNNHLYKQISNSTSGGSSNDNAYLGYSTPWGYFDFNRFHCHFSPRDWQRLINNNWGFRPKRLNFELFNIQVKEVTDNNGVKTIANNLTSTVQVFTDSDYQLPYVLGSAHEGCLPPFPADVFMIPQYGYLTLNDGSQAVGRSSFYCLEYFPSQMLRTGNNFQSSYEFENVPFHSSYAHSQSLDRLMNPLIDQYLYYLSKTINGSGQNQQTLKFSVAGPSNMAVQGRNYIPGPSYRQQRASTTVTQNNNSEFAWPGASSWALNGRNSLMNPGPAMASHKEGEDRFFPLSGSLIFGKQGTGRDNVDADKVMITNEEEIKTTNPVATESYGQVATNHQSAQAQAQTGWVQNQGILPGMVWQDRDVYLQGPIWAKIPHTDGNFHPSPLMGGFGMKHPPPQILIKNTPVPADPPTAFNKDKLNSFITQYSTGQVSVEIEWELQKENSKRWNPEIQYTSNYYKSNNVEFAVNTEGVYSEPRPIGTRYLTRNL

SEQ ID NO: 731 - protein, 736 aa, Artificial Sequence
  source: /note="Description of Artificial Sequence: Synthetic polypeptide"
MAADGYLPDWLEDNLSEGIREWWALKPGAPQPKANQQHQDNARGLVLPGYKYLGPGNGLDKGEPVNAADAAALEHDKAYDQQLKAGDNPYLKCNHADAEFQERLKEDTSFGGNLGRAVFQAKKRLLEPLGLVEEAAKTAPGKKRPVEQSPQEPDSSAGIGKSGAQPAKKRLNFGQTGDTESVPDPQPIGEPPAAPPGVGSLTMASGGGAPVADNNEGADGVGSSSGNWHCDSQWLGDRVITTSTRTWALPTYNNHLYKQISNSTSGGSSNDNAYLGYSTPWGYFDFNRFHCHFSPRDWQRLINNNWGFRPKRLNFKLFNIQVKEVTDNNGVKTIANNLTSTVQVFTDSDYQLPYVLGSAHEGCLPPFPADVFMIPQYGYLTLNDGSQAVGRSSFYCLEYFPSQMLRTGNNFQFSYEFENVPFHSSYAHSQSLDRLMNPLIDQYLYYLSKTISGSGQNQQTLKFSVAGPSNMAVQGRNYIPGPSYRQQRVSTTVTQNNSSEFAWPGASSWALNGRNSLMNPGPAMASHKEGEDRFFPLSGSLIFGKQGTGRDNVDADKVMITNEEEIKTTNPVATESYGQVATNHQSAQAQAQTGWVQNQGILSGMVWQDRDVYLQGPIWAKIPHTDGNFHPSPLMGGFGMKHPPPQILIKNTPVPADPPTAFNKDKLNSFITQYSTGQVSVEIEWELQKENSKRWNPEIQYTSNYYKSNNVEFAVNTEGVYSEPRPIGTRYLTRNL

SEQ ID NO: 732 - protein, 736 aa, Artificial Sequence
  source: /note="Description of Artificial Sequence: Synthetic polypeptide"
MAADGYLPDWLEDNLSEGIREWWALKPGAPQPKANQQHQDNARGLVLPGYKYLGPGNGLDKGEPVNAADAAALEHDKAYDQQLKAGDNPYLKCNHADAEFQERLKEDTSFGGNLGRAVFQAKKRLLEPLGLVEEAAKTAPGKKRPVEQSPQEPDSSAGIGKSGAQPAKKRLNFGQTGDTESVPDPQPIGEPPAAPSGVGSLTMASGGGAPVADNNEGADGVGSSSGNWHCDSQWLGDRVITTSTRTWALPTYNNHLYKQISNSTSGGSSNDNAYLGYSTPWGYFDFNRFHCHFSPRDWQRLINNNWGFRPKRLNFKLFNIQVKEVTDNNGVKTIANNLTSTVQVFTDSDYQLPYVLGSAHEGCLPPFPADVFMIPQYGYLTLNDGSQAVGRSSFYCLEYFPSQMLRTGNNFQFSYEFENVPFHSSYAHSQSLDRLMNPLIDQYLYYLSKTINGSGQNQQTLKFSVAGPSNMAVQGRNYIPGPSYRQQRVSTTVTQNNNSEFAWPGASSWALNGRNSLMNPGPAMASHKEGEDRFFPLSGSLIFGKQGTGRDNVDADKVMITNEEEIKTTNPVATESYGQVATNHQSAQAQAQTGWVQNQGILPGMVWQDRDVYLQGPIWAKIPHTDGNFHPSPLMGGFGMKHPPPQILIKNTPVPADPPTAFNKDKLNSFITQYSTGQVSVEIEWELQKENSKRWNPEIQYTSNYYKSNNVEFAVNTEGVYSEPRPIGTRYLTRNL

SEQ ID NO: 733 - protein, 736 aa, Artificial Sequence; identical to SEQ ID NO: 732
  source: /note="Description of Artificial Sequence: Synthetic polypeptide"

SEQ ID NO: 734 - protein, 736 aa, Artificial Sequence
  source: /note="Description of Artificial Sequence: Synthetic polypeptide"
MAADGYLPDWLEDNLSEGIREWWALKPGAPQPKANQQHQDNARGLVLPGYKYLGPGNGLDKGEPVNAADAAALEHDKAYDQQLKAGDNPYLKCNHADAEFQERLKEDTSFGGNLGRAVFQAKKRLLEPLGLVEEAAKTAPGKKRPVEQSPQEPDSSAGIGKSGAQPAKKRLNFGQTGDTESVPDPQPIGEPPAAPSGVGSLTMASGGGAPVADNNEGADGVGSSSGNWHCDSQWLGDRVITTSTRTWALPTYNNHLYKQISNSTSGGSSNDNAYLDYSTPWGYFDFNRFHCHFSPRDWQRLINNNWGFRPKRLNFKLFNIQVKEVTDNNGVKTIANNLTSTVQVFTDSDYQLPYVLGSAHEGCLPPFPADVFMIPQYGYLTLNDGSQAVGRSSFYCLEYFPSQMLRTGNNFQFSYEFENVPFHSSYAHSQSLDRLMNPLIDQYLYYLSKTINGSGQNQQTLKFSVAGPSNMAVQGRNYIPGPSYRQQRVSTTVTQNNNSEFAWPGASSWALNGRNSLMNPGPAMASHKEGEDRFFPLSGSLIFGKQGTGRDNVDADKVMITNEEEIKTTNPVATESYGQVATNHQSAQAQAQTGWVQNQGILPGMVWQGRDVYLQGPIWAKIPHTDGNFHPSPLMGGFGMKHPPPQILIKNTPVPADPPTAFNKDKLNSFITQYSTGQVSVEIEWELQKENSKRWNPEIQYTSNYYKSNNVEFAVNTEGVYSEPRPIGTRYLTRNL

SEQ ID NO: 735 - protein, 736 aa, Artificial Sequence; identical to SEQ ID NO: 732
  source: /note="Description of Artificial Sequence: Synthetic polypeptide"

SEQ ID NO: 736 - protein, 736 aa, Artificial Sequence
  source: /note="Description of Artificial Sequence: Synthetic polypeptide"
MAADGYPPDWLEDNLSEGIREWWALKPGAPQPKANQQHQDNARGLVLPGYKYLGPGNGLDKGEPVNAADAAALEHDKAYDQQLKAGDNPHLKYNHADAEFQERLKEDTSFGGNLGRAVFQAKKRLLEPLGLVEEAAKTAPGKKRPVEQSPQEPDSSAGIGKSGAQPAKKRLNFGQTGDTESVPDPQPIGEPPAAPSGVGSLTMASGGGAPVADNNEGADGVGSSSGNWHCDSQWLGDRVITTSTRTWALPTYNNHLYKQISNSTSGGSSNDNAYFGYSTPWGYFDFNRFHCHFSPRDWQRLINNNWGFRPKRLNFKLFNIQVKEVTDNNGVKTIANNLTSTVQVFTDSDYQLPYVLGSAHEGCLPPFPADVFMIPQYGYLTLNDGSQAVGRSSFYCLEYFPSQMLRTGNNFQFSYEFENVPFHSSYAHSQSLDRLMNPLIDQYLYYLSKTINGSGQNQQTLKFSVAGPSNMAVQGRNYIPGPSYRQQRVSTTVTQNNNSEFAWPGASSWALNGRNSLMNPGPAMASHKEGEDRFFPLSGSLIFGKQGTGRDNVDADKVMITNEEEIKTTNPVATESYGQVATNHQSAQAQAQTGWVQNQGILPGMVWQDRDVYLQGPIWAKIPHTDGNFHPSPLMGGFGVKHPPPQILIKNTPVPADPPTAFNKDRLNSFITQYSTGQVSVEIEWELQKENSKRWNPEIQYTSNYYKSNNVEFAVNTEGVYSEPRPIGTRYLTRNL

SEQ ID NO: 737 - protein, 736 aa, Artificial Sequence
  source: /note="Description of Artificial Sequence: Synthetic polypeptide"
MAADGYLPDWLEDNLSEGIREWWALKPGAPQPKANQQHQDNARGLVLPGYKYLGPGNGLDKGEPVNAADAAALEHDKAYDQQLKAGDNPYLKYNHADAEFQERLKEDTSFGGNLGRAVFQAKKRLLEPLGLVEEAAKTAPGKKRPVEQSPQEPDSSAGIGKSGAQPAKKRLNFGQTGDTESVPDPQPIGEPPAAPSGVGSLTMASGGGAPVADNNEGADGVGSSSGNWHCDSQWLGDRVITTSTRTWALPTYNNHLYKQISNSTSGGSSNDNAYFGYSTPWGYFDFNRFHCHFSPRDWQRLINNNWGFRPKRLNFKLFNIQVKEVTDNNGVKTIANNLTSTVQVFTDSDYQLPYVLGSAHEGCLPPFPADVFMIPQYGYLTLNDGSQAVGRSSFYCLEYFPSQMLRTGNNFQFSYEFENVPFHSSYAHSQSLDRLMNPLIDQYLYYLSKTINGSGQNQQTLKFSVAGPSNMAVQGRNYIPGPSYRQQRVSTTVTQNNNSEFAWPGASSWALNGRNSLMNPGPAMASHKEGEDRFFPLSGSLIFGKQGTGRDNVDADKVMITNEEEIKTTNPVATESYGQVATNHQSAQAQAQTGWVQNQGILPGMVWQDRDVYLQGPIWAKIPHTDGNFHPSPLMGGFGVKHPPPQILIKNTPVPADPPTAFNKDKLNSFITQYSTGQVSVEIEWELQKENSKRWNPEIQYTSNYYKSNNVEFAVNTEGVYSEPRPIGTRYLTRNL

SEQ ID NO: 738 - protein, 736 aa, Artificial Sequence
  source: /note="Description of Artificial Sequence: Synthetic polypeptide"
MAADGYLPDWLEDNLSEGIREWWALKPGAPQPKANQQHQDNARGLVLPGYKYLGPGNGLDKGEPVNAADAAALEHDKAYDQQLKAGDNPYLKYNHADAEFQERLKEDTSFGGNLGRAVFQAKKRLLEPLGLVEEAAKTAPGKKRPVEQSPQEPDSSAGIGKSGAQPAKKRLNFGQTGDTESVPDPQPIGEPPAAPSGVGSLTMASGGGAPVADNNEGADGVGSSSGNWHCDSQWLGDRVITTSTRTWALPTYNNHLYKQISNSTSGGSSNDNAYFGYSTPWGYFDFNRFHCHFSPRDWQRLTNNNWGFRPKRLNFKLFNIQVKEVTDNNGVKTIANNLTSTVQVFTDSDYQLPYVLGSAHEGCLPPFPADVFMIPQYGYLTLNDGSQAVGRSSFYCLEYIPSQMLRTGNNFQFSYEFENVPFHSSYAHSQSLDRLMNPLIDQYLYYLSKTINGSGQNQQTLKFSVAGPSNMAVQGRNYIPGPSYRQQRVSTTVTQNNNSEFAWPGASSWALNGRNSLMNPGPAMASHKEGEDRFFPLSGSLIFGKQGTGRDNVDADKVMITNEEEIKTTNPVATESYGQVATNHQSAQAQAQTGWVQNQGILPGMVWQDRDVYLQGPIWAKIPHTDGNFHPSPLMGGFGVKHPPPQILIKNTPVPADPPTAFNKDKLNSFITQYSTGQVSVEIEWELQKENSKRWNPEIQYTSNYYKSNNVEFAVNTEGVYSEPRPIGTRYLTRNL

SEQ ID NO: 739 - protein, 736 aa, Artificial Sequence
  source: /note="Description of Artificial Sequence: Synthetic polypeptide"
MAADGYLPDWLEDNLSEGIREWWALKPGAPQPKANQQHQDNARGLVLPGYKYLGPGNGLDKGEPVNAADAAALEHDKAYDQQLKAGDNPYLKYNHADAEFQERLKEDTSFGGNLGRAVFQAKKRLLEPLGLVEEAAKTAPGKKRPVEQSPQEPDSSAGIGKSGAQPAKKRLNFGQTGDTESVPDPQPIGEPPAAPSGVGSLTMASGGGAPVADNNEGADGVGSSSGNWHCDSQWLGDRVITTSTRTWALPTYNNHLYKQISNSTSGGSSNDNAYFGYSTPWGYFDFNRFHCHFSPRDWQRLINNNWGFRPKRLNFKLFNIQVKEVTDNNGVKTIANNLTSTVQVFTDSDYQLPYVLGSAHEGCLPPFPADVFMIPQYGYLTLNDGSQAVGRSSFYCLEYFPSQMLRTGNNFQFSYEFENVPFHSSYAHSQSLDRLMNPLIDQYLYYLSKTINGSGQNQQTLKFSVAGPSNMAVQGRNYIPGPSYRQQRVSTTVTQNNNSEFAWPGASSWALNGRNSLMNPGPAMASHKEGEDRFFPLSGSLISGKQGTGRDNVDANKVMITNEEEIKTTNPVATESYGQVATNHQSAQAQAQTGWVQNQGILPGMVWQDRDVYLQGPIWAKIPHTDGNFHPSPLMGGFEMKHPPPQILIKNTPVPADPPTAFNKDKLNSFITQYSTGQVSVEIEWELQKENSKRWNPEIQYTSNYYKSNNVEFAVNTEGVYSEPRPIGTRYLTRNL

SEQ ID NO: 740 - protein, 736 aa, Artificial Sequence
  source: /note="Description of Artificial Sequence: Synthetic polypeptide"
MAADGYLPDWLEDNLSEGIREWWALKPGAPQPKANQQHQDNARGLVLPGYKYLGPGNGLDKGEPVNAADAAALEHDKAYDQQLKAGDNPYLKYNHADAEFQERLKEDTSFGGNLGRAVFQAKKRLLEPLGLVEEAAKTAPGKKRPVEQSPQEPDSSAGIGKSGAQPAKKRLNFGQTGDTESVPDPQPIGEPPAAPSGVGSLTIASGGGAPVADNNEGADGVGSSSGNWHCDSQWLGDRVITTSTRTWALPTYNNHLYKRISNSTSGGSSNDNAYFGYSTPWGYFDFNRFHCHFSPRDWQRLINNNWGFRPKRLNFKLFNIRVKEVTDNNGVKTITNNLTSTVQVFTDSDYQLPYVLGSAHEGCLPPFPADVFMIPQYGYLTLNDGSQAVGRSSFYCLEYFPSQMLRTGNNFQFSYEFENVPFHSSYAHSQSLDRLMNPLIDQYLYYLSKTINGSGQNQQTLKFSVAGPSNMAVQGRNYIPGPSYRQQRVSTTVTRNNNSEFAWPGASSWALNGRNSLMNPGPAMASHKEGEDRFFPLSGSLIFGKQGTGRDNVDADKVMITNEEEIKTTNPVATESYGQVATNHQSAQAQAQTGWVQNQGILPGMVWQDRDVYLQGPIWAKIPHTDGNFHPSPLMGGFGVKHPPPQILIKNTPVPADPPTAFNKDKLNSFITQYSTGQVSVEIEWELQKENSKRWNPEIQYTSNYYKSNNVEFAVNTEGVYSEPRPIGTRYLTRNL

SEQ ID NO: 741 - protein, 736 aa, Artificial Sequence
  source: /note="Description of Artificial Sequence: Synthetic polypeptide"
MAADGYLPDWLEDNLSEGIREWWALKPGAPQPKANQQHQDNARGLVLPGYKYLGPGNGLDKGEPVNAADAAALEHDKAYDQQLKAGDNPYLKYNHADAEFQERLKEDTSFGGNLGRAVFQAKKRLLEPLGLVEEAAKTAPGKKRPVEQSPQEPDSSAGIGKSGAQPAKKRLNFGQTGDTEPVPDPQPIGEPPAAPSGVGSLTMASGGGAPVADNNEGADGVGSSSGNWHCDSQWLGDRVITTSTRTWALPTYNNHLYKQISNSTSGGSSNDNAYFGYSTPWGYFDFNRFHCHFSPRDWQRLINNNWGFRPKRLNFKLFNIQVKEVTDNNGVKTIANNLTSTVQVFTDSDYQLPYVLGSAHEGCLPPFPAGVFMIPQYGYLTLNDGSQAVGRSSFYCLEYFPSQMLRTGNNFQFSYEFENVPFHSSYAHSQSLDRLMNPLIDQYLYYLSKTINGSGQNQQTLKFSVAGPSNMAVQGRNYIPGPSYRQQRVSTTATQNNNSEFAWPGASSWALNGRNSLMNPGPAMASHKEGEDRFFPLSGSLIFGKQGTGRDNVDADKVMITNEEEIKTTNPVATESYGQVATNHQSAQAQAQTGWVQNQGILPGMVWQDRDVYLQGPIWAKIPHTDGNFHPSPLMGGFGMKHPPPQILIKNTPVPADPPTAFNKDKLNSFITQYSTGQVSVEIEWELQKENSKRWNPEIQYTSNYYKSNNVEFAVNTEGVYSEPRPIGTRYLTRNL

SEQ ID NO: 742 - protein, 736 aa, Artificial Sequence
  source: /note="Description of Artificial Sequence: Synthetic polypeptide"
MAADGYLPDWLEDNLSEGIREWWALKPGAPQPKANQQHQDNARGLVLPGYKYLGPGNGLDKGEPVNAADAAALEHDKAYDQQLKAGDNPYLKYNHADAGFQERLKEDTSFGGNLGRAVFQAKKRLLEPLGLVEEAAKTAPGKKRPVEQSPQEPDSSAGIGKSGAQPAKKRLNFGQTGDTESVPVPQPIGEPPAAPSGVGSLTMASGGGAPVADNNEGADGVGSSSGNWHCDSQWLGDRVITTSTRTWALPTYNNHLYKQISNSTSGGSSNDNAYFGYSTPWGYFDFNRFHCHFSPRDWQRLINNNWGFRPKRLNFKLFNIQVKEVTDNNGVKTIANNLTSTVQVFTDSDYQLPYVLGSAHEGCLPPFPADVFMIPQYGYLTLNDGSQAVGRSSFYCLEYFPSQMLRTGNNFQFSYEFENVPFHSSYAHSQSLDRLMNPLIDQYLYYLSKTINGSGQNQQTLKFSVAGPSNMAVQGRNYIPGPSYRQQRVSTTVTQNNNSEFAWPGASSWALNGRNSLMNPGPAMASHKEGEDRFFPLSGSLIFGKQGAGRDNVDADKVMITNEEEIKTTNPVATESYGQVATNHQSAQAQAQTGWVQNQGILPGMVWQDRDVYLQGPIWAKIPHTDGNFHPSPLMGGFGMKHPPPQILIKNTPVPADPPTAFNKDKLNSFITQYSTGQVSVEIEWELQKENSKRWNPEIQYTSNYYKSNNVEFAVNTEGVYSEPRPIGTRYLTRNL

SEQ ID NO: 743 - protein, 736 aa, Artificial Sequence
  source: /note="Description of Artificial Sequence: Synthetic polypeptide"
  MOD_RES (126)..(126): Any naturally occurring amino acid
MAADGYLPDWLEDNLSEGIRERWALKPGAPQPKANQQHQDNARGLVLPGYKYLGPGNGLDKGEPVNAADAAALEHDKAYDQQLKAGDNPYLKYNHADAEFQERLKEDTSFGGNLGRAVFQAKKRLXEPLGLVEEAAKTAPGKKRPVEQSPQEPDSSAGIGKSGAQPAKKRLNFGQTGDTESVPDPQPIGEPPAAPSGVGSLTMASGGGAPVADNNEGADGVGSSSGNWHCDSQWLGDRVITTSTRTWALPTYNNHLYKQISNSTSGGSSNDNAYFGYSTPWGYFDFNRFHCHFSPRDWQRLINNNWGFRPKRLNFKLFNIQVKEVTDNNGVKTIANNLTSTVQVFTDSDYQLPYVLGSAHEGCLPPFPADVFMIPQYGYLTLNDGSQAVGRSSFYCLEYFPSQMLRTGNNFQFSYEFENVPFHSSYAHSQSPDRLMNPLIDQYLYYLSKTINGSGQNQQTLKFSVAGPSNMAVQGRNYIPGPSYRQQRVSTTVTQNNNSEFAWPGASSWALNGRNSLMNPGPAMASHKEGEDRFFPLSGSLIFGKQGTGRDNVDADKVMITNEEEIKTTNPVATESYGQVATNHQSAQAQAQTGWVQNQGILPGMVWQDRDVYLQGPIWAKIPHTDGNFHPSPLMGGFGVKHPPPQILIKNTPVPADPPTAFNKDKLNSFITQYSTGQVSVEIEWELQKENSKRWNPEIQYTSNYYKSNNVEFAVNTEGVYSEPRPIGTRYLTRNL

SEQ ID NO: 744 - protein, 736 aa, Artificial Sequence
  source: /note="Description of Artificial Sequence: Synthetic polypeptide"
MAADGYLPDWLEDNLSEGIREWWALKPGAPQPKANQQHQDNARGLVLPGYKYLGPGNGLDKGEPVNAADAAALEHDKAYDQQLKAGDNPYLKYNHADAEFQERLKEDTSFGGNLGRAVFQAKKRLLEPLGLVEEAAKTAPGKKRPVEQSPQEPDSSAGIGKSGAQPAKKRLNFGQTGDTESVPDPQPIGEPPAAPSGVGSLTMASGGGAPVADNNEGADGVGSSSGNWHCDSQWLGDRVITTSTRTWALPTYNNHLYKQISNSTSGGSSNDNAYLGYSTPWGYFDFNRFHCHFSPRDWQRLINNNWGFRPKRLNFKLFNIQVKEVTDNNGVKTIANNLTSTVQVFTDSDYQLPYVLGSAHEGCLPPFPADVFMIPQYGYLTLNDGSQAVGRSSFYCLEYFPSQMLRTGNNFQFSYEFENVPFHSSYAHSQSLDRLMNPLIDQYLYYLSKTINGSGQNQQTLKFSVAGPSNMAVQGRNYIPGPSYRQQRVSTTVTQNNNSEFAWPGASSWALNGRNSLMNPGPAMASHKEGEDRFFPLSGSLIFGKQGTGRDNVDADKVMITNEEEIKTTNPVATESYGQVATNHQSAQAQAQTGWVQNQGILPGMVWQDRDVYLQGPIWAKIPHTDGNFHPSPLMGGFGMKHPPPQILIKNTPVPADPPTAFNKDKLNSFITQYSTGQVSVEIEWELQKENSKRWNPEIQYTSNYYKSNNVEFAVNTEGVYSEPRPIGTRYLTRNL

SEQ ID NO: 745 - protein, 736 aa, Artificial Sequence
  source: /note="Description of Artificial Sequence: Synthetic polypeptide"
MAADGYLPDWLEDNLSEGIREWWALKPGAPQPKANQQHQDNARGLVLPGYKYLGPGNGLDKGEPVNAADAAALEHDKAYDQQLKAGDNPYLKYNHADAEFQERLKEDTSFGGNLGRAVFQAKKRLLEPLGLVEEAAKTAPGKKRPVEQSPQEPDSSAGIGKSGAQPAKKRLNFGQTGDTESVPDPQPIGEPPAAPSGVGSLTMASGGGAPVADNNEGADGVGSSSGNWHCDSQWLGDRVITTSTRTWALPTYNNHLYKQISNSTSGGSSNDNAYFGYSTPWGYFDFNRFHCHFSPRDWQRLINNNWGFRPKRLNFKLFNIQVKEVTDNNGVKTIANNLTSTVQVFTDSDYQLPYVLGSAHEGCLPPFPADVFMIPQYGYLTLNDGSQAVGRSSFYCLEYFPSQMLRTGNNFQFSYEFENVPFHSSYAHSQSLDRLMNPLIDQYLYYLSKTINGSGQNQQTLKFSVAGPSNMAVQGRNYIPGPSYRQQRVSTTVTQNNNSEFAWPGASSWALNGRNSLMNPGPAMASHKEGEDRFFPLSGSLIFGKQGTGRDNVDADKVMITNEEEIKTTNPVATESYGQVATNHQSAQAQAQTGWVQNQGILPGMVWQDRDVYLQGPIWAKIPHTDGNFHPSPLMGGFGMKHPPPQILIKNTPVPADPPTAFNKDKLDSFITQYSTGQVSVEIEWELQKENSKRWNPVIQYTSNYYKSNNVEFAVNTEGVYSEPRPIGTRYLTRNL

SEQ ID NO: 746 - protein, 736 aa, Artificial Sequence
  source: /note="Description of Artificial Sequence: Synthetic polypeptide"
MAADGYLPDWLEDNLSEGIREWWDLKPGAPKPKANQQKQDDGRGLVLPGYKYLGPFNGLDKGEPVNAADAAALEHDKAYDQQLKAGDNPYLRYNHADAEFQERLQEDTSFGGNLGRAVFQAKKRVLEPLGLVEEGAKTAPGKKRPVEQSPQEPDSSSGIGKTGQQPAKKRLNFGQTGDSESVPDPQPLGEPPATPAAVGPTTMASGGGAPMADNNEGVDGVGNASGNWHCDSTWLGDRVITTSTRTWALPTYNNHLYKQISSASTGASNDNHYFGYSTPWGYFDFNRFHCHFSPRDWQRLINNNWGFRPKRLNFKLFNIQVKEVTTNDGVTTIANNLTSTVQVFSDSEYQLPYVLGSAHQGCLPPFPADVFMIPQYGYLTLNNGSQAVGRSSFYCLEYFPSQMLRTGNNFTFSYTFEEVPFHSSYAHSQSLDRLMNPLIDQYLYYLNRTQNQSGSAQNKDLLFSRGSPAGMSVQPKNWLPGPCYRQQRVSKTKTDNNNSNFTWTGASKYNLNGRESIINPGTAMASHKDDEDKFFPMSGVMIFGKESAGASNTALDNVMITDEEEIKATNPVATERFGTVAVNFQSSSTDPATGDVHAMGALPGMVWQDRDVYLQGPIWAKIPHTDGHFHPSPLMGGFGLKNPPPQILIKNTPVPANPPAEFSATKLASFITQYSTGQVSVEIEWELQKENSKRWNPEVQYTSNYAKSANVDFTVDNNGLYTEPRPIGTRYLTRPL

SEQ ID NO: 747 - protein, 736 aa, Artificial Sequence
  source: /note="Description of Artificial Sequence: Synthetic polypeptide"
MAADGYLPDWLEDNLSEGIREWWDLKPGAPKPKANQQKQDDGRGLVLPGYKYLGPFNGLDKGEPVNAADAAALEHDKAYDQQLKAGDNPYLRYNHADAEFQERLQEDTSFGGNLGRAVFQAKKRVLEPLGLVEEGAKTAPGKRRPVEQSPQEPDSSSGIGKTGQQPAKKRLNFGQTGDSESVPDPQPLGEPPATPAAVGPTTMASGGGAPMADNNEGADGVGNASGNWHCDSTWLGDRVITTSTRTWALPTYNNHLYKQISSASTGASNDNHYFGYSTPWGYFDFNRFHCHFSPRDWQRLINNNWGFRPKRLNFKLFNIQVKEVTTNDGVTTIANNLTSTVQVFSDSEYQLPYVLGSAHQGCLPPFPADVFMIPQYGYLTLNNGSQAVGRSSFYCLEYFPSQMLRTGNNFTFSYTFEEVPFHSSYAHSQSLDRLMNPLIDQYLYYLNRTQNQSGSAQNKDLLFSRGSPAGMSVQPKNWLPGPCYRQQRVSKTKTDNNNSNFTWTGASKYNLNGRESIINPGTAMASHKDDEDKFFPMSGVMIFGKESAGASNTALDNVMITDEEEIKATNPVATERFGTVAVNFQSSSTDPATGDVHAMGALPGMVWQDRDVYLQGPIWAKIPHTDGHFHPSPLMGGFGLKNPPPQILIKNTPVPANPPAEFSATKFASFITQYSTGQVSVEIEWELQKENSKRWNPEVQYTSNYAKSANVDFTVDNNGLYTEPRPIGTRYLTRPL

SEQ ID NO: 748 - protein, 736 aa, Artificial Sequence
  source: /note="Description of Artificial Sequence: Synthetic polypeptide"
MAADGYLPDWLEDNLSEGIREWWDLKPGAPKPKANQQKQDDGRGLVLPGYKYLGPFNGLDKGEPVNAADAAALEHDKAYDQQLKAGDNPYPRYNHADAEFQERLQEDTSFGGNLGRAVFQAKKRVLEPLGLVGEGAKTAPGKKRPVEQSPQEPDSSSGIGKTGQQPAKKRLNFGQTGDSESVPDPQPLGEPPATPAAVGPTTMASGGGAPMADNNEGADGVGNASGNWHCDSTWLGDRVITTSTRTWALPTYNNHLYKQISSASTGASNDNHYFGYSTPWGYFDFNRFHCHFSPRDWQRLINNNWGFRPKRLNFKLFNIQVKEVTTNDGVTTIANNLTSTVQVFSDSEYQLPYVLGSAHQGCLPPFPADVFMIPQYGYLTLNNGSQAVGRSSFYCLEYFPSQMLRTGNNFTFSYTFEEVPFHSSYAHSQSLDRLMNPPIDQYLYYLNRTQNQSGSAQNKDLLFSRGSPAGMSVQPKNWLPGPCYRQQRVSKTKTDNNNSNFTWTGASKYNLNGRESIINPGTAMASHKDDEDKFFPMSGVMIFGKESAGASNTALDNVMITDEEEIKATNPVATERFGTVAVNFQSSSTDPATGDVHAMGALPGMVWQDRDVYLQGPIWAKIPHTDGHFHPSPLMGGFGLKNPPPQILIKNTPVPANPPAEFSATKFASFITQYSTGQVSVEIEWELQKENSKRWNPEVQYTSNYAKSANVDFTVDNNGLYTEPRPIGTRYLTRPL

SEQ ID NO: 749 - protein, 736 aa, Artificial Sequence
  source: /note="Description of Artificial Sequence: Synthetic polypeptide"
MAADGYLPDWLEDNLSEGIREWWDLKPGAPKPKANQQKQDDGRGLVLPGYKYLGPFNGLDKGEPVNAADAAALEHDKAYDQQLKAGDNPYLRYNHADAEFQERLQEDTSFGGNLGRAVFQAKKRVLEPLGLVEEGAKTAPGKKRPVEQSPQEPDSSSGIGKTGQQPAKKRLNFGQTGDSESVPDPRPLGEPPATPAAVGPTTMASGGGAPMADNNEGADGVGNASGNWHCDSTWLGDRVITTSTRTWALPTYNNHLYKQISSASTGASNDNHYFGYSTPWGYFDFNRFHCHFSPRDWQRLINNNWGFRPKRLNFKLFNIQVKEVTTNDGVTTIANNLTSTVQVFSDSEYQLPYVLGSAHQGCLPPFPADVFMIPQYGYLTLNNGSQAVGRSSFYCLEYFPSQMLRTGNNFTFSYTFEEVPFHSSYAHSQSLDRLMNPLIDQYLYYLNRTQNQSGSAQNKDLLFSRGPPAGMSVQPKNWLPGPCYRQQRVSKTKTDNNNSNFTWTGASKYNLNGRESIINPGTAMASHKDDEDKFFPMSGVMIFGKESAGASNTALDNVMITDEEEIKATNPVATERFGTVAVNFQSSSTDPATGDVHAMGALPGMVWQDRDVYLQGPIWAKIPHTDGHFHPSPLMGGFGLKNPPPQILIKNTPVPANPPAEFSATKFASFITQYSTGQVSVEIEWELQKENSKRWNPEVQYTSNYAKSANVDFTVDNNGLYTEPRPIGTRYLTRPL

SEQ ID NO: 750 - protein, 736 aa, Artificial Sequence
  source: /note="Description of Artificial Sequence: Synthetic polypeptide"
MAADGYLPDWLEDNLSEGIREWWDLKPGAPKPKANQQKQDDGRGLVLPGYKYLGPFNGLDKGEPVNAADAAALEHDKAYDQQLKAGDNPYLRYNHADAEFQERLQEDTSFGGNLGRAVFQAKKRVLEPLGLVEEGAKTAPGKKRPVEQSPQEPDSSSGIGKTGQQPAKKRLNFGQTGGSESVPDPQPLGEPPATPAAVGPTTMASGGGAPMADNNEGADGVGNASGNWHCDSTWLGDRVITTSTRTWALPTYNNHLYKQISSASTGASNDNHYFGYSTPWGYFDFNRFHCHFSPRDWQRLINNNWGFRPKRLNFKLFNIQVKEVTTNDGVTTIANNLTSTVQVFSDSEYQLPYVLGSAHQGCLPPFPADVFMIPQYGYLTLNNGSQAVGRSSFYCLEYFPSQMLRTGNNFTFSYTFEEVPFHSSYAHSQSLDRLMNPPIDQYLYYLNRTQNQSGSAQNKDLLFSRGSPAGMSVQPKNWLPGPCYRQQRVSKTKTDNNNSNFTWTGASKYNLNGRESIINPGTAMASHKDDEDKFFPMSGVMIFGKESAGASNTALDNVMITDEEEIKATNPVATERFGTVAVNFQSSSTDPATGDVHAMGALPGMVWQDRDVYLQGPIWAKIPHTDGHFHPSPLMGGFGLKNPPPQILIKNTPVPANPPAEFSATKFASFITQYSTGQVSVEIEWELQKENSKRWNPEVQYTSNYAKSANVDFTVDNNGLYTEPRPIGTRYLTRPL

SEQ ID NO: 751 - protein, 736 aa, Artificial Sequence
  source: /note="Description of Artificial Sequence: Synthetic polypeptide"
MAADGYLPDWLEDNLSEGIREWWDLKPGAPKPKANQQKQDDGRGLVLPGYKYLGPFNGLDKGEPVNAADAAALEHDKAYDQQLKAGDNPYLRYNHADAEFQERLQEDTSFGGNLGRAVFQAKKRVLEPLGLVEEGAKTAPGKKRPVEQSPQEPDSSSGIGKTGQQPAKKRLNFGQTGDSESVPDPQPLGEPPATPAAVGPTTMASGGGAPMADNNEGADGVGNASGNWHCDSTWLGDRVITTSTRTWALPTYNNHLYKQISSASTGASNDNHYFGYSTPWGYFDFNRFHCHFSPRDWQRLINNNWGFRPKRLNFKLFNIQVKEVTTNDGVTTIANNLTSTVQVFSDSEYQLPYVLGSAHQGCLPPFPADVFMIPQYGYLTLNNGSQAVGRSSFYCLEYFPSQMLRTGNNFTFSYTFEEVPFHSSYAHSQSLDRLMNPLIDQYLYYLNRTQNQSGSAQNKDLLFSRGSPAGMSVQPKNWLPGPCYRQQRVSKTKTDNNNSNFTWTGASKYNLNGRESIINPGTAVASHKDDEDKFFPMSGVMIFGKESAGASNTALDNVMITDEEEIKATNPVATERFGTVAVNFQSSSTDPATGDVHAMGALPGMVWQDRDVYLQGPIWAKIPHTDGHFHPSPLMGGFGLKNPPPQILIKNTPVPANPPAEFSATKFASFITQYSTGQVSVEIEWELQKENSKRWNPEVQYTSNYAKSANVDFTVDNNGLYTEPRPIGTRYLTRPL

SEQ ID NO: 752 - protein, 736 aa, Artificial Sequence
  source: /note="Description of Artificial Sequence: Synthetic polypeptide"
MAADGYLPDWLEDNLSEGIREWWDLKPGAPKPKANQQKQDDGRGLVLPGYKYLGPFNGLDKGEPVNAADAAALEHDKAYDQQLKAGDNPYLRYNHADAEFQERLQEDTSFGGNLGRAVFQAKKRVLEPLGLVEEGAKTAPGKKRPVEQSPQEPDSSSGIGKTGQQPAKKRLNFGQTGDSESVPDPQPLGEPPATPAAVGPTTMASGGGAPMADNNEGADGVGNASGNWHCDSTWLGDRVITTSTRTWALPTYNNHLYKQISSASTGASNDNHYFGYSTPWGYFDFNRFHCHFSPRDWQQLINNNWGFRPKRLNFKLFNIQVKEVTTNDGVTTIANNLTSTVQVFSDSEYQLPYVLGSAHQGCLPPFPADVFMIPQYGYLTLNNGSQAVGRSSFYCLEYFPSQMLRTGNNFTFSYTFEEVPFHSSYAHSQSLDRLMNPLIDQYLYYLNRTQNQSGSAQNKDLLFSRGSPAGMSVQPKNWLPGPCYRQQRVSKTKTDNNNSNFTWTGASKYNLNGRESIINPGTAMASHKDDEDKFFPMSGVMIFGKESAGASNTALDNVMITDEEEIKATNPVATERFGTVAVNFQSTSTDPATGDVHAMGALPGMVWQDRDVYLQGPIWAKIPHTDGHFHPSPLMGGFGLKNPPPQILIKNTPVPANPPAEFSATKFASFITQYSTGQVSVEIEWELQKENSKRWNPEVQYTSNYAKSADVDFTVDNNGLYTEPRPIGTRYLTRPL

SEQ ID NO: 753 - protein, 736 aa, Artificial Sequence
  source: /note="Description of Artificial Sequence: Synthetic polypeptide"
MAADGYLPDWLEDNLSEGIREWWDLKPGAPKPKANQQKQDDGRGLVLPGYKYLGPFNGLDKGEPVNAADAAALEHDKAYDQQLKAGDNPYLRYNHADAEFQERLQEDTSFGGNLGRAVFQAKKRVLEPLGLVEEGAKTAPGKKRPVEQSPQEPDSSSGIGKTGQQPAKKRLNFGQTGDSESVPDPQPLGEPPATPAAVGPTTMASGGGAPMADNNEGADGVGNASGNWHCDSTWLGDRVITTSTRTWALPTYNNHLYKQISSASTGASNDNHYFGYSTPWGYFDFNRFHCHFSPRDWQRLINNNWGFRPKRLNFKLFNIQVKEVTTNDGVTTIANNLTSTVQVFSDSEYQPPYVLGSAHQGCLPPFPADVFMIPQYGHLTLNNGSQAVGRSSFYCLEYFPSQMLRTGNNFTFSYTFEEVPFHSSYAHSQSLDRLTNPLIDQYLYYLNRTQNQSGSAQNKDLLFSRGSPAGMSVQPKNWLPGPCYRQQRVSKTKTDNNNSNFTWTGASKYNLNGRESIINPGTAMASHKDDEDKFFPMSGVMIFGKESAGASNTALDNVMITDEEEIKATNPVATERFGTVAVNFQSSSTDPATGDVHAMGALPGMVWQDRDVYLQGPIWAKIPHTDGHFHPSPLMGGFGLKNPPPQILIKNTPVPANPPAEFSATKFASFITQYSTGQVSVEIEWELQKENSKRWNPEVQYTSNYAKSANVDFTVDNNGLYTEPRPIGTRYLTRPL

SEQ ID NO: 754 - protein, 736 aa, Artificial Sequence
  source: /note="Description of Artificial Sequence: Synthetic polypeptide"
MAADGYLPDWLEDNLSEGIREWWDLKPGAPKPKANQQEQDDGRGLVLPGYKYLGPFNGLDKGEPVNAADAAALEHDKAYDQQLKAGDNPYLRYNHADAEFQERLQEDTSFGGNLGRAVFQAKKRVLEPLGLVEEGAKTAPGKKRPVEQSPQEPDSSSGIGKTGQQPAKKRLNFGQTGDSESVPDPQPLGEPPATPAAVGPTTMASGGGAPMADNNEGADGVGNASGNWHCDSTWLGDRVITTSTRTWALPTYNNHLYKQISSASTGASNDNHYFGYSTPWGYFDFNRFHCHFSPRDWQRLINNNWGFRPKRLNFKLFNIQVKEVTTNDGVTTIANNLTSTVQVFSDSEYQLPYVLGSAHQGCLPPFPADVFMIPQYGYLTLNNGSQAVGRSSFYCLEYFPSQMLRTGNNFTFSYTFEEVPFHSSYAHSQSLDRLMNPLIDQYLYYLNRTQNQSGSAQNKDLLFSRGSPAGMSVQPKNWLPGPCYRQQRVSKTKTDNNNSNFTWTGASKYNLNGRESIINPGTAMASHKDDEDKFFPMSGVMIFGKESAGASNTALDNVMITDEEEIKATNPVATERFGTVAVNFQSSSTDPATGDVHATGTLPGMVWQDRDVYLQGPIWAKIPHTDGHFHPSPLMGGFGLKNPPPQILIKTTPVPANPPAEFSATKFASFITQYSTGQVSVEIEWELQKENSKRWNPEVQYTSNYAKSANVDFTVDDNGLYTEPRPIGTRYLTRPL

SEQ ID NO: 755 - protein, 736 aa, Artificial Sequence
  source: /note="Description of Artificial Sequence: Synthetic polypeptide"
MAADGYLPDWLEDNLSEGIREWWDLKPGAPKPKANQQKQDDGRGLVLPGYKYLGPFNGLDKGEPVNAADAAALEHDKAYDQQLKAGDNPYLRYNHADAEFQERLQEDTSFGGNLGRAVFQAKKRVLEPLGLVEEGAKTAPGKKRPVEQSLQEPDSSSGIGKTGQQPAKKRLNFGQTGDSESVPDPQPLGEPPATPAAVGPTTMASGGGAPMADNNEGADGVGNASGNWHCDSTWLGDRVITTSTRTWALPTYNNHLYKQISSASTGASNDNHYFGYSTPWGYFDFNRFHCHFSPRDWQRLINNNWGFRPKRLNFKLFNIQVKEVTTNDGVTTIANNLTSTVQVFSDSEYQLPYVLGSAHQGCLPPFPADVFMIPQYGYLTLNNGSQAVGRSSFYCLEYFPSQMLRTGNNFTFSYTFEEVPFHSSYAHSQSLDRLMNPLIDQYLYYLNRTQNQSGSAQNKDLLFSRGSPAGMSVQPKNWLPGPCYRQQRVSKTKTDNDNSNFTWTGASKYNLNGRESIINPGTAMASHKDDEDKFFPMSGVMIFGKESAGASNTALDNVMITDEEEIKATNPVATERFGTVAVNFQSSSTDPATGDVHAMGALPGMVWQDRDVYLQGPIWAKIPHTDGHFHPSPLMGGFGLKNPPPQILIKNTPVPANPPAEFSATKFASFITQYSTGQVSVEIEWELQKENSKRWNPEVQYTSNYAKSANVDFTVDNNGLYTEPRPIGTRYLTRPL

SEQ ID NO: 756 - protein, 736 aa, Artificial Sequence
  source: /note="Description of Artificial Sequence: Synthetic polypeptide"
MAADGYLPDWLEDNLSEGIREWWDLKPGAPKPKANQQKQDDGRGLVLPGYKYLGPFNGLDKGEPVNAADAAALEHDKAYDQQLKAGDNPYLRYNHADAEFQERLQEDTSFGGNLGRAVFQAKKRVLEPLGLVEEGAKTAPGKKRPVEQSPQEPDSSSGIGKTGQQPAKKRLNFGQTGDSESVPDPQPLGEPPATPAAVGPTTMASGGGAPMADNNEGADGVGNASGNWHCDSTWLGDRVITTSTRTWALPTYNNHLYKQISSASTGASNDNHYFGYSTPWGYFDFNRFHCHFSPRDWQRLINNNWGFRPKRLNFKLFNIQVKEVTTNDGVTTIANNLTSTVQVFSDSEYQLPYVLGSAHQGCLPPFPADVFMIPQYGYLTLNNGSQAVGRSSFYCLEYFPSQMLRTGNNFTFSYTFEEAPFHSSYAHSQSLDRLMNPLIDQYLYYLNRTQNQSGSAQNKDLLFSRGSPAGMSVQPKNWLPGPCYRQQRVSKTKTDNNNSNFTWTGASKYNLNGRESIINPGTAMASHKDDEDKFFPMSGVMIFGKESAGASNTALDNVMITDEEEIKATNPVATERFGTVAVNFQSSSTDPATGDVHAMGALPGMVWQDRDVYLQGPIWAKIPHTDGHFHPSPLMGGFGLKNPPPQILIKNTPVPANPPAEFSATKFASFITQYSTGQVSVEIEWELQKENSKRWNPEVQYTSNYAKSANVDFTVDNNGLYTEPRPVGTRYLTRPL

SEQ ID NO: 757 - protein, 736 aa, Artificial Sequence
  source: /note="Description of Artificial Sequence: Synthetic polypeptide"
MAADGYLPDWLEDNLSEGIREWWDLKPGAPKPKANQQKQDDGRGLVLPGYKYLGPFNGLDKGEPVNAADAAALEHDKAYDQQLKAGDNPYLRYNHADAEFQERLQENTSFGGNLGRAVFQAKKRVLEPLGLVEEGAKTAPGKKRPVEQSPQEPDSSSGIGKTGQQPAKKRLNFGQTGDSESVPDPQPLGEPPATPAAVGPTTMASGGGAPMADNNEGADGVGNASGNWHCDSTWLGDRVITTSTRTWALPTYNNHLYKQISSASTGASNDNHYFGYSTPWGYFDFNRFHCHFPPRDWQRLINNNWGFRPKRLNFKLFNIQVKEVTSNDGVTTIANNLTSTVQVFSDSEYQLPYVLGSAHQGCLPPFPADVFMIPQYGYLTLNNGSQAVGRSSFYCLEYFPSQMLRTGNNFTFSYTFEEVPFHSSYAHSQSLDRLMNPLIDQYLYYLNRTQNQSGSAQNKDLLFSRGSPAGMSVQPKNWLPGPCYRQQRVSKTKTDNNNSNFTWTGASKYNLNGRESIINPGTAMASHKDDEDKFFPMSGVMIFGKESAGASNTALDNVMITDEEEIKATNPVATERFGTVAVNFQSSSTDPATGDVHAMGALPGMVWQDRDVYLQGPIWAKIPHTDGHFHPSPLMGGFGLKNPPPQILIKNTPVPANPPAEFSATKFASFITQYSTGQVSVEIEWELQKENSKRWNPEVQYTSNYAKSANVDFTVDNNGLYTEPRPIGTRYLTRPL

SEQ ID NO: 758 - protein, 736 aa, Artificial Sequence
  source: /note="Description of Artificial Sequence: Synthetic polypeptide"
MAADGYLPDWLEDNLSEGIREWWDLKPGAPKPKANQQKQDDGRGLVLPGYKYLGPFNGLDKGEPVNAADAAALEHDKAYDQQLKAGDNPYLRYNHADAEFQERLQEDTSFGGNLGRAVFQAKKRVLEPLGLVEEGAKTAPGKKRPVEQSPQEPDSSSGIGKTGQQPAKKRLNFGQTGDSESVPDPQPLGEPPATPAAVGPTTMASGGGAPMADNNEGADGVGNASGNWHCDSTWLGDRVITTSTRTWALPTYNNHLYKQISSASTGASNDNHYFGYSTPWGYFDFNRFHCHFSPRDWQRLINNNWGFRPKRLNFKLFNIQVKEVTTNDGVTTIANNLTSTVQVFSDSEYQLPYVLGSAHQGCLPPFPADVFMIPQYGYLTLNNGSQAVGRSSFYCLEYFPSQMLRTGNNFTFSYTFEEVPFHSSYAHSQSLDRLMNPLIDQYLYYLNRTQNQSGSAQNKDLLFSRGSPAGTSVQPKNWLPGPCYRQQRVSKTKTDNNNSNFTWTGASKYNLNGRESIINPGTAMASHKDDEDKFFPMSGVMIFGKESAGASNTALDNVMITDEEEIKATNPVATERFGTVAVNFQSSSTDPATGDVHAMGALPGMVWQDRDVYLQGPIWAKIPHTDGHFHPSPLMGGFGLKNPPPQILIKNTPVPANPPAEFSATKFASFITQYSTGQVSVEIEWELQKENSKRWNPEVQYTSNYAKSANVDFTVDNNGLYTGPRPIGTRYLTRPL

SEQ ID NO: 759 - protein, 736 aa, Artificial Sequence
  source: /note="Description of Artificial Sequence: Synthetic polypeptide"
MAADGYLPDWLEDNLSEGIREWWDLKPGAPKPKANQQKQDDGRGLVLPGYKYLGPFNGLDKGEPVNAADAAALEHDKAYDQQLKAGDNPYLRYNHADAEFQERLQEDTSFGGNLGRAVFQAKKRVLEPLGLVEEGAKTAPGKKRPVEQSPQEPDSSSGIGKTGQQPAKKRLNFGQTGDSESVPDPQPLGEPPATPAAVGPTTMASGGGAPMADNNEGADGVGNAPGNWHCDSTWLGDRVITTSTRTWALPTYNNHLYKQISSASTGASNDNHYFGYSTPWGYFDFNRFHCHFSPRDWQRLINNNWGFRPKRLNFKLFNIQVKEVTTNDGVTTIANNLTSTVQVFSDSEYQLPYVLGSAHQGCLPPFPADVFMIPQYGYLTLNNGSQAVGRSSFYCLEYFPSQMLRTGNNFTFSYTFEEVPFHSSYAHSQSLDRLMNPLIDQYLYYLNRTQNQSGSAQNKDLLFSRGSPAGMSVQPKNWLPGPCYRQQRVSKTKTDNNNSNFTWTGASKYNLNGRESIINPGTAMASHKDDEDKFFPMSGVMIFGKESAGASNTALDNVMITGEEEIKATNPVATERFGTVAVNFQSSSTDPATGDVHAMGALPGMVWQDRDVYLQGPIWAKIPHTDGHFHPSPLMGGFGLKNPPPQILIKNTPVPANPPAEFSATKFASFITQYSTGQVSVEIEWELQKENSKRWNPEVQYTSNYAKSANVDFTVDNNGLYTEPRPIGTRYLTRPL

SEQ ID NO: 760 - protein, 736 aa, Artificial Sequence
  source: /note="Description of Artificial Sequence: Synthetic polypeptide"
MAADGYLPDWLEDNLSEGIREWWDLKPGAPKPKANQQKQDDGRGLVLPGYKYLGPFNRLDKGEPVNAADAAALEHDKAYDQQLKAGDNPYLRYNHADAEFQERLQEDTSFGGNLGRAVFQAKKRVLEPLGLVEEGAKTAPGRKRPVEQSPQEPDSSSGIGKTGQQPAKKRLNFGQTGDSESVPDPQPLGEPPATPAAVGPTTMASGGGAPMADNNEGADGVGNASGNWHCDSTWLGDRVITTSTRTWALPTYNNHLYKQISSASTGASNDNHYFGYSTPWGYFDFNRFHCHFSPRDWQRLINNNWGFRPKRLNFKLFNIQVKEVTTNDGVTTIANNLTSTVQVFSDSEYQLPYVLGSAHQGCLPPFPADVFMIPQYGYLTLNNGGQAVGRSSFYCLEYFPSQMLRTGNNFTFSYTFEEVPFHSSYAHSQSLDRLMNPLIDQYLYYLNRTQNQSGSAQNKDLLFSRGSPAGMSVQPKNWLPGPCYRQQRVSKTKTDNNNSNFTWTGASKYSLNGRESIINPGTAMASHKDDEDKFFPMGGVMIFGKESAGASNTALDNAMITDEEEIKATNPVATERFGTVAVNFQSSSTDPATGDVHAMGALPGMVWQDRDVYLQGPIWAKIPHTDGHFHPSPLMGGFGLKNPPPQILIKNTPVPANPPAEFSATKFASFITQYSTGQVSVEIEWELQKENSKRWNPEVQYTSNYAKSANVDFTVDNNGLYTEPRPIGTRYLTRPL

SEQ ID NO: 761 - protein, 736 aa, Artificial Sequence
  source: /note="Description of Artificial Sequence: Synthetic polypeptide"
MAADGYLPDWLEDNLSEGIREWWDLKPGAPKPKANQQKQDDGRGLVLPGYKYLGPFNGLDKGEPVNAADAAALEHDKAYDQQLKAGDNPYLRYNHADAEFQERLQEDTSFGGNLGRAVFQAKKRVLEPLGLVEEGAKTAPGKKRPVEQSPQEPDSSSGIGKTGQQPAKKRLNFGQTGDSESVPDPQPLGEPPATPAAVGPTTMASGGGAPMADNNEGADGVGNASGNWHCDSTWLGGRVITTSTRTWALPTYNNHLYKQISSASTGASNDNHYFGYSTPWGYFDFNRFHCHFSPRDWQRLINNNWGFRPKRLNFKLFNIQVKEVTTNDGVTTIANNLTSTVQVFSDSEYQLPYVLGSAHQGCLPPFPADVFMIPQYGYLTLNNGSQAVGRSSFYCLEYFPSQMLRTGNNSTFSYTFEEVPFHSSYAHSQSLDRLMNPLIDQYLYYLNRTQNQSGSAQNKDLLFSRGSPAGMSVQPKNWLPGPCYRQQRVSKTKTDNNNSNFTWTGASKYNLNGRESIINPGTAMASHKDDEDKFFPMSGVMIFGKESAGASNTALDNVMITDEEEIKATNPVATERFGTVAVNFQSSSTDPATGDVHAMGTLPGMVWQDRDVYLQGPIWAKIPHTDGHFHPSPLMGGFGLKNPPPQILIKNTPVPANPPAEFSATKFASFITQYSTGQVSVEIEWELQKENSKRWNPEVQYTSNYAKSANVDFTVDNNGLYTEPRPIGTRYLTRPL

SEQ ID NO: 762 - protein, 736 aa, Artificial Sequence
  source: /note="Description of Artificial Sequence: Synthetic polypeptide"
MAADGYLPDWLEDNLSEGIREWWDLKPGAPKPKANQQKQDDGRGLVLPGYKYLGPFNGLDKGEPVSAADAAALEHDKAYDQQLKAGDNPYLRYNHADAEFQERLQEDTSFGGNLGRAVFQAKKRVLEPLGLVEEGAKTAPGKKRPVEQSPQEPDSSSGIGKTGQQPAKERLNFGQTGDSESVPDPQPLGEPPATPAAVGPTTMASGGGAPMADNNEGADGVGNASGNWHCDSTWLGDRVITTSTRTWALPTYNNHLYKQISSASTGASNDNHYFGYSTPWGYFDFNRFHCHFSPRDWQRLINNNWGFRPKRLNFKLFNIQVKEVTTNDGVTTIANNLTSTVQVFSDSEYQLPYVLGSAHQGCLPPFPADVFMIPQYGYLTLNNGSQAVGRSSFYCLEYFPSQMLRTGNNFTFSYTFEEVPFHSSYAHSQSLDRLMNPLIDQYLYYLNRTQNQSGSAQNKDLLFSRGSPAGMSVQPKNWLPGPCYRQQRVSKTKTDNNNSNFTWTGASKYNLNGRESIINPGTAMASHKDDEDKFFPMSGVMIFGKESAGASNTALDNVMITDEEEIKATNPVATERFGTVAVNFQSSSTDPATGDVHAMGALPGMVWQDRDVYLQGPIWAKIPHTDGHFHPSPLMGGFGLKNPPPQILIKNTPVPANPPAEFSATKFASFITQYSTGQVSVEIEWELQKENSKRWNPEVQYTSNYAKSANVDFTVDNNGLYTEPRPIGTRYLTRPL

SEQ ID NO: 763 - protein, 736 aa, Artificial Sequence
  source: /note="Description of Artificial Sequence: Synthetic polypeptide"
MAADGYLPDWLEDNLSEGIREWWDLKPGAPKPKANQQKQDDGRGLVLPGYKYLGPFNGLDKGEPVNAADAAALEHDKAYDQQLKAGDNPYLRYNHADAEFQERLQEDTSFGGNLGRAVFQAKKRVLEPLGLVEEGAKTAPGKKRPVEQSPQEPDSSSGIGKTGQQPAKKRLNFGQTGDSESVPDPQPLGEPPATPAAVGPTTMASGGGAPMADNNEGADGVGNASGNWHCDSTWLGDRVITTSTRTWALPTYNNHLYKQISSASTGASNDNHYFGYSTPWGYFDFNRFHCHFSPRDWQRLINNNWGFRPKRLNFKLFNIQVKEVTTNDGVTTIANNLTSTVQVFSDSEYQLPYVLGSAHQGCLPPFPADVFMIPQYGYLTLNNGSQAVGRSSFYCLEYFPSQMLRTGNNFTFSYTFEEVPFHSSYAHSQSLDRLMNPLIDQYLYYLNRTQNQSGSAQNKDLLFSRGSPAGMSVQPKNWLPGPCYRQQRVSKTKTDNNNSNFTWTGASKYNLNGRESIINPGTAMASHKDDEDKFFPMSGVMIFGKESAGASNTALDNVMITDEGEIKATNPVATERFGTVAVNFQSSSTDPATGDVHAMGALPGMVWQDRDVYLQGPIWAKIPHTDGHFHPSPLMGGFGLKNPPPQILIKNTPVPANPPAEFSATKFASFITQYSTGQVSVEIEWELQKENSKRWNPEVQYTSNYAKSANVDFTVDNNGLYTEPRPIGTRYLTRPL

SEQ ID NO: 764 - protein, 736 aa, Artificial Sequence
  source: /note="Description of Artificial Sequence: Synthetic polypeptide"
MAADGYLPDWLEDNLSEGIREWWDLKPGAPKPKANQQKQDDGRGLVLPGYKYLGPFNGLDKGEPVNAADAAALEHDKAYDQQLKAGDNPYLRYNHADAEFQERLQEDTSFGGNLGRAVFQAKKRVLEPFGLVEEGAKTAPGKKRPVEQSPQEPDSSSGIGKTGQQPAKKRLNFGQTGDSESVPDPQPLGEPPATPAAVGPTTMASGGGAPMADNNEGADGVGNASGNWHCDSTWLGDRVITTSTRTWALPTYNNHLYKQISSASTGASNDNHYFGYSTPWGYFDFNRFHCHFSPRDWQRLINNNWGFRPKRLNFKLFNIQVKEVTTNDGVTTIANNLTSTVQVFSDSEYQLPYVLGSAHQGCLPPFPADVFMIPQYGYLTLNNGSQAVGRSSFYCPEYFPSQMLRTGNNFTFSYTFEEVPFHSSYAHSQSLDRLMNPLIDQYLYYLNRTQNQSGSAQNKDLLFSRGSPAGMSVQPKNWLPGPCYRQQRVSKTKTDNNNSNFTWTGASKYNLNGRESIINPGTAMASHKDDKDKFFPMSGVMIFGKESAGASNTALDNVMITDEEEIKATNPVATERFGTVAVNFQSSNTDPATGDVHVMGALPGMVWQDRDVYLQGPIWAKIPHTDGHFHPSPLMGGFGLKHPPPQILIKNTPVPANPPAEFSATKFASFITQYSTGQVSVEIEWELQKENSKRWNPEVQYTSNYAKSANVDFTVDNNGLYTEPRPIGTRYLTRPL

SEQ ID NO: 765 - protein, 736 aa, Artificial Sequence
  source: /note="Description of Artificial Sequence: Synthetic polypeptide"
MAADGYLPDWLEDNLSEGIREWWDLKPGAPKPKANQQKQDDGRGLVLPGYKYLGPFNGLDKGEPVNAADAAALEHDKAYDQQLKAGDNPYLRYNHADAEFQERLQEDTSFGGNLGRAVFQAKKRVLEPFGLVEEGAKTAPGKKRPVEQSPQEPDSSSGIGKTGQQPAKKRLNFGQTGDSESVPDPQPLGEPPATPAAVGPTTMASGGGAPMADNNEGADGVGNASGNWHCDSTWLGDRVITTSTRTWALPTYNNHLYKQISSASTGASNDNHYFGYSTPWGYFDFNRFHCHFSPRDWQRLINNNWGFRPKRLNFKLFNIQVKEVTTNDGVTTIANNLTSTVQVFSDSEYQLPYVLGSAHQGCLPPFPADVFMIPQYGYLTLNNGSQAVGRSSFYCLEYFPSQMLRTGNNFTFSYTFEEVPFHSSYAHSQSLDRLMNPLIDQYLYYLNRTQNQSGSAQNKDLLFSRGSPAGMSVQPKNWLPGPCYRQQRVSKTKTDNNNSNFTWTGASKYNLNGRESIINPGTAMASHKDDKDKFFPMSGVMIFGKESAGASNTALDNVMITDEEEIKATNPVATERFGTVAVNFQSSDTDPATGDVHVMGALPGMVWQDRDVYLQGPIWAKIPHTDGHFHPSPLMGGFGLKHPPPQILIKNTPVPANPPAEFSATKFASFITQYSTGQVSVEIEWELQKENSKRWNPEVQYTSNYAKSANVDFTVDNNGLYTEPRPIGTRYLTRPL

SEQ ID NO: 766 - protein, 736 aa, Artificial Sequence
  source: /note="Description of Artificial Sequence: Synthetic polypeptide"
MAADGYLPDWLEDNLSEGIREWWDLKPGAPKPKANQQKQGDGRGLVLPGYKYLGPFNGLDKGEPVNAADAAALEHDKAYDQQLKAGDNPYLRYNHADAEFQERLQEDTSFGGNLGRAVFQAKKRVLEPFGLVEEGAKTAPGKKRPVEQSPQEPDSSSGIGKTGQQPAKKRLNFGQTGDSESVPDPQPLGEPPATPAAVGPTTMASGGGAPMADNNEGADGVGNASGNWHCDSTWLGDRVITTNTRTWALPTYNNHLYKQISSASTGASNDNHYFGYSTPWGYFDFNRFHCHFSPRDWQRLINNNWGFRPKRLNFKLFNIQVKEVTTNDGVTTIANNLTSTVQVFSDSEYQLPYVLGSAHQGCLPPFPADVFMIPQYGYLTLNNGSQAVGRSSFYCLEYFPSQMLRTGNNFTFSYTFEEVPFHSSYGHSQSLDRLMNLLIDQYLYYLNRTQNQSGSAQNKDLLFSRGSPAGMFVQPKNWLPGPCYRQQRVSKTKTDNNNSNFTWTGASKYNLNGRESIINPGTAMASHKDDEDKFFPMSGVMIFGKESAGASNTALDNVMITDEEEIKATNPVATERFGTVAVNFQSSSTDPATGDVHVMGALPGMVWQDRDVYLQGPIWAKIPHTDGHFHPSPLMGGFGLKHPPPQILIKNTPVPANPPAEFSATKFASFITQYSTGQVSVEIEWELQKENSKRWNPEVQYTSNYAKSANVDFTVDNNGLYTEPRPIGTRYLTRPL

SEQ ID NO: 767 - protein, 736 aa, Artificial Sequence
  source: /note="Description of Artificial Sequence: Synthetic polypeptide"
MAADGYLPDWLEDNLSEGIREWWDLKPGAPKPKANQQKQDDGRGLVLPGYKYLGPFNGLDKGEPVNAADAAALEHDKAYDQQLKAGDNPYLRYNHADAEFQERLQEDTSFGGNLGRAVFQAKKRVLEPFGLVEEGAKTAPGKKRPVEQSPQEPDSSSGIGKTGQQPAKKRLNFGQTGDSESVPDPQPLGEPPATPAAVGPTTMASGGGAPMADNNEGADGVGNASGNWHCDSTWLGDRVITTNTRTWALPTYNNHLYKQISSASTGASNDNHYFGYSTPWGYFDFNRFHCHFSPRDWQRLINNNWGFRPKRLNFKLFNIQVKEVTTNDGVTTIANNLTSTVQVFSDSEYQLPYVLGSAHQGCLPPFPADVFMIPQYGYLMLNNGSQAVGRSSFYCLEYFPSQMLRTGNNFTFSYTFEEVPFHSSYAHSQSLDRLMNPLIDQYLYYLNRTQNQSGSAQNKDLLFSRGSPAGMSVQPKNWLPGPCYRQQRVSKTKTDNNNSNFTWTGASKYNLNGRESIINPGTAMASHKDDEDKFFPMSGVMIFGKESAGASNTALDNVMITDEEEIKATNPAATERFGTVAVNFQSSSTDPATGDVHVMGALPGMVWQDRDVYLQGPIWAKIPHTDGHFHPSPLMGGFGLKHPPPQILIKNTPVPANPPAEFSATKFASFITQYSTGQVSVEIEWELQKENSKRWNPEVQYTSNYAKSANVDFTVDNNGLYTEPRPIGTRYLTRPL

SEQ ID NO: 768 - protein, 736 aa, Artificial Sequence
  source: /note="Description of Artificial Sequence: Synthetic polypeptide"
MAADGYLPDWLEDNLSEGIREWWDLKPGAPKPKANQQKQDDGRGLVLPGYKYLGPFNGLDKGEPVNAADAAALEHDKAYDQQLKAGDNPYLRYNHADAEFQERLQEDTSFGGNLGRAVFQAKKRVLEPFGLVEEGAKTAPGKKRPVEQSPQEPDSSSGIGKTGQQPAKKRLNFGQTGDSESVPDPQPLGEPPATPAAVGPTTMASGGGAPMADNNEGADGVGNASGNWHCDSTWLGDRVITTSTRTWALPTYNNHLYKQISSASTGASNDNHYFGYSTPWGYFDFNRFHCHFSPRDWQRLINNNWGFRPKRLNFKLFNIQVKEVTTNDGVTTIANNLTSTVQVFSDSEYQLPYVLGSAHQGCLPPFPADVFMIPQYGYLTLNNGSQAVGRSSFYCLEYFPSQMLRTGNNFTFSYTFEEVPFHSSYAHSQSLDRLMNPLIDQYLYYLNRTQNQSGSAQNKDLLFSRGSPAGMSVQPKNWLPGPCYRQQRVSKTKTDNNNSNFTWTGASKYNLNGRESIINPGTAMASHKDDEDKFFPMSGVMIFGKESAGASNTALDNVMITDEEEIKATNPVATERFGTVAVNFQSSSTDPATGDVHVMGALPGMVWQDRDVYLQGPIWAKIPHTDGHFHPSPLMGGFGLKHPPPQILIKNTPVPANPPAEFSATKFASFITQYSTGQVSVEIEWELQKENSKRWNPEVQYTSNYAKSANVDFTVDNNGLYTEPRPIGTRYLTRPL

SEQ ID NO: 769 - protein, 736 aa, Artificial Sequence
  source: /note="Description of Artificial Sequence: Synthetic polypeptide"
  MOD_RES (102)..(102): Any naturally occurring amino acid
MAADGYLPDWLEDNLSEGIREWWDLKPGAPKPKANQQKQDDGRGLVLPGYKYLGPFNGLDKGEPVNAADAAALEHDKAYDQQLKAGDNPYLRYNHADAEFQXRLQEDTSFGGNLGRAVFQAKKRVLEPFGLVEEGAKTAPGKKRPVEQSPQEPDSSSGIGKTGQQPAKKRLNFGQTGDSESVPDPQPLGEPPATPAAVGPTTMASGGGAPMADNNEGADGVGNASGNWHCDSTWLGGRVITTSTRTWALPTYNNHLYKQISSASTGASNDNHYFGHSTPWGYFDFNRFHCHFSPRDWQRLINNNWGFRPKRLNFKLFNIQVKEVTTNDGVTTIANNLTSTVQVFSDSEYQLPYVLGSAHQGCLPPSPADVFMIPQYGYLTLNNGSQAVGRSSFYCLEYFPSQMLRTGNNFTFSYTFEEVPFHSSYAHSQSLDRLMNPLIDQYLYYLNRTQNQSGSAQNKDLLFSRGSPAGMSVQPKNWLPGPCYRQQRVSKTKTDNNNSNFTWTGASKYNLNGRESIINPGTAMASHKDDKDKFFPMSGVMIFGKESAGASNTALDNVMITDEEEIKATNPVATERFGTVAVNFQSSNTDPATGDVHVMGALPGMVWQDRDVYLQGPIWAKIPHTDGHFHPSPLMGGFGLKHPPPQILIKNTPVPANPPAEFSATKFASFITQYSTGQVSVEIEWELQKENSKRWNPEVQYTSNYAKSANVDFTVDNNGLYTEPRPIGTRYLTRPL

SEQ ID NO: 770 - protein, 736 aa, Artificial Sequence
  source: /note="Description of Artificial Sequence: Synthetic polypeptide"
MAADGYFPDWLEDNLSEGIREWWDLKPGAPKPKANQQKQDDGRGLVLPGYKYLGPFNGLDKGEPVNAADAAALEHDKAYDQQLKAGDNPYLRYNHADAEFQERLQEDTSFGGNLGRAVFQAKKRVLEPFGLVEEGAKTAPGKKRPVEQSPQEPDSSSGIGRTGQQPAKKRLNFGQTGDSESVPDPQPLGEPPATPAAVGPTTMASGGGAPMADNNEGADGVGNASGNWHCDSTWLGDRVITTSTRTWALPTYNNHLYKQISSASTGASNDNHYFGYSTPWGYFDFNRFHCHFSPRDWQRLINNNWGFRPKRLNFKLFNIQVKEVTTNDGVTTIANNLTSTVQVFSDSEYQLPYVLGSAHQGCLPPFPADVFMIPQYGYLTLNNGSQAVGRSSFYCLEYFPSQMLRTGNNFTFSYTFEEVPFHSSYAHSQSLDRLMNPLIDQYLYYLNRTQNQSGSAQNKDLLFSRGSPAGMSVQPKNWLPGPCYRQQRVSKTKTDNNNSNFTWTGASKYNLNGRESIINPGTAMASHKDDEDKFFPMSGVMIFGKESAGASNTALDNVMITDEEEIKATNPVATERFGTVAVNFQSSSPDPATGDVHVMGALPGMVWQDRDVYLQGPIWAKIPHTDGHFHPSPLMGGFGLKHPPPQILIKNTPVPANPPAEFSATKFASFITQYSTGQVSVEIEWELQKENSKRWNPEVQYTSNYAKSANVDFTVDNNGLYSEPRPIGTRYLTRPL

SEQ ID NO: 771 - protein, 736 aa, Artificial Sequence
  source: /note="Description of Artificial Sequence: Synthetic polypeptide"
MAADGYLPDWLEDNLSEGIREWWDLKPGAPKPKANQQKQDDGRGLVLPGYKYLGPFNGLDKGEPVNAADAAALEHDKAYDQQLKAGDNPYLRYNHADAEFQERLQEDTSFGGNLGRAVFQAKKRVLEPFGLVEEGAKTAPGKKRPVEQSPQEPDSSSGIGKTGQQPAKKRLNFGQTGDSESVPDPQPLGEPPATPAAVGPTTMASGGGAPMADNNEGADGVGNASGNWHCDSTWLGDRVITTSTRTWALPTYNNHLYKQTSSASTGASNDNHYFGYSTPWGYFDFNRFHCHFSPRDWQRLINNNWGFRPKRLNFKLFNIQVKEVTTNDGVTTIANNLTSTVQVFSDSEYQLPYVLGSAHQGCLPPFPADVFMIPQYGYLTLNNGSQAVGRSSFYCLEYFPSQMLRTGNNFTFSYTFEEVPFHSSYAHSQSLDRLMNPLIDQYLYYLNRTQNQSGSAQNKDLLFSRGSPAGMSVQPKNWLPGPCYRQQRVSKTKTDYNNSNFTWTGASKYNLNGRESIINPGTAMASHKDDEDKFFPMSGVMIFGKESAGASNTALDNVMITDEEEIKATNPVATERFGTVAVNFQSSSTDPATGDVHVMGALPGMVWQDRDVYLQGPIWAKIPHTDGHFHPSPLMGGFGLKHPPPQILIKNTPVPANPPAEFSATKFASFITQYSTGQVSVEIEWELQKENSKRWNPEVQYTSNYAKSANVDFTVDNNGLYTEPRPIGTRYLTRPL

SEQ ID NO: 772 - protein, 736 aa, Artificial Sequence
  source: /note="Description of Artificial Sequence: Synthetic polypeptide"
MAADGYPPDWLEDNLSEGIREWWDLKPGVPKPKANQQKQDDGRGLVLPGYKYLGPFNGLDKGEPVNAADAAALEHDKAYDQQLKAGDNPYLRYNHADAEFQERLQEDTSFGGNLGRAVFQAKKRVLEPFGLVEEGAKTAPGKKRPVEQSPQEPDSSSGIGKTGQQPAKKRLNFGQTGDSESVPDPQPLGEPPATPAAVGPTTMASGGGAPMADNNEGADGVGNASGNWHCDSTWLGDRVITTSTRTWALPTYNNHLYKQISSASTGASNDNHYFGYSTPWGYFDFNRFHCHFSPRDWQRLINNNWGFRPKRLNFKLFNIQVKEVTTNDGVTTIANNLTSTVQVFSDSEYQLPYVLGSAHQGCLPPFPADVFMIPQYGYLTLNNGSQAVGRSSFYCLEYFPSQMLRTGNNFTFSYTFEEVPFHSSYAHSQSLDRLMNPLIDQYLYYLNRTQNQSGSAQNKDLLFSRGSPAGMSVQPKNWLPGPCYRQQRVSKTKTDNNNSNFTWTGASKYNLNGRESIINPGTAMASHKDDEDKFFPMSGVMIFGKESAGASNTALDNVMITDEEEIKATNPVATERFGTVAVNFQSSSTDPATGDVHVMGALPGMVWQDRDVYLQGPIWAKIPHTDGHFHPSPLMGGFGLKHPPPQILIKNTPVPANPPAEFSATKFASFITQYSTGQVSVEIEWELQKENSKRWNPEVQYTSNYAKSANVDFTVDNNGLYTEPRPIGTRYLTRPL

SEQ ID NO: 773 - protein, 732 aa, Artificial Sequence
  source: /note="Description of Artificial Sequence: Synthetic polypeptide"
MAADGYLPDWLEDNLSEGIREWWDLKPGAPKPKANQQKQDDGRGLVLPGYKYLGPFNGLDKGEPVNAADAAALEHDKAYDQQLKAGDNPYLRYNHADAEFQERLQEDTSFGGNLGRAVFQAKKRVLEPFGLVEEGAKTAPGKKRPVEQSPQEPDSSSGIGKTGQQPAKKRLNFGQTGDSESVPDPQPLGEPPATPAAVGPTTMASGGGAPMADNNEGADGVGNASGNWHCDSTWLGDRVITTSTRTWALPTYNNHLYKQISSASTGASNDNHYFGYSTPWGYFDFNRFHCHFSPRDWQRLINNNWGFRPKRLNFKLFNIQVKEVTTNDGVTTIANNLTSTVQAFSDSEYQLPYVLGSAHQGCLPPFPADVFMIPQYGYLTLNNGSQAVGRSSFYCLEYFPSQMLRTGNNFTFSYTFEEVPFHSSYAHSQSLDRLMNPLIDPYLYYLNRTQNQSGSAQNKDLLFSRGSPAGMSVQPKNWLPGPCYRQQRVSKTKTDNNNSNFTWTGASKYNLNGRESIINPGTAMASHKDDEDKFFPMSGVMIFGKESAGASNTALDNVMITDEEEIKATNPVATERFGTVAVNFQSSSTDPATGDVHVMGALPGMVWQDRDVYLQGPIWAKIPHTDGHFHPSPLMGGFGLKHPPPQILIKNTPVPANPPAEFSATKFASFITQYSTGQVSVEIEWELQKENSKRWNPEVQYTSNYAKSANVDFTVDNNGLYTEPRPIGTRYL

SEQ ID NO: 774 - protein, 736 aa, Artificial Sequence
  source: /note="Description of Artificial Sequence: Synthetic polypeptide"
MAADGYLPDWLEDNLSEGIREWWDLKPGAPKPKANQQKQDDGRGLVLPGYKYLGPFNGLDKGEPVNAADAAALEHDKAYDQQLKAGDNPYLRYNHADAEFQERLQEDTSFGGNLGRAVFQAKKRVLEPFGLVEEGAKTAPGKKRPVEQSPQEPDSSSGIGKTGQQPAKKRLNFGQTGDSESVPDPQPLGEPPATPAAVGPTTMASGGGAPMADNNEGADGVGNASGNWHCDSTWLGDRVITTSTRTWALPTYNNHLYKQISSASTGASNDNHYFGYSTPWGYFDFNRFHCHFSPRDWQRLINNNWGFRPKRLNFKLFNIQVKEVTTNDGVTTIANNLTSTVQVFSDSEYQLPYVLGSAHQGCLPPFPADVFMIPQYGYLTLNNGSQAVGRSSFYCLEYFPSQMLRTGNNFTFSYTFEEVPFHSSYAHSQSLDRLMNPLIDQYLYYLNRTQNQSGSAQNKDLLFSRGSPAGMSVQPKNWLPGPCYRQQRVSKTKTDNNNSNFTWTGASKYNLNGRESIINPGTAMASHKDDEDKFFPMSGVMIFGKESAGASNTALDNVMITDEEEIKATNPVATERFGTVAVNFQSSSTDPATGDVHVMGALPGMVWQDRDVYLQGPIWAKIPHTDGHSHPSPLMGGFGLKHPPPQILIKNTPVPANPPAEFSATKFASFITQYSTGQVSVEIEWELQKENSKRWNPEVQYTSNYAKSANVDFTVDNNGLYTEPRPIGTRYLTRPL

SEQ ID NO: 775 - protein, 736 aa, Artificial Sequence
  source: /note="Description of Artificial Sequence: Synthetic polypeptide"
MAADGYLPDWLEDNLSEGIREWWDLKPGAPKPKANQQKQDDGRGLVLPGYKYLGPFNGLDKGEPVNAADAAALEHDKAYDQQLKAGDNPYLRYNHADAEFQERLQEDTSFGGNLGRAVFQAKKRVLEPFGLVEEGAKTAPGKKRPVEQSPQEPDSSSGIGKTGQQPAKKRLNFGQTGDSESVPDPQPLGEPPATPAAVGPTTMASGGGAPMADNNEGADGVGNASGNWHCDSTWLGDRVITTSTRTWALPTYNNHLYKQISSASTGASNDNHYFGYSTPWGYFDFNRFHCHFSPRDWQRLINNNWGFRPKRLNFKLFNIQVKEVTTNDGVTTIANNLTSTVQVFSDSEYQLPYVLGSAHQGCLPPFPADVFMIPQYGYLTLNNGSQAVGRSSFYCLEYFPSQMLRTGNNFTFSYTFEEVPFHSSYAHSQSLDRLMNPLIDLYLYYLNRTQNQSGSAQNKDLLFSRGSPAGMSVQPKNWLPGPCYRQQRVSKTKTDNNNSNFTWTGASKYNLNGRESIINPGTAMASHKDDEDKFFPMSGVMIFGKESAGTSNTALDNVMITDEEEIKATNPVATERFGTVAVNFQSSSTDPATGDVHVMGALPGMVWQDRDVYLQGPIWAKIPHTDGHFHPSPLMGGFGLKHPPPQILIKNTPVPANPPAEFSATKFASFITQYSTGQVSVEIEWELQKENSKRWNPEVQYTSNYAKSANVDFTVDNNGLYTEPRPIGTRYLTRPL

SEQ ID NO: 776 - protein, 736 aa, Artificial Sequence
  source: /note="Description of Artificial Sequence: Synthetic polypeptide"
MAADGYLPDWLEDSLSEGIREWWDLKPGAPKPKANQQKQDDGRGLVLPGYKYLGPFNGLDKGEPVNAADAAALEHDKAYDQQLKAGDNPYLRYNHADAEFQERLQEDTSFGGNLGRAVFQAKKRVLEPFGLVEEGAKTAPGKKRPVEQSPQEPDSSSGIGKTGQQPAKKRLNFGQTGDSESVPDPQPLGEPPATPAAVGPTTMASGGGAPMADNNEGADGVGNASGNWHCDSTWLGDRVITTSTRTWALPTYNNHLYKQISSASTGASNDNHYFGYSTPWGYFDFNRFHCHFSPRDWQRLINNNWGFRPKRLNFKLFNIQVKEVTTNDGVTTIANNLTSTVQVFSDSEYQLPYVLGSAHQGCLPPFPADVFMIPQYGYLTPNNGSQAVGRSSFYCLEYFPSQMLRTGNNFTFSYTFEEVPFHSSYAHSQSLDRLMNPLIDQYQYYLNRTQNQSGSAQNKDLLFSRGSPAGMSVQPKNWLPGPCYRQQRVSKTKTDNNNSNFTWTGASKYNLNGRESIINPGTAMASHKDDEDKFFPMSGVMIFGKESAGASNTALDNVMITDEEEIKATNPVATERFGTVAVNFQSSSTDPATGDVHVMGALPGMVWQDRDVYLQGPIWAKIPHTDGHFHPSPLMGGFGLKHPPPQILIKNTPVPANPPAEFSATKFASFITQYSTGQVSVEIEWELQKENSKRWNPEVQYTSNYAKSANVDFTVDNNGLYTEPRPIGTRYLTRPL

SEQ ID NO: 777 - protein, 736 aa, Artificial Sequence; identical to SEQ ID NO: 768
  source: /note="Description of Artificial Sequence: Synthetic polypeptide"

SEQ ID NO: 778 - protein, 735 aa, Artificial Sequence
  source: /note="Description of Artificial Sequence: Synthetic polypeptide"
MAADGYLPDWLEDTLSEGIRQWWKLKPGPPPPKPAERHKDDSRGLVLPGYKYLGPFNGLDKGEPVNEADAAALEHDKAYDRQLDSGDNPYLKYNHADAEFQERLKEDTSFGGNLGRAVFQAKKRVLEPLGLVEEPVKTAPGKKRPVEHSPVEPDSSSGTGKAGQQPARKRLNFGQTGDADSVPDPQPLGQPPAAPSGLGTNTMATGSGAPMADNNEGADGVGNSSGNWHCDSTWMGDRVITTSTRTWALPTYNNHLYKQISSQSGASNDNHYFGYSTPWGYFDFNRFHCHFSPRDWQRLINNNWGFRPKRLNFKLFNIQVKEVTQNDGTTTIANNLTSTVQVFTDSEYQLPYVLGSAHQGCLPPFPADVFMVPQYGYLTLNNGSQAVGRSSFYCLEYFPSQMLRTGNNFTFSYTFEDVPFHSSYAHSQSLDRLMNPLIDQYLYYLSRTNTPSGTTTQSRLQFSRAGASDIRDQSRNWLPGPCYRQQRVSKTSADNNNSEYSWTGATKYHLNGRDSLVNPGPAMASHKDDEEKFFPQSGVLIFGKQGSEKTNVDIEKVMITDEEEIRTTNPVATEQYGSVSTNLQRGNRQAATADVNTQGVLPGMVWQDRDVYLQGPIWAKIPHTDGHFHPSPLMGGFGLKHPPPQILIKNTPVPANPSTTFSAAKFASFITQYSTGQVSVEIEWELQKENSKRWNPEIQYTSNYNKSVNVDFTVDTNGVYSEPRPIGTRYLTRNL

SEQ ID NO: 779 - DNA, 2211 bp, Artificial Sequence
  source: /note="Description of Artificial Sequence: Synthetic polynucleotide"
atggctgctgacggttatcttccagattggctcgaggacaacctttctgaaggcattcgtgagtggtgggctctgaaacctggagtccctcaacccaaagcgaaccaacaacaccaggacaaccgtcggggtcttgtgcttccgggttacaaatacctcggacccggtaacggactcgacaaaggagagccggtcaacgaggcggacgcggcagccctcgaacacgacaaagcttacgaccagcagctcaaggccggtgacaacccgtacctcaagtacaaccacgccgacgccgagtttcaggagcgtcttcaagaagatacgtcttttgggggcaaccttggcagagcagtcttccaggccaaaaagaggatccttgagcctcttggtctggttgaggaagcagctaaaacggctcctggaaagaagaggcctgtagatcagtctcctcaggaaccggactcatcatctggtgttggcaaatcgggcaaacagcctgccagaaaaagactaaatttcggtcagactggcgactcagagtcagtcccagaccctcaacctctcggagaaccaccagcagcccccacaagtttgggatctaatacaatggcttcaggcggtggcgcaccaatggcagacaataacgagggtgccgatggagtgggtaattcctcaggaaattggcattgcgattcccaatggctgggcgacagagtcatcaccaccagcaccagaacctgggccctgcccacttacaacaaccatctctacaagcaaatctccagccaatcaggagcttcaaacgacaaccactactttggctacagcaccccttgggggtattttgactttaacagattccactgccacttctcaccacgtgactggcagcgactcattaacaacaactggggattccggcccaagaaactcagcttcaagctcttcaacatccaagttaaagaggtcacgcagaacgatggcacgacgactattgccaataaccttaccagcacggttcaagtgtttacggactcggagtatcagctcccgtacgtgctcgggtcggcgcaccaaggctgcctcccgccgtttccagcggacgtcttcatggtccctcagtatggatacctcaccctgaacaacggaagtcaagcggtgggacgctcatccttttactgcccggagtacttcccttcgcagatgctaaggactggaaataacttccaattcagctataccttcgaggatgtaccttttcacagcagctacgctcacagccagagtttggatcgcttgatgaatcctcttattgatcagtatctgtactacctgaacagaacgcaaggaacaacctctggaacaaccaaccaatcacggctgctttttagccaggctgggcctcagtctatgtctttgcaggccagaaattggctacctgggccctgctaccggcaacagagactttcaaagactgctaacgacaacaacaacagtaactttccttggacagcggccagcaaatatcatctcaatggccgcgactcgctggtgaatccaggaccagctatggccagtcacaaggacgatgaagaaaaatttttccctatgcacggcaatctaatatttggcaaagaagggacaacggcaagtaacgcagaattagataatgtaatgattacggatgaagaagagattcgtaccaccaatcctgtggcaacagagcagtatggaactgtggcaaataacttgcagagctcaaatacagctcccacgactagaactgtcaatgatcagggggccttacctggcatggtgtggcaagatcgtgacgtgtaccttcaaggacctatctgggcaaagattcctcacacggatggacactttcatccttctcctctgatgggaggctttggactgaaacatccgcctcctcaaatcatgatcaaaaatactccggtaccggcaaatcctccgacgactttcagcccggccaagtttgcttcatttatcactcagtactccactggacaggtcagcgtggaaattgagtgggagctacagaaagaaaacagcaaacgttggaatccagagattcagtacacttccaactacaacaagtctgttaatgtggactttactgtagacactaatggtgtttatagtgaacctcaccctattggaacccggtatctcacacgaaacttgtaa

SEQ ID NO: 780 - DNA, 2211 bp, Artificial Sequence
  source: /note="Description of Artificial Sequence: Synthetic polynucleotide"
atggctgctgatggttatcttccagattggctcgaggacaacctttctgaaggcattcgtgagtggtgggctctgaaacctggagtccctcaacccaaagcgaaccaacaacaccaggacaaccgtcggggtcttgtgcttccgggttacaaatacctcggacccggtaacggactcgacaaaggagagccggtcaacgaggcggacgcggcagccctcgaacacgacaaagcttacgaccagcagctcaaggccggtgacaacccgtacctcaagtacaaccacgccgacgccgagtttcaggagcgtcttcaagaagatacgtcttttgggggcaaccttggcagagcagtcttccaggccaaaaagaggatccttgagcctcttggtctggttgaggaagcagctaaaacggctcctggaaagaagaggcctgtagatcagtctcctcaggaaccggactcatcatctggtgttggcaaatcgggcaaacagcctgccagaaaaagactaaatttcggtcagactggcgactcagagtcagtcccagaccctcaacctctcggagaaccaccagcagcccccacaagtttgggatctaatacaatggcttcaggcggtggcgcaccaatggcagacaataacgagggtgccgatggagtgggtaattcctcaggaaattggcattgcgattcccaatggctgggcgacagagtcatcaccaccagcaccagaacctgggccctgcccacttacaacaaccatctctacaagcaaatctccagccaatcaggagcttcaaacgacaaccactactttggctacagcaccccttgggggtattttgactttaacagattccactgccacttctcaccacgtgactggcagcgactcattaacaacaactggggattccggcccaagaaactcagcttcaagctcttcaacatccaagttaaagaggtcacgcagaacgatggcacgacgactgttgccaataaccttaccagcacggttcaagtgtttacggactcggagtatcaactcccgtacgtgctcgggtcggcgcaccaaggctgtctcccgccgtttccagcggacgtcttcatggtccctcagtatggatacctcaccctgaacaacggaagtcaagcggtgggacgctcatccttttactgcctggagtacttcccttcgcagatgctaaggactggaaataacttccaattcagctataccttcgaggatgtaccttttcacagcagctacgctcacagccagagtttggatcgcttgatgaatcctcttattgatcagtatctgtactacctgaacagaacgcaaggaacaacctctggaacaaccaaccaatcacggctgctttttagccaggctgggcctcagtctatgtctttgcaggccagaaattggctacctgggccctgctaccggcaacagagactttcaaagactgctaacgacaacaacaacagtaactttccttggacagcggccagcaaatatcatctcaatggccgcgactcgctggtgaatccaggaccagctatggccagtcacaaggacgatgaagaaaaatttttccctatgcacggcaatctaatatttggcaaagaagggacaacggcaagtaacgcagaattagataatgtaatgattacggatgaagaagagattcgtaccaccaatcctgtggcaacagagcagtatggaactgtggcaaataacttgcagagctcaaatacagctcccacgactagaactgtcaatgatcagggggccttacctggcatggtgtggcaagatcgtgacgtgtaccttcaaggacctatctgggcaaagattcctcacacggatggacactttcatccttctcctctgatgggaggctttggactgaaacatccgcctcctcaaatcatgatcaaaaatactccggtaccggcaaatcctccgacgactttcagcccggccaagtttgcttcatttatcactcagtactccactggacaggtcagcgtggaaattgagtgggagctacagaaagaaaacagcaaacgttggaatccagagattcagtacacttccaactacaacaagtctgttaatgtggactttactgtagacactaatggtgtttatagtgaacctcgccctattggaacccggtatctcacacgaaacttgtaa

SEQ ID NO: 781 - DNA, 2211 bp, Artificial Sequence
  source: /note="Description of Artificial Sequence: Synthetic polynucleotide"
atggctgctgacggttatcttccagattggctcgaggacaacctttctgaaggcattcgtgagtggtgggctctgaaacctggagtccctcaacccaaagcgaaccaacaacaccaggacaaccgtcggggtcttgtgcttccgggttacaaatacctcggacccggtaacggactcgacaaaggagagccggtcaacgaggcggacgcggcagccctcgaacacgacaaagcttacgaccagcagctcaaggccggtgacaacccgtacctcaagtacaaccacgccgacgccgagtttcaggagcgtcttcaagaagatacgtcttttgggggcaaccttggcagagcagtcttccaggccaaaaagaggatccttgagcctcttggtctggttgaggaagcagctaaaacggctcctggaaagaagaggcctgtagatcagtctcctcaggaaccggactcatcatctggtgttggcaaatcgggcaaacagcctgccagaaaaagactaaatttcggtcagactggcgactcagagtcagtcccagaccctcaacctctcggagaaccaccagcagcccccacaagtttgggatctaatacaatggcttcaggcggtggcgcaccaatggcagacaataacgagggtgccgatggagtgggtaattcctcaggaaattggcattgcgattcccaatggctgggcgacagagtcatcaccaccagcaccagaacctgggccctgcccacttacaacaaccatctctacaagcaaatctccggccaatcaggagcttcaaacgacaaccactactttggctacagcaccccttgggggtattttgactttaacagattccactgccacttctcaccacgtgactggcagcgactcattaacaacaactggggattccggcccaagaaactcagcttcaagctcttcaacatccaagttaaagaggtcacgcagaacgatggcacgacgactattgccaataaccttaccagcacggttcaagtgtttacggactcggagtatcagctcccgtacgtgctcgggtcggcgcaccaaggctgtctcccgccgtttccagcggacgtcttcatggtccctcagtatggatacctcaccctgaacaacggaagtcaagcggtgggacgctcatccttttactgcctggagtacttcccttcgcagatgctaaggactggaaataacttccaattcagctataccttcgaggatgtaccttttcacagcagctacgctcacagccagagtttggatcgcttgatgaatcctcttattgatcagtatctgtactacctgaacagaacgcaaggaacaacctctggaacaaccaaccaatcacggctgctttttagccaggctgggcctcagtctatgtctttgcaggccagaaattggctacctgggccctgctaccggcaacagagactttcaaagactgctaacggcaacaacaacagtaactttccttggacagcggccagcaaatatcatctcaatggccgcgactcgctggtgaatccaggaccagctatggccagtcacaaggacgatgaagaaaaatttttccctatgcacggcaatctaatatttggcaaagaagggacaacggcaagtaacgcagaattagataatgtaatgattacggatgaagaagagattcgtaccaccaatcctgtggcaacagagcagtgtggaactgtggcaaataacttgcagagctcaaatacagctcccacgactagaactgtcaatgatcagggggccttacctggcatggtgtggcaagatcgtgacgtgtaccttcaaggacctatctgggcaaagattcctcacacggatggacactttcatccttctcctctgatgggaggctttggactgaaacatccgcctcctcaaatcatgatcaaaaatactccggtaccggcaaatcctccgacgactttcagcccggccaagtttgcttcatttatcactcagtactccactggacaggtcagcgtggaaattgagtgggagctacagaaagaaaacagcaaacgttggaatccagagattcagtacacttccaactacaacaagtctgttaatgtggactttactgtagacactaatggtgtttatagtgaacctcgccctattggaacccggtatctcacacgaaacttgtaa

SEQ ID NO: 782 - DNA, 2212 bp, Artificial Sequence
  source: /note="Description of Artificial Sequence: Synthetic polynucleotide"
  modified_base (1283)..(1283): a, c, g or t
atggctgctgacggttatcttccagattggctcgaggacaacctttctgaaggcattcgtgagtggtgggctctgaaacctggagtccctcaacccaaagcgaaccaacaacaccaggacaaccgtcggggtcttgtgcttccgggttacaaatacctcggaccgggtaacggactcgacaaaggagagccggtcaacgaggcggacgcggcagccctcgaacacgacaaagcttacgaccagcagctcaaggccggtgacaacccgtacctcaagtacaaccacgccgacgccgagtttcaggagcgtcttcaagaagatacgtcttttgggggcaaccttggcagagcagtcttccaggccaaaaagaggatccttgagcctcttggtctggttgagggagcagctaaaacggctcctggaaagaagaggcctgtagatcagtctcctcaggaaccggactcatcatctggtgttggcaaatcgggcaaacagcctgccagaaaaagactaaatttcggtcagactggcgactcagagtcagtcccagaccctcaacctctcggagaaccaccagcagcccccacaagtttgggatctaatacaatggcttcaggcggtggcgcaccaatggcagacaataacgagggtgccgatggagtgggtaattcctcaggaaattggcattgcgattcccaatggctgggcgacagagtcatcaccaccagcaccagaacctgggccctgcccacttacaacagccatctctacaagcaaatctccagccaatcaggagcttcaaacgacaaccactactttggctacagcaccccttgggggtattttgactttaacagattccactgccacttctcaccacgtgactggcagcgactcattaacaacaactggggattccggcccaagaaactcagcttcaagctcttcaacatccaagttaaagaggtcacgcagaacgatggcacgacgactattgccaataaccttaccagcacggtccaagtgtttacggactcggagtatcagctcccgtacgtgctcgggtcggcgcaccaaggctgtctcccgccgtttccagcggacgccttcatggtccctcagtatggatacctcaccctgaacaacggaagtcaagcggtgggacgctcatccttttactgcctggagtacttcccttcgcagatgctaaggactggaaataacttccaattcagctataccttcgaggatgtaccttttcacggcagctacgctcacagccngagtttggatcgcttgatgaatcctcttattgatcagtatctgtactacctgaacagaacgcaaggaacaacctctggaacaaccaaccaatcacggctgctttttagccaggctgggcctcagtctatgtctttgcaggccagaaattggctacctgggccctgctaccggcaacagagacttttcaaagactgctaacgacaacaacaacagtaactttccttggacagcggccagcaaatatcatctcaatggccgcgactcgctggtgaatccaggaccagctatggccagtcacaaggacgatgaagaaaaatttttccctatgcacggcaatctaatatttggcaaagaagggacaacggcaagtaacgcagaattagataatgtaatgattacggatgaagaagagattcgtaccaccaatcctgtggcaacagagcagtatggaactgtggcaaataacttgcagagctcaaatacagctcccacgactagaactgtcaatgatcagggggccttacctggcatggtgtggcaagatcgtgacgtgtaccttcaaggacctatctgggcaaagattcctcacacggatggacactttcatccttctcctctgatgggaggctttggactgaaacatccgcctcctcaaatcatgatcaaaaatactccggtaccggcaaatcctccgacgactttcagcccggccaagtttgcttcatttatcactcagtactccactggacaggtcagcgtggaaattgagtgggagctacagaaagaaaacagcaaacgttggaatccagagattcagtacacttccaactacaacaagtctgttaatgtggactttactgtagacactaatggtgtttatagtgaacctcgccctattggaacccggtatctcacacgaaactcgtaa

SEQ ID NO: 783 - DNA, 2212 bp, Artificial Sequence
  source: /note="Description of Artificial Sequence: Synthetic polynucleotide"
atggctgctgacggttatcttccagattggctcgaggacaacctttctgaaggcattcgtgagtggtgggctctgaaacctggagtccctcaacccaaagcgaaccaacaacaccaggacaaccgtcggggtcttgtgcttccgggttacaaatacctcggacccggtaacggactcgacaaaggagagccggtcaacgaggcggacgcggcagccctcgaacacgacaaagcttacgaccagcagctcaaggccggtgacaacccgtacctcaagtacaaccacgccgacgccgagtttcaggagcgtcttcaagaagatacgtcttttgggggcaaccttggcagagcagtcttccaggccaaaaagaggatccttgagcctcttggtctggttgagggagcagctaaaacggctcctggaaagaagaggcctgtagatcagtctcctcaggaaccggactcatcatctggtgttggcaaatcgggcaaacagcttgccagaaaaagactaaatttcggtcagactggcgactcagagtcagtcccagaccctcaacctctcggagaaccaccagcagcccccacaagtttgggatctaatacaatggcttcaggcggtggcgcaccaatggcagacaataacgagggtgccgatggagtgggtaattcctcaggaaattggcattgcgattcccaatggctgggcgacagagtcatcaccaccagcaccagaacctgggccctgcccacttacaacagccatctctacaagcaaatctccggccaatcaggagcttcaaacgacaaccactactttggctacagcaccccctgggggtattttgactttaacagattccactgccacttctcaccacgtgactggcagcgactcattaacaacaactggggattccggcccaagaaactcagcttcaagctcttcaacatccaagttaaagaggtcacgcagaacgatggcacgacgactattgccaataaccttaccagcacggttcaagtgtttacggactcggagtatcagctcccgtacgtgctcgggtcggcgcaccaaggctgtctcccgccgtttccagcggacgtcttcatggtccctcagtatggatacctcaccctgaacaacggaagtcaagcggtgggacgctcatccttttactgcctggagtacttcccttcgcagatgctaaggactggaaataacttccaattcagctataccttcgaggatgtaccttttcacagcagctacgctcacagccagagtttggatcgcttgatgaatcctcttattgatcagtatctgtactacctgaacagaacgcaaggaacaacctctggaacaaccaaccaatcacggctgctttttagccaggctgggcctcagtctatgtctttgcaggccagaaattggctacctgggccctgctaccggcaacagagactttcaaagactgctaacgacaacaacaacagtaactttccttggacagcggccagcaaatatcatctcaatggccgcgactcgctggtgaatcccaggaccagctatggccagtcacaaggacgatgaagaaaaatttttccctatgcacggcaatctaatatttggcaaagaagggacaacggcaagtaacgcagaattagataatgtaatgattacggatgaagaagagattcgtaccaccaatcctgtggcaacagagcagtatggaactgtggcaaataacttgcagagctcaaatacagctcccacgactagaactgtcaatgatcagggggccttacctggcatggtgtggcaagatcgtgacgtgtaccttcaaggacctatctgggcaaagattcctcacacggatggacactttcatccttctcctctgatgggaggctttggactgaaacatccgcctcctcaaatcatgatcaaaaatactccggtaccggcaaatcctccgacgactttcagcccggccaagtttgcttcatttatcactcagtactccactggacaggtcagcgtggaaattgagtgggagctacagaaagaaaacagcaaacgttggaatccagagattcagtacacttccaactacaacaagtctgttaatgtggactttactgtagacactaatggtgtttatagtgaacctcgccctattggaacccggtatctcacacgaaacttgtaa

SEQ ID NO: 784 - DNA, 2212 bp, Artificial Sequence
  source: /note="Description of Artificial Sequence: Synthetic polynucleotide"
atggctgctgacggttatcttccagattggctcgaggacaacctttctgaaggcattcgtgagtggtgggctctgaaacctggagtccctcaacccaaagcgaaccaacaacaccaggacgaccgtcggggtcttgtgcttccgggttacaaatacctcggacccggtaacggactcgacaaaggagagccggtcaacgaggcggacgcggcagccctcgaacacgacaaagcttacgaccagcagctcaaggccggtgacaacccgtgcctcaagtacaaccacgccgacgccgagtttcaggagcgtcttcaagaagatacgtcttttgggggcaaccttggcagagcagtcttccaggccaaaaagaggatccttgagcctcttggtctggttgaggaagcagctaaaacggctcctggaaagaagaggcctgtagatcagtctcctcaggaaccggactcatcatctggtgttggcaaatcgggcaaacagcctgccagaaaaagactaaatttcggtcagactggcgactcagagtcagtcccagaccctcaacctctcggagaaccaccagcagcccccacaagtttgggatctaatacaatggcttcaggcggtagcgcaccaatggcagacaataacgagggtgccgatggagtgggtaattcctcaggaaattggcattgcgattcccaatggctgggcgacagagtcatcaccaccagcaccagaacctgggccctgcccacttacaacaaccatctctacaagcaaatctccagccaatcaggagcttcaaacgacaaccactactttggctacagcaccccttgggggtattttgactttaacagattccactgccacttctcaccacgtgactggcagcgactcattaacaacaactggggattccggcccaagaaactcagcttcaagctcttcaacatccaagttaaagaggtcacgcagaacgatggcacgacgactattgccaataaccttaccagcacggttcaagtgtttacggactcggagtatcagctcccgtacgtgctcgggtcggcgcaccaaggctgtctcccgccgtttccagcggacgtcttcatggtccctcagtatggatacctcaccctgaacaacggaagtcaagcggtgggacgctcatccttttactgcctggagtacttcccttcgcagatgctaaggactggaaataacttccaattcagctataccttcgaggatgtaccttttcacagcagctacgctcacagccagagtttggatcgcttgatggatcctcttattgatcagtatctgtactacctgaacagaacgcaaggaacaacctctggaacaaccaaccaatcacggctgctttttagccaggctgggcctcagtctatgtctttgcaggccagaaattggctacctgggccctgctaccggcaacagagactttcaaagactgctaacgacaacaacaacagtaactttccttggacagcggccagcaaatatcatctcaatggccgcgactcgctggtgaatccaggaccagctatggccagtcacaaaggacgatgaagaaaaatttttccctatgcacggcaatctaatatttggcaaagaagggacaacggcaagtaacgcagaattagataatgtaatgattacggatgaagaagagattcgtaccaccaatcctgtggcaacagagcagtatggaactgtggcaaataacttgcagagctcaaatacagctcccacgactagaactgtcaatgatcagggggccttacctggcatggtgtggcaagatcgtgacgtgtaccttcaaggacctatctgggcaaagattcctcacacggatggacactttcatccttctcctctgatgggaggctttggactgaaacatccgcctcctcaaatcatgatcaaaaatactccggtaccggcaaatcctccgacgactttcagcccggccaagtttgcttcatttatcactcagtactccactggacaggtcagcgtggaaattgagtgggagctacagaaagaaaacagcaaacgttggaatccagagattcagtacacttccaactacaacaagtctgttaatgtggactttactgtagacactaatggtgtttatagtgaacctcgccctattggaacccggtatctcacacgaaacctgtaa

SEQ ID NO: 785 - DNA, 2211 bp, Artificial Sequence
  source: /note="Description of Artificial Sequence: Synthetic polynucleotide"
atggctgctgacggttatcttccagattggctcgaggacaacctttctgaaggcattcgtgagtggtgggctctgaaacctggagtccctcaacccaaagcgaaccaacaacaccaggacgaccgtcggggtcttgtgcttccgggttacaaatacctcggacccggtaacggactcgacaaaggagagccggtcaacgaggcggacgcggcagccctcgaacacgacaaagcttacgaccagcagctcaaggccggtgacaacccgtacctcaagtacaaccacgccgacgccgagtttcaggagcgtcttcaagaagatacgtcttttgggggcaaccttggcagagcagtcttccaggccaaaaagaggatccttgagcctcttggtctggttgaggaagcagctaaaacggctcctggaaagaagaggcctgtagatcagtctcctcaggaaccggactcatcatctggtgttggcaaatcgggcaaacagcctgccagaaaaagactaaatttcggtcagactggcgactcagagtcagtcccagaccctcaacctctcggagaaccaccagcagcccccacaagtttgggatctaatacaatggcttcaggcggtggcgcaccaatggcagacaataacgagggtgccgatggagtgggtaattcctcaggaaattggcattgcgattcccaatggctgggcaacagagtcatcaccaccagcaccagaacctgggccctgcccacttacaacaaccatctctacaagcaaatctccagccaatcaggagcttcaaacgacaaccactactttggctacagcaccccttgggggtattttgactttaacagattccactgccacttctcaccacgtgactggcagcgactcattaacaacaactggggattccggcccaagaaactcagcttcaagctcttcaacatccaagttaaagaggtcacgcagaacgatggcacgacgactattgccaataaccttaccagcacggttcaagtgtttacggactcggagtatcagctcccgtacgtgctcgggtcggcgcaccaaggctgtctcccgccgtttccagcggacgtcttcatggtccctcagtatggatacctcaccctgaacaacggaagtcaagcggtgggacgctcatccttttactgcctggagtacttcccttcgcagatgctaaggactggaaataacttccaattcagctataccttcgaggatgtaccttttcacagcagctacgctcacagccagagtttggatcgcttgatgaatcctcttattgatcagtatctgtactacctgaacagaacgcaaggaacaacctctggaacaaccaaccaatcacggctgctttttagccaggctgggcctcagtctatgtctttgcaggccagaaattggctacctgggccctgctaccggcaacagagactttcaaagactgctaacgacaacaacaacagtaactttccttggacagcggccagcaaatatcatctcaatggccgcgactcgctggtgaatccaggaccagctatggccagtcacaaggacgatgaagaaaaatttttccctatgcacggcaatctaatatttggcaaagaagggacaacggcaagtaacgcagaattagataatgtaatgattacggatgaagaagagattcgtaccaccaatcctgtggcaacagagcagtatggaactgtggcaaataacttgcagagctcaaatacagctcccacgactagaactgtcaatgatcagggggccttacctggcatggtgtggcaagatcgtgacgtgtaccttcaaggacctatctgggcaaagattcctcacacggatggacactttcatccttctcctctgatgggaggctttggactgaaacatccgcctcctcaaatcatgatcaaaaatactccggtaccggcaaatcctccgacgactttcagcccggccaagtttgcttcatttatcactcagtactccactggacaggtcagcgtggaaattgagtgggagctacagaaagaaaacagcaaacgttggaatccagagattcagtacacttccaactacaacaagtctgttaatgtggactttactgtagacactaatggtgtttatagtgaacctcgccctattggaacccggtatctcacacgaaacttgtaa

SEQ ID NO: 786 - DNA, 2211 bp, Artificial Sequence
  source: /note="Description of Artificial Sequence: Synthetic polynucleotide"
atggctgctgacggttatcttccagattggctcgaggacaacctttctgaaggcattcgtgagtggtgggctctgaaacctggagtccctcaacccaaagcgaaccaacaacaccaggacgaccgtcggggtcttgtgcttccgggttacaaatacctcggacccggtaacggactcgacaaaggagagccggtcaacgaggcggacgcggcagccctcgaacacgacaaagcttacgaccagcagctcaaggccggtgacaacccgtacctcaagtacaaccacgccgacgccgagtttcaggagcgtcttcaagaagatacgtcttttgggggcaaccttggcagagcagtcttccaggccaaaaagaggatccttgagcctcttggtctggttgaggaagcagctaaaacggctcctggaaagaagaggcctgtagatcagtctcctcaggaaccggactcatcatctggtgttggcaaatcgggcaaacagcctgccagaaaaagactaaatttcggtcagactggcgactcagagtcagtcccagaccctcaacctctcggagaaccaccagcagcccccacaagtttgggatctaatacaatggcttcaggcggtggcgcaccaatggcggacaataacgagggtgccgatggagtgggtaattcctcaggaaattggcattgcgattcccaatggctgggcgacagagtcatcaccaccagcaccagaacctgggccctgcccacttacaacaaccatctctacaagcaaatctccagccaatcaggagcttcaaacgacaaccactactttggctacagcaccccttgggggtattttgactttaacagattccactgccacttctcaccacgtgactggcagcgactcattaacaacaactggggattccggcccaagaaactcagcttcaagctcttcaacatccaagttaaagaggtcacgcagaacgatggcacgacgactattgccaataaccttaccagcacggttcaagtgtttacggactcggagtatcagctcccgtacgtgctcgggtcggcgcaccaaggctgtctcccgccgtttccagcggacgtcttcatggtccctcagtatggatacctcaccctgaacaacggaagtcaagcggtgggacgctcatccttttactgcctggagtacttcccttcgcagatgctaaggactggaaataacttccaattcagctataccttcgaggatgtaccttttcacagcagctacgctcacagccagagtttggatcgcttgatgaatcctcttattgatcagtatctgtactacctgaacagaacgcaaggaacaacctctggaacaaccaaccaatcacggctgctttttagccaggctgggcctcagtctatgtctttgcaggccagaaattggctacctgggccctgctaccggcaacagagactttcaaagactgctaacgacaacaacaacagtaactttccttggacagcggccagcaaatatcatctcaatggccgcgactcgctggtgaatccaggaccagctatggccagtcacaaggacgatgaagaaaaatttttccctatgcacggcaatctaatatttggcaaagaagggacaacggcaagtaacgcagaattagataatgtaatgattacggatgaagaagagattcgtaccaccaatcctgtggcaacagtgcagtatggaactgtggcaaataacttgcagagctcaaatacagctcccacgactagaactgtcaatgatcagggggccttacctggcatggtgtggcaagatcgtgacgtgtaccttcaaggacctatctgggcaaagattcctcacacggatggacactttcatccttctcctctgatgggaggctttggactgaaacatccgcctcctcaaatcatgatcaaaaatactccggtaccggcaaatcctccgacgactttcagcccggccaagtttgcttcatttatcactcagtactccactggacaggtcagcgtggaaattgagtgggagctacagaaagaaaacagcaaacgttggaatccagagattcagtacacttccaactacaacaagtctgttaatgtggactttactgtagacactaatggtgtttatagtgaacctcgccctattggaacccggtatctcacacgaaacttgtaa

SEQ ID NO: 787 - DNA, 2211 bp, Artificial Sequence
  source: /note="Description of Artificial Sequence: Synthetic polynucleotide"
atggctgctgacggttatcttccagattggctcgaggacaacctttctgaaggcattcgtgagtggtgggctctgaaacctggagtccctcaacccaaagcgaaccaacaacaccaggacaaccgtcggggtcttgtgcttccgggttacaaatacctcggacccggtaacggactcgacaaaggagagccggtcaacgaggcggacgcggcagccctcgaacacgacaaagcttacgaccagcagctcaaggccggtgacaacccgtacctcaagtacaaccacgccgacgccgagtttcaggagcgtcttcaagaagatacgtcttttgggggcaaccttggcagagcagtcttccaggccaaaaaggggatccttgagcctcttggtctggttgaggaagcagctaaaacggctcctggaaagaagaggcctgtagatcagtctcctcaggaaccggactcatcatctggtgttggcaaatcgggcaaacagcctgccagaaaaagactaaatttcggtcagactggcgactcagagtcagtcccagaccctcaacctctcggagaaccaccagcagcccccacaagtttgggatctaatacaatggcttcaggcggtggcgcaccaatggcagacaataacgagggtgccgatggagtgggtaattcctcaggaaattggcattgcgattcccaatggctgggcgacagagtcatcaccaccagcaccagaacctgggccctgcccacttacaacaaccatctctacaagcaaatctccagccaatcaggagcttcaaacgacaaccactactttggctacagcaccccttgggggtattttgactttaacagattccactgccacttctcaccacgtgactggcagcgactcattaacaacaactggggattccggcccaagaaactcagcttcaagctcttcaacatccaagttaaagaggtcacgcagaacgatggcacgacgactattgccaataaccttaccagcacggttcaagtgtttacggactcggagtatcagctcccgtacgtgttcgggtcggcgcaccaaggctgtctcccgccgtttccagcggacgtcttcatggtccctcagtatggatacctcaccctgaacaacggaagtcaagcggtgggacgctcatccttttactgcctggagtacttcccttcgcagatgctaaggactggaaataacttccaattcagctataccttcgaggatgtaccttttcacagcagctacgctcacagccagagttcggatcgcttgatgaatcctcttattgatcagtatctgtactacctgaacagaacgcaaggaacaacctctggaacaaccaaccaatcacggctgctttttagccaggctgggcctcagtctatgtctttgcaggccagaaattggctacctgggccctgctaccggcaacagagactttcaaagactgctaacgacaacaacaacagtaactttccttgaacagcggccagcaaatatcatctcaatggccgcgactcgctggtgaatccaggaccagctatggccagtcacaaggacgatgaagaaaaatttttccctatgcacggcaatctaatatttggcaaagaagggacaacggcaagtaacgcagaattagataatgtaatgattacggatgaagaagagattcgtaccaccaatcctgtggcaacagagcagtatggaactgtggcaaataacttgcagagctcaaatacagctcccacgactagaactgtcaatgatcagggggccttacctggcatggtgtggcaagatcgtgacgtgtaccttcaaggacctatctgggcaaagattcctcacacggatggacactttcatccttctcctctgatgggaggctttggactgaaacatccgcctcctcaaatcatgatcaaaaatactccggtaccggcaaatcctccgacgactttcagcccggccaagtttgcttcatttatcactcagtactccactggacaggtcagcgtggaaattgagtgggagctacagaaagaaaacagcaaacgttggaatccagagattcagtacacttccaactacaacaagtctgttaatgtggactttactgtagacactaatggtgtttatagtgaacctcgccctattggaacccggtatctcacacgaaacttgtaa

SEQ ID NO: 788 - DNA, 2211 bp, Artificial Sequence
  source: /note="Description of Artificial Sequence: Synthetic polynucleotide"
atggctgctgacggttatcttccagattggctcgaggacaacctttctgaaggcattcgtgagtggtgggctctgaaacctggagtccctcaacccaaagcgaaccaacaacaccaggacaaccgtcggggtcttgtgcttccgggttacaaatacctcggacccggtaacggactcgacgaaggagagccggtcaacgaggcggacgcggcagccctcgaacacgacaaagcttacgaccagcagctcaaggccggtgacaacccgtacctcaagtacaaccacgccgacgccgagtttcaggagcgtcttcaagaagatacgtcttttgggggcaaccttggcagagcagtcttccaggccaaaaagaggatccttgagcctcttggtctggttgagggagcagctaaaacggctcctggaaagaagaggcctgtagatcagtctcctcaggaaccggactcatcatctggtgttggcaaatcgggcaaacagcctgccagaaaaagactaaatttcggtcagactggcgactcagagtcagtcccagaccctcaacctctcggagaaccaccagcagcccccacaagtttgggatctaatacaatggcttcaggcggtggcgcaccaatggcagacaataacgagggtgccgatggagtgggtaattcctcaggaaattggcattgcgattcccaatggctgggcgacagagtcatcaccaccagcaccagaacctgggccctgcccacttacaacagccacctctacaagcaaatctccagccaatcaggagcttcaaacgacaaccactactttggctacagcaccccttgggggtattttgactttaacagattccactgccacttctcaccacgtgactggcagcgactcattaacaacaactggggattccggcccaagaaactcagcttcaagctcttcaacatccaagttaaagaggtcacgcagaacgatggcacgacgactattgccaataaccttaccagcacggttcaagtgtttacggactcggagtatcagctcccgtacgtgctcgggtcggcgcaccaaggctgtctcccgccgtttccagcggacgtcttcatggtccctcagtatggatacctcaccctgaacaacggaagtcaagcggtgggacgctcatccttttactgcctggagtacttcccttcgcagatgctaaggactggaaataacttccaattcagctataccttcgaggatgtaccttttcacagcagctacgctcacagccagagtttggatcgcttgatgaatcctcttattgatcagtatctgtactacctgaacagaacgcaaggaacaacctctggaacaaccaaccaatcacggctgctttttagccaggctgggcctcagtctatgtctttgcaggccagaaattggctacctgggccctgctaccggcaacagagactttcaaagactgctaacgacaacaacaacagtaactttccttggacagcggccagcaaatatcatctcaatggccgcgactcgctggtgaatccaggaccagctatggccagtcacaaggacgatgaagaaaaatttttccctatgcacggcaatctaatatttggcaaagaagggacaacggcaagtaacgcagaattagataatgtaatgattacggatgaagaagagattcgtaccaccaatcctgtggcaacagagcagtatggaactgtggcaaataacttgcagagctcaaatacagctcccacgactagaactgtcaatgatcagggggccttacctggcatggtgtggcaagatcgtgacgtgtaccttcaaggacctatctgggcaaagattcctcacacggatggacactttcatccttctcctctgatgggaggctttggactgaaacatccgcctcctcaaatcatgatcaaaaatactccggtaccggcaaatcctccgacgactttcagcccggccaagtttgcttcatttatcactcagtactccactggacaggtcagcgtggaaattgagtgggagctacagaaagaaaacagcaaacgttggaatccagagattcagtacacttccaactacaacaagtctgttaatgtggactttactgtagacactaatggtgtttatagtgaacctcgccctattggaacccggtatctcacacgaaacttgtaa

SEQ ID NO: 789 - DNA, 2211 bp, Artificial Sequence
  source: /note="Description of Artificial Sequence: Synthetic polynucleotide"
atggctgctgacggttatcttccagattggctcgaggacaacctttctgaaggcattcgtgagtggtgggctctgaaacctggagtccctcaacccaaagcgaaccaacaacaccaggacaaccgtcggggtcttgtgcttccgggttacaaatacctcggacccggtaacggactcgacaaaggagagccggtcaacgaggcggacgcggcagccctcgaacacgacaaagcttacgaccagcagctcaaggccggtgacaacccgtacctcaagtacaaccacgccgacgccgagtttcaggagcgtcttcaagaagatacgtcttttgggggcaaccttggcagagcagtcttccaggccaaaaagaggatccttgagcctcttggtctggttgagggagcagctaaaacggctcctggaaagaagaggcctgtagatcagtctcctcaggaaccggactcatcatctggtgttggcaaatcgggcaaacagcctgccagaaaaagactaaatttcggtcagactggcgactcagagtcagtcccagaccctcaacctctcggagaaccaccagcagcccccacaagtttgggatctaatacaatggcttcaggcggtggcgcaccaatggcagacaataacgagggtgccgatggagtgggtaattcctcaggaaattggcattgcgattcccaatggctgggcgacagagtcatcaccaccagcaccagaacctgggccctgcccacttacaacagccatctctacaagcaaatctccagccaatcaggagcttcaaacgacaaccactactttggctacagcaccccttggggtattttgactttaacagattccactgccacttctcaccacgtgactggcagcgactcattaacaacaactggggattccggcccaagaaactcagcttcaagctcttcaacatccaagttaaagaggtcacgcagaacgatggcacgacgactattgccaataaccttaccagcacggttcaagtgtttacggactcggagtatcagctcccgtacgtgctcgggtcggcgcaccaaggctgtctcccgccgtttccagcggacgccttcatggtccctcagtatggatacctcaccctgaacaacggaagtcaagcggtgggacgctcatccttttactgcctggagtacttcccttcgcagatgctaaggactggaaataacttccaattcagctataccctcgaggatgtaccttttcacagcagctacgctcacagccagagtttggatcgcttgatgaatcctcttattgatcagtatctgtactacctgaacagaacgcaaggaacaacctctggaacaaccaaccaatcacggctgctttttagccaggctgggcctcagtctatgtctttgcaggccagaaattggctacctgggccctgctaccggcaacagagactttcaaagactgctaacgacaacaacaacagtaactttccttggacagcggccagcaaatatcatctcaatggccgcgactcgctggtgaatccaggaccagctatggccagtcacaaaggacgatgaagaaaaatttttccctatgcacggcaatctaatatttggcaaagaagggacaacggcaagtaacgcagaattagatagtgtaatgattacggatgaagaagagattcgtaccaccaatcctgtggcaacagagcagtatggaactgtggcaaataacttgcagagctcaaatacagctcccacgactagaactgtcaatgatcagggggccttacctggcatggtgtggcaagatcgtgacgtgtaccttcaaggacctatctgggcaaagattcctcacacggatggacactttcatccttctcctctgatgggaggctttggactgaaacatccgcctcctcaaatcatgatcaaaaatactccggtaccggcaaatcctccgacgactttcagcccggccaagtttgcttcatttatcactcagtactccactggacaggtcagcgtggaaattgagtgggagctacagaaagaaaacagcaaacgttggaatccagagattcagtacacttccaactacaacaagtctgttaatgtggactttactgtagacactaatggtgtttatagtgaacctcgccctattggaacccggtatctcacacgaaacttgtaa

SEQ ID NO: 790 - DNA, 2205 bp, Artificial Sequence
  source: /note="Description of Artificial Sequence: Synthetic polynucleotide"
atgactgacggttaccttccagattggctagaggacaacctctctgagggcgttcgagagtggtgggcgctgcaacctggagcccctaaacccaaggcaaatcaacaacatcaggacaacgctcggggtcttgtgcttccgggttacaaatacctcggacccggcaacggactcgacaagggggaacccgtcaacgcagcggacgcggcagccctcgagcacgacaaggcctacgaccagcagctcaaggccggtgacaacccctacctcaagtacaaccacgccgacgcggagttccagcagcggcttcagggcgacacatcgtttgggggcaacctcggcagagcagtcttccaggccaaaaagagggttcttgaacctcttggtctggttgagcaagcgggtgagacggctcctggaaagaagagaccgttgattgaatccccccagcagcccgactcctccacgggtatcggcaaaaaaggcaagcagccggctaaaaagaagctcgttttcgaagacgaaactggagcaggcgacggaccccctgagggatcaacttccggagccatgtctgatgacagtgagatgcgtgcagcaactggcggagctgcagtcgagggcggacaaggtgccgatggagtgggtaatgcctcgggtgattggcattgcgattccacctggtctgagggccacgtcacgaccaccagcaccagaacctgggtcttgcccacctacaacaaccacctctacaagcgactcggagagagcctgcagtccaacacctacaacggattctccaccccctggggatactttgacttcaaccgcttccactgccacttctcaccacgtgactggcagcgactcatcaacaacaactggggcatgcgacccaaagccatgcgggtcaaaatcttcaacatccaggtcaaggaggtcacgacgtcgaacggcgagacaacggtggctaataaccttaccagcacggttcagatctttgcggactcgtcgtacgaactgccgtacgtgatggatgcgggtcaagagggcagcctgcctccttttcccaacgacgtctttatggtgccccagtacggctactgtggactggtgaccggcaacacttcgcagcaacagactgacagaaatgccttctactgcctggagtactttccttcgcagatgctgcggactggcaacaactttgaaattacgtacagttttgagaaggtgcctttccactcgatgtacgcgcacagccagagcctggaccggctgatgaaccctctcatcgaccagtacctgtggggactgcaatcgaccaccaccggaaccaccctgaatgccgggactgccaccaccaactttaccaagctgcggcctaccaacctttccaactttaaaaagaactggctgcccgggccttcaatcaagcagcagggcttctcaaagactgccaatcaaaactacaagatccctgccaccgggtcagacagtctcatcaaatacgagacgcacagcactctggacggaagatggagtgccctgacccccggacctccaatggccacggctggacctgcggacagcaagttcagcaacagccagctcatctttgcggggcctaaacagaacggcaacacggccaccgtacccgggactctgatcttcacctctgaggaggagctggcagccaccaacgctaccgatacggacatgtggggcaacctacctggcggtgaccagagcaacagcaacctgccgaccgtggacagactgacagccttgggagccgtgcctggaatggtctggcaaaacagagacatttactaccagggtcccatttgggccaagattcctcataccgatggacactttcacccctcaccgctgattggtgggtttgggctgaaacacccgcctcctcaaatttttatcaagaacaccccggtacctgcgaatcctgcgacgaccttcagctctactccggtaaactccttcattactcagtacagcactggccaggtgtcggtgcagattgactgggagatccagaaggagcggtccaaacgctggaaccccgaggtccagtttacctccaactacggacagcaaaactctctgttgtgggctcccgatgcggctgggaaatacactgagcctagggctatcggtacccgctacctcacccaccacctgtaa

SEQ ID NO: 791 - DNA, 2205 bp, Artificial Sequence
  source: /note="Description of Artificial Sequence: Synthetic polynucleotide"
atgactgacggttaccttccagattggctagaggacaacctctctgaaggcgttcgagagtggtgggcgctgcaacctggagcccctaaacccaaggcaaatcaacaacatcaggacaacgctcggggtcttgtgcttccgggttacaaatacctcggacccggcaacggactcgacaagggggaacccgtcaacgcagcggacgcggcagccctcgagcacgacaaggcctacgaccagcagctcaaggccggtgacaacccctacctcaagtacaaccacgccgacgcggagttccagcagcggcttcagggcgacacatcgtttgggggcaacctcggcagagcagtcttccaggccaaaaagagggttcttgaacctcttggtctggttgagcaagcgggtgagacggctcctggaaagaagagaccgttgattgaatccccccagcagcccgactcctccacgggtatcggcaaaaaaggcaagcagccggctaaaaagaagctcgttttcgaagacgaaactggagcaggcgacggaccccctgagggatcaacttccggagccatgtctgatgacagtgagatgcgtgcagcagctggcggagctgcagtcgagggcggacaaggtgccgatggagtgggtaatgcctcgggtgattggcattgcgattccacctggtctgagggccacgtcacgaccaccagcaccagaacctgggtcttgcccacctacaacaaccacctctacaagcgactcggagagagcctgcagtccaacacctacaacggattctccaccccctggggatactttgacttcaaccgcttccactgccacttcttaccacgtgactggcagcgactcatcaacaacaactggggcgtgcgacccaaagccatgcgggtcaaaatcttcaacatccaggtcaaggaggtcacgacgtcgaacggcgagacaacggtggctaataaccttaccagcacggttcagatctttgcggactcgtcgtacgaactgccgtacgtgatggatgcgggtcaagagggcagcctgcctccttttcccaacgacgtctttatggtgccccagtacggctactgtggactggtgaccggcgacacttcgcagcaacagactgacagaaatgccttctactgcctggagtactttccttcgcagatgctgcggactggcaacaactttgaaattacgtacagttttgagaaggtgcctttccactcgatgtacgcgcacagccagagcctggaccggctgatgaaccctctcatcgaccagtacctgtggggactgcaatcgaccaccaccggaaccaccctgaatgccgggactgccaccaccaactttaccaagctgcggcctaccaacttttccaactttaaaaagaactggctgcccgggccttcaatcaagcagcagggcttctcaaagactgccaatcaaaactacaagatccctgccaccgggtcagacagtctcatcaaatacgagacgcacagcactctggacggaagatggagtgccctgacccccggacctccaatggccacggctggacctgcggacagcaagttcagcaacagccagctcatctttgcggggcctaaacagaacggcaacacggccaccgtacccgggactctgatcttcacctctgaggaggagctggcagccaccaacgccaccgatacggacatgtggggcaacctacctggcggtgaccagagcaacagcaacctgccgaccgtggacagactgacagccttgggagccgtgcctggaatggtctggcaaaacagagacatttactaccagggtcccatttgggccaagattcctcataccgatggacactttcacccctcaccgctgattggtgggtttgggctgaaacacccgcctcctcaaatttttatcaagaacaccccggtacctgcgaatcctgcgacgaccttcagctctactccggtaaactccttcattactcagtacagcactggccaggtgtcggtgcagattgactgggagatccagaaggagcggtccaaacgctggaaccccgaggtccagtttacctccaactacggacagcaaaactctctgttgtgggctcccgatgcggctgggaaatacactgagcctagggctatcggtacccgctacctcacccaccacctgtaa

SEQ ID NO: 792 - DNA, 2205 bp, Artificial Sequence
  source: /note="Description of Artificial Sequence: Synthetic polynucleotide"
atgactgacggttaccttccagattggctagaggacaacctctctgaaggcgttcgagagtggtgggcgctgcaacctggagcccctaaacccaaggcaaatcaacaacatcaggacaacgctcggggtcttgtgcttccgggttacaaatacctcggacccggcaacggactcgacgagggggaacccgtcaacgcagcggacgcggcagccctcgagcacgacaaggcctacgaccagcagctcaaggccggtgacaacccctacctcaagtacaaccacgccgacgcggagttccagcagcggcttcagggcgacacatcgtttgggggcaacctcggcagagcagtcttccaggccaaaaagagggttcttgaacctcttggtctggttgagcaagcgggtgagacggctcctggaaagaagagaccgttgattgaatccccccagcagcccgactcctccacgggtatcggcaaaaaaggcaagcagccggctaaaaagaagctcgttttcgaagacgaaactggagcaggcgacggaccccctgagggatcaacttccggagccatgtctgatgacagtgagatgcgtgcagcagctggcggagctgcagtcgagggcggacaaggtgccgatggagtgggtaatgcctcgggtgattggcattgcgattccacctggtctgagggccacgtcacgaccaccagcaccagaacctgggtcttgcccacctacaacaaccacctctacaagcgactcggagagagcctgcagtccaacacctacaacggattctccaccccctggggatactttgacttcaaccgcttccactgccacttctcaccacgtgactggcagcgactcatcaacaacaactggggcatgcgacccaaagccatgcgggtcaaaatcttcaacatccaggtcaaggaggtcacgacgtcgaacggcgagacaacggtggctaataaccttaccagcacggttcagatctttgcggactcgtcgtacgaactgccgtacgtgatggatgcgggtcaagagggcagcctgcctccttttcccaacgacgtctttatggtgccccagtacggctactgtggactggtgaccggcaacacttcgcagcaacagactgacagaaatgccttctactgcctggagtactttccttcgcagatgctgcggactggcaacaactttgaaattacgtacagttttgagaaggtgcctttccactcgatgtacgcgcacagccagagcctggaccggctgatgaaccctctcatcgaccagtacctgtggggactgcaatcgaccaccaccggaaccaccctgaatgccgggactgccaccaccaactttaccaagctgcggcctaccaacttttccaactttaaaaagaactggctgcccgggccttcaatcaagcagcagggcttctcaaagactgccaatcaaaactacaagatccctgccaccgggtcagacagtctcatcaaatacgagacgcacagcactctggacggaagatggagtgccctgacccccggacctccaatggccacggctggacctgcggacagcaagttcagcaacagccagctcatctttgcggggcctaaacagaacggcaacacggccaccgtacccgggactctgatcttcacctctgaggaggagctggcagccaccaacgctaccgatacggacatgtggggcaacctacctggcggtgaccagagcaacagcaacctgccgaccgtggacagactgacagccttgggagccgtgcctggaatggtctggcaaaacagagacatttactaccagggtcccatttgggccaagattcctcataccgatggacactttcacccctcaccgctgattggtgggtttgggctgaaacacccgcctcctcaaatttttatcaagaacaccccggtacctgcgaatcctgcgacgaccttcagctctactccggtaaactccttcattactcagtacagcactggccaggtgtcggtgcagattgactgggagatccagaaggagcggtccaaacgctggaaccccgaggtccagtttacctccaactacggacagcaaaactctctgttgtgggctcccgatgcggctgggaaatacactgagcctagggctatcggtacccgctacctcacccaccacctgtaa

SEQ ID NO: 793 - DNA, 2205 bp, Artificial Sequence
  source: /note="Description of Artificial Sequence: Synthetic polynucleotide"
atgactgacggttaccttccagattggctagaggacaacctctctgaaggcgttcgagagtggtgggcgctgcaacctggagcccctaaacccaaggcaaatcaacaacatcaggacaacgctcggggtcttgtgcttccgggttacaaatacctcggacccggcaacggactcgacaagggggaacccgtcaacgcagcggacgcggcagccctcgagcacgacaaggcctacgaccagcagctcaaggccggtgacaacccctacctcaagtacaaccacgccgacgcggagttccagcagcggcttcagggcgacacatcgtttgggggcaacctcggcagagcagtcttccaggccaaaaagagggttcttgaacctcttggtctggttgagcaagcgggtgagacggctcctggaaagaagagaccgttgattgaatccccccagcagcccgactcctccacgggtatcggcaaaaaaggcaagcagccggctaaaaagaagctcgttttcgaagacggaactggagcaggcgacggaccccctgagggatcaacttccggagccatgtctgatgacagtgagatgcgtgcagcagctggcggagctgcagtcgagggcggacaaggtgccgatggagtgggtaatgcctcgggtgattggcattgcgattccacctggtctgagggccacgtcacgaccaccagcaccagaacctgggtcttgcccacctacaacaaccacctctacaagcgactcggagagagcctgcagtccaacacctacaacggattccccaccccctggggatactttgacttcaaccgcttccactgccacttctcaccacgtgactggcagcgactcatcaacaacaactggggcatgcgacccaaagccatgcgggtcaaaatcttcaacatccaggtcaaggaggtcacgacgtcgaacggcgagacaacggcggctaataaccttaccagcacggttcagatctttgcggactcgtcgtacgaactgccgtacgtgatggatgcgggtcaagagggcagcctgcctccttttcccaacgacgtctttatggtgccccagtacggctactgtggactggtgaccggcaacacttcgcagcaacagactgacagaaatgccttctactgcctggagtactttccttcgcagatgctgcggactggcaacaactttgaaattacgtacagttttgagaaggtgcctttccactcgatgtacgcgcacagccagagcctggaccggctgatgaaccctctcatcgaccagtacctgtggggactgcaatcgaccaccaccggaaccaccctgaatgccgggactgccaccaccaactttaccaagctgcggcctaccaacttttccaactttaaaaagaactggctgcccgggccttcaatcaagcagcagggcttctcaaagactgccaatcaaaactacaagatccctgccaccgggtcagacagtctcatcaaatacgagacgcacagcactctggacggaagatggagtgccctgacccccggacctccaatggccacggctggacctgcggacagcaagttcagcaacagccagctcatctttgcggggcctaaacagaacggcaacacggccaccgtacccgggactctgatcttcacctctgaggaggagctggcagccaccaacgccaccgatacggacatgtggggcaacctacctggcggtgaccagagcaacagcaacctgccgaccgtggacagactgacagccttgggagccgtgcctggaatggtctggcaaaacagagacatttactaccagggtcccatttgggccaagattcctcataccgatggacactttcacccctcaccgctgattggtgggtttgggctgaaacacccgcctcctcaaatttttatcaagaacaccccggtacctgcgaatcctgcgacgaccttcagctctactccggtaaactccttcattactcagtacagcactggccaggtgtcggtgcagattgactgggagatccagaaggagcggtccaaacgctggaaccccgaggtccagtttacctccaactacggacagcaaaactctctgttgtgggctcccgatgcggctgggaaatacactgagcctagggctatcggtacccgctacctcacccaccacctgtaa

SEQ ID NO: 794 - DNA, 2205 bp, Artificial Sequence
  source: /note="Description of Artificial Sequence: Synthetic polynucleotide"
atgactgacggttaccttccagattggctagaggacaacctctctgaaggcgttcgagagtggtgggcgctgcaacctggagcccctaaacccaaggcaaatcaacaacatcaggacaacgctcggggtcttgtgcttccgggttacaaatacctcggacccggcaacggactcgacaagggggaacccgtcaacgcagcggacgcggcagccctcgagcacgacaaggcctacgaccagcagctcaaggccggtgacaacccctacctcaagtacaaccacgccgacgcggagttccagcagcggcttcagggcgacacatcgtttgggggcaacctcggcagagcagtcttccaggccaaaaagagggttcttgaacctcttggtctggttgagcaagcgggtgagacggctcctggaaagaagagaccgttgattgaatccccccagcagcccgactcctccacgggtatcggcaaaaaaggcaagcagccggctaaaaagaagctcgttttcgaagacgaaactggagcaggcgacggaccccctgagggatcaacttccggagccatgtctgatgacagtgagatgcgtgcagcagctggcggagctgcagtcgagggcggacaaggtgccgatggagtgggtaatgcctcgggtgattggcattgcgattccacctggtctgagggccacgtcacgaccaccagcaccagaacctgggtcttgcccacctacaacaaccacctctacaagcgactcggagagagcctgcagtccaacacctacaacggattctccaccccctggggatactttgacttcaaccgcttccactgccacttctcaccacgtgactggcagcgactcatcaacaacaactggggcatgcgacccaaagccatgcgggtcaaaatcttcaacatccaggtcaaggaggtcacgacgtcgaacggcgagacaacggtggctaataaccttaccagcacggttcagatctttgcggactcgtcgtacgaactgccgtacgtgatggatgcgggtcaagagggcagcctgcctccttttcccaacgacgtctttatggtgccccagtacggctaccgtggactggtgaccggcaacacttcgcagcaacagactgacagaaatgccttctactgcctggagtactttccttcgcagatgctgcggactggcaacaactttgaaattacgtacagttttgagaaggtgcctttccactcgatgtacgcgcacagccagagcctggaccggctgatgaaccctctcatcgaccagtacctgtggggactgcaatcgaccaccaccggaaccaccctgaatgccgggactgccaccaccaactttaccaagctgcggcctaccaacttttccaactttaaaaagaactggctgcccgggccttcaatcaagcagcagggcttctcaaagactgccaatcaaaactacaagatccctgccaccgggtcagacagtctcatcaaatacgagacgcacagcactctggacggaagatggagtgccctgacccccggacctccaatggccacggctggacctgcggacagcaagttcagcaacagccagctcatctttgcggggcctaaacagaacggcaacacggccaccgtacccgggactctgatcttcacctctgaggaggagctggcagccaccaacgccaccgatacggacatgtggggcaacctacctggcggtgaccagagcaacagcaacctgccgaccgtggacagactgacagccttgggagccgtgcctggaatggtctggcaaaacagagacatttactaccagggtcccatttgggccaagattcctcataccgatggacactttcacccctcaccgctgattggtgggtttgggctgaaacacccgcctcctcaaatttttatcaagaacaccccggtacctgcgaatcctgcgacgaccttcagctctactccggtaaactccttcattactcagtacagcactggccaggtgtcggtgcagattgactgggagatccagaaggagcggtccaaacgctggaaccccgaggtccagtttacctccaactacggacagcaaaactctctgttgtgggctcccgatgcggctgggaaatacactgagcctagggctatcggtacccgctacctcacccaccacctgtaa

SEQ ID NO: 795 - DNA, 2205 bp, Artificial Sequence
  source: /note="Description of Artificial Sequence: Synthetic polynucleotide"
atgactgacggttaccttccagattggctagaggacaacctctctgaaggcgttcgagagtggtgggcgctgcaacctggagcccctaaacccaaggcaaatcaacaacatcaggacaacgctcggggtcttgtgcttcagggttacaaatacctcggacccggcaacggactcgacaagggggaacccgtcaacgcagcggacgcggcagccctcgagcacgacaaggcctacgaccagcagctcaaggccggtgacaacccctacctcaagtacaaccacgccgacgcggagttccagcagcggcttcagggcgacacatcgtttgggggcaacctcggcagagcagtcttccaggccaaaaagagggttcttgaaccccttggtctggttgagcaagcgggtgagacggctcctggaaagaagagaccgttgattgaatccccccagcagcccgactcctccacgggtatcggcaaaaaaggcaagcagccggctaaaaagaagctcgttttcgaagacgaaactggagcaggcgacggaccccctgagggatcaacttccggagccatgtctgatgacagtgagatgcgtgcagcagctggcggagctgcagtcgagggcggacaaggtgccgatggagtgggtaatgcctcgggtgattggcattgcgattccacccggtctgagggccacgtcacgaccaccagcaccagaacctgggtcttgcccacctacaacaaccacctctacaagcgactcggagagagcctgcagtccaacacctacaacggattctccaccccctggggatactttgacttcaaccgcttccactgccacttctcaccacgtgactggcagcgactcatcaacaataactggggcatgcgacccaaagccatgcgggtcaaaatcttcaacatccaggtcaaggaggtcacgacgtcgaacggcgagacaacggtggctaataaccttaccagcacggttcagatctttgcggactcgtcgtacgaactgccgtacgtgatggatgcgggtcaagagggcagcctgcctccttttcccaacgacgtctttatggtgccccagtacggctactgtggactggtgaccggcaacacttcgcagcaacagactgacagaaatgccttctactgcctggagtactttccttcgcagatgctgcggactggcaacaactttgaaattacgtacagttttgagaaggtgcctttccactcgatgtacgcgcacagccagagcctggaccggctgatgaaccctctcatcgaccagtacctgtggggactgcaatcgaccaccaccggaaccaccctgaatgccgggactgccaccaccaactttaccaagctgcggcctaccaacttttccaactttaaaaagaactggctgcccgggccttcaatcaagcagcagggcttctcaaagactgccaatcaaaactacaagatccctgccaccgggtcagacagtctcatcaaatacgagacgcacagcactctggacggaagatggagtgcccggacccccggacctccaatggccacggctggacctgcggacagcaagttcagcaacagccagctcatctttgcggggcctaaacagaacggcaacacggccaccgtacccgggactctgatcttcacctctgaggaggagctggcagccaccaacgccaccgatacggacatgtggggcaacctacctggcggtgaccagagcaacagcaacctgccgaccgtggacagactgacagccttgggagccgtgcctggaatggtctggcaaaacagagacatttactaccagggtcccatttgggccaagattcctcataccgatggacactttcacccctcaccgctgattggtgggtttgggctgaaacacccgcctcctcaaatttttatcaagaacaccccggtacctgcgaatcctgcgacgaccttcagctctactccggtaaactccttcattactcagtacagcactggccaggtgtcggtgcagattgactgggagatccagaaggagcggtccaaacgctggaaccccgaggtccagtttacctccaactacggacagcaaaactctctgttgtgggctcccgatgcggctgggaaatacactgagcctagggctatcggtacccgctacctcacccaccacctgtaa

SEQ ID NO: 796 - DNA, 2175 bp, Artificial Sequence
  source: /note="Description of Artificial Sequence: Synthetic polynucleotide"
atgtcttttgttgatcaccctccagattggttggaagaagttggtgaaggtcttcgcgagtttttgggccttgaagcgggcccaccgaaaccaaaacccaatcagcagcatcaagatcaagcccgtggtcttgtgctgcctggttataactatctcggacccggaaacggtctcgatcgaggagagcctgtcaacagggcagacgaggtcgcgcgagagcacgacatctcgtacaacgagcagcttgaggcgggagacaacccctacctcaagtacaaccacgcggacgccgagtttcaggagaggctcgccgacgacacatccttcgggggaaacctcggaaaggcagtctttcaggccaagaaaagggttctcgaaccttttggcctggttgaagagggtgctaagacggcccctaccggaaagcggatagacgaccactttccaaaaagaaagaaggcccggaccgaagaggactccaagccttccacctcgtcagacgccgaagctggacccagcggatcccagcagctgcaaatcccagcccaaccagcctcaagtttgggagctgatacaatgtctgcgggaggtggcggcccattgggcgacaataaccaaggtgccgatggagtgggcaatgcctcgggagattggcattgcgattccacgtggatgggggacagagtcgtcaccaagtccacccgaacctgggtgctgcccagctacaacaaccaccagtaccgagagatcaaaagcggctccgtcgacggaagcaacgccaacgcctactttggatacagcaccccctgggggtactttgactttaaccgcttccacagccactggagcccccgagactggcaaagactcatcaacaactactggggcttcagaccccggtccctcagagtcaaaatcttcaacattcaagtcaaagaggtcacggtgcaggactccaccaccaccatcgccaacaacctcacctccaccgtccaagtgtttacggacgacgactaccagctgccctacgtcgtcggcaacgggaccgagggatgcctgccggccttccctccgcaggtctttacgctgccgcagtacggttacgcgacgctgaaccgcgacaacacagaaaatcccaccgagaggagcagcttcttctgcctagagtactttcccagcaagatgctgagaacgggcaacaactttgagtttacctacaactttgaggaggtgcccttccactccagcttcgctcccagtcagaacctcttcaagctggccaacccgctggtggaccagtacttgtaccgcttcgtgagcacaaataacactggcggagtccagttcaacaagaacctggccgggagatacgccaacacctacaaaaactggttcccggggcccatgggccgaacccagggctggaacctgggctccggggtcaaccgcgccagtgtcagcgccttcgccacgaccaataggatggagctcgagggcgcgagttaccaggtgcccccgcagccgaacggcatgaccaacaacctccagggcagcaacacctatgccctggagaacactatgatcttcaacagccagccggcgaacccgggcaccaccgccacgtacctcgagggcaacatgctcatcaccagcgagagcgagacgcagccggtgaaccgcgtggcgtacaacgtcggcgggcagatggccaccaacaaccagagctccaccactgcccccgcgaccggcacgtacaacctccaggaaatcgtgcccggcagcgtgtggatggagagggacgtgtacctccaaggacccatctgggccaagatcccagagacggaggcgcactttcacccctctccggccatgggcggattcggactcaaacacccaccgcccatgatgctcatcaagaacacgcctgtgcccggaaatatcaccagcttctcggacgtgcccgtcagcagcttcatcacccagtacagcaccgggcaggtcaccgtggagatggagtgggagctcaagaaggaaaactccaagaggtggaacccagagatccagtacacaaacaactacaacgacccccagtttgtggactttgccccggacagcaccggggaatacagaaccaccagacctatcggaacccgataccttacccgacccctttaa

SEQ ID NO: 797 - DNA, 2175 bp, Artificial Sequence
  source: /note="Description of Artificial Sequence: Synthetic polynucleotide"
atgtcttttgttgatcaccctccagattggttggaagaagttggtgaaggtcttcgcgagtttttgggccttgaagcgggcccaccgaaaccaaaacccaatcagcagcatcaagatcaagcccgtggtcttgtgctgcctggttataactatctcggacccggaaacggtctcgatcgaggagagcctgtcaacagggcagacgaggtcgcgcgagagcacgacatctcgtacaacgagcagcttgaggcgggagacaacccctacctcaagtacaaccacgcggacgccgagtttcaggagaagctcgccgacgacacatcctccgggggaaacctcggaaaggcagtctttcaggccaagaaaagggttctcgaaccttttggcctggttgaagagggtgctaagacggcccctaccggaaagcggatagacgaccactttccaaaaagaaagaaggcccggaccgaagaggactccaagccttccacctcgtcagacgccgaagctggacccagcggatcccagcagctgcaaatcccagcccaaccagcctcaagtttgggagctgatacaatgtctgcgggaggtggcggcccattgggcgacaataaccaaggtgccgatggagtgggcaatgcctcgggagattggcattgcgattccacgtggatgggggacagagtcgtcaccaagtccacccgaacctgggtgctgcccagctacaacaaccaccagtaccgagagatcaaaagcggctccgtcgacggaagcaacgccaacgcctactttggatacagcaccccctgggggtactttgactttaaccgcttccacagccactggagcccccgagactggcaaagactcatcaacaactactggggcttcagaccccggtccctcagagtcaaaatcttcaacattcaagtcaaagaggtcacggtgcaggactccaccaccaccatcgccaacaacctcacctccaccgtccaagtgtttacggacgacgactaccagctgccctacgtcgtcggcaacgggaccgagggatgcctgccggccttccctccgcaggtctttacgctgccgcagtacggttacgcgacgctgaaccgcgacaacacagaaaatcccaccgagaggagcagcttcttctgcctagagtactttcccagcaagatgctgagaacgggcaacaactttgagtttacctacaactttgaggaggtgcccttccactccagcttcgctcccagtcagaacctcttcaagctggccaacccgctagtggaccagtacttgtaccgcttcgtgagcacaaataacactggcggagtccagttcaacaagaacctggccgggagatacgccaacacctacaaaaactggttcccggggcccatgggccgaacccagggctggaacctgggctccggggtcaaccgcgccagtgtcagcgccttcgccacgaccaataggatggagctcgagggcgcgagttaccaggtgcccccgcagccgaacggcatgaccaacaacctccagggcagcaacacctatgccctggagaacactatgatcttcaacagccagccggcgaacccgggcaccaccgccacgtacctcgagggcaacatgctcatcaccagcgagagcgagacgcagccggtgaaccgcgtggcgtacaacgtcggcgggcagatggccaccaacaaccagagctccaccactgcccccgcgaccggcacgtacaacctccaggaaatcgtgcccggcagcgtgtggatggagagggacgtgtacctccaaggacccatctgggccaagatcccagagacgggggcgcactttcacccctctccggccatgggcggattcggactcaaacacccaccgcccatgatgctcatcaagaacacgcctgtgcccggaaatatcaccagcttctcggacgtgcccgtcagcagcttcatcacccagtacagcaccgggcaggtcaccgtggagatggagtgggagctcaagaaggaaaactccaagaggtggaacccagagatccagtacacaaacaactacaacgacccccagtttgtggactttgccccggacagcaccggggaatacagaaccaccagacctatcggaacccgataccttacccgacccctttaa

SEQ ID NO: 798 - DNA, 2175 bp, Artificial Sequence
  source: /note="Description of Artificial Sequence: Synthetic polynucleotide"
atgtcttttgttgatcaccctccagattggttggaagaagttggtgaaggtcttcgcgagtttttgggccttgaagcgggcccaccgaaaccaaaacccaatcagcagcatcaagatcaagcccgtggtcttgtgctgcctggttataactatctcggacccggaaacggtctcgatcgaggagagcctgtcaacagggcagacgaggtcgcgcgagagcacgacatctcgtacaacgagcagcttgaggcgggagacaacccctacctcaagtacaaccacgcggacgccgagtttcaggagaagctcgccgacgacacatccttcgggggaaacctcggaaaggcagtctttcaggccaagaaaagggttctcgaaccttttggcctggttgaagagggtgctaagacggcccctaccggaaagcggatagacgaccactttccaaaaagaaagaaggcccggaccgaagaggactccaagccttccacctcgtcagacgccgaagctggacccagcggatcccagcagctgcaaatcccagcccaaccagcctcaagtttgggagctgatacaatgtctgcgggaggtggcggcccattgggcgacaataaccaaggtgccgatggagtgggcaatgcctcgggagattggcattgcgattccacgtggatgggggacagagtcgtcaccaagtccacccgaacctgggtgctgcccagctacaacaaccaccagtaccgagagatcaaaagcggctccgtcgacggaagcaacgccaacgcctactttggatacagcaccccctgggggtactttgactttaaccgcttccacagccactggagcccccgagactggcaaagactcatcaacaactactggggcttcagaccccggtccctcagagtcaaaatcttcaacattcaagtcaaagaggtcacggtgcaggactccaccaccaccatcgccaacaacctcacctccaccgtccaagtgtttacggacgacgactaccagctgccctacgtcgtcggcaacgggaccgagggatgcctgccggccttccctccgcaggtctttacgctgccgcagtacggttacgcgacactgaaccgcgacaacacagaaaatcccaccgagaggagcagcttcttctgcctagagtactttcccagcaagatgctgagaacgggcaacaactttgagtttacctacaactttgaggaggtgcccttccactccagcttcgctcccagtcagaacctcttcaagctggccaacccgctggtggaccagtacttgtaccgcttcgtgagcacaaataacactggcggagtccagttcaacaagaacctggccgggagatacgccaacacctacaaaaactggttcccggggcccatgggccgaacccagggctggaacctgggctccggggtcaaccgcgccagtgtcagcgccttcgccacgaccaataggatggagctcgagggcgcgagttaccaggtgcccccgcagccgaacggcatgaccaacaacctccagggcagcaacacctatgccctggagaacactatgatcttcaacagccagccggcgaacccgggcaccaccgccacgtacctcgagggcaacatgctcatcaccagcgagagcgagacgcagccggtgaaccgcgtggcgtacaacgtcggcgggcagatggccaccaacaaccagagctccaccactgcccccgcgaccggcacgtacaacctccaggaaatcgtgcccggcagcgtgtggatggagagggacgtgtacctccaaggacccatctgggccaagatcccagagacgggggcgcactttcacccctctccggccatgggcggattcggactcaaacacccaccgcccatgatgctcatcaagagcacgcctgtgcccggaaatatcaccagcttctcggacgtgcccgtcagcagcttcatcacccagtacagcaccgggcaggtcaccgtggagatggagtgggagctcaagaaggaaaactccaagaggtggaacccagagatccagtacacaaacaactacaacgacccccagtttgtggactttgccccggacagcaccggggaatacagaaccaccagacctatcggaacccgataccttacccgacccctttaa

SEQ ID NO: 799 - DNA, 2175 bp, Artificial Sequence
  source: /note="Description of Artificial Sequence: Synthetic polynucleotide"
atgtcttttgttgatcaccctccagattggttggaagaagttggtgaaggtcttcgcgagtttttgggccctgaagcgggcccaccgaaaccaaaacccaatcagcagcatcaagatcaagcccgtggtcttgtgctgcctggttataactatctcggacccggaaacggtctcgatcgaggagagcctgtcaacagggcagacgaggtcgcgcgagagcacgacatctcgtacaacgagcagcttgaggcgggagacaacccctacctcaagtacaaccacgcggacgccgagtttcaggagaagctcgccgacgacacatccttcgggggaaacctcggaaaggcagtctttcaggccaagaaaagggttctcgaaccttttggcctggttgaagagggtgctaagacggcccctaccggaaagcggatagacgaccactttccaaaaagaaagaaggtccggaccgaagaggactccaagccttccacctcgtcagacgccgaagctggacccagcggatcccagcagctgcaaatcccagcccaaccagcctcaagtttgggagctgatacaatgtctgcgggaggtggcggcccattgggcgacaataaccaaggtgccgatggagtgggcaatgcctcgggagattggcattgcgattccacgtggatgggggacagagtcgtcaccaagtccacccgaacctgggtgccgcccagctacaacaaccaccagtaccgagagatcaaaagcggctccgtcgacggaagcaacgccaacgcctactttggatacagcaccccctgggggtactttgactttaaccgcttccacagccactggagcccccgagactggcaaagactcatcaacaactactggggcttcagaccccggtccctcagagtcaaaatcttcaacattcaagtcaaagaggtcacggtgcaggactccaccaccaccatcgccaacaacctcacctccaccgtccaagtgtttacggacgacgactaccagctgccctacgtcgtcggcaacgggaccgagggatgcctgccggccttccctccgcaggtctttacgctgccgcagtacggttacgcgacgctgaaccgcgacaacacagaaaatcccaccgagaggagcagcttcttctgcctagagtactttcccagcaagatgctgagaacgggcaacaactttgagtttacctacaactttgaggaggtgcccttccactccagcttcgctcccagtcagaacctcttcaagctggccaacccgctggtggaccagtacttgtaccgcttcgtgagcacaaataacactggcggagtccagttcaacaagaacctggccgggagatacgccaacacctacaaaaactggttcccggggcccatgggccgaacccagggctggaacctgggctccggggtcaaccgcgccagtgtcagcgccttcgccacgaccaataggatggagctcgagggcgcgagttaccaggtgcccccgcagccgaacggcatgaccaacaacctccagggcagcaacacctatgccctggagaacactatgatcttcaacagccagccggcgaacccgggcaccaccgccacgtacctcgagggcaacatgctcatcaccagcgagagcgagacgcagccggtgaaccgcgtggcgtgcaacgtcggcgggcagatggccaccaacaaccagagctccaccactgcccccgcgaccggcacgtacaacctccaggaaatcgtgcccggcagcgtgtggatggagagggacgtgtacctccaaggacccatctgggccaagatcccagagacgggggcgcactttcacccctctccggccatgggcggattcggactcaaacacccaccgcccatgatgctcatcaagaacacgcctgtgcccggaaatatcaccagcttctcggacgtgcccgtcagcagcttcatcacccagtacagcaccgggcaggtcaccgtggagatggagtgggagctcaagaaggaaaactccaagaggtggaacccagagatccagtacacaaacaactacaacgacccccagtttgtggactttgccccggacagcaccggggaatacagaaccaccagacctattggaacccgataccttacccgacccctttaa

SEQ ID NO: 800 - DNA, 2175 bp, Artificial Sequence
  source: /note="Description of Artificial Sequence: Synthetic polynucleotide"
atgtcttttgttgatcaccctccagattggttggaagaagttggtgaaggtcttcgcgagtttttgggccttgaagcgggcccaccgaaaccaaaacccaatcagcagcatcaagatcaagcccgtggtcttgtgctgcctggttataactatctcggacccggaaacggtctcgatcgaggagagcctgtcaacagggcagacgaggtcgcgcgagagcacgacatctcgtacaacgagcagcttgaggcgggagacaacccctacctcaagtacaaccacgcggacgccgagtttcaggagaagctcgccgacgacacatccttcgggggaaacctcggaaaggcagtctttcaggccaagaaaagggttctcgaaccttttggcctggttgaagagggtgctaagacggcccctaccggaaagcggatagacgaccactttccaaaaagaaagaaggcccggaccgaagaggactccaagccttccacctcgtcagacgccgaagctggacccagcggatcccagcagctgcaaatcccagcccaaccagcctcaagtttgggagctgatacaatgtctgcgggaggtggcggcccattgggcgacaataaccaaggtgccgatggagtgggcaatgcctcgggagattggcattgcgattccacgtggatgggggacagagtcgtcaccaagtccacccgaacctgggtgctgcccagctacaacaaccaccagtaccgagagatcaaaagcggctccgtcgacggaagcaacgccaacgcctactttggatacagcaccccctgggggtactttgactttaaccgcttccacagccactggagcccccgagactggcaaagactcatcaacaactactggggcttcagaccccggtccctcagagtcaaaatcttcaacattcaagtcaaagaggtcacggtgcaggactccaccaccaccatcgccaacaacctcacctccaccgtccaagtgtttacggacgacgactaccagctgccctacgtcgtcggcaacgggaccgagggatgcctgccggccttccctccgcaggtctttacgctgccgcagtacggttacgcgacgctgaaccgcgacaacaccgaaaatcccaccgagaggagcagcttcttctgcctagagtactttcccagcaagatgctgagaacgggcaacaactttgagtttacctacaactttgaggaggtgcccttccactccagcttcgctcccagtcagaacctcttcaagctggccaacccgctggtggaccagtacttgtaccgcttcgtgagcacaaataacactggcggagtccagttcaacaagaacctggccgggagatacgccaacacctacaaaaactggttcccggggcccatgggccgaacccagggctggaacctgggctccggggtcaaccgcgccagtgtcagcgccttcgccacgaccaataggatggagctcgagggcgcgagttaccaggtgcccccgcagccgaacggcatgaccaacaacctccagggcagcaacacctatgccctggagaacactatgatcttcaacagccagccggcgaacccgggcaccaccgccacgtacctcgagggcaacatgctcatcaccagcgagagcgagacgcagccggtgaaccgcgtggcgtacaacgtcggcgggcagatggccaccaacaaccagagctccaccactgcccccgcgaccggcgcgtacaacctccaggaaatcgtgcccggcagcgtgtggatggagagggacgtgtacctccaaggacccatctgggccaagatcccagagacgggggcgcactttcacccctctccggccatgggcggattcggactcaaacacccaccgcccatgatgctcatcaagaacacgcctgtgcccggaaatatcaccagcttctcggacgtgcccgtcagcagcttcatcacccagtacagcaccgggcaggtcaccgtggagatggagtgggagctcaagaaggaaaactccaagaggtggaacccagagatccagtacacaaacaactacaacgacccccagtttgtggactttgccccggacagcaccggggaatacagaaccaccagacctatcggaacccgataccttacccgacccctttaa

SEQ ID NO: 801 - DNA, 2175 bp, Artificial Sequence
  source: /note="Description of Artificial Sequence: Synthetic polynucleotide"
atgtcttttgttgatcaccctccagattggttggaagaagttggtgaaggtcttcgcgagtttttgggccttgaagcgggcccaccgaaaccaaaacccaatcagcagcatcaagatcaagcccgtggtcttgtgctgcctggttataactatctcggacccggaaacggtctcgatcgaggagagcctgtcaacagggcagacggggtcgcgcgagagcacgacatctcgtacaacgagcagcttgaggcgggagacaacccctacctcaagtacaaccacgcggacgccgagtttcaggagaagctcgccgacgacacatccttcgggggaaacctcggaaaggcagtctttcaggccaagaaaagggttctcgaaccttttggcctggttgaagagggtgctaagacggcccctaccggaaagcggatagacgaccactttccaaaaagaaagaaggcccggaccgaagaggactccaagccttccacctcgtcagacgccgaagctggacccagcggatcccagcagctgcaaatcccagcccaaccagcctcaagtttgggagctgatacaatgtctgcgggaggtggcggcccattgggcgacaataaccaaggtgccgatggagtgggcaatgcctcgggagattggcattgcgattccacgtggatgggggacagagtcgtcaccaagtccacccgaacctgggtgctgcccagctacaacaaccaccagtaccgagagatcaaaagcggctccgtcgacggaagcaacgccaacgcctactttggatacagcaccccctgggggtactttgactttaaccgcttccacagccactggagcccccgagactggcaaagactcatcaacaactactggggcttcagaccccggtccctcagagtcaaaatcttcaacattcaagtcaaagaggtcacggtgcaggactccaccaccaccatcgccaacaacctcacctccaccgtccaagcgtttacggacgacgactaccagctgccctacgtcgtcggcaacgggaccgagggatgcctgccggccttccctccgcaggtctttacgctgccgcagtacggttacgcgacgctgaaccgcgacaacacagaaaatcccaccgagaggagcagcttcttctgcctagagtactttcccagcaagatgctgagaacgggcaacaactttgagtttacctacaactttgaggaggtgcccttccactccagcttcgctcccagtcagaacctcttcaagctggccaacccgctggtggaccagtacttgtaccgcttcgtgagcacaaataacactggcggagtccagttcaacaagaacctggccgggagatacgccaacacctacaaaaactggttcccggggcccatgggccgaacccagggctggaacctgggctccggggtcaaccgcgccagtgtcagcgccttcgccacgaccaataggatggagctcgagggcgcgagttaccaggtgcccccgcagccgaacggcatgaccaacaacctccagggcagcaacacctatgccctggagaacactatgatcttcaacagccagccggcgaacccgggcaccaccgccacgtacctcgagggcaacatgctcatcaccagcgagagcgagacgcagccggtgaaccgcgtggcgtacaacgtcggcgggcagatggccaccaacaaccagagctccaccactgcccccgcgaccggcacgtacaacctccaggaaatcgtgcccggcagcgtgtggatggagagggacgtgtacctccaaggacccatctgggccaagatcccagagacgggggcgcactttcacccctctccggccatgggcggattcggactcaaacacccaccgcccatgatgctcatcaagaacacgcctgtgcccggaaatatcaccagcttctcggacgtgcccgtcagcagcttcatcacccagtacagcaccgggcaggtcaccgtggagatggagtgggagctcaagaaggaaaactccaagaggtggaacccagagatccagtacacaaacaactacaacgacccccagtttgtggactttgccccggacagcaccggggaatacagaaccaccagacctatcggaacccgataccttacccgacccctttaa

SEQ ID NO: 802 - DNA, 2175 bp, Artificial Sequence
  source: /note="Description of Artificial Sequence: Synthetic polynucleotide"
atgtcttttgttgatcaccctccagattggttggaagaagttggtgaaggtcttcgcgagtttttgggccttgaagcgggcccaccgaaaccaaaacccaatcagcagcatcaagatcaagcccgtggtcttgtgctgcctggttataactatctcggacccggaaacggtctcgatcgaggagagcctgtcaacagggcagacgaggtcgcgcgagagcacgacatctcgtacaacgagcagcttgaggcgggagacaacccctacctcaagtacaaccacgcggacgccgagtttcaggagaagctcgccgacgacacatccttcgggggaaacctcggaaaggcagtctttcaggccaagaaaagggttctcgaaccttttggcctggttgaagagggtgctaagacggcccctaccggaaagcggatagacgaccactttccaaaaagaaagaaggcccggaccgaagaggactccaagccttccacctcgtcagacgccgaagctggacccagcggatcccagcagctgcaaatcccagcccaaccagcctcaagtttgggagctgatacaatgtctgcgggaggtggcggcccattgggcgacaataaccaaggtgccgatggagtgggcaatgcctcgggagattggcattgcgattccacgtggatgggggacagagtcgtcaccaagtccacccgaacctgggtgctgcccagctacaacaaccaccagtaccgagagatcaaaagcggctccgtcgacggaagcaacgccaacgcctactttggatacagcaccccctgggggtactttgactttaaccgcttccacagccactggagcccccgagactggcaaagactcatcaacaactactggggcttcagaccccggtccctcagagtcaaaatcttcaacattcaagtcaaagaggtcacggtgcaggactccaccaccaccatcgccaacaacctcacctccaccgtccaagtgtttacggacgacgactaccagctgccctacgtcgtcggcaacgggaccgagggatgcctgccggccttccctccgcaggtctttacgctgccgcagtacggttacgcgacgctgaaccgcgacaacacagaaaatcccaccgagaggagcagcttcttctgcctagagtactttcccagcaagatgctgagaacgggcaacaactttgagtttacctacaactttgaggaggtgcccttccactccagcttcgctcccagtcagaacctcttcaagctggccaacccgctggtggaccagtacttgtaccgcttcgtgagcacaaataacactggcggagtccagttcaacaagaacctggccgggagatacgccaacacctacaaaaactggttcccggggcccatgggccgaacccagggctggaacctgggctccggggtcaaccgcgccagtgtcagcgccttcgccacgaccaataggatggagctcgagggcgcgagttactaggtgcccccgcagccgaacggcatgaccaacaacctccagggcagcaacacctatgccctggagaacactatgatcttcaacagccagccggcgaacccgggcaccaccgccacgtacctcgagggcaacatgctcatcaccagcgagagcgagacgcagccggtgaaccgcgtggcgtacaacgtcggcgggcagatggccaccaacaaccagagctccaccactgcccccgcgaccggcacgtacaacctccaggaaatcgtgcccggcagcgtgtggatggagggggacgtgtacctccaaggacccatctgggccaagatcccagagacgggggcgcactttcacccctctccggccatgggcggattcggactcaagcacccaccgcccatgatgctcatcaagaacacgcctgtgcccggaaatatcaccagcttctcggacgtgcccgtcagcagcttcatcacccagtacagcaccgggcaggtcaccgtggagatggagtgggagctcaagaaggaaaactccaagaggtggaacccagagatccagtacacaaacaactacaacgacccccagtttgtggactttgccccggacagcaccggggaatacagaaccaccagacctatcggaacccgataccttacccgacccctttaa

SEQ ID NO: 803 - DNA, 2175 bp, Artificial Sequence
  source: /note="Description of Artificial Sequence: Synthetic polynucleotide"
atgtcttttgttgatcaccctccagattggttggaagaagttggtgaaggtcttcgcgagtttttgggccttgaagcgggcccaccgaaaccaaaacccaatcagcagcatcaagatcaagcccgtggtcttgtgctgcctggttataactatctcggacccggaaacggtctcgatcgaggagagcctgtcaacagggcagacgaggtcgcgcgagagcacgacatctcgtacaacgagcagcttgaggcgggagacaacccctacctcaagtacaaccacgcggacgccgagtttcaggagaagctcgccgacgacacatccttcgggggaaacctcggaaaggcagtctttcaggccaagaaaagggttctcgaaccttttggcctggttgaagagggtgctaagacggcccctaccggaaagcggatagacgaccactttccaaaaagaaagaaggtccggaccgaagaggactccaagccttccacctcgtcagacgccgaagctggacccagcggatcccagcagctgcaaatcccagcccaaccagcctcaagtttgggagctgatacaatgtctgcgggaggtggcggcccattgggcgacaataaccaaggtgccgatggagtgggcaatgcctcgggagattggcattgcgattccacgtggatgggggacagagtcgtcaccaagtccacccgaacctgggtgctgcccagctacaacaaccaccagtaccgagagatcaaaagcggctccgtcgacggaagcaacgccaacgcctactttggatacagcaccccctgggggtactttgactttaaccgcttccacagccactggagcccccgagactggcaaagactcatcaacaactactggggcttcagaccccggtccctcagagtcaaaatcttcaacattcaagtcaaagaggtcacggtgcaggactccaccaccaccatcgccaacaacctcacctccaccgtccaagtgtttacggacgacgactaccagctgccctacgtcgtcggcaacgggaccgagggatgcctgccggccttccctccgcaggtctttacgctgccgcagtacggttacgcgacgctgaaccgcgacaacacagaaaatcccaccgagaggagcagcttcttctgcctagagtactttcccagcaagatgctgagaacgggcaacaactttgagtttacctacaactttgaggaggtgcccttccactccagcttcgctcccagtcagaacctcttcaagctggccaacccgctggtggaccagtacttgtaccgcttcgtgagcacaaataacactggcggagtccagttcaacaagaacctggccgggagatacgccaacacctacaaaaactggttcccggggcccatgggccgaacccagggctggaacctgggctccggggtcaaccgcgccagtgtcagcgccttcgccacgaccaataggatggagctcgagggcgcgagttaccaggtgcccccgcagccgaacggcatgaccaacaacctccagggcagcaacacctatgccctggagaacactatgatcttcaacagccagccggcgaacccgggcaccaccgccacgtacctcgagggcaacatgctcatcaccagcgagagcgagacgcagccggtgaaccgcgtggcgtacaacgtcggcgggcagatggccaccaacaaccagagctccaccactgcccccgcgaccggcacgtacaacctccaggaaatcgtgcccggcagcgtgtggatggagagggacgtgtacctccaaggacccatctgggccaagatcccagagacgggggcgcactttcacccctctccggccatgggcggattcggactcaaacacccaccgcccatgatgctcatcaagaacacgcctgtgcccggaaatatcaccagcttctcggacgtgcccgtcagcagcttcatcacccagtacagcaccgggcaggtcaccgtggagatggagtgggagctcaagaaggaaaactccgagaggtggaacccagagatccagtacacaaacaactacaacgacccccagtttgtggactttgccccggacagcaccggggaatacagaaccaccagacctattggaacccgataccttacccgacccctttaa

SEQ ID NO: 804 - DNA, 2175 bp, Artificial Sequence
  source: /note="Description of Artificial Sequence: Synthetic polynucleotide"
atgtcttttgttgatcaccctccagattggttggaagaagttggtgaaggtcttcgcgagtttttgggccttgaagcgggcccaccgaaaccaaaacccaatcagcagcatcaagatcaagcccgtggtcttgtgctgcctggttataactatctcggacccggaaacggtctcgatcgaggagagcctgtcaacagggcagacgaggtcgcgcgagagcacgacatctcgtacagcgagcagcttgaggcgggagacaacccctacctcaagtacaaccacgcggacgccgagtttcaggagaagctcgccgacgacacatccttcgggggaaacctcggaaaggcagtctttcaggccaagaaaagggttctcgaaccttttggcctggttgaagagggtgctaagacggcccctaccggaaagcggatagacgaccactttccaaaaagaaagaaggcccggaccgaagaggactccaagccttccacctcgtcagacgccgaagctggacccagcggatcccagcagctgcaaatcccagcccaaccagcctcaagtttgggagctgatacaatgtctgcgggaggtggcggcccattgggcgacaataaccaaggtgccgatggagtgggcaatgcctcgggagattggcattgcgattccacgtggatgggggacagagtcgtcaccaagtccacccgaacctgggtgctgcccagctacaacaaccaccagtaccgagagatcaaaagcggctccgtcgacggaagcaacgccaacgcctactttggatacagcaccccctgggggtactttgactttaaccgcttccacagccactggagcccccgagactggcaaagactcatcaacaactactggggcttcagaccccggtccctcagagtcaaaatcttcaacattcaagtcaaagaggtcacggtgcaggactccaccaccaccatcgccaacaacctcacctccaccgtccaagtgtttacggacgacgactaccagctgccctacgtcgtcggcaacgggaccgagggatgcctgccggccttccctccgcaggtctttacgctgccgcagtacggttacgcgacgctgaaccgcgacaacacagaaaatcccaccgagaggagcagcttcttctgcctagagtactttcccagcaagatgctgagaacgggcaacaactttgagtttacctacaactttgaggaggtgcccttccactccagcttcgctcccagtcagaacctcttcaagctggccaacccgctggtggaccagtacttgtaccgcttcgtgagcacaaataacactggcggagtccagttcaacaagaacctggccgggagatacgccaacacctacaaaaactggttcccggggcccatgggccgaacccagggctggaacctgggctccggggtcaaccgcgccagtgtcagcgccttcgccacgaccaataggatggagctcgagggcgcgagttaccaggtgcccccgcagccgaacggcatgaccaacaacctccagggcagcaacacctatgccctggagaacactatgatcttcaacagccagccggcgaacccgggcaccaccgccacgtacctcgagggcaacatgctcatcaccagcgagagcgagacgcagccggtgaaccgcgtggcgtacaacgtcggcgggcagatggccaccaacaaccagagctccaccactgcccccgcgaccggcacgtacaacctccaggaaatcgtgcccggcagcgtgtggatggagagggacgtgtacctccaaggacccatctgggccaagatcccagagacgggggcgcactttcacccctctccggccatgggcggattcggactcaaacacccaccgcccatgatgctcatcaagaacacgcctgtgcccggaaatatcaccagcttctcggacgtgcccgtcagcagcttcatcacccagtacagcaccgggcaggtcaccgtggagatggagtgggagctcaagaaggaaaactccaagaggtggaacccagagatccagtacacaaacaactacaacgacccccagtttgtggactttgccccggacagcaccggggaatacagaaccgccagacctatcggaacccgataccttacccgacccctttaa

SEQ ID NO: 805 - DNA, 2175 bp, Artificial Sequence
  source: /note="Description of Artificial Sequence: Synthetic polynucleotide"
atgtcttttgttgatcaccctccagattggttggaagaagttggtgaaggtcttcgcgagtttttgggccctgaagcgggcccaccgaaaccaaaacccaatcagcagcatcaagatcaagcccgtggtcttgtgctgcctggttataactatctcggacccggaaacggtctcgatcgaggagagcctgtcaacagggcagacgaggtcgcgcgagagcacgacatctcgtacaacgagcagcttgaggcgggagacaacccctacctcaagtacaaccacgcggacgccgagtttcaggagaagctcgccgacgacacatccttcgggggaaacctcggaaaggcagtctttcaggccaagaaaagggttctcgaaccttttggcctggttgaagagggtgctaagacggcccctaccggaaagcggatagacgaccactttccaaaaagaaagaaggcccggaccgaagaggactccaagccttccacctcgtcagacgccgaagctggacccagcggatcccagcagctgcaaatcccagcccaaccagcctcaagtttgggagctgatacaatgtctgcgggaggtggcggcccattgggcgacaataaccaaggtgccgatggagtgggcaatgcctcgggagattggcattgcgattccacgtggatgggggacagagtcgtcaccaagtccacccgaacctgggtgctgcccagctacaacaaccaccagtaccgagagatcaaaagcggctccgtcgacggaagcaacgccaacgcctactttggatacagcaccccctgggggtactttgactttaaccgcttccacagccactggagcccccgagactggcaaagactcatcaacaactactggggcttcagaccccggtccctcagagtcaaaatcttcaacattcaagtcaaagaggtcacggtgcaggactccaccaccaccatcgccaacaacctcacctccaccgtccaagtgtttacggacgacgactaccagctgccctacgtcgtcggcaacgggaccgagggatgcctgccggccttccctccgcaggtctttacgctgccgcagtacggttacgcgacgctgaaccgcgacaacacagaaaatcccaccgagaggagcagcttcttctgcctagagtactttcccagcaagatgctgagaacgggcaacaactttgagtttacctacaactttgaggaggtgcccttccactccagcttcgctcccagtcagaacctcttcaagctggccaacccgctggtggaccagtacttgtaccgcttcgtgagcacaaataacactggcggagtccagttcaacaagaacctggccgggagatacgccaacacctacaaaaactggttcccggggcccatgggccgaacccagggctggaacctgggctccggggtcaaccgcgccagtgtcagcgccttcgccacgaccaataggatggagctcgagggcgcgagttaccaggtgcccccgcagccgaacggcatgaccaacaacctccagggcagcaacacctatgccctggagaacactatgatcttcaacagccagccggcgaacccgggcaccaccgccacgtacctcgagggcaacatgctcatcaccagcgagagcgagacgcagccggtgaaccgcgtggcgtacaacgtcggcgggcagatgaccaccaacaaccagagctccaccactgcccccgcgaccggcacgtacaacctccaggaaatcgtgcccggcagcgtgtggatggagagggacgtgtacccccaaggacccatctgggccaagatcccagagacgggggcgcactttcacccctctccggccatgggcggattcggactcaaacacccaccgcccatgatgctcatcaagaacacgcctgtgcccggaaatatcaccagcttctcggacgtgcccgtcagcagcttcatcacccagtacagcaccgggcaggtcaccgtggagatggagtgggagctcaagaaggaaaactccaagaggtggaacccagagatccagtacacaaacaactacaacgacccccagtttgtggactttgccccggacagcaccggggaatacaggaccaccagacctatcggaacccgataccttacccgacccctttaa

SEQ ID NO: 806 - DNA, 2175 bp, Artificial Sequence
  source: /note="Description of Artificial Sequence: Synthetic polynucleotide"
atgtcttttgttgatcaccctccagattggttggaagaagttggtgaaggtcttcgcgagtttttgggccttgaagcgggcccaccgaaaccaaaacccaatcagcagcatcaagatcaagcccgtggtcttgtgctgcctggttataactatctcggacccggaaacggtctcgatcgaggagagcctgtcaacagggcagacgaggtcgcgcgagagcacgacatctcgtacaacgagcagcttgaggcgggagacaacccctacctcaagtacaaccacgcggacgccgagtttcaggagaagctcgccgacgacacatccttcgggggaaacctcggaaaggcagtctttcaggccaagaaaagggttctcgaaccttttggcctggttgaagagggtgctaagacggcccctaccggaaagcggatagacgaccactttccaaaaagaaagaaggcccggaccgaagaggactccaagccttccacctcgtcagacgccgaagctggacccagcggatcccagcagctgcaaatcccagcccaaccagcctcaagtttgggagctgatacaatgtctgcgggaggtggcggcccattgggcgacaataaccaaggtgccgatggagtgggcaatgcctcgggagattggcattgcgattccacgtggatgggggacagagtcgtcaccaagtccacccgaacctgggtgctgcccagctacaacaaccaccagtaccgagagatcaaaagcggctccgtcgacggaagcaacgccaacgcctactttggatacagcaccccctgggggtactttgactttaaccgcttccacagccactggagcccccgagactggcaaagactcatcaacaactactggggcttcagaccccggtccctcagagtcaaaatcttcaacattcaagtcaaagaggtcacggtgcaggactccaccaccaccatcgccaacaacctcacctccaccgtccaagtgtttacggacgacgactaccagctgccctacgtcgtcggcaacgggaccgagggatgcctgccggccttccctccgcaggtctttacgctgccgcagtacggttacgcgacgctgaaccgcgacaacacagaaaatcccaccgagaggagcagcttcctctgcctagagtactttcccagcaagatgctgagaacgggcaacaactttgagtttacctacaactttgaggaggtgcccttccactccagcttcgctcccagtcagaacctcttcaagctggccaacccgctggtggaccagtacttgtaccgcttcgtgagcacaaataacactggcggagtccagttcaacaagaacctggccgggagatacgccaacacctacaaaaactggttcccggggcccatgggccgaacccagggctggaacctgggctccggggtcaaccgcgccagtgtcagcgccttcgccacgaccaataggatggagctcgagggcgcgagttaccaggtgcccccgcagccgaacggcatgaccaacaacctccagggcagcaacacctatgccctggagaacactatgatcttcaacagccagccggcgaacccgggcaccaccgccacgtacctcgagggcaacatgctcatcaccagcgagagcgagacgcagccggtgaaccgcgtggcgtacaacgtcggcgggcagatggccaccaacaaccagagctccaccactgcccccgcgaccggcacgtacaacctccaggaaatcgtgcccggcagcgtgtggatgaagagggacgtgtacctccaaggacccatctgggccaagatcccagagacgggggcgcactttcacccctctccggccatgggcggattcggactcaaacacccaccgcccatgatgctcatcaagaacacgcctgtgcccggaaatatcaccagcttctcggacgtgcccgtcagcagcttcatcacccagtacagcaccgggcaggtcaccgtggagatggagtgggagctcaagaaggaaaactccaagaggtggaacccagagatccagtacacaaacaactacaacgacccccagtttgtggactttgccccggacagcaccggggaatacagaaccaccagacctatcggaacccgataccttacccgacccctttaa

SEQ ID NO: 807 - DNA, 2175 bp, Artificial Sequence
  source: /note="Description of Artificial Sequence: Synthetic polynucleotide"
atgtcttttgttgatcaccctccagattggttggaagaagttggtgaaggtcttcgcgagtttttgggccttgaggcgggcccaccgaaaccaaaacccaatcagcagcatcaagatcaagcccgtggtcttgtgctgcctggttataactatctcggacccggaaacggtctcgatcgaggagagcctgtcaacagggcagacgaggtcgcgcgagagcacgacatctcgtacaacgagcagcttgaggcgggagacaacccctacctcaagtacaaccacgcggacgccgagtttcaggagaagctcgccgacgacacatccttcgggggaaacctcggaaaggcagtctttcaggccaagaaaagggttctcgaaccttttggcctggttgaagagggtgctaagacggcccctaccggaaagcggatagacgaccactttccaaaaagaaagaaggcccggaccgaagaggactccaagccttccaccccgtcagacgccgaagctggacccagcggatcccagcagctgcaaatcccagcccaaccagcctcaagtttgggagctgatacaatgtctgcgggaggtggcggcccattgggcgacaataaccaaggtgccgatggagtgggcaatgcctcgggagattggcattgcgattccacgtggatgggggacagagtcgtcaccaagtccacccgaacctgggtgctgcccagctacaacaaccaccagtaccgagagatcaaaagcggctccgtcgacggaagcaacgccaacgcctactttggatacagcaccccctgggggtactttgactttaaccgcttccacagccactggagcccccgagactggcaaagactcatcaacaactactggggcttcagaccccggtccctcagagtcaaaatcttcaacattcaagtcaaagaggtcacggtgcaggactccaccaccaccatcgccaacaacctcacctccaccgtccaagtgtttacggacgacgactaccagctgccctacgtcgtcggcaacgggaccgagggatgcctgccggccttccctccgcaggtctttacgctgccgcagtacggttacgcgacgctgaaccgcgacaacacagaaaatcccaccgagaggagcagcttcttctgcctagagtactttcccagcaagatgctgagaacgggcaacaactttgagtttacctacaactttgaggaggtgcccttccactccagcttcgctcccagtcagaacctcttcaagctggccaacccgctggtggaccagtacttgtaccgcttcgtgagcacaaataacactggcggagtccagttcaacaagaacctggccgggagatacgccaacacctacaaaaactggttcccggggcccatgggccgaacccagggctggaacctgggctccggggtcaaccgcgccagtgtcagcgccttcgccacgaccaataggatggagctcgagggcgcgagttaccaggtgcccccgcagccgaacggcatgaccaacaacctccagggcagcaacacctatgccctggagaacactatgatcttcaacagccagccggcgaacccgggcaccaccgccacgtacctcgagggcaacatgctcatcaccagcgagagcgagacgcagccggtgaaccgcgtggcgtacaacgtcggcgggcagatggccaccaacaaccagagctccaccactgcccccgcgaccggcacgtacaacctccaggaaatcgtgcccggcagcgtgtggatggagagggacgtgtacctccaaggacccatctgggccaagatcccagagacgggggcgcactttcacccctctccggccatgggcggattcggactcaaacacccaccgcccatgatgctcatcaagaacacgcctgtgcccggaaatatcaccagcttctcggacgtgcccgtcagcagcttcatcacccagtacagcaccgggcaggtcaccgtggagatggagtgggagctcaagaaggaaaactccaagaggtggaacccagagatccagtacacaaacaactacaacgacccccagtttgtggactttgccccggacagcaccggggaatacagaaccaccagacctatcggaacccgataccttacccgacccctttaa

SEQ ID NO: 808 - DNA, 2175 bp, Artificial Sequence
  source: /note="Description of Artificial Sequence: Synthetic polynucleotide"
atgtcttttgttgatcaccctccagattggttggaagaagttggtgaaggtcttcgcgagtttttgggccttgaagcgggcccaccgaaaccaaaacccaatcagcagcatcaagatcaagcccgtggtcttgtgctgcctggttataactatctcggacccggaaacggtctcgatcgaggagagcctgtcaacagggcagacgaggtcgcgcgagagcacgacatctcgtacaacgagcagcttgaggcgggagacaacccctacctcaagtacaaccacgcggacgccgagtttcaggagaagctcgccgacgacacatccttcgggggaaacctcggaaaggcagtctttcaggccaagaaaagggttctcgaaccttttggcctggttgaagagggtgctaagacggcccctaccggaaagcggatagacgaccactttccaaaaagaaagaaggcccggaccgaagaggactccaagccttccacctcgtcagacgccgaagctggacccagcggatcccagcagctgcaaatcccagcccaaccagcctcaagtttgggagctgatacaatgtctgcgggaggtggcggcccattgggcgacaataaccaaggtgccgatggagtgggcaatgcctcgggagattggcattgcgattccacgtggatgggggacagagtcgtcaccaagtccacccgaacctgggtgctgcccagctacaacaaccaccagtaccgagagatcaaaagcggctccgtcgacggaagcaacgccaacgcctactttggatacagcaccccctgggggtactttgactttaaccgcttccacagccactggagcccccgagactggcaaagactcatcaacaactactggggcttcagaccccggtccctcagagtcaaaatcttcaacattcaagtcaaagaggtcacggtgcaggactccaccaccaccatcgccaacaacctcacctccaccgtccaagtgtttacggacgacgactaccagctgccctacgtcgtcggcaacgggaccgagggatgcctgccggccttccctccgcaggtctttacgctgccgcagtacggttacgcgacgctgaaccgcgacaacacagaaaatcccaccgagaggagcagcttcttctgcctagagtactttcccagcaagatgctgagaacgggcaacaactttgagtttacctacaactttgaggaggtgcccttccactccagcttcgctcccagtcagaacctcttcaagctggccaacccgctggtggaccagtacttgtaccgcttcgtgagcacaaataacactggcggagtccagttcaacaagaacctggccgggagatacgccaacacccacaaaaactggttcccggggcccatgggccgaacccagggctggaacctgggctccggggtcaaccgcgccagtgtcagcgccttcgccacgaccaataggatggagctcgagggcgcgagttaccaggtgcccccgcagtcgaacggcatgaccaacaacctccggggcagcaacacctatgccctggagaacactatgatcttcaacagccagccggcgaacccgggcaccaccgccacgtacctcgagggcaacatgctcatcaccagcgagagcgagacgcagccggtgaaccgcgtggcgtacaacgtcggcgggcagatggccaccaacaaccagagctccaccactgcccccgcgaccggcacgtacaacctccaggaaatcgtgcccggcagcgtgtggatggagagggacgtgtacctccaaggacccatctgggccaagatcccagagacgggggcgcactttcacccctctccggccatgggcggattcggactcaaacacccaccgcccatgatgctcatcaagaacacgcctgtgcccggaaatatcaccagcttctcggacgtgcccgtcagcagcttcatcacccagtacagcaccgggcaggtcaccgtggagatggagtgggagctcaagaaggaaaactccaagaggtggaacccagagatccagtacacaaacaactacaacgacccccagtttgtggactttgccccggacagcaccggggaatacagaaccaccagacctatcggaacccgataccttacccgacccctttaa

SEQ ID NO: 809 - DNA, 2175 bp, Artificial Sequence
  source: /note="Description of Artificial Sequence: Synthetic polynucleotide"
atgtcttttgttgatcaccctccagattggttggaagaagttggtgaaggtcttcgcgagtttttgggccttgaagcgggcccaccgaaaccaaaacccaatcagcagcatcaagatcaagcccgtggtcttgtgctgcctggttataactatctcggacccggaaacggtctcgatcgaggagagcctgtcaacagggcagacgaggtcgcgcgagagcacgacatctcgtacaacgagcagcttgaggcgggagacaacccctacctcaagtacaaccacgcggacgccgagtttcaggagaagctcgccgacgacacatccttcgggggaaacctcggaaaggcagtctttcaggccaagaaaagggttctcgaaccttttggcctggttgaagagggtgctaagacggcccctaccggaaagcggatagacgaccactttccaaaaagaaagaaggcccggaccgaagaggactccaagccttccacctcgtcagacgccgaagctggacccagcggatcccagcagctgcaaatcccagcccaaccagcctcaagtttgggagctgatacaatgtctgcgggaggtggcggcccattgggcgacaataaccaaggtgccgatggagtgggcaatgcctcgggagattggcattgcgattccacgtggatgggggacagagtcgtcaccaagtccacccgaacctgggtgctgcccagctacaacaaccaccagtaccgagagatcaaaagcggctccgtcgacggaagcaacgccaacgcctactttggatacagcaccccctgggggtactttgactttaaccgcttccacagccactggagcccccgagactggcaaagactcatcaacaactactggggcttcagaccccggtccctcagagtcaaaatcttcaacattcaagtcaaagaggtcacggtgcaggactccaccaccaccatcgccaacaacctcacctccaccgtccaagtgtttacggacgacgactaccagctgccctacgtcgtcggcaacgggaccgagggatgcctgccggccttccctccgcaggtctttacgctgccgcagtacggttacgcgacgctgaaccgcgacaacacagaaaatcccaccgagaggagcagcttcttctgcctagagtactttcccagcaagatgctgagaacgggcaacaactttgagtttacctacaactttgaggaggtgcccttccactccagcttcgctcccagtcagaacctcttcaagctggccaacccgctggtggaccagtacttgtaccgcttcgtgagcacaaataacactggcggagtccagttcaacaagaacctggccgggagatacgccaacacctacaaaaactggttcccggggcccatgggccgaacccagggctggaacctgggctccggggtcaaccgcgccagtgtcagcgccttcgccacgaccaataggatggagctcgagggcgcgagttaccaggtgcccccgcagccgaacggcatgaccaacaacctccagggcagcaacacctatgccctggagaacactatgatcttcaacagccagccggcgaacccgggcaccaccgccacgtacctcgagggcaacatgctcatcaccagcgagagcgagacgcagccggtgaaccgcgtggcgtacagcgtcggcgggcagatggccaccaacaaccagagctccaccactgcccccacgaccggcacgtacaacctccaggaaatcgtgcccggcagcgtgtggatggagagggacgtgtacctccaaggacccatctgggccaagatcccagagacgggggcgcactttcacccctctccggccatgggcggattcagactcaaacacccaccgcccatgatgctcatcaagaacacgcctgtgcccggaaatatcaccagcttctcggacgtgcccgtcagcagcttcatcacccagtacagcaccgggcaggtcaccgtggagatggagtgggagctcaagaaggaaaactccaagaggtggaacccagagatccagtacacaaacaactacaacgacccccagtttgtggactttgccccggacagcaccggggaatacagaaccaccagacctatcggaacccgataccttacccgacccctttaa

SEQ ID NO: 810 - DNA, 2175 bp, Artificial Sequence
  source: /note="Description of Artificial Sequence: Synthetic polynucleotide"
atgtcttttgttgatcaccctccagattggttggaagaagttggtgaaggtcttcgcgagtttttgggccttgaagcgggcccaccgaaaccaaaacccaatcagcagcatcaagatcaagcccgtggtcttgtgctgcctggttataactatctcggacccggaaacggtctcgatcgaggagagcctgtcaacagggcagacgaggtcgcgcgagagcacgacatctcgtacaacgagcagcttgaggcgggagacaacccctacctcaagtacaaccacgcggacgccgagtttcaggagaagctcgccgacgacacatccttcgggggaaacctcggaaaggcagtctttcaggccaagaaaagggttctcgaaccttttggcctggttgaagagggtgctaagacggcccctaccggaaagcggatagacgaccactttccaaaaagaaagaaggcccggaccgaagaggactccaagccttccacctcgtcagacgccgaagctggacccagcggatcccagcagctgcaaatcccagcccaaccagcctcaagtttgggagctgatacaatgtctgcgggaggtggcggcccattgggcgacaataaccaaggtgccgatggagtgggcaatgcctcgggagattggcattgcgattccacgtggatgggggacagagtcgtcaccaagtccacccgaacctgggtgctgcccagctacaacaaccaccagtaccgagagatcaaaagcggctccgtcgacggaagcaacgccaacgcctactttggatacagcaccccctgggggtactttgactttaaccgcttccacagccactggagcccccgagactggcaaagactcatcaacaactactggggcttcagaccccggtccctcagagtcaaaatcttcaacattcaagtcaaagaggtcacggtgcaggactccaccaccaccatcgccaacaacctcacctccaccgtccaagtgtttacggacgacgactaccagctgccctacgtcgtcggcaacgggaccgagggatgcctgccggccttccctccgcaggtctttacgctgccgcagtacggttacgcgacgctgaaccgcgacaacacagaaaatcccaccgagaggagcagcttcttctgcctagagtactttcccagcaagatgctgagaacgggcaacaactttgagtttacctacaactttgaggaggtgcccttccactccagcttcgctcccagtcagaacctcttcaagctggccaacccgctggtggaccagtacttgtaccgcttcgtgagcacaaataacactggcggagtccagttcaacaagaacctggccgggagatacgccaacacctacaaaaactggttcccggggcccatgggccgaacccagggctggaacctgggctccggggtcaaccgcgccagtgtcagcgccttcgccgcgaccaataggatggagctcgagggcgcgagttaccaggtgcccccgcagccgaacggcatgaccaacaacctccagggcagcaacacctatgccctggagaacactatgatcttcaacagccagccggcgaacccgggcaccaccgccacgtacctcgagggcaacatgctcatcaccagcgagagcgagacgcagccggtgaaccgcgtggcgtacaacgtcggcgggcagatggccaccaacaaccagagctccaccactgcccccgcgaccggcacgtacaacctccaggaaatcgtgcccggcggcgtgtggatggagagggacgtgtacctccaaggacccatctgggccaagatcccagagacgggggcgcactttcacccctctccggccatgggcggattcggactcaaacacccaccgcccatgatgctcatcaagaacacgcctgtgcccggaaataccaccagcttctcggacgtgcccgtcagcagcttcatcacccagtacagcaccgggcaggtcaccgtggagatggagtgggagctcaagaaggaaaactccaagaggtggaacccagagatccagtacacaaacaactacaacgacccccagtttgtggactttgccccggacagcaccggggaatacagaaccaccagacctatcggaacccgataccttacccgacccctttaa

SEQ ID NO: 811 - DNA, 2175 bp, Artificial Sequence
  source: /note="Description of Artificial Sequence: Synthetic polynucleotide"
atgtcttttgttgatcaccctccagattggttggaagaagttggtgaaggtcttcgcgagtttttgggccttgaagcgggcccaccgaaaccaaaacccaatcagcagcatcaagatcaagcccgtggtcttgtgctgcctggttataactatctcggacccggaaacggtctcgatcgaggagagcctgtcaacagggcagacgaggtcgcgcgagagcacgacatctcgtacaacgagcagcttgaggcgggagacaacccctacctcaagtacaaccacgcggacgccgagtttcaggagaagctcgccgacgacacatccttcgggggaaacctcggaaaggtagtctttcaggccaagaaaagggttctcgaaccttttggcctggttgaagagggtgctaagacggcccctaccggaaagcggatagacgaccactttccaaaaagaaagaaggcccggaccgaagaggactccaagccttccacctcgtcagacgccgaagctggacccagcggatcccagcagctgcaaatcccagcccaaccagcctcaagtttgggagctgatacaatgtctgcgggaggtggcggcccattgggcggcaataaccaaggtgccgatggagtgggcaatgcctcgggagattggcattgcgattccacgtggatgggggacagagtcgtcaccaagtccacccgaacctgggtgctgcccagctacaacaaccaccagtaccgagagatcaaaagcggctccgtcgacggaagcaacgccaacgcctactttggatacagcaccccctgggggtactttgactttaaccgcttccacagccactggggcccccgagactggcaaagactcatcaacaactactggggcttcagaccccggtccctcagagtcaaaatcttcaacattcaagtcaaagaggtcacggtgcaggactccaccaccaccatcgccaacaacctcacctccaccgtccaagtgtttacggacgacgactaccagctgccctacgtcgtcggcaacgggaccgagggatgcctgccggccttccctccgcaggtctttacgctgccgcagtacggttacgcgacgctgaaccgcgacaacacagaaaatcccaccgagaggagcagcttcttctgcctagagtactttcccagcaagatgctgagaacgggcaacaactttgagtttacctacaactttgaggaggtgcccttccactccagcttcgctcccagtcagaacctcttcaagctggccaacccgctggtggaccagtacttgtaccgcttcgtgagcacaaataacactggcggagtccagttcaacaagaacctggccgggagatacgccaacacctacaaaaactggttcccggggcccatgggccgaacccagggctggaacctgggctccggggtcaaccgcgccagtgtcagcgccctcgccacgaccaataggatggagctcgagggcgcgagttaccaggtgcccccgcagccgaacggcatgaccaacaacctccagggcagcaacacctatgccctggagaacactatgatcttcaacagccagccggcgaacccgggcaccaccgccacgtacctcgagggcaacatgctcatcaccagcgagagcgagacgcagccggtgaaccgcgtggcgtacaacgtcggcgggcagatggccaccaacaaccagagctccaccactgcccccgcgaccggcacgtacaacctccaggaaatcgtgcccggcagcgtgtggatggagagggacgtgtacctccaaggacccatctgggccaagatcccagagacgggggcgcactttcacccctctccggccatgggcggattcggactcaaacacccaccgcccatgatgctcatcaagaacacgcctgtgcccggaaatatcaccagcttctcggacgtgcccgtcagcagcttcatcacccagtacagcaccgggcaggtcaccgtggagatggagtgggagctcaagaaggaaaactccaagaggtggaacccagagatccagtacacaaacaactacaacgacccccagtttgtggactttgccccggacagcaccggggaatacagaaccaccagacctatcggaacccgataccttacccgacccctttaa

SEQ ID NO: 812 - DNA, 2175 bp, Artificial Sequence
  source: /note="Description of Artificial Sequence: Synthetic polynucleotide"
atgtcttttgttgatcaccctccagattggttggaagaagttggtgaaggtcttcgcgagtttttgggccttgaagcgggcccaccgaaaccaaaacccaatcagcagcatcaagatcaagcccgtggtcttgtgctgcctggttataactatctcggacccggaaacggtctcgatcgaggagagcctgtcaacagggcagacgaggtcgcgcgagagcacgacatctcgtacaacgagcagcttgaggcgggagacaacccctacctcaagtacaaccacgcggacgccgagtttcaggagaagctcgccgacgacacatccttcgggggaaacctcggaaaggcagtctttcaggccaagaaaagggttctcgaaccttttggcctggttgaagagggtgctaagacggcccctaccggaaagcggatagacgaccactttccaaaaagaaagaaggcccggaccgaagaggactccaagccttccacctcgtcagacgccgaagctggacccagcggatcccagcagctgcaaatcccagcccaaccagcctcaagtttgggagctgatacaatgtctgcgggaggtggcggcccattgggcgacaataaccaaggtgccgatggagtgggcaatgcctcgggagattggcattgcgattccacgtggatgggggacagagtcgtcaccaagtccacccgaacctgggtgctgcccagctacaacaaccaccagtaccgagagatcaaaagcggctccgtcgacggaagcaacgccaacgcctactttggatacagcaccccctgggggtactttgactttaaccgcttccacagccactggagcccccgagactggcaaagactcatcaacaactactggggcttcagaccccggtccctcagagtcaaaatcttcaacattcaagtcaaagaggtcacggtgcaggactccaccaccaccatcgccaacaacctcacctccaccgtccaagtgtttacggacgacgactaccagctgccctacgtcgtcggcaacgggaccgagggatgcctgccggccttccctccgcaggtctttacgctgccgcagtacggttacgcgacgctgaaccgcgacaacacagaaaatcccaccgagaggagcagcttcttctgcctagagtactttcccagcaagatgctgagaacgggcaacaactttgagtttacctacaactttgaggaggtgcccttccactccagcttcgctcccagtcagaacctcttcaagctggccaacccgctggtggaccagtacttgtaccgcttcgtgagcacaaataacactggcggagtccagttcaacaagaacctggccgggagatacgccaacacctacaaaaactggttcccggggcccatgggccgaacccagggctggaacctgggctccggggtcaaccgcgccagtgtcagcgccttcgccacgaccaataggatggagctcgagggcgcgagttaccaggtgcccccgcagccgaacggcatgaccaacaacctccagggcagcaacacctatgccctggagaacactatgatcttcaacagccagccggcgaacccgggcaccaccgccacgtacctcgagggcaacatgctcatcaccagcgagagcgagacgcagccggtgaaccgcgtggcgtacaacgtcggcgggcagatggccaccaacaaccagagctccaccactgcccccgcgaccggcacgtacaacctccaggaaatcgtgcccggcagcgtgtggatggagagggacgtgtacctccaaggacccatctgagccaagatcccagagacgggggcgcactttcacccctctccggccatgggcggattcggactcaaacacccaccgcccatgatgctcatcaagaacacgcctgtgcccggaaatatcaccagcttctcggacgtgcccgtcagcagcttcatcacccagtacagcaccgggcaggtcaccgtggagatggagtgggagctcaagaaggaaaactccaagaggtggaacccagagatccagtacacaaacaactacaacgacccccagtttgtggactttgccccggacagcaccggggaatgcagaaccaccagacctatcggaacccgataccttacccgacccctttaa

SEQ ID NO: 813 - DNA, 2175 bp, Artificial Sequence
  source: /note="Description of Artificial Sequence: Synthetic polynucleotide"
atgtcttttgttgatcaccctccagattggttggaagaagttggtgaaggtcttcgcgagtttttgggccttgaagcgggcccaccgaaaccaaaacccaatcagcagcatcaagatcaagcccgtggtcttgtgctgcctggttataactatctcggacccggaaacggtctcgatcgaggagagcctgtcaacagggcagacgaggtcgcgcgagagcacgacatctcgtacaacgagcagcttgaggcgggagacaacccctacctcaagtacaaccacgcggacgccgagtttcaggagaagctcgccgacgacacatccttcgggggaaacctcggaaaggcagtctttcaggccaagaaaagggttctcgaaccttttggcctggttgaagagggtgctaagacggcccctaccggaaagcggatagacgaccactttccaaaaagaaagaaggcccggaccgaagaggactccaagccttccacctcgtcagacgccgaagctggacccagcggatcccagcagctgcaaatcccagcccaaccagcctcaagtttgggagctgatacaatgtctgcgggaggtggcggcccattgggcgacaataaccaaggtgccgatggagtgggcaatgcctcgggagattggcattgcgattccacgtggatgggggacagagtcgtcaccaagtccacccgaacctgggtgctgcccagctacaacaaccaccagtaccgagagatcaaaagcggctccgtcgacggaagcaacgccaacgcctactttggatacagcaccccctgggggtactttgactttaaccgcttccacagccactggagcccccgagactggcaaagactcatcaacaactactggggcttcagaccccggtccctcagagtcaaaatcctcaacattcaagtcaaagaggtcacggtgcaggactccaccaccaccatcgccaacaacctcacctccaccgtccaagtgtttacggacgacgactaccagctgccctacgtcgtcggcaacgggaccgagggatgcctgccggccttccctccgcaggtctttacgctgccgcagtacggttacgcgacgctgaaccgcgacaacacagaaaatcccaccgagaggagcagcttcttctgcctagagtactttcccagcaagatgctgagaacgggcaacaactttgagtttacctacaactttgaggaggtgcccttccactccagcttcgctcccagtcagaacctcttcaagctggccaacccgctggtgggccagtacttgtaccgcttcgtgagcacaaataacactggcggagtccagttcaacgagaacctggccgggagatacgccaacacctacaaaaactggttcccggggcccatgggccgaacccagggctggaacctgggctccggggtcaaccgcgccagtgtcagcgccttcgccacgaccaataggatggagctcgagggcgcgagttaccaggtgcccccgcagccgaacggcatgaccaacaacctccagggcagcaacacctatgccctggagaacactatgatcttcaacagccagccggcgaacccgggcaccaccgccacgtacctcgagggcaacatgctcatcaccagcgagagcgagacgcagccggtgaaccgcgtggcgtacaacgtcggcgggcagatggccaccaacaaccagagctccaccactgcccccgcgaccggcacgtacaacctccaggaaatcgtgcccggcagcgtgtggatggagagggacgtgtacctccaaggacccatctgggccaagatcccagagacgggggcgcactttcacccctctccggccatgggcggattcggactcaaacacccaccgcccatgatgctcatcaagaacacgcctgtgcccggaaatatcaccagcttctcggacgtgcccgtcagcagcttcatcacccagtacagcaccgggcaggccaccgtggagatggagtgggagctcaagaaggaaaactccaagaggtggaacccagagatccagtacacaaacaactacaacgacccccagtttgtggactttgccccggacagcaccggggaatacagaaccaccagacctatcggaacccgataccttacccgacccctttaa

SEQ ID NO: 814 - DNA, 2175 bp, Artificial Sequence
  source: /note="Description of Artificial Sequence: Synthetic polynucleotide"
atgtcttttgttgatcaccctccagattggttggaagaagttggtgaaggtcttcgcgagtttttgggccttgaagcgggcccaccgaaaccaaaacccaatcagcagcatcaagatcaagcccgtggtcttgtgctgcctggttataactatctcggacccggaaacggcctcgatcgaggagagcctgtcaacagggcagacgaggtcgcgcgagagcacgacatctcgtacaacgagcagcttgaggcgggagacaacccctacctcaagtacaaccacgcggacgccgagtttcaggagaagctcgccgacgacacatccttcgggggaaacctcggaaaggcagtctttcaggccaagaaaagggttctcgaaccttttggcctggttgaagagggtgctaagacggcccctaccggaaagcggatagacgaccactttccaaaaagaaagaaggcccggaccgaagaggactccaagccttccacctcgtcagacgccgaagctggacccagcggatcccagcagctgcaaatcccagcccaaccagcctcaagtttgggagctgatacaatgtctgcgggaggtggcggcccattgggcgacaataaccaaggtgccgatggagtgggcaatgcctcgggagattggcattgcgattccacgtggatgggggacagagtcgtcaccaagtccacccgaacctgggtgctgcccagctacaacaaccaccagtaccgagagatcaaaagcggctccgtcgacggaagcaacgccaacgcctactttggatacagcaccccctgggggtactttgactttaaccgcttccacagccactggagcccccgagactggcaaagactcatcaacaactactggggcttcagaccccggtccctcagagtcaaaatcttcaacattcaagtcaaagaggtcacggtgcaggactccaccaccatcatcgccaacaacctcacctccaccgtccaagtgtttacggacgacgactaccagctgccctacgtcgtcggcaacgggaccgagggatgcctgccggccttccctccgcaggtctttacgctgccgcagtacggttacgcgacgctgaaccgcgacaacacagaaaatcccaccgagaggagcagcttcttctgcctagagtactttcccagcaagatgctgagaacgggcaacaactttgagtttacctacaactttgaggaggtgcccttccactccagcttcgcccccagtcagaacctcttcaagctggccaacccgctggtggaccagtacttgtaccgcttcgtgagcacaaataacactggcggagtccagttcaacaagaacctggccgggagatacgccaacacctacaaaaactggttcccggggcccatgggccgaacccagggctggaacctgggctccggggtcaaccgcgccagtgtcagcgccttcgccacgaccaataggatggagctcgagggcgcgagttaccaggtgcccccgcagccgaacggcatgaccaacaacctccagggcagcaacacctatgccctggagaacactatgatcttcaacagccagccggcgaacccgggcaccaccgccacgtacctcgagggcaacatgctcatcaccagcgagagcgagacgcagccggtgaaccgcgtggcgtacaacgtcggcgggcagatggccaccaacaaccagagctccaccactgcccccgcgaccggcacgtacaacctccaggaaatcgtgcccggcagcgtgtggatggagagggacgtgtacctccaaggacccatctgggccaagatcccagagacgggggcgcactttcacccctctccggccatgggcggattcggactcaaacacccaccgcccatgatgctcatcaagaacacgcctgtgcccggaaatatcaccagcttctcggacgtgcccgtcagcagcttcatcacccagtacagcaccgggcaggtcaccgtggagatggagtgggagctcaagaaggaaaactccaagaggtggaacccagagatccagtacacaaacaactacaacgacccccagtttgtggactttgccccggacagcaccggggaatacagaaccaccagacctatcggaacccgataccttacccgacccctttaa

SEQ ID NO: 815 - DNA, 2175 bp, Artificial Sequence
  source: /note="Description of Artificial Sequence: Synthetic polynucleotide"
atgtcttttgttgatcaccctccagattggttggaagaagttggtgaaggtcttcgcgagtttttgggccttgaagcgggcccaccgaaaccaaaacccaatcagcagcatcaagatcaagcccgtggtcttgtgctgcctggttataactatctcggacccggaaacggtctcgatcgaggagagcctgtcaacagggcagacgaggtcgcgcgagagcacgacatctcgtacaacgagcagcttgaggcgggagacaacccctacctcaagtacaaccacgcggacgccgagtttcaggagaagctcgccgacgacacatccttcgggggaaacctcggaaaggcagtctttcaggccaagaaaagggttctcgaaccttttggcctggttgaagagggtgctaagacggcccctaccggaaagcggatagacgaccactttccaaaaagaaagaaggcccggaccgaagaggactccaagccttccacctcgtcagacgccgaagctggacccagcggatcccagcagctgcaaatcccagcccaaccagcctcaagtttgggagctgatacaatgtctgcgggaggtggcggcccattgggcgacaataaccaaggtgccgatggagtgggcaatgcctcgggagattggcattgcgattccacgtggatgggggacagagtcgtcaccaagtccacccgaacctgggtgctgcccagctacaacaaccaccagtaccgagagatcaaaagcggctccgtcgacggaagcaacgccaacgcctactttggatacagcaccccctgggggtactttgactttaaccgcttccacagccactggagcccccgagactggcaaagactcatcaacaactactggggcttcagaccccggtccctcagagtcaaaatcttcaacattcaagtcaaagaggtcacggtgcaggactccaccaccaccatcgccaacaacctcacctccaccgtccaagtgtttacggacgacgactaccagctgccctacgtcgtcggcaacgggaccgagggatgcctgccggccttccctccgcaggtctttacgctgccgcagtacggttacgcgacgctgaaccgcgacaacacagaaaatcccaccgagaggagcagcttcttctgcctagagtactttcccagcaagatgctgagaacgggcaacaactttgagtttacctacaactttgaggaggtgcccttccactccagcttcgctcccagtcagaacctcttcaagctggccaacccgctggtggaccagtacttgtaccgcttcgtgagcacaaataacactggcggagtccagttcaacaagaacctggccgggagatacgccaacacctacaaaaactggttcccggggcccatgggccgaacccagggctggaacctgggctccggggtcaaccgcgccagtgtcagcgccttcgccacgaccaataggatggagctcgagggcgcgagttaccaggtgcccccgcagccgaacggcatgaccaacaacctccagggcagcaacacctatgccctggagaacactatgatcttcaacagccagccggcgaacccgggcaccaccgccacgtacctcgagggcaacatgctcatcaccagcgagagcgagacgcagccggtgaaccgcgtggcgtacaacgtcggcgggcagatggccaccaacaaccagagctccaccactgcccccgcgaccggcacgtacaacctccaggaaatcgtgcccggcagcgtgtggatggagagggacgtgtacctccaaggacccatctgggccaagatcccagagacgggggcgcactttcacccctctccggccatgggcggattcggactcaaacacccaccgcccatgatgctcatcaagaacacgcctgtgcccggaaatatcaccagcctctcggacgtgcccgtcagcagcttcatcacccagtacagcaccgggcaggtcaccgtggagatggagtgggagctcaagaaggaaaactccaagaggtggaacccagagatccagtacacaaacaactacaacgacccccagtttgtggactttgccccggacagcaccggggaatacagaaccaccagacctatcggaacccgataccttacccgacccctttaa

SEQ ID NO: 816 - DNA, 2175 bp, Artificial Sequence
  source: /note="Description of Artificial Sequence: Synthetic polynucleotide"
atgtcttttgttgatcaccctccagattggttggaagaagttggtgaaggtcttcgcgagtttttgggccttgaagcgggcccaccgaaaccaaaacccaatcagcagcatcaagatcaagcccgtggtcttgtgctgcctggttataactatctcggacccggaaacggtctcgatcgaggagagcctgccaacagggcagacgaggtcgcgcgagagcacgacatctcgtacaacgagcagcttgaggcgggagacaacccctacctcaagtacaaccacgcgggcgccgagtttcaggagaagctcgccgacgacacatccttcgggggaaacctcggaaaggcagtctttcaggccaagaaaagggttctcgaaccttttggcctggttgaagagggtgctaagacggcccctaccggaaagcggatagacgaccactttccaaaaagaaagaaggcccggaccgaagaggactccaagccttccacctcgtcagacgccgaagctggacccagcggatcccagcagctgcaaatcccagcccaaccagcctcaagtttgggagctgatacaatgtctgcgggaggtggcggcccattgggcgacaataaccaaggtgccgatggagtgggcaatgcctcgggagattggcattgcgattccacgtggatgggggacagagtcgtcaccaagtccacccgaacctgggtgctgcccggctacaacaaccaccagtaccgagagatcaaaagcggctccgtcgacggaagcaacgccaacgcctactttggatacagcaccccctgggggtactttgactttaaccgcttccacagccactggagcccccgagactggcaaagactcatcaacaactactggggcttcagaccccggtccctcagagtcaaaatcttcaacattcaagtcaaagaggtcacggtgcaggactccaccaccaccatcgccaacaacctcacctccaccgtccaagtgtttacggacgacgactaccagctgccctacgtcgtcggcaacgggaccgagggatgcctgccggccttccctccgcaggtctttacgctgccgcagtacggttacgcgacgctgaaccgcgacaacacagaaaatcccaccgagaggagcagcttcttctgcctagagtactttcccagcaagatgctgagaacgggcaacaactttgagtttacctacaactttgaggaggtgcccttccactccagcttcgctcccagtcagaacctcttcaagctggccaacccgctggtggaccagtacttgtaccgcttcgtgagcacaaataatactggcggagtccagttcaacaagaacctggccgggagatacgccaacacctacaaaaactggttcccggggcccatgggccgaacccagggctggaacctgggctccggggtcaaccgcgccagtgtcagcgccttcgccacgaccaataggatggagctcgagggcgcgagttaccaggtgcccccgcagccgaacggcatgaccaacaacctccagggcagcaacacctatgccctggagaacactatgatcttcaacagccagccggcgaacccgggcaccaccgccacgtacctcgagggcaacatgctcatcaccagcgagagcgagacgcagccggtgaaccgcgtggcgtacaacgtcggcgggcagatggccaccaacaaccagagctccaccactgcccccgcgaccggcacgtacaacctccaggaaatcgtgcccggcagcgtgtggatggagagggacgtgtacctccaaggacccatctgggccaagatcccagagacgggggcgcactttcacccctctccggccatgggcggattcggactcaaacacccaccgcccatgatgctcatcaagaacacgcctgtgcccggaaatatcaccagcttctcggacgtgcccgtcagcagcttcatcacccagtacagcaccgggcaggtcaccgtggagatggagtgggagctcaagaaggaaaactccaagaggtggaacccagagatccagtacacaaacaactacaacgacccccagtttgtggactttgccccggacagcaccggggaatacagaaccaccagacctatcggaacccgataccttacccgacccctttaa

SEQ ID NO: 817 - DNA, 2175 bp, Artificial Sequence
  source: /note="Description of Artificial Sequence: Synthetic polynucleotide"
atgtcttttgttgatcaccctccagattggttggaagaagttggtgaaggtcttcgcgagtttttgggccttgaagcgggcccaccgaaaccaaaacccaatcagcagcatcaagatcaagcccgtggtcttgtgctgcctggttataactatctcggacccggaaacggtctcgatcgaggagagcctgtcaacagggcagacgaggtcgcgcgagagcacgacatctcgtacaacgagcagcttgaggcgggagacaacccctacctcaagtacaaccacgcggacgccgagtttcaggagaagctcgccgacgacacatccttcgggggaaacctcggaaaggcagtctttcaggccaagaaaagggttctcgaaccttttggcctggttgaagagggtgctaagacggcccctaccggaaagcggatagacgaccactttccaaaaagaaagaaggcccggaccgaagaggactccaagcctcccacctcgtcagacgccgaagctggacccagcggatcccagcagctgcaaatcccagcccaaccagcctcaagtttgggagctgatacaatgtctgcgggaggtggcggcccattgggcgacaataaccaaggtgccgatggagtgggcaatgcctcgggagattggcattgcgattccacgtggatgggggacagagtcgtcaccaagtccacccgaacctgggtgctgcccagctacaacaaccaccagtaccgagagatcaaaagcggctccgtcgacggaagcaacgccaacgcctactttggatacagcaccccctgggggtactttgactttaaccgcttccacagccactggagcccccgagactggcaaagactcatcaacaactactggggcttcagaccccggtccctcagagtcaaaatcttcaacattcaagtcaaagaggtcacggtgcaggactccgccaccaccatcgccaacaacctcacctccaccgtccaagtgtttacggacgacgactaccagctgccctacgtcgtcggcaacgggaccgagggatgcctgccggccttccctccgcaggtctttacgctgccgcagtacggttacgcgacgctgaaccgcgacaacacagaaaatcccaccgagaggagcagcttcttctgcctagagtactttcccagcaagatgctgagaacgggcaacaactttgagtttacctacaactttgaggaggtgcccttccactccagcttcgctcccagtcagaacctcttcaagctggccaacccgctggtggaccagtacttgtaccgcttcgtgagcacaaataacactggcggagtccagttcaacaagaacctggccgggagatacgccaacacctacaaaaactggttcccggggcccatgggccgaacccagggctggaacctgggctccggggtcaaccgcgccagtgtcagcgccttcgccacgaccaataggatggagctcgagggcgcgagttaccaggtgcccccgcagccgaacggcatgaccaacaacctccagggcagcaacacctatgccctggagaacactatgatcttcaacagccagccggcgaacccgggcaccaccgccacgtacctcgagggcaacatgctcatcaccagcgagagcgagacgcagccggtgaaccgcgtggcgtacaacgtcggcgggcagatggccaccaacaaccagagctccaccactgcccccgcgaccggcacgtacaacctccaggaaatcgtgcccggcagcgtgtggatggagagggacgtgtacctccaaggacccatctgggccaagatcccagagacgggggcgcactttcacccctctccggccatgggcggattcggactcaaacacccaccgcccatgatgctcatcaagaacacgcctgtgcccggaaatatcaccagcttctcggacgtgcccgtcagcagcttcatcacccagtacagcaccgggcaggtcaccgtggagatggagtgggagctcaagaaggaaaactccaagaggtggaacccagagatccagtacacaaacaactacaacgacccccagtttgtggactttgccccggacagcaccggggaatacagaaccaccagacctatcggaacccgataccttacccgacccctttaa

SEQ ID NO: 818 - DNA, 2175 bp, Artificial Sequence
  source: /note="Description of Artificial Sequence: Synthetic polynucleotide"
atgtcttttgttgatcaccctccagattggttggaagaagttggtgaaggtcttcgcgagtttttgggccttgaagcgggcccaccgaaaccaaaacccaatcagcagcatcaagatcaagcccgtggtcttgtgctgcctggttataactatctcggacccggaaacggtctcgatcgaggagagcctgtcaacagggcagacgaggtcgcgcgagagcacgacatctcgtacaacgagcagcttgaggcgggagacaacccctacctcaagtacaaccacgcggacgccgagtttcaggagaagctcgccgacgacacatccttcgggggaaacctcggaaaggcagtctttcaggccaagaaaagggttctcgaaccttttggcctggttgaagagggtgctaagacggcccctaccggaaagcggatagacgaccactttccaaaaagaaagaaggcccggaccgaagaggactccaagccttccacctcgtcagacgccgaagctggacccagcggatcccagcagccgcaaatcccagcccaaccagcctcaagtttgggagctgatacaatgtctgcgggaggtggcggcccattgggcgacaataaccaaggtgccgatggagtgggcaatgcctcgggagattggcattgcgattccacgtggatgggggacagagtcgtcaccaagtccacccgaacctgggtgctgcccagctacaacaaccaccagtaccgagagatcaaaagcggctccgtcgacggaagcaacgccaacgcctactttggatacagcaccccctgggggtactttgactttaaccgcttccacagccactggagcccccgagactggcaaagactcatcaacaactactggggcttcagaccccggtccctcagagtcaaaatcttcaacattcaagtcaaagaggtcacggtgcaggactccaccaccaccatcgccaacaacctcacctccaccgtccaagtgtttacggacgacgactaccagctgccctacgtcgtcggcaacgggaccgagggatgcctgccggccttccctccgcaggtctttacgctgccgcagtacggttacgcgacgctgaaccgcgacaacacagaaaatcccaccgagaggagcagcttcttctgcctagagtactttcccagcaagatgctgagaacgggcaacaactttgagtttacctacaactttgaggaggtgcccttccactccagcttcgctcccagtcagaacctcttcaagctggccaacccgctggtggaccagtacttgtaccgcttcgtgagcacaaataacactggcggagtccagttcaacaagaacctggccgggagatacgccaacacctacaaaaactggttcccggggcccatgggccgaacccagggctggaacctgggctccggggtcaaccgcgccagtgtcagcgccttcgccacgaccaataggatggagctcgagggcgcgagttaccaggtgcccccgcagccgaacggcatgaccaacaacctccagggcagcaacacctatgccctggagaacactatgatcttcaacagccagccggcgaacccgggcaccaccgccacgtacctcgagggcaacatgctcatcaccagcgagagcgagacgcagccggtgaaccgcgtggcgtacaacgtcggcgggcagatggccaccaacaaccagagctccaccactgcccccgcgaccggcacgtacaacctccaggaaatcgtgcccggcagcgtgtggatggagagggacgtgtacctccaaggacccatctgggccaagatcccagagacgggggcgcactttcacccctctccggccatgggcggattcggactcaaacacccaccgcccatgatgctcatcaagaacacgcctgcgcccggaaatatcaccagcttctcggacgtgcccgtcagcagcttcatcacccagtacagcaccgggcaggtcaccgtggagatggagtgggagctcaagaaggaaaactccaagaggtggaacccagagatccagtacacaaacaactacaacgacccccagtttgtggactttgccccggacagcaccggggaatacagaaccaccagacctatcggaacccgataccttacccgacccctttaa

SEQ ID NO: 819 - DNA, 2175 bp, Artificial Sequence
  source: /note="Description of Artificial Sequence: Synthetic polynucleotide"
atgtcttttgttgatcaccctccagattggttggaagaagttggtgaaggtcttcgcgagtttttgggccttgaagcgggcccaccgaaaccaaaacccaatcagcagcatcaagatcaagcccgtggtcttgtgctgcctggttataactatctcggacccggaaacggtctcgatcgaggagagcctgtcaacagggcagacgaggtcgcgcgagagcacgacatctcgtacaacgagcagcttgaggcgggagacaacccctacctcaagtacaaccacgcggacgccgagtttcaggagaagctcgccgacgacacatccttcgggggaaacctcggaaaggcagtctttcaggccaagaaaagggttctcgaaccttttggcctggttgaagagggtgctaagacggcccctaccggaaagcggatagacgaccactttccaaaaagaaagaaggcccggaccgaagaggactccaagcctcccacctcgtcagacgccgaagctggacccagcggatcccagcagctgcaaatcccagcccaaccagcctcaagtttgggagctgatacaatgtctgcgggaggtggcggcccattgggcgacaataaccaaggtgccgatggagtgggcaatgcctcgggagattggcattgcgattccacgtggatgggggacagagtcgtcaccaagtccacccgaacctgggtgctgcccagctacaacaaccaccagtaccgagagatcaaaagcggctccgtcgacggaagcaacgccaacgcctactttggatacagcaccccctgggggtactttgactttaaccgcttccacagccactggagcccccgagactggcaaagactcatcaacaactactggggcttcagaccccggtccctcagagtcaaaatcttcaacattcaagtcaaagaggtcacggtgcaggactccaccaccaccatcgccaacaacctcacctccaccgtccaagtgtttacggacgacgactaccagctgccctacgtcgtcggcaacgggaccgagggatgcctgccggccttccctccgcaggtctttacgctgccgcagtacggttacgcgacgctgaaccgcgacaacacagaaaatcccaccgagaggagcagcttcttctgcctagagtactttcccagcaagatgctgagaacgggcaacaactttgagtttacctacaactttgaggaggtgcccttccactccagcttcgctcccagtcagaacctcttcaagctggccaacccgctggtggaccagtacttgtaccgcttcgtgagcacaaataacactggcggagtccagttcaacaagaacctggccgggagatacgccaacacctacaaaaactggttcccggggcccatgggccgaacccagggctggaacctgggctccggggtcaaccgcgccagtgtcagcgccttcgccacgaccaataggatggagctcgagggcgcgagttaccaggtgcccccgcagccgaacggcatgaccaacaacctccagggcagcaacacctatgccctggagaacactatgatcttcaacagccagccggcgaacccgggcaccaccgccacgtacctcgagggcaacatgctcatcaccagcgagagcgagacgcagccggtgaaccgcgtggcgtacaacgtcggcgggcagatggccaccaacaaccagagctccaccactgcccccgcgaccggcacgtacaacctccaggaaatcgtgcccggcagcgtgtggatggagagggacgtgtacctccaaggacccatctgggccaagatcccagagacgggggcgcactttcacccctctccggccatgggcggattcggactcaaacacccaccgcccatgatgctcatcaagaacacgcctgtgcccggaaatatcaccagcttctcggacgtgcccgtcagcagcttcatcacccagtacagcaccgggcaggtcaccgtggagatggagtgggagctcaagaaggaaaactccaagaggtggaacccagagatccagtacacaaacaactacaacgacccccagtttgtggactttgccccggacagcaccggggaatacagaaccaccagacctatcggaacccgataccttacccgacccctttaa

SEQ ID NO: 820 - DNA, 2175 bp, Artificial Sequence
  source: /note="Description of Artificial Sequence: Synthetic polynucleotide"
atgtcttttgttgatcaccctccagattggttggaagaagttggtgaaggtcttcgcgagtttttgggccttgaagcgggcccaccgaaaccaaaacccaatcagcagcatcaagatcaagcccgtggtcttgtgctgcctggttataactatctcggacccggaaacggtctcgatcgaggagagcctgtcaacagggcagacgaggtcgcgcgagagcacgacatctcgtacaacgagcagcttgaggcgggagacaacccctacctcaagtacaaccacgcggacgccgagtttcaggagaagctcgccgacgacacatccttcgggggaaacctcggaaaggcagtctttcaggccaagaaaagggttctcgaaccttttggcctggttgaagagggtgctaagacggcccctaccggaaagcggatagacgaccactttccaaaaagaaagaaggcccggaccgaagaggactccaagcctcccacctcgtcagacgccgaagctggacccagcggatcccagcagctgcaaatcccagcccaaccagcctcaagtttgggagctgatacaatgtctgcgggaggtggcggcccattgggcgacaataaccaaggtgccgatggagtgggcaatgcctcgggagattggcattgcgattccacgtggatgggggacagagtcgtcaccaagtccacccgaacctgggtgccgcccagctacaacaaccaccagtaccgagagatcaaaagcggctccgtcgacggaagcaacgccaacgcctactttggatacagcaccccctgggggtactttgactttaaccgcttccacagccactggagcccccgagactggcaaagactcatcaacaactactggggcttcagaccccggtccctcagagtcaaaatcttcaacattcaagtcaaagaggtcacggtgcaggactccaccaccaccatcgccaacaacctcacctccaccgtccaagtgtttacggacgacgactaccagctgccctacgtcgtcggcaacgggaccgagggatgcctgccggccttccctccgcaggtctttacgctgccgcagtacggttacgcgacgctgaaccgcgacaacacagaaaatcccaccgagaggagcagcttcttctgcctagagtactttcccagcaagatgctgagaacgggcaacaactttgagtttacctacaactttgaggaggtgcccttccactccagcttcgctcccagtcagaacctcttcaagctggccaacccgctggtggaccagtacttgtaccgcttcgtgagcacaaataacactggcggagtccagttcaacaagaacctggccgggagatacgccaacacctacaaaaactggttcccggggcccatgggccgaacccagggctggaacctgggctccggggtcaaccgcgccagtgtcagcgccttcgccacgaccaataggatggagctcgagggcgcgagttaccaggtgcccccgcagccgaacggcatgaccaacaacctccagggcagcaacacctatgccctggagaacactatgatcttcaacagccagccggcgaacccgggcaccaccgccacgtacctcgagggcaacatgctcatcaccagcgagagcgagacgcagccggtgaaccgcgtggcgtacaacgtcggcgggcagatggccaccaacaaccagagctccaccactgcccccgcgaccggcacgtacaacctccaggaaatcgtgcccggcagcgtgtggatggagagggacgtgtacctccaaggacccatctgggccaagatcccagagacgggggcgcactttcacccctctccggccatgggcggattcggactcaaacacccaccgcccatgatgctcatcaagaacacgcctgtgcccggaaatatcaccagcttctcggacgtgcccgtcagcagcttcatcacccagtacagcaccgggcaggtcgccgtggagatggagtgggagctcaagaaggaaaactccaagaggtggaacccagagatccagtacacaaacaactacaacgacccccagtttgtggactttgccccggacagcaccggggaatacagaaccaccagacctatcggaacccgataccttacccgacccctttaa

SEQ ID NO: 821 - DNA, 2175 bp, Artificial Sequence
  source: /note="Description of Artificial Sequence: Synthetic polynucleotide"
atgtcttttgttgatcaccctccagattggttggaagaagttggtgaaggtcttcgcgagtttttgggccttgaagcgggcccaccgaaaccaaaacccaatcagcagcatcaagatcaagcccgtggtcttgtgctgcctggttataactatctcggacccggaaacggtctcgatcgaggagagcctgtcaacagggcagacgaggtcgcgcgagagcacgacatctcgtacaacgagcagcttgaggcgggagacaacccctacctcaagtacaaccacgcggacgccgagtttcaggagaagctcgccgacgacacatccttcgggggaaacctcggaaaggcagtctttcaggccaagaaaagggttctcgaaccttttggcctggttgaagagggtgctaagacggcccctaccggaaagcggatagacgaccactttccaaaaagaaagaaggcccggaccgaagaggactccaagccttccacctcgtcagacgccgaagctggacccagcggatcccagcagctgcaaatcccagcccaaccagcctcaagtttgggagctgatacaatgtctgcgggaggtggcggcccattgggcgacaataaccaaggtgccgatggagtgggcaatgcctcgggagattggcattgcgattccacgtggatgggggacagagtcgtcaccaagtccacccgaacctgggtgctgcccagctacaacaaccaccagtaccgagagatcaaaagcggctccgtcgacggaagcaacgccaacgcctactttggatacagcaccccctgggggtactttgactttaaccgcttccacagccactggagcccccgagactggcaaagactcatcaacaactactggggcttcagaccccggtccctcagagtcaaaatcttcaacattcaagtcaaagaggtcacggtgcaggactccaccaccaccatcgccaacaacctcacctccaccgtccaagtgtttacggacgacgactaccagctgccctacgtcgtcggcaacgggaccgagggatgcctgccggccttccctccgcaggtctttacgctgccgcagtacggttacgcgacgctgaaccgcgacaacacagaaaatcccaccgagaggagcagcttcttctgcctagagtactttcccagcaagatgctgagaacgggcaacaactttgagtttacctacaactttgaggaggtgcccttccactccagcttcgctcccagtcagaacctcttcaagctggccaacccgctggtggaccagtacttgtaccgcttcgtgagcacaaataacactggcggagtccagttcaacaagaacctggccgggagatacgccaacacctacaaaaactggttcccggggcccatgggccgaacccagggctggaacctgggctccggggtcaaccgcgccagtgtcagcgccttcgccacgaccaataggatggagctcgagggcgcgagttaccaggtgcccccgcagccgaacggcatgaccaacaacctccagggcagcaacacctatgccctggagaacactatgatcttcaacagccagccggcgaacccgggcaccaccgccacgtacctcgagggcaacatgctcatcaccagcgagagcgagacgcagccggtgaaccgcgtggcgtacaacgtcggcgggcagatggccaccaacaaccagagctccaccactgcccccgcgaccggcacgtacaacctccaggaaatcgtgcccggcagcgtgtggatggagagggacgtgtacctccaaggacccatctgggccaagatcccagagacgggggcgcactttcacccctctccggccatgggcggattcggactcaaacacccaccgcccatgatgctcatcaagaacacgcctgcgcccggaaatatcaccagcttctcggacgtgcccgtcagcagcttcatcacccagtacagcaccgggcaggtcaccgtggagatggagtgggagctcaagaaggaaaactccaagaggtggaacccagagatccagtacacaaacaactacaacgacccccagtttgtggactttgccccggacagcaccggggaatacagaaccaccagacctatcggaacccgataccttacccgacccctttaa

SEQ ID NO: 822 - DNA, 2175 bp, Artificial Sequence
  source: /note="Description of Artificial Sequence: Synthetic polynucleotide"
atgtcttttgttgatcaccctccagattggttggaagaagttggtgaaggtcttcgcgagtttttgggccttgaagcgggcccaccgaaaccaaaacccaatcagcagcatcaagatcaagcccgtggtcttgtgctgcctggttataactatctcggacccggaaacggtctcgatcgaggagagcctgtcaacagggcagacgaggtcgcgcgagagcacgacatctcgtacaacgagcagcttgaggcgggagacaacccctacctcaagtacaaccacgcggacgccgagtttcaggagaagctcgccgacgacacatccttcgggggaaacctcggaaaggcagtctttcaggccaagaaaagggttctcgaaccttttggcctggctgaagagggtgctaagacggcccctaccggaaagcggatagacgaccactttccaaaaagaaagaaggcccggaccgaagaggactccaagccttccacctcgtcagacgccgaagctggacccagcggatcccagcagctgcaaatcccagcccaaccagcctcaagtttgggagctgatacaatgtctgcgggaggtggcggcccattgggcgacaataaccaaggtgccgatggagtgggcaatgcctcgggagattggcattgcgattccacgtggatgggggacagagtcgtcaccaagtccacccgaacctgggtgctgcccagctacaacaaccaccagtaccgagagatcaaaagcggctccgtcgacggaagcaacgccaacgcctactttggatacagcaccccctgggggtactttgactttaaccgcttccacagccactggagcccccgagactggcaaagactcatcaacaactactggggcttcagaccccggtccctcagagccaaaatcttcaacattcaagtcaaagaggtcacggtgcaggactccaccaccaccatcgccaacaacctcacctccaccgtccaagtgtttacggacgacgactaccagctgccctacgtcgtcggcaacgggaccgagggatgcctgccggccttccctccgcaggtctttacgctgccgcagtacggttacgcgacgctgaaccgcgacaacacagaaaatcccaccgagaggagcagcttcttctgcctagagtactttcccagcaagatgctgagaacgggcaacaaccttgagtttacctacaactttgaggaggtgcccttccactccagcttcgctcccagtcagaacctcttcaagctggccaacccgctggtggaccagtacttgtaccgcttcgtgagcacaaataacactggcggagtccagttcaacaagaacctggccgggagatacgccaacacctacaaaaactggttcccggggcccatgggccgaacccagggctggaacctgggctccggggtcaaccgcgccagtgtcagcgccttcgccacgaccaataggatggagctcgagggcgcgagttaccaggtgcccccgcagccgaacggcatgaccaacaacctccagggcagcaacacctatgccctggagaacactatgatcttcaacagccagccggcgaacccgggcaccaccgccacgtacctcgagggcaacatgctcatcaccagcgagagcgagacgcagccggtgaaccgcgtggtgcacaacgtcggcgggcagatggccaccaacaaccagagctccaccactgcccccgcgaccggcacgtacaacctccaggaaatcgtgcccggcagcgtgtggatggagagggacgtgtacctccaaggacccatctgggccaagatcccagagacgggggcgcactttcacccctctccggccatgggcggattcggactcaaacacccaccgcccatgatgctcatcaagaacacgcctgtgcccggaaatatcaccagcttctcggacgtgcccgtcagcagcttcatcacccagtacagcaccgggcaggtcaccgtggagatggagtgggagctcaagaaggaaaactccaagaggtggaacccggagatccagtacacaaacaactacaacgacccccagtttgtggactttgccccggacagcaccggggaatacagaaccaccagacctatcggaacccgataccttacccgacccctttaa

SEQ ID NO: 823 - DNA, 2175 bp, Artificial Sequence
  source: /note="Description of Artificial Sequence: Synthetic polynucleotide"
atgtcttttgttgatcaccctccagattggttggaagaagttggtgaaggtcttcgcgagtttttgggccttgaagcgggcccaccgaaaccaaaacccaatcagcagcatcaagatcaagcccgtggtcttgtgctgcctggttataactatctcggacccggaaacggtctcgatcgaggagagcctgtcaacagggcagacgaggtcgcgcgagagcacgacatctcgtacaacgagcagcttgaggcgggagacaacccctacctcaagtacaaccacgcggacgccgagtttcaggagaagctcgccgacgacacatccttcgggggaaacctcggaaaggcagtctttcaggccaagaaaagggttctcgaaccttttggcctggttgaagagggtgctaagacggcccctaccggaaagcggatagacgaccactttccaaaaagaaagaaggcccggaccgaagaggactccaagccttccacctcgtcagacgccgaagctggacccagcggatcccagcagctgcaaatcccagcccaaccagcctcaagtttgggagctgatacaatgtctgcgggaggtggcggcccattgggcgacaataaccaaggtgccgatggagtgggcaatgcctcgggagattggcattgcgattccacgtggatgggggacagagtcgtcaccaagtccacccgaacctgggtgctgcccagctacaacaaccaccagtaccgagagatcaaaagcggctccgtcgacggaggcaacgccaacgcctactttggatacagcaccccctgggggtactttgactttaaccgcttccacagccactggagcccccgggactggcaaagactcatcaacaactactggggcttcagaccccggtccctcagagtcaaaatcttcaacattcaagtcaaagaggtcacggtgcaggactccaccaccaccatcgccaacaacctcacctccaccgtccaagtgtttacggacgacgactaccagctgccctacgtcgtcggcaacgggaccgagggatgcctgccggccttccctccgcaggtctttacgctgccgcagtacggttacgcgacgctgaaccgcgacaacacagaaaatcccaccgagaggagcagcttcttctgcctagagtactttcccagcaagatgctgagaacgggcaacaactttgagtttacctacaactttgaggaggtgcccttccactccagcttcgctcccagtcagaacctcttcaagctggccaacccgctggtggaccagtacttgtaccgcttcgtgagcacaaataacactggcggagtccagttcaacaagaacctggccgggagatacgccaacacctacaaaaactggttcccggggcccatgggccgaacccagggctggaacctgggctccggggtcaaccgcgccagtgtcagcgccttcgccacgaccaataggatggagctcgagggcgcgagttaccaggtgcccccgcagccgaacggcatgaccaacaacctccagggcagcaacacctatgccctggagaacactatgatcttcaacagccagccggcgaacccgggcaccaccgccacgtacctcgagggcaacatgctcatcaccagcgagagcgagacgcagccggtgaaccgcgtggcgtacaacgtcggcgggcagatggccaccaacaaccagagctccaccactgcccccgcgaccggcacgtacaacctccaggaaatcgtgcccggcagcgtgtggatggagagggacgtgtacctccaaggacccatctgggccaagatcccagagacgggggcgcactttcacccctctccggccatgggcggattcggactcaaacacccaccgcccatgatgctcatcaagaacacgcctgcgcccggaaatatcaccagcttctcggacgtgcccgtcagcagcttcatcacccagtacagcaccgggcaggtcaccgtggagatggagtgggagctcaagaagggaaactccaagaggtggaacccagagatccagtacacaaacaactacaacgacccccagtttgtggactttgccccggacagcaccggggaatacagaaccaccagacctatcggaacccgataccttacccgacccctttaa

SEQ ID NO: 824 - DNA, 2175 bp, Artificial Sequence
  source: /note="Description of Artificial Sequence: Synthetic polynucleotide"
atgtcttttgttgatcaccctccagattggttggaagaagttggtgaaggtcttcgcgagtttttgggccttgaagcgggcccaccgaaaccaaaacccaatcagcagcatcaagatcaagcccgtggtcttgtgctgcctggttataactatctcggacccggaaacggtctcgatcgaggagagcctgtcaacagggcagacgaggtcgcgcgagagcacgacatctcgtacaacgagcagcttgaggcgggagacaacccctacctcaagtacaaccacgcggacgccgagtttcaggagaagctcgccgacgacacgtccttcgggggaaacctcggaaaggcagtctttcaggccaagaaaagggttctcgaaccttttggcctggttgaagagggtgctaagacggcccctaccggaaagcggatagacgaccactttccaaaaagaaagaaggcccggaccgaagaggactccaagccttccacctcgtcagacgccgaagctggacccagcggatcccagcagctgcaaatcccagcccaaccagcctcaagtttgggagctgatacaatgtctgcgggaggtggcggcccattgggcgacaataaccaaggtgccgatggagtgggcaatgcctcgggagattggcattgcgattccacgtggatgggggacagagtcgtcaccaagtccacccgaacctgggtgctgcccagctacaacaaccaccagtaccgagagatcaaaagcggctccgtcgacggaagcaacgccaacgcctactttggatacagcaccccctgggggtactttgactttaaccgcttccacagccactggagcccccgagactggcaaagactcatcaacaactactggggcttcagaccccggtccctcagagtcaaaatcttcaacattcaagtcaaagaggtcacggtgcaggactccaccaccaccatcgccaacaacctcacctccaccgtccaagtgtttacggacgacgactaccagctgccctacgtcgtcggcaacgggaccgagggatgcctgccggccttccctccgcaggtctttacgctgccgcagtacggttacgcgacgctgaaccgcgacaacacagaaaatcccaccgagaggagcagcttcttctgcctagagtactttcccagcaagatgctgagaacgggcaacaactttgagtttacctacaactttgaggaggtgcccttccactccagcttcgctcccagtcagaacctcttcaagctggccaacccgctggtggaccagtacttgtaccgcttcgtgagcacaaataacactggcggagtccagttcaacaagaacctggccgggagatacgccaacacctacaaaaactggttcccggggcccatgggccgaacccagggctggaacctgggctccggggtcaaccgcgccagtgtcagcgccttcgccacgaccaataggatggagctcgagggcgcgagttaccaggtgcccccgcagccgaacggcatgaccaacaacctccagggcagcaacacctatgccctggagaacactatgatcttcaacagccagccggcgaacccgggcaccaccgccacgtacctcgagggcaacatgctcatcaccagcgagagcgagacgcagccggtgaaccgcgtggcgtacaacgtcggcgggcagatggccaccaacaaccagagctccaccactgcccccgcgaccggcacgtacaacctccaggaaatcgtgcccggcagcgtgtggatggagagggacgtgtacctccaaggacccatctgggccaagatcccagagacgggggtgcactttcacccctctccggccatgggcggattcggactcaaacacccaccgcccatgatgctcatcaagaacacgcctgtgcccggaaatatcaccagcttctcggacgtgcccgtcagcagcttcatcacccagtacagcaccgggcaggtcaccgtggagatggagtgggagctcaagaaggaaaactccaagaggtggaacccagagatccagtacacaaacaactacaacgacccccagtttgtggactttgccccggacagcaccggggaatacagaaccaccagacctatcggaacccgataccttacccgacccctttaa

SEQ ID NO: 825 - DNA, 2175 bp, Artificial Sequence
  source: /note="Description of Artificial Sequence: Synthetic polynucleotide"
  modified_base (1652)..(1652): a, c, g or t
atgtcttttgttgatcaccctccagattggttggaagaagttggtgaaggtcttcgcgagtttttgggccttgaagcgggcccaccgaaaccaaaacccaatcagcagcatcaagatcaagcccgtggtcttgtgctgcctggttataactatctcggacccggaaacggtctcgatcgaggagagcctgtcaacagggcagacgaggtcgcgcgagagcacgacatctcgtacaacgagcagcttgaggcgggagacaacccctacctcaagtacaaccacgcggacgccgagtttcaggagaagctcgccgacgacacatccttcgggggaaacctcggaaaggcagtctttcaggccaagaaaagggttctcgaaccttttggcctggttgaagagggtgctaagacggcccctaccggaaagcggatagacgaccactttccaaaaagaaagaaggcccggaccgaggaggactccaagccttccacctcgtcagacgccgaagctggacccagcggatcccagcagctgcaaatcccagcccaaccagcctcaagtttgggagctgatacaatgtctgcgggaggtggcggcccattgggcgacaataaccaaggtgccgatggagtgggcaatgcctcgggagattggcattgcgattccacgtggatgggggacagagtcgtcaccaagtccacccgaacctgggtgctgcccagctacaacaaccaccagtaccgagagatcaaaagcggctccgtcgacggaagcaacgccaacgcctactttggatacagcaccccctgggggtactttgactttaaccgcttccacagccactggagcccccgagactggcaaagactcatcaacaactactggggcttcagaccccggtccctcagagtcaaaatcttcaacattcaagtcaaagaggtcacggtgcaggactccaccaccaccatcgccaacaacctcacctccaccgtccaagtgtttacggacgacgactaccagctgccctacgtcgtcggcaacgggaccgagggatgcctgccggccttccctccgcaggtctttacgctgccgcagtacggttacgcgacgctgaaccgcgacaacacagaaaatcccaccgagaggagcagcttcttctgcctagagtactttcccagcaagatgctgagaacgggcaacaactttgagtttacctacaactttgaggaggtgcccttccactccagcttcgctcccagtcagaacctcttcaagctggccaacccgctggtggaccagtacttgtaccgcttcgtgagcacaaataacactggcggagtccagttcaacaagaacctggccgggagatacgccaacacctacaaaaactggttcccggggcccatgggccgaacccagggctggaacctgggctccggggtcaaccgcgccagtgtcagcgccttcgccacgaccaataggatggagctcgagggcgcgagttaccaggtgcccccgcagccgaacggcatgaccaacaacctccagggcagcaacacctatgccctggagaacactatgatcttcaacagccagccggcgaacccgggcaccaccgccacgtacctcgagggcagcatgctcatcaccancgagagcgagacgcagccggtgaaccgcgtggcgtacaacgtcggcgggcagatggccaccaacaaccagagctccaccactgcccccgcgaccggcacgtacaacctccaggaaatcgtgcccggcagcgtgtggatggagagggacgtgtacctccaaggacccatctgggccaagatcccagagacgggggcgcactttcacccctctccggccatgggcggattcggactcaaacacccaccgcccatgatgctcatcaagaacacgcctgtgcccggaaatatcaccagcttctcggacgtgcccgtcagcagcttcatcacccagtacagcaccgggcaggtcaccgtggagatggagtgggagctcaagaaggaaaactccaagaggtggaacccagagatccagtacacaaacaactacaacgacccccagtttgtggactttgccccggacagcaccggggaatacagaaccaccagacctatcggaacccgataccttacccgacccctttaa

SEQ ID NO: 826 - DNA, 2211 bp, Artificial Sequence
  source: /note="Description of Artificial Sequence: Synthetic polynucleotide"
atggctgctgacggttatcttccagattggctcgaggacaacctttctgaaggcattcgtgagtggtgggctctgaaacctggagtccctcaacccaaagcgaaccaacaacaccaggacaaccgtcggggtcttgtgcttccgggttacaaatacctcggacccggtaacggactcgacaaaggagagccggtcaacgaggcggacgcggcagccctcgaacacgacaaagcttacgaccagcagctcaaggccggtgacaacccgtacctcaagtacaaccacgccgacgccgagtttcaggagcgtcttcaagaagatacgtcttttgggggcaaccttggcagagcagtcttccaggccaaaaagaggatccttgagcctcttggtctggttgaggaagcagctaaaacggctcctggaaagaagaggcctgtagatcagtctcctcaggaaccggactcatcatctggtgttggcaaatcgggcaaacagcctgccagaaaaagactaaatttcggtcagactggcgactcagagtcagtcccagaccctcaacctctcggagaaccaccagcagcccccacaagtttgggatctaatacaatggcttcaggcggtggcgcaccaatggcagacaataacgagggtgccgatggagtgggtaattcctcaggaaattggcattgcgattcccaatggctgggcgacagagtcatcaccaccagcaccagaacctgggccctgcccacttacaacaaccatctctacaagcaaatctccagccaatcaggagcttcaaacgacaaccactactttggctacagcaccccttgggggtattttgactttaacagattccactgccacttctcaccacgtgactggcagcgactcattaacaacaactggggattccggcccaagaaactcagcttcaagctcttcaacatccaagttaaagaggtcacgcagaacgatggcacgacgactattgccaataaccttaccagcacggttcaagtgtttacggactcggagtatcagctcccgtacgtgctcgggtcggcgcaccaaggctgtctcccgccgtttccagcggacgtcttcatggtccctcagtatggatacctcaccctgaacaacggaagtcaagcggtgggacgctcatccttttactgcctggagtacttcccttcgcagatgctaaggactggaaataacttccaattcagctataccttcgaggatgtaccttttcacagcagctacgctcacagccagagtttggatcgcttgatgaatcctcttattgatcagtatctgtactacctgaacagaacgcaaggaacaacctctggaacaaccaaccaatcacggctgctttttagccaggctgggcctcagtctatgtctttgcaggccagaaattggctacctgggccctgctaccggcaacagagactttcaaagactgctaacgacaacaacaacagtaactttccttggacagcggccagcaaatatcatctcaatggccgcgactcgctggtgaatccaggaccagctatggccagtcacaaggacgatgaagaaaaatttttccctatgcacggcaatctaatatttggcaaagaagggacaacggcaagtaacgcagaattagataatgtaatgattacggatgaagaagagattcgtaccaccaatcctgtggcaacagagcagtatggaactgtggcaaataacttgcagagctcaaatacagctcccacgactagaactgtcaatgatcagggggccttacctggcatggtgtggcaagatcgtgacgtgtaccttcaaggacctatctgggcaaagattcctcacacggatggacactttcatccttctcctctgatgggaggctttggactgaaacatccgcctcctcaaatcatgatcaaaaatactccggtaccggcaaatcctccgacgactttcagcccggccaagtttgcttcatttatcactcagtactccactggacaggtcagcgtggaaattgagtgggagctacagaaagaaaacagcaaacgttggaatccagagattcagtacacttccaactacaacaagtctgttaatgtggactttactgtagacactaatggtgtttatagtgaacctcgccctattggaacccggtatctcacacgaaacttgtaa

SEQ ID NO: 827 - DNA, 2205 bp, Artificial Sequence; identical to SEQ ID NO: 95
  source: /note="Description of Artificial Sequence: Synthetic polynucleotide"

SEQ ID NO: 828 - DNA, 2234 bp, Artificial Sequence
  source: /note="Description of Artificial Sequence: Synthetic polynucleotide"
atgtcttttgttgatcaccctccagattggttggaagaagttggtgaaggtcttcgcgagtttttgggccttgaagcgggcccaccgaaaccaaaacccaatcagcagcatcaagatcaagcccgtggtcttgtgctgcctggttataactatctcggacccggaaacggtctcgatcgaggagagcctgtcaacagggcagacgaggtcgcgcgagagcacgacatctcgtacaacgagcagcttgaggcgggagacaacccctacctcaagtacaaccacgcggacgccgagtttcaggagaagctcgccgacgacacatccttcgggggaaacctcggaaaggcagtctttcaggccaagaaaagggttctcgaaccttttggcctggttgaagagggtgctaagacggcccctaccggaaagcggatagacgaccactttccaaaaagaaagaaggctcggaccgaagaggactccaagccttccacctcgtcagacgccgaagctggacccagcggatcccagcagctgcaaatcccagcccaaccagcctcaagtttgggagctgatacaatgtctgcgggaggtggcggcccattgggcgacaataaccaaggtgccgatggagtgggcaatgcctcgggagattggcattgcgattccacgtggatgggggacagagtcgtcaccaagtccacccgaacctgggtgctgcccagctacaacaaccaccagtaccgagagatcaaaagcggctccgtcgacggaagcaacgccaacgcctactttggatacagcaccccctgggggtactttgactttaaccgcttccacagccactggagcccccgagactggcaaagactcatcaacaactactggggcttcagaccccggtccctcagagtcaaaatcttcaacattcaagtcaaagaggtcacggtgcaggactccaccaccaccatcgccaacaacctcacctccaccgtccaagtgtttacggacgacgactaccagctgccctacgtcgtcggcaacgggaccgagggatgcctgccggccttccctccgcaggtctttacgctgccgcagtacggttacgcgacgctgaaccgcgacaacacagaaaatcccaccgagaggagcagcttcttctgcctagagtactttcccagcaagatgctgagaacgggcaacaactttgagtttacctacaactttgaggaggtgcccttccactccagcttcgctcccagtcagaacctgttcaagctggccaacccgctggtggaccagtacttgtaccgcttcgtgagcacaaataacactggcggagtccagttcaacaagaacctggccgggagatacgccaacacctacaaaaactggttcccggggcccatgggccgaacccagggctggaacctgggctccggggtcaaccgcgccagtgtcagcgccttcgccacgaccaataggatggagctcgagggcgcgagttaccaggtgcccccgcagccgaacggcatgaccaacaacctccagggcagcaacacctatgccctggagaacactatgatcttcaacagccagccggcgaacccgggcaccaccgccacgtacctcgagggcaacatgctcatcaccagcgagagcgagacgcagccggtgaaccgcgtggcgtacaacgtcggcgggcagatggccaccaacaaccagagctccaccactgcccccgcgaccggcacgtacaacctccaggaaatcgtgcccggcagcgtgtggatggagagggacgtgtacctccaaggacccatctgggccaagatcccagagacgggggcgcactttcacccctctccggccatgggcggattcggactcaaacacccaccgcccatgatgctcatcaagaacacgcctgtgcccggaaatatcaccagcttctcggacgtgcccgtcagcagcttcatcacccagtacagcaccgggcaggtcaccgtggagatggagtgggagctcaagaaggaaaactccaagaggtggaacccagagatccagtacacaaacaactacaacgacccccagtttgtggactttgccccggacagcaccggggaatacagaaccaccagacctatcggaacccgataccttacccgacccctttaacccattcatgtcgcataccctcaataaaccgtgtattcgtgtcagtaaaatactgcctc

SEQ ID NO: 829 - protein, 736 aa, Artificial Sequence
  source: /note="Description of Artificial Sequence: Synthetic polypeptide"
MAADGYLPDWLEDNLSEGIREWWALKPGVPQPKANQQHQDNRRGLVLPGYKYLGPGNGLDKGEPVNEADAAALEHDKAYDQQLKAGDNPYLKYNHADAEFQERLQEDTSFGGNLGRAVFQAKKRILEPLGLVEEAAKTAPGKKRPVDQSPQEPDSSSGVGKSGKQPARKRLNFGQTGDSESVPDPQPLGEPPAAPTSLGSNTMASGGGAPMADNNEGADGVGNSSGNWHCDSQWLGDRVITTSTRTWALPTYNNHLYKQISSQSGASNDNHYFGYSTPWGYFDFNRFHCHFSPRDWQRLINNNWGFRPKKLSFKLFNIQVKEVTQNDGTTTIANNLTSTVQVFTDSEYQLPYVLGSAHQGCLPPFPADVFMVPQYGYLTLNNGSQAVGRSSFYCPEYFPSQMLRTGNNFQFSYTFEDVPFHSSYAHSQSLDRLMNPLIDQYLYYLNRTQGTTSGTTNQSRLLFSQAGPQSMSLQARNWLPGPCYRQQRLSKTANDNNNSNFPWTAASKYHLNGRDSLVNPGPAMASHKDDEEKFFPMHGNLIFGKEGTTASNAELDNVMITDEEEIRTTNPVATEQYGTVANNLQSSNTAPTTRTVNDQGALPGMVWQDRDVYLQGPIWAKIPHTDGHFHPSPLMGGFGLKHPPPQIMIKNTPVPANPPTTFSPAKFASFITQYSTGQVSVEIEWELQKENSKRWNPEIQYTSNYNKSVNVDFTVDTNGVYSEPHPIGTRYLTRNL

SEQ ID NO: 830 - protein, 736 aa, Artificial Sequence
  source: /note="Description of Artificial Sequence: Synthetic polypeptide"
MAADGYLPDWLEDNLSEGIREWWALKPGVPQPKANQQHQDNRRGLVLPGYKYLGPGNGLDKGEPVNEADAAALEHDKAYDQQLKAGDNPYLKYNHADAEFQERLQEDTSFGGNLGRAVFQAKKRILEPLGLVEEAAKTAPGKKRPVDQSPQEPDSSSGVGKSGKQPARKRLNFGQTGDSESVPDPQPLGEPPAAPTSLGSNTMASGGGAPMADNNEGADGVGNSSGNWHCDSQWLGDRVITTSTRTWALPTYNNHLYKQISSQSGASNDNHYFGYSTPWGYFDFNRFHCHFSPRDWQRLINNNWGFRPKKLSFKLFNIQVKEVTQNDGTTTVANNLTSTVQVFTDSEYQLPYVLGSAHQGCLPPFPADVFMVPQYGYLTLNNGSQAVGRSSFYCLEYFPSQMLRTGNNFQFSYTFEDVPFHSSYAHSQSLDRLMNPLIDQYLYYLNRTQGTTSGTTNQSRLLFSQAGPQSMSLQARNWLPGPCYRQQRLSKTANDNNNSNFPWTAASKYHLNGRDSLVNPGPAMASHKDDEEKFFPMHGNLIFGKEGTTASNAELDNVMITDEEEIRTTNPVATEQYGTVANNLQSSNTAPTTRTVNDQGALPGMVWQDRDVYLQGPIWAKIPHTDGHFHPSPLMGGFGLKHPPPQIMIKNTPVPANPPTTFSPAKFASFITQYSTGQVSVEIEWELQKENSKRWNPEIQYTSNYNKSVNVDFTVDTNGVYSEPRPIGTRYLTRNL

SEQ ID NO: 831 - protein, 736 aa, Artificial Sequence
  source: /note="Description of Artificial Sequence: Synthetic polypeptide"
MAADGYLPDWLEDNLSEGIREWWALKPGVPQPKANQQHQDNRRGLVLPGYKYLGPGNGLDKGEPVNEADAAALEHDKAYDQQLKAGDNPYLKYNHADAEFQERLQEDTSFGGNLGRAVFQAKKRILEPLGLVEEAAKTAPGKKRPVDQSPQEPDSSSGVGKSGKQPARKRLNFGQTGDSESVPDPQPLGEPPAAPTSLGSNTMASGGGAPMADNNEGADGVGNSSGNWHCDSQWLGDRVITTSTRTWALPTYNNHLYKQISGQSGASNDNHYFGYSTPWGYFDFNRFHCHFSPRDWQRLINNNWGFRPKKLSFKLFNIQVKEVTQNDGTTTIANNLTSTVQVFTDSEYQLPYVLGSAHQGCLPPFPADVFMVPQYGYLTLNNGSQAVGRSSFYCLEYFPSQMLRTGNNFQFSYTFEDVPFHSSYAHSQSLDRLMNPLIDQYLYYLNRTQGTTSGTTNQSRLLFSQAGPQSMSLQARNWLPGPCYRQQRLSKTANGNNNSNFPWTAASKYHLNGRDSLVNPGPAMASHKDDEEKFFPMHGNLIFGKEGTTASNAELDNVMITDEEEIRTTNPVATEQCGTVANNLQSSNTAPTTRTVNDQGALPGMVWQDRDVYLQGPIWAKIPHTDGHFHPSPLMGGFGLKHPPPQIMIKNTPVPANPPTTFSPAKFASFITQYSTGQVSVEIEWELQKENSKRWNPEIQYTSNYNKSVNVDFTVDTNGVYSEPRPIGTRYLTRNL

SEQ ID NO: 832 - protein, 736 aa, Artificial Sequence
  source: /note="Description of Artificial Sequence: Synthetic polypeptide"
MAADGYLPDWLEDNLSEGIREWWALKPGVPQPKANQQHQDNRRGLVLPGYKYLGPGNGLDKGEPVNEADAAALEHDKAYDQQLKAGDNPYLKYNHADAEFQERLQEDTSFGGNLGRAVFQAKKRILEPLGLVEGAAKTAPGKKRPVDQSPQEPDSSSGVGKSGKQPARKRLNFGQTGDSESVPDPQPLGEPPAAPTSLGSNTMASGGGAPMADNNEGADGVGNSSGNWHCDSQWLGDRVITTSTRTWALPTYNSHLYKQISSQSGASNDNHYFGYSTPWGYFDFNRFHCHFSPRDWQRLINNNWGFRPKKLSFKLFNIQVKEVTQNDGTTTIANNLTSTVQVFTDSEYQLPYVLGSAHQGCLPPFPADAFMVPQYGYLTLNNGSQAVGRSSFYCLEYFPSQMLRTGNNFQFSYTFEDVPFHGSYAHSQSLDRLMNPLIDQYLYYLNRTQGTTSGTTNQSRLLFSQAGPQSMSLQARNWLPGPCYRQQRLSKTANDNNNSNFPWTAASKYHLNGRDSLVNPGPAMASHKDDEEKFFPMHGNLIFGKEGTTASNAELDNVMITDEEEIRTTNPVATEQYGTVANNLQSSNTAPTTRTVNDQGALPGMVWQDRDVYLQGPIWAKIPHTDGHFHPSPLMGGFGLKHPPPQIMIKNTPVPANPPTTFSPAKFASFITQYSTGQVSVEIEWELQKENSKRWNPEIQYTSNYNKSVNVDFTVDTNGVYSEPRPIGTRYLTRNS

SEQ ID NO: 833 - protein, 736 aa, Artificial Sequence
  source: /note="Description of Artificial Sequence: Synthetic polypeptide"
MAADGYLPDWLEDNLSEGIREWWALKPGVPQPKANQQHQDNRRGLVLPGYKYLGPGNGLDKGEPVNEADAAALEHDKAYDQQLKAGDNPYLKYNHADAEFQERLQEDTSFGGNLGRAVFQAKKRILEPLGLVEGAAKTAPGKKRPVDQSPQEPDSSSGVGKSGKQLARKRLNFGQTGDSESVPDPQPLGEPPAAPTSLGSNTMASGGGAPMADNNEGADGVGNSSGNWHCDSQWLGDRVITTSTRTWALPTYNSHLYKQISGQSGASNDNHYFGYSTPWGYFDFNRFHCHFSPRDWQRLINNNWGFRPKKLSFKLFNIQVKEVTQNDGTTTIANNLTSTVQVFTDSEYQLPYVLGSAHQGCLPPFPADVFMVPQYGYLTLNNGSQAVGRSSFYCLEYFPSQMLRTGNNFQFSYTFEDVPFHSSYAHSQSLDRLMNPLIDQYLYYLNRTQGTTSGTTNQSRLLFSQAGPQSMSLQARNWLPGPCYRQQRLSKTANDNNNSNFPWTAASKYHLNGRDSLVNPGPAMASHKDDEEKFFPMHGNLIFGKEGTTASNAELDNVMITDEEEIRTTNPVATEQYGTVANNLQSSNTAPTTRTVNDQGALPGMVWQDRDVYLQGPIWAKIPHTDGHFHPSPLMGGFGLKHPPPQIMIKNTPVPANPPTTFSPAKFASFITQYSTGQVSVEIEWELQKENSKRWNPEIQYTSNYNKSVNVDFTVDTNGVYSEPRPIGTRYLTRNL

SEQ ID NO: 834 - protein, 736 aa, Artificial Sequence
  source: /note="Description of Artificial Sequence: Synthetic polypeptide"
MAADGYLPDWLEDNLSEGIREWWALKPGVPQPKANQQHQDDRRGLVLPGYKYLGPGNGLDKGEPVNEADAAALEHDKAYDQQLKAGDNPCLKYNHADAEFQERLQEDTSFGGNLGRAVFQAKKRILEPLGLVEEAAKTAPGKKRPVDQSPQEPDSSSGVGKSGKQPARKRLNFGQTGDSESVPDPQPLGEPPAAPTSLGSNTMASGGSAPMADNNEGADGVGNSSGNWHCDSQWLGDRVITTSTRTWALPTYNNHLYKQISSQSGASNDNHYFGYSTPWGYFDFNRFHCHFSPRDWQRLINNNWGFRPKKLSFKLFNIQVKEVTQNDGTTTIANNLTSTVQVFTDSEYQLPYVLGSAHQGCLPPFPADVFMVPQYGYLTLNNGSQAVGRSSFYCLEYFPSQMLRTGNNFQFSYTFEDVPFHSSYAHSQSLDRLMDPLIDQYLYYLNRTQGTTSGTTNQSRLLFSQAGPQSMSLQARNWLPGPCYRQQRLSKTANDNNNSNFPWTAASKYHLNGRDSLVNPGPAMASHKDDEEKFFPMHGNLIFGKEGTTASNAELDNVMITDEEEIRTTNPVATEQYGTVANNLQSSNTAPTTRTVNDQGALPGMVWQDRDVYLQGPIWAKIPHTDGHFHPSPLMGGFGLKHPPPQIMIKNTPVPANPPTTFSPAKFASFITQYSTGQVSVEIEWELQKENSKRWNPEIQYTSNYNKSVNVDFTVDTNGVYSEPRPIGTRYLTRNL

SEQ ID NO: 835 - protein, 736 aa, Artificial Sequence
  source: /note="Description of Artificial Sequence: Synthetic polypeptide"
MAADGYLPDWLEDNLSEGIREWWALKPGVPQPKANQQHQDDRRGLVLPGYKYLGPGNGLDKGEPVNEADAAALEHDKAYDQQLKAGDNPYLKYNHADAEFQERLQEDTSFGGNLGRAVFQAKKRILEPLGLVEEAAKTAPGKKRPVDQSPQEPDSSSGVGKSGKQPARKRLNFGQTGDSESVPDPQPLGEPPAAPTSLGSNTMASGGGAPMADNNEGADGVGNSSGNWHCDSQWLGNRVITTSTRTWALPTYNNHLYKQISSQSGASNDNHYFGYSTPWGYFDFNRFHCHFSPRDWQRLINNNWGFRPKKLSFKLFNIQVKEVTQNDGTTTIANNLTSTVQVFTDSEYQLPYVLGSAHQGCLPPFPADVFMVPQYGYLTLNNGSQAVGRSSFYCLEYFPSQMLRTGNNFQFSYTFEDVPFHSSYAHSQSLDRLMNPLIDQYLYYLNRTQGTTSGTTNQSRLLFSQAGPQSMSLQARNWLPGPCYRQQRLSKTANDNNNSNFPWTAASKYHLNGRDSLVNPGPAMASHKDDEEKFFPMHGNLIFGKEGTTASNAELDNVMITDEEEIRTTNPVATEQYGTVANNLQSSNTAPTTRTVNDQGALPGMVWQDRDVYLQGPIWAKIPHTDGHFHPSPLMGGFGLKHPPPQIMIKNTPVPANPPTTFSPAKFASFITQYSTGQVSVEIEWELQKENSKRWNPEIQYTSNYNKSVNVDFTVDTNGVYSEPRPIGTRYLTRNL

SEQ ID NO: 836 - protein, 736 aa, Artificial Sequence
  source: /note="Description of Artificial Sequence: Synthetic polypeptide"
MAADGYLPDWLEDNLSEGIREWWALKPGVPQPKANQQHQDDRRGLVLPGYKYLGPGNGLDKGEPVNEADAAALEHDKAYDQQLKAGDNPYLKYNHADAEFQERLQEDTSFGGNLGRAVFQAKKRILEPLGLVEEAAKTAPGKKRPVDQSPQEPDSSSGVGKSGKQPARKRLNFGQTGDSESVPDPQPLGEPPAAPTSLGSNTMASGGGAPMADNNEGADGVGNSSGNWHCDSQWLGDRVITTSTRTWALPTYNNHLYKQISSQSGASNDNHYFGYSTPWGYFDFNRFHCHFSPRDWQRLINNNWGFRPKKLSFKLFNIQVKEVTQNDGTTTIANNLTSTVQVFTDSEYQLPYVLGSAHQGCLPPFPADVFMVPQYGYLTLNNGSQAVGRSSFYCLEYFPSQMLRTGNNFQFSYTFEDVPFHSSYAHSQSLDRLMNPLIDQYLYYLNRTQGTTSGTTNQSRLLFSQAGPQSMSLQARNWLPGPCYRQQRLSKTANDNNNSNFPWTAASKYHLNGRDSLVNPGPAMASHKDDEEKFFPMHGNLIFGKEGTTASNAELDNVMITDEEEIRTTNPVATVQYGTVANNLQSSNTAPTTRTVNDQGALPGMVWQDRDVYLQGPIWAKIPHTDGHFHPSPLMGGFGLKHPPPQIMIKNTPVPANPPTTFSPAKFASFITQYSTGQVSVEIEWELQKENSKRWNPEIQYTSNYNKSVNVDFTVDTNGVYSEPRPIGTRYLTRNL

SEQ ID NO: 837 - protein, 735 aa, Artificial Sequence
  source: /note="Description of Artificial Sequence: Synthetic polypeptide"
MAADGYLPDWLEDNLSEGIREWWALKPGVPQPKANQQHQDNRRGLVLPGYKYLGPGNGLDKGEPVNEADAAALEHDKAYDQQLKAGDNPYLKYNHADAEFQERLQEDTSFGGNLGRAVFQAKKGILEPLGLVEEAAKTAPGKKRPVDQSPQEPDSSSGVGKSGKQPARKRLNFGQTGDSESVPDPQPLGEPPAAPTSLGSNTMASGGGAPMADNNEGADGVGNSSGNWHCDSQWLGDRVITTSTRTWALPTYNNHLYKQISSQSGASNDNHYFGYSTPWGYFDFNRFHCHFSPRDWQRLINNNWGFRPKKLSFKLFNIQVKEVTQNDGTTTIANNLTSTVQVFTDSEYQLPYVFGSAHQGCLPPFPADVFMVPQYGYLTLNNGSQAVGRSSFYCLEYFPSQMLRTGNNFQFSYTFEDVPFHSSYAHSQSSDRLMNPLIDQYLYYLNRTQGTTSGTTNQSRLLFSQAGPQSMSLQARNWLPGPCYRQQRLSKTANDNNNSNFPTAASKYHLNGRDSLVNPGPAMASHKDDEEKFFPMHGNLIFGKEGTTASNAELDNVMITDEEEIRTTNPVATEQYGTVANNLQSSNTAPTTRTVNDQGALPGMVWQDRDVYLQGPIWAKIPHTDGHFHPSPLMGGFGLKHPPPQIMIKNTPVPANPPTTFSPAKFASFITQYSTGQVSVEIEWELQKENSKRWNPEIQYTSNYNKSVNVDFTVDTNGVYSEPRPIGTRYLTRNL

SEQ ID NO: 838 - protein, 736 aa, Artificial Sequence
  source: /note="Description of Artificial Sequence: Synthetic polypeptide"
MAADGYLPDWLEDNLSEGIREWWALKPGVPQPKANQQHQDNRRGLVLPGYKYLGPGNGLDEGEPVNEADAAALEHDKAYDQQLKAGDNPYLKYNHADAEFQERLQEDTSFGGNLGRAVFQAKKRILEPLGLVEGAAKTAPGKKRPVDQSPQEPDSSSGVGKSGKQPARKRLNFGQTGDSESVPDPQPLGEPPAAPTSLGSNTMASGGGAPMADNNEGADGVGNSSGNWHCDSQWLGDRVITTSTRTWALPTYNSHLYKQISSQSGASNDNHYFGYSTPWGYFDFNRFHCHFSPRDWQRLINNNWGFRPKKLSFKLFNIQVKEVTQNDGTTTIANNLTSTVQVFTDSEYQLPYVLGSAHQGCLPPFPADVFMVPQYGYLTLNNGSQAVGRSSFYCLEYFPSQMLRTGNNFQFSYTFEDVPFHSSYAHSQSLDRLMNPLIDQYLYYLNRTQGTTSGTTNQSRLLFSQAGPQSMSLQARNWLPGPCYRQQRLSKTANDNNNSNFPWTAASKYHLNGRDSLVNPGPAMASHKDDEEKFFPMHGNLIFGKEGTTASNAELDNVMITDEEEIRTTNPVATEQYGTVANNLQSSNTAPTTRTVNDQGALPGMVWQDRDVYLQGPIWAKIPHTDGHFHPSPLMGGFGLKHPPPQIMIKNTPVPANPPTTFSPAKFASFITQYSTGQVSVEIEWELQKENSKRWNPEIQYTSNYNKSVNVDFTVDTNGVYSEPRPIGTRYLTRNL

SEQ ID NO: 839 - protein, 668 aa, Artificial Sequence
  source: /note="Description of Artificial Sequence: Synthetic polypeptide"
MAADGYLPDWLEDNLSEGIREWWALKPGVPQPKANQQHQDNRRGLVLPGYKYLGPGNGLDKGEPVNEADAAALEHDKAYDQQLKAGDNPYLKYNHADAEFQERLQEDTSFGGNLGRAVFQAKKRILEPLGLVEGAAKTAPGKKRPVDQSPQEPDSSSGVGKSGKQPARKRLNFGQTGDSESVPDPQPLGEPPAAPTSLGSNTMASGGGAPMADNNEGADGVGNSSGNWHCDSQWLGDRVITTSTRTWALPTYNSHLYKQISSQSGASNDNHYFGYSTPWGILTLTDSTATSHHVTGSDSLTTTGDSGPRNSASSSSTSKLKRSRRTMARRLLPITLPARFKCLRTRSISSRTCSGRRTKAVSRRFQRTPSWSLSMDTSPTTEVKRWDAHPFTAWSTSLRRCGLEITSNSAIPSRMYLFTAATLTARVWIAILLLISICTTTERKEQPLEQPTNHGCFLARLGLSLCLCRPEIGYLGPATGNRDFQRLLTTTTTVTFLGQRPANIISMAATRWIQDQLWPVTRTMKKNFSLCTAIRGPYLAWCGKIVTCTFKDLSGQRFLTRMDTFILLLWEALDNIRLLKSSKILRYRQILRRLSARPSLLHLSLSTPLDRSAWKLSGSYRKKTANVGIQRFSTLPTTTSLLMWTLLTLMVFIVNLALLEPGISHETC

SEQ ID NO: 840 - protein, 734 aa, Artificial Sequence
  source: /note="Description of Artificial Sequence: Synthetic polypeptide"
MTDGYLPDWLEDNLSEGVREWWALQPGAPKPKANQQHQDNARGLVLPGYKYLGPGNGLDKGEPVNAADAAALEHDKAYDQQLKAGDNPYLKYNHADAEFQQRLQGDTSFGGNLGRAVFQAKKRVLEPLGLVEQAGETAPGKKRPLIESPQQPDSSTGIGKKGKQPAKKKLVFEDETGAGDGPPEGSTSGAMSDDSEMRAATGGAAVEGGQGADGVGNASGDWHCDSTWSEGHVTTTSTRTWVLPTYNNHLYKRLGESLQSNTYNGFSTPWGYFDFNRFHCHFSPRDWQRLINNNWGMRPKAMRVKIFNIQVKEVTTSNGETTVANNLTSTVQIFADSSYELPYVMDAGQEGSLPPFPNDVFMVPQYGYCGLVTGNTSQQQTDRNAFYCLEYFPSQMLRTGNNFEITYSFEKVPFHSMYAHSQSLDRLMNPLIDQYLWGLQSTTTGTTLNAGTATTNFTKLRPTNLSNFKKNWLPGPSIKQQGFSKTANQNYKIPATGSDSLIKYETHSTLDGRWSALTPGPPMATAGPADSKFSNSQLIFAGPKQNGNTATVPGTLIFTSEEELAATNATDTDMWGNLPGGDQSNSNLPTVDRLTALGAVPGMVWQNRDIYYQGPIWAKIPHTDGHFHPSPLIGGFGLKHPPPQIFIKNTPVPANPATTFSSTPVNSFITQYSTGQVSVQIDWEIQKERSKRWNPEVQFTSNYGQQNSLLWAPDAAGKYTEPRAIGTRYLTHHL

SEQ ID NO: 841 - protein, 734 aa, Artificial Sequence
  source: /note="Description of Artificial Sequence: Synthetic polypeptide"
MTDGYLPDWLEDNLSEGVREWWALQPGAPKPKANQQHQDNARGLVLPGYKYLGPGNGLDKGEPVNAADAAALEHDKAYDQQLKAGDNPYLKYNHADAEFQQRLQGDTSFGGNLGRAVFQAKKRVLEPLGLVEQAGETAPGKKRPLIESPQQPDSSTGIGKKGKQPAKKKLVFEDETGAGDGPPEGSTSGAMSDDSEMRAAAGGAAVEGGQGADGVGNASGDWHCDSTWSEGHVTTTSTRTWVLPTYNNHLYKRLGESLQSNTYNGFSTPWGYFDFNRFHCHFLPRDWQRLINNNWGVRPKAMRVKIFNIQVKEVTTSNGETTVANNLTSTVQIFADSSYELPYVMDAGQEGSLPPFPNDVFMVPQYGYCGLVTGDTSQQQTDRNAFYCLEYFPSQMLRTGNNFEITYSFEKVPFHSMYAHSQSLDRLMNPLIDQYLWGLQSTTTGTTLNAGTATTNFTKLRPTNFSNFKKNWLPGPSIKQQGFSKTANQNYKIPATGSDSLIKYETHSTLDGRWSALTPGPPMATAGPADSKFSNSQLIFAGPKQNGNTATVPGTLIFTSEEELAATNATDTDMWGNLPGGDQSNSNLPTVDRLTALGAVPGMVWQNRDIYYQGPIWAKIPHTDGHFHPSPLIGGFGLKHPPPQIFIKNTPVPANPATTFSSTPVNSFITQYSTGQVSVQIDWEIQKERSKRWNPEVQFTSNYGQQNSLLWAPDAAGKYTEPRAIGTRYLTHHL

SEQ ID NO: 842 - protein, 734 aa, Artificial Sequence
  source: /note="Description of Artificial Sequence: Synthetic polypeptide"
MTDGYLPDWLEDNLSEGVREWWALQPGAPKPKANQQHQDNARGLVLPGYKYLGPGNGLDEGEPVNAADAAALEHDKAYDQQLKAGDNPYLKYNHADAEFQQRLQGDTSFGGNLGRAVFQAKKRVLEPLGLVEQAGETAPGKKRPLIESPQQPDSSTGIGKKGKQPAKKKLVFEDETGAGDGPPEGSTSGAMSDDSEMRAAAGGAAVEGGQGADGVGNASGDWHCDSTWSEGHVTTTSTRTWVLPTYNNHLYKRLGESLQSNTYNGFSTPWGYFDFNRFHCHFSPRDWQRLINNNWGMRPKAMRVKIFNIQVKEVTTSNGETTVANNLTSTVQIFADSSYELPYVMDAGQEGSLPPFPNDVFMVPQYGYCGLVTGNTSQQQTDRNAFYCLEYFPSQMLRTGNNFEITYSFEKVPFHSMYAHSQSLDRLMNPLIDQYLWGLQSTTTGTTLNAGTATTNFTKLRPTNFSNFKKNWLPGPSIKQQGFSKTANQNYKIPATGSDSLIKYETHSTLDGRWSALTPGPPMATAGPADSKFSNSQLIFAGPKQNGNTATVPGTLIFTSEEELAATNATDTDMWGNLPGGDQSNSNLPTVDRLTALGAVPGMVWQNRDIYYQGPIWAKIPHTDGHFHPSPLIGGFGLKHPPPQIFIKNTPVPANPATTFSSTPVNSFITQYSTGQVSVQIDWEIQKERSKRWNPEVQFTSNYGQQNSLLWAPDAAGKYTEPRAIGTRYLTHHL

SEQ ID NO: 843 - protein, 734 aa, Artificial Sequence
  source: /note="Description of Artificial Sequence: Synthetic polypeptide"
MTDGYLPDWLEDNLSEGVREWWALQPGAPKPKANQQHQDNARGLVLPGYKYLGPGNGLDKGEPVNAADAAALEHDKAYDQQLKAGDNPYLKYNHADAEFQQRLQGDTSFGGNLGRAVFQAKKRVLEPLGLVEQAGETAPGKKRPLIESPQQPDSSTGIGKKGKQPAKKKLVFEDGTGAGDGPPEGSTSGAMSDDSEMRAAAGGAAVEGGQGADGVGNASGDWHCDSTWSEGHVTTTSTRTWVLPTYNNHLYKRLGESLQSNTYNGFPTPWGYFDFNRFHCHFSPRDWQRLINNNWGMRPKAMRVKIFNIQVKEVTTSNGETTAANNLTSTVQIFADSSYELPYVMDAGQEGSLPPFPNDVFMVPQYGYCGLVTGNTSQQQTDRNAFYCLEYFPSQMLRTGNNFEITYSFEKVPFHSMYAHSQSLDRLMNPLIDQYLWGLQSTTTGTTLNAGTATTNFTKLRPTNFSNFKKNWLPGPSIKQQGFSKTANQNYKIPATGSDSLIKYETHSTLDGRWSALTPGPPMATAGPADSKFSNSQLIFAGPKQNGNTATVPGTLIFTSEEELAATNATDTDMWGNLPGGDQSNSNLPTVDRLTALGAVPGMVWQNRDIYYQGPIWAKIPHTDGHFHPSPLIGGFGLKHPPPQIFIKNTPVPANPATTFSSTPVNSFITQYSTGQVSVQIDWEIQKERSKRWNPEVQFTSNYGQQNSLLWAPDAAGKYTEPRAIGTRYLTHHL

SEQ ID NO: 844 - protein, 734 aa, Artificial Sequence
  source: /note="Description of Artificial Sequence: Synthetic polypeptide"
MTDGYLPDWLEDNLSEGVREWWALQPGAPKPKANQQHQDNARGLVLPGYKYLGPGNGLDKGEPVNAADAAALEHDKAYDQQLKAGDNPYLKYNHADAEFQQRLQGDTSFGGNLGRAVFQAKKRVLEPLGLVEQAGETAPGKKRPLIESPQQPDSSTGIGKKGKQPAKKKLVFEDETGAGDGPPEGSTSGAMSDDSEMRAAAGGAAVEGGQGADGVGNASGDWHCDSTWSEGHVTTTSTRTWVLPTYNNHLYKRLGESLQSNTYNGFSTPWGYFDFNRFHCHFSPRDWQRLINNNWGMRPKAMRVKIFNIQVKEVTTSNGETTVANNLTSTVQIFADSSYELPYVMDAGQEGSLPPFPNDVFMVPQYGYRGLVTGNTSQQQTDRNAFYCLEYFPSQMLRTGNNFEITYSFEKVPFHSMYAHSQSLDRLMNPLIDQYLWGLQSTTTGTTLNAGTATTNFTKLRPTNFSNFKKNWLPGPSIKQQGFSKTANQNYKIPATGSDSLIKYETHSTLDGRWSALTPGPPMATAGPADSKFSNSQLIFAGPKQNGNTATVPGTLIFTSEEELAATNATDTDMWGNLPGGDQSNSNLPTVDRLTALGAVPGMVWQNRDIYYQGPIWAKIPHTDGHFHPSPLIGGFGLKHPPPQIFIKNTPVPANPATTFSSTPVNSFITQYSTGQVSVQIDWEIQKERSKRWNPEVQFTSNYGQQNSLLWAPDAAGKYTEPRAIGTRYLTHHL

SEQ ID NO: 845 - protein, 734 aa, Artificial Sequence
  source: /note="Description of Artificial Sequence: Synthetic polypeptide"
MTDGYLPDWLEDNLSEGVREWWALQPGAPKPKANQQHQDNARGLVLQGYKYLGPGNGLDKGEPVNAADAAALEHDKAYDQQLKAGDNPYLKYNHADAEFQQRLQGDTSFGGNLGRAVFQAKKRVLEPLGLVEQAGETAPGKKRPLIESPQQPDSSTGIGKKGKQPAKKKLVFEDETGAGDGPPEGSTSGAMSDDSEMRAAAGGAAVEGGQGADGVGNASGDWHCDSTRSEGHVTTTSTRTWVLPTYNNHLYKRLGESLQSNTYNGFSTPWGYFDFNRFHCHFSPRDWQRLINNNWGMRPKAMRVKIFNIQVKEVTTSNGETTVANNLTSTVQIFADSSYELPYVMDAGQEGSLPPFPNDVFMVPQYGYCGLVTGNTSQQQTDRNAFYCLEYFPSQMLRTGNNFEITYSFEKVPFHSMYAHSQSLDRLMNPLIDQYLWGLQSTTTGTTLNAGTATTNFTKLRPTNFSNFKKNWLPGPSIKQQGFSKTANQNYKIPATGSDSLIKYETHSTLDGRWSARTPGPPMATAGPADSKFSNSQLIFAGPKQNGNTATVPGTLIFTSEEELAATNATDTDMWGNLPGGDQSNSNLPTVDRLTALGAVPGMVWQNRDIYYQGPIWAKIPHTDGHFHPSPLIGGFGLKHPPPQIFIKNTPVPANPATTFSSTPVNSFITQYSTGQVSVQIDWEIQKERSKRWNPEVQFTSNYGQQNSLLWAPDAAGKYTEPRAIGTRYLTHHL

SEQ ID NO: 846 - protein, 724 aa, Artificial Sequence
  source: /note="Description of Artificial Sequence: Synthetic polypeptide"
MSFVDHPPDWLEEVGEGLREFLGLEAGPPKPKPNQQHQDQARGLVLPGYNYLGPGNGLDRGEPVNRADEVAREHDISYNEQLEAGDNPYLKYNHADAEFQERLADDTSFGGNLGKAVFQAKKRVLEPFGLVEEGAKTAPTGKRIDDHFPKRKKARTEEDSKPSTSSDAEAGPSGSQQLQIPAQPASSLGADTMSAGGGGPLGDNNQGADGVGNASGDWHCDSTWMGDRVVTKSTRTWVLPSYNNHQYREIKSGSVDGSNANAYFGYSTPWGYFDFNRFHSHWSPRDWQRLINNYWGFRPRSLRVKIFNIQVKEVTVQDSTTTIANNLTSTVQVFTDDDYQLPYVVGNGTEGCLPAFPPQVFTLPQYGYATLNRDNTENPTERSSFFCLEYFPSKMLRTGNNFEFTYNFEEVPFHSSFAPSQNLFKLANPLVDQYLYRFVSTNNTGGVQFNKNLAGRYANTYKNWFPGPMGRTQGWNLGSGVNRASVSAFATTNRMELEGASYQVPPQPNGMTNNLQGSNTYALENTMIFNSQPANPGTTATYLEGNMLITSESETQPVNRVAYNVGGQMATNNQSSTTAPATGTYNLQEIVPGSVWMERDVYLQGPIWAKIPETEAHFHPSPAMGGFGLKHPPPMMLIKNTPVPGNITSFSDVPVSSFITQYSTGQVTVEMEWELKKENSKRWNPEIQYTNNYNDPQFVDFAPDSTGEYRTTRPIGTRYLTRPL

SEQ ID NO: 847 - protein, 724 aa, Artificial Sequence
  source: /note="Description of Artificial Sequence: Synthetic polypeptide"
MSFVDHPPDWLEEVGEGLREFLGLEAGPPKPKPNQQHQDQARGLVLPGYNYLGPGNGLDRGEPVNRADEVAREHDISYNEQLEAGDNPYLKYNHADAEFQEKLADDTSSGGNLGKAVFQAKKRVLEPFGLVEEGAKTAPTGKRIDDHFPKRKKARTEEDSKPSTSSDAEAGPSGSQQLQIPAQPASSLGADTMSAGGGGPLGDNNQGADGVGNASGDWHCDSTWMGDRVVTKSTRTWVLPSYNNHQYREIKSGSVDGSNANAYFGYSTPWGYFDFNRFHSHWSPRDWQRLINNYWGFRPRSLRVKIFNIQVKEVTVQDSTTTIANNLTSTVQVFTDDDYQLPYVVGNGTEGCLPAFPPQVFTLPQYGYATLNRDNTENPTERSSFFCLEYFPSKMLRTGNNFEFTYNFEEVPFHSSFAPSQNLFKLANPLVDQYLYRFVSTNNTGGVQFNKNLAGRYANTYKNWFPGPMGRTQGWNLGSGVNRASVSAFATTNRMELEGASYQVPPQPNGMTNNLQGSNTYALENTMIFNSQPANPGTTATYLEGNMLITSESETQPVNRVAYNVGGQMATNNQSSTTAPATGTYNLQEIVPGSVWMERDVYLQGPIWAKIPETGAHFHPSPAMGGFGLKHPPPMMLIKNTPVPGNITSFSDVPVSSFITQYSTGQVTVEMEWELKKENSKRWNPEIQYTNNYNDPQFVDFAPDSTGEYRTTRPIGTRYLTRPL

SEQ ID NO: 848 - protein, 724 aa, Artificial Sequence
  source: /note="Description of Artificial Sequence: Synthetic polypeptide"
MSFVDHPPDWLEEVGEGLREFLGLEAGPPKPKPNQQHQDQARGLVLPGYNYLGPGNGLDRGEPVNRADEVAREHDISYNEQLEAGDNPYLKYNHADAEFQEKLADDTSFGGNLGKAVFQAKKRVLEPFGLVEEGAKTAPTGKRIDDHFPKRKKARTEEDSKPSTSSDAEAGPSGSQQLQIPAQPASSLGADTMSAGGGGPLGDNNQGADGVGNASGDWHCDSTWMGDRVVTKSTRTWVLPSYNNHQYREIKSGSVDGSNANAYFGYSTPWGYFDFNRFHSHWSPRDWQRLINNYWGFRPRSLRVKIFNIQVKEVTVQDSTTTIANNLTSTVQVFTDDDYQLPYVVGNGTEGCLPAFPPQVFTLPQYGYATLNRDNTENPTERSSFFCLEYFPSKMLRTGNNFEFTYNFEEVPFHSSFAPSQNLFKLANPLVDQYLYRFVSTNNTGGVQFNKNLAGRYANTYKNWFPGPMGRTQGWNLGSGVNRASVSAFATTNRMELEGASYQVPPQPNGMTNNLQGSNTYALENTMIFNSQPANPGTTATYLEGNMLITSESETQPVNRVAYNVGGQMATNNQSSTTAPATGTYNLQEIVPGSVWMERDVYLQGPIWAKIPETGAHFHPSPAMGGFGLKHPPPMMLIKSTPVPGNITSFSDVPVSSFITQYSTGQVTVEMEWELKKENSKRWNPEIQYTNNYNDPQFVDFAPDSTGEYRTTRPIGTRYLTRPL

SEQ ID NO: 849 - protein, 724 aa, Artificial Sequence
  source: /note="Description of Artificial Sequence: Synthetic polypeptide"
MSFVDHPPDWLEEVGEGLREFLGPEAGPPKPKPNQQHQDQARGLVLPGYNYLGPGNGLDRGEPVNRADEVAREHDISYNEQLEAGDNPYLKYNHADAEFQEKLADDTSFGGNLGKAVFQAKKRVLEPFGLVEEGAKTAPTGKRIDDHFPKRKKVRTEEDSKPSTSSDAEAGPSGSQQLQIPAQPASSLGADTMSAGGGGPLGDNNQGADGVGNASGDWHCDSTWMGDRVVTKSTRTWVPPSYNNHQYREIKSGSVDGSNANAYFGYSTPWGYFDFNRFHSHWSPRDWQRLINNYWGFRPRSLRVKIFNIQVKEVTVQDSTTTIANNLTSTVQVFTDDDYQLPYVVGNGTEGCLPAFPPQVFTLPQYGYATLNRDNTENPTERSSFFCLEYFPSKMLRTGNNFEFTYNFEEVPFHSSFAPSQNLFKLANPLVDQYLYRFVSTNNTGGVQFNKNLAGRYANTYKNWFPGPMGRTQGWNLGSGVNRASVSAFATTNRMELEGASYQVPPQPNGMTNNLQGSNTYALENTMIFNSQPANPGTTATYLEGNMLITSESETQPVNRVACNVGGQMATNNQSSTTAPATGTYNLQEIVPGSVWMERDVYLQGPIWAKIPETGAHFHPSPAMGGFGLKHPPPMMLIKNTPVPGNITSFSDVPVSSFITQYSTGQVTVEMEWELKKENSKRWNPEIQYTNNYNDPQFVDFAPDSTGEYRTTRPIGTRYLTRPL

SEQ ID NO: 850 - protein, 724 aa, Artificial Sequence
  source: /note="Description of Artificial Sequence: Synthetic polypeptide"
MSFVDHPPDWLEEVGEGLREFLGLEAGPPKPKPNQQHQDQARGLVLPGYNYLGPGNGLDRGEPVNRADEVAREHDISYNEQLEAGDNPYLKYNHADAEFQEKLADDTSFGGNLGKAVFQAKKRVLEPFGLVEEGAKTAPTGKRIDDHFPKRKKARTEEDSKPSTSSDAEAGPSGSQQLQIPAQPASSLGADTMSAGGGGPLGDNNQGADGVGNASGDWHCDSTWMGDRVVTKSTRTWVLPSYNNHQYREIKSGSVDGSNANAYFGYSTPWGYFDFNRFHSHWSPRDWQRLINNYWGFRPRSLRVKIFNIQVKEVTVQDSTTTIANNLTSTVQVFTDDDYQLPYVVGNGTEGCLPAFPPQVFTLPQYGYATLNRDNTENPTERSSFFCLEYFPSKMLRTGNNFEFTYNFEEVPFHSSFAPSQNLFKLANPLVDQYLYRFVSTNNTGGVQFNKNLAGRYANTYKNWFPGPMGRTQGWNLGSGVNRASVSAFATTNRMELEGASYQVPPQPNGMTNNLQGSNTYALENTMIFNSQPANPGTTATYLEGNMLITSESETQPVNRVAYNVGGQMATNNQSSTTAPATGAYNLQEIVPGSVWMERDVYLQGPIWAKIPETGAHFHPSPAMGGFGLKHPPPMMLIKNTPVPGNITSFSDVPVSSFITQYSTGQVTVEMEWELKKENSKRWNPEIQYTNNYNDPQFVDFAPDSTGEYRTTRPIGTRYLTRPL

SEQ ID NO: 851 - protein, 724 aa, Artificial Sequence
  source: /note="Description of Artificial Sequence: Synthetic polypeptide"
MSFVDHPPDWLEEVGEGLREFLGLEAGPPKPKPNQQHQDQARGLVLPGYNYLGPGNGLDRGEPVNRADGVAREHDISYNEQLEAGDNPYLKYNHADAEFQEKLADDTSFGGNLGKAVFQAKKRVLEPFGLVEEGAKTAPTGKRIDDHFPKRKKARTEEDSKPSTSSDAEAGPSGSQQLQIPAQPASSLGADTMSAGGGGPLGDNNQGADGVGNASGDWHCDSTWMGDRVVTKSTRTWVLPSYNNHQYREIKSGSVDGSNANAYFGYSTPWGYFDFNRFHSHWSPRDWQRLINNYWGFRPRSLRVKIFNIQVKEVTVQDSTTTIANNLTSTVQAFTDDDYQLPYVVGNGTEGCLPAFPPQVFTLPQYGYATLNRDNTENPTERSSFFCLEYFPSKMLRTGNNFEFTYNFEEVPFHSSFAPSQNLFKLANPLVDQYLYRFVSTNNTGGVQFNKNLAGRYANTYKNWFPGPMGRTQGWNLGSGVNRASVSAFATTNRMELEGASYQVPPQPNGMTNNLQGSNTYALENTMIFNSQPANPGTTATYLEGNMLITSESETQPVNRVAYNVGGQMATNNQSSTTAPATGTYNLQEIVPGSVWMERDVYLQGPIWAKIPETGAHFHPSPAMGGFGLKHPPPMMLIKNTPVPGNITSFSDVPVSSFITQYSTGQVTVEMEWELKKENSKRWNPEIQYTNNYNDPQFVDFAPDSTGEYRTTRPIGTRYLTRPL

SEQ ID NO: 852 - protein, 723 aa, Artificial Sequence
  source: /note="Description of Artificial Sequence: Synthetic polypeptide"
MSFVDHPPDWLEEVGEGLREFLGLEAGPPKPKPNQQHQDQARGLVLPGYNYLGPGNGLDRGEPVNRADEVAREHDISYNEQLEAGDNPYLKYNHADAEFQEKLADDTSFGGNLGKAVFQAKKRVLEPFGLVEEGAKTAPTGKRIDDHFPKRKKARTEEDSKPSTSSDAEAGPSGSQQLQIPAQPASSLGADTMSAGGGGPLGDNNQGADGVGNASGDWHCDSTWMGDRVVTKSTRTWVLPSYNNHQYREIKSGSVDGSNANAYFGYSTPWGYFDFNRFHSHWSPRDWQRLINNYWGFRPRSLRVKIFNIQVKEVTVQDSTTTIANNLTSTVQVFTDDDYQLPYVVGNGTEGCLPAFPPQVFTLPQYGYATLNRDNTENPTERSSFFCLEYFPSKMLRTGNNFEFTYNFEEVPFHSSFAPSQNLFKLANPLVDQYLYRFVSTNNTGGVQFNKNLAGRYANTYKNWFPGPMGRTQGWNLGSGVNRASVSAFATTNRMELEGASYVPPQPNGMTNNLQGSNTYALENTMIFNSQPANPGTTATYLEGNMLITSESETQPVNRVAYNVGGQMATNNQSSTTAPATGTYNLQEIVPGSVWMEGDVYLQGPIWAKIPETGAHFHPSPAMGGFGLKHPPPMMLIKNTPVPGNITSFSDVPVSSFITQYSTGQVTVEMEWELKKENSKRWNPEIQYTNNYNDPQFVDFAPDSTGEYRTTRPIGTRYLTRPL

SEQ ID NO: 853 - protein, 724 aa, Artificial Sequence
  source: /note="Description of Artificial Sequence: Synthetic polypeptide"
MSFVDHPPDWLEEVGEGLREFLGLEAGPPKPKPNQQHQDQARGLVLPGYNYLGPGNGLDRGEPVNRADEVAREHDISYNEQLEAGDNPYLKYNHADAEFQEKLADDTSFGGNLGKAVFQAKKRVLEPFGLVEEGAKTAPTGKRIDDHFPKRKKVRTEEDSKPSTSSDAEAGPSGSQQLQIPAQPASSLGADTMSAGGGGPLGDNNQGADGVGNASGDWHCDSTWMGDRVVTKSTRTWVLPSYNNHQYREIKSGSVDGSNANAYFGYSTPWGYFDFNRFHSHWSPRDWQRLINNYWGFRPRSLRVKIFNIQVKEVTVQDSTTTIANNLTSTVQVFTDDDYQLPYVVGNGTEGCLPAFPPQVFTLPQYGYATLNRDNTENPTERSSFFCLEYFPSKMLRTGNNFEFTYNFEEVPFHSSFAPSQNLFKLANPLVDQYLYRFVSTNNTGGVQFNKNLAGRYANTYKNWFPGPMGRTQGWNLGSGVNRASVSAFATTNRMELEGASYQVPPQPNGMTNNLQGSNTYALENTMIFNSQPANPGTTATYLEGNMLITSESETQPVNRVAYNVGGQMATNNQSSTTAPATGTYNLQEIVPGSVWMERDVYLQGPIWAKIPETGAHFHPSPAMGGFGLKHPPPMMLIKNTPVPGNITSFSDVPVSSFITQYSTGQVTVEMEWELKKENSERWNPEIQYTNNYNDPQFVDFAPDSTGEYRTTRPIGTRYLTRPL

SEQ ID NO: 854 - protein, 724 aa, Artificial Sequence
  source: /note="Description of Artificial Sequence: Synthetic polypeptide"
MSFVDHPPDWLEEVGEGLREFLGLEAGPPKPKPNQQHQDQARGLVLPGYNYLGPGNGLDRGEPVNRADEVAREHDISYSEQLEAGDNPYLKYNHADAEFQEKLADDTSFGGNLGKAVFQAKKRVLEPFGLVEEGAKTAPTGKRIDDHFPKRKKARTEEDSKPSTSSDAEAGPSGSQQLQIPAQPASSLGADTMSAGGGGPLGDNNQGADGVGNASGDWHCDSTWMGDRVVTKSTRTWVLPSYNNHQYREIKSGSVDGSNANAYFGYSTPWGYFDFNRFHSHWSPRDWQRLINNYWGFRPRSLRVKIFNIQVKEVTVQDSTTTIANNLTSTVQVFTDDDYQLPYVVGNGTEGCLPAFPPQVFTLPQYGYATLNRDNTENPTERSSFFCLEYFPSKMLRTGNNFEFTYNFEEVPFHSSFAPSQNLFKLANPLVDQYLYRFVSTNNTGGVQFNKNLAGRYANTYKNWFPGPMGRTQGWNLGSGVNRASVSAFATTNRMELEGASYQVPPQPNGMTNNLQGSNTYALENTMIFNSQPANPGTTATYLEGNMLITSESETQPVNRVAYNVGGQMATNNQSSTTAPATGTYNLQEIVPGSVWMERDVYLQGPIWAKIPETGAHFHPSPAMGGFGLKHPPPMMLIKNTPVPGNITSFSDVPVSSFITQYSTGQVTVEMEWELKKENSKRWNPEIQYTNNYNDPQFVDFAPDSTGEYRTARPIGTRYLTRPL

SEQ ID NO: 855 - protein, 724 aa, Artificial Sequence
  source: /note="Description of Artificial Sequence: Synthetic polypeptide"
MSFVDHPPDWLEEVGEGLREFLGPEAGPPKPKPNQQHQDQARGLVLPGYNYLGPGNGLDRGEPVNRADEVAREHDISYNEQLEAGDNPYLKYNHADAEFQEKLADDTSFGGNLGKAVFQAKKRVLEPFGLVEEGAKTAPTGKRIDDHFPKRKKARTEEDSKPSTSSDAEAGPSGSQQLQIPAQPASSLGADTMSAGGGGPLGDNNQGADGVGNASGDWHCDSTWMGDRVVTKSTRTWVLPSYNNHQYREIKSGSVDGSNANAYFGYSTPWGYFDFNRFHSHWSPRDWQRLINNYWGFRPRSLRVKIFNIQVKEVTVQDSTTTIANNLTSTVQVFTDDDYQLPYVVGNGTEGCLPAFPPQVFTLPQYGYATLNRDNTENPTERSSFFCLEYFPSKMLRTGNNFEFTYNFEEVPFHSSFAPSQNLFKLANPLVDQYLYRFVSTNNTGGVQFNKNLAGRYANTYKNWFPGPMGRTQGWNLGSGVNRASVSAFATTNRMELEGASYQVPPQPNGMTNNLQGSNTYALENTMIFNSQPANPGTTATYLEGNMLITSESETQPVNRVAYNVGGQMTTNNQSSTTAPATGTYNLQEIVPGSVWMERDVYPQGPIWAKIPETGAHFHPSPAMGGFGLKHPPPMMLIKNTPVPGNITSFSDVPVSSFITQYSTGQVTVEMEWELKKENSKRWNPEIQYTNNYNDPQFVDFAPDSTGEYRTTRPIGTRYLTRPL

SEQ ID NO: 856 - protein, 724 aa, Artificial Sequence
  source: /note="Description of Artificial Sequence: Synthetic polypeptide"
MSFVDHPPDWLEEVGEGLREFLGLEAGPPKPKPNQQHQDQARGLVLPGYNYLGPGNGLDRGEPVNRADEVAREHDISYNEQLEAGDNPYLKYNHADAEFQEKLADDTSFGGNLGKAVFQAKKRVLEPFGLVEEGAKTAPTGKRIDDHFPKRKKARTEEDSKPSTSSDAEAGPSGSQQLQIPAQPASSLGADTMSAGGGGPLGDNNQGADGVGNASGDWHCDSTWMGDRVVTKSTRTWVLPSYNNHQYREIKSGSVDGSNANAYFGYSTPWGYFDFNRFHSHWSPRDWQRLINNYWGFRPRSLRVKIFNIQVKEVTVQDSTTTIANNLTSTVQVFTDDDYQLPYVVGNGTEGCLPAFPPQVFTLPQYGYATLNRDNTENPTERSSFLCLEYFPSKMLRTGNNFEFTYNFEEVPFHSSFAPSQNLFKLANPLVDQYLYRFVSTNNTGGVQFNKNLAGRYANTYKNWFPGPMGRTQGWNLGSGVNRASVSAFATTNRMELEGASYQVPPQPNGMTNNLQGSNTYALENTMIFNSQPANPGTTATYLEGNMLITSESETQPVNRVAYNVGGQMATNNQSSTTAPATGTYNLQEIVPGSVWMKRDVYLQGPIWAKIPETGAHFHPSPAMGGFGLKHPPPMMLIKNTPVPGNITSFSDVPVSSFITQYSTGQVTVEMEWELKKENSKRWNPEIQYTNNYNDPQFVDFAPDSTGEYRTTRPIGTRYLTRPL

SEQ ID NO: 857 - protein, 724 aa, Artificial Sequence
  source: /note="Description of Artificial Sequence: Synthetic polypeptide"
MSFVDHPPDWLEEVGEGLREFLGLEAGPPKPKPNQQHQDQARGLVLPGYNYLGPGNGLDRGEPVNRADEVAREHDISYNEQLEAGDNPYLKYNHADAEFQEKLADDTSFGGNLGKAVFQAKKRVLEPFGLVEEGAKTAPTGKRIDDHFPKRKKARTEEDSKPSTPSDAEAGPSGSQQLQIPAQPASSLGADTMSAGGGGPLGDNNQGADGVGNASGDWHCDSTWMGDRVVTKSTRTWVLPSYNNHQYREIKSGSVDGSNANAYFGYSTPWGYFDFNRFHSHWSPRDWQRLINNYWGFRPRSLRVKIFNIQVKEVTVQDSTTTIANNLTSTVQVFTDDDYQLPYVVGNGTEGCLPAFPPQVFTLPQYGYATLNRDNTENPTERSSFFCLEYFPSKMLRTGNNFEFTYNFEEVPFHSSFAPSQNLFKLANPLVDQYLYRFVSTNNTGGVQFNKNLAGRYANTYKNWFPGPMGRTQGWNLGSGVNRASVSAFATTNRMELEGASYQVPPQPNGMTNNLQGSNTYALENTMIFNSQPANPGTTATYLEGNMLITSESETQPVNRVAYNVGGQMATNNQSSTTAPATGTYNLQEIVPGSVWMERDVYLQGPIWAKIPETGAHFHPSPAMGGFGLKHPPPMMLIKNTPVPGNITSFSDVPVSSFITQYSTGQVTVEMEWELKKENSKRWNPEIQYTNNYNDPQFVDFAPDSTGEYRTTRPIGTRYLTRPL

SEQ ID NO: 858 - protein, 724 aa, Artificial Sequence
  source: /note="Description of Artificial Sequence: Synthetic polypeptide"
MSFVDHPPDWLEEVGEGLREFLGLEAGPPKPKPNQQHQDQARGLVLPGYNYLGPGNGLDRGEPVNRADEVAREHDISYNEQLEAGDNPYLKYNHADAEFQEKLADDTSFGGNLGKAVFQAKKRVLEPFGLVEEGAKTAPTGKRIDDHFPKRKKARTEEDSKPSTSSDAEAGPSGSQQLQIPAQPASSLGADTMSAGGGGPLGDNNQGADGVGNASGDWHCDSTWMGDRVVTKSTRTWVLPSYNNHQYREIKSGSVDGSNANAYFGYSTPWGYFDFNRFHSHWSPRDWQRLINNYWGFRPRSLRVKIFNIQVKEVTVQDSTTTIANNLTSTVQVFTDDDYQLPYVVGNGTEGCLPAFPPQVFTLPQYGYATLNRDNTENPTERSSFFCLEYFPSKMLRTGNNFEFTYNFEEVPFHSSFAPSQNLFKLANPLVDQYLYRFVSTNNTGGVQFNKNLAGRYANTHKNWFPGPMGRTQGWNLGSGVNRASVSAFATTNRMELEGASYQVPPQSNGMTNNLRGSNTYALENTMIFNSQPANPGTTATYLEGNMLITSESETQPVNRVAYNVGGQMATNNQSSTTAPATGTYNLQEIVPGSVWMERDVYLQGPIWAKIPETGAHFHPSPAMGGFGLKHPPPMMLIKNTPVPGNITSFSDVPVSSFITQYSTGQVTVEMEWELKKENSKRWNPEIQYTNNYNDPQFVDFAPDSTGEYRTTRPIGTRYLTRPL

SEQ ID NO: 859 - protein, 724 aa, Artificial Sequence
  source: /note="Description of Artificial Sequence: Synthetic polypeptide"
MSFVDHPPDWLEEVGEGLREFLGLEAGPPKPKPNQQHQDQARGLVLPGYNYLGPGNGLDRGEPVNRADEVAREHDISYNEQLEAGDNPYLKYNHADAEFQEKLADDTSFGGNLGKAVFQAKKRVLEPFGLVEEGAKTAPTGKRIDDHFPKRKKARTEEDSKPSTSSDAEAGPSGSQQLQIPAQPASSLGADTMSAGGGGPLGDNNQGADGVGNASGDWHCDSTWMGDRVVTKSTRTWVLPSYNNHQYREIKSGSVDGSNANAYFGYSTPWGYFDFNRFHSHWSPRDWQRLINNYWGFRPRSLRVKIFNIQVKEVTVQDSTTTIANNLTSTVQVFTDDDYQLPYVVGNGTEGCLPAFPPQVFTLPQYGYATLNRDNTENPTERSSFFCLEYFPSKMLRTGNNFEFTYNFEEVPFHSSFAPSQNLFKLANPLVDQYLYRFVSTNNTGGVQFNKNLAGRYANTYKNWFPGPMGRTQGWNLGSGVNRASVSAFATTNRMELEGASYQVPPQPNGMTNNLQGSNTYALENTMIFNSQPANPGTTATYLEGNMLITSESETQPVNRVAYSVGGQMATNNQSSTTAPTTGTYNLQEIVPGSVWMERDVYLQGPIWAKIPETGAHFHPSPAMGGFRLKHPPPMMLIKNTPVPGNITSFSDVPVSSFITQYSTGQVTVEMEWELKKENSKRWNPEIQYTNNYNDPQFVDFAPDSTGEYRTTRPIGTRYLTRPL

SEQ ID NO: 860 - protein, 724 aa, Artificial Sequence
  source: /note="Description of Artificial Sequence: Synthetic polypeptide"
MSFVDHPPDWLEEVGEGLREFLGLEAGPPKPKPNQQHQDQARGLVLPGYNYLGPGNGLDRGEPVNRADEVAREHDISYNEQLEAGDNPYLKYNHADAEFQEKLADDTSFGGNLGKAVFQAKKRVLEPFGLVEEGAKTAPTGKRIDDHFPKRKKARTEEDSKPSTSSDAEAGPSGSQQLQIPAQPASSLGADTMSAGGGGPLGDNNQGADGVGNASGDWHCDSTWMGDRVVTKSTRTWVLPSYNNHQYREIKSGSVDGSNANAYFGYSTPWGYFDFNRFHSHWSPRDWQRLINNYWGFRPRSLRVKIFNIQVKEVTVQDSTTTIANNLTSTVQVFTDDDYQLPYVVGNGTEGCLPAFPPQVFTLPQYGYATLNRDNTENPTERSSFFCLEYFPSKMLRTGNNFEFTYNFEEVPFHSSFAPSQNLFKLANPLVDQYLYRFVSTNNTGGVQFNKNLAGRYANTYKNWFPGPMGRTQGWNLGSGVNRASVSAFAATNRMELEGASYQVPPQPNGMTNNLQGSNTYALENTMIFNSQPANPGTTATYLEGNMLITSESETQPVNRVAYNVGGQMATNNQSSTTAPATGTYNLQEIVPGGVWMERDVYLQGPIWAKIPETGAHFHPSPAMGGFGLKHPPPMMLIKNTPVPGNTTSFSDVPVSSFITQYSTGQVTVEMEWELKKENSKRWNPEIQYTNNYNDPQFVDFAPDSTGEYRTTRPIGTRYLTRPL

SEQ ID NO: 861 - protein, 724 aa, Artificial Sequence
  source: /note="Description of Artificial Sequence: Synthetic polypeptide"
MSFVDHPPDWLEEVGEGLREFLGLEAGPPKPKPNQQHQDQARGLVLPGYNYLGPGNGLDRGEPVNRADEVAREHDISYNEQLEAGDNPYLKYNHADAEFQEKLADDTSFGGNLGKVVFQAKKRVLEPFGLVEEGAKTAPTGKRIDDHFPKRKKARTEEDSKPSTSSDAEAGPSGSQQLQIPAQPASSLGADTMSAGGGGPLGGNNQGADGVGNASGDWHCDSTWMGDRVVTKSTRTWVLPSYNNHQYREIKSGSVDGSNANAYFGYSTPWGYFDFNRFHSHWGPRDWQRLINNYWGFRPRSLRVKIFNIQVKEVTVQDSTTTIANNLTSTVQVFTDDDYQLPYVVGNGTEGCLPAFPPQVFTLPQYGYATLNRDNTENPTERSSFFCLEYFPSKMLRTGNNFEFTYNFEEVPFHSSFAPSQNLFKLANPLVDQYLYRFVSTNNTGGVQFNKNLAGRYANTYKNWFPGPMGRTQGWNLGSGVNRASVSALATTNRMELEGASYQVPPQPNGMTNNLQGSNTYALENTMIFNSQPANPGTTATYLEGNMLITSESETQPVNRVAYNVGGQMATNNQSSTTAPATGTYNLQEIVPGSVWMERDVYLQGPIWAKIPETGAHFHPSPAMGGFGLKHPPPMMLIKNTPVPGNITSFSDVPVSSFITQYSTGQVTVEMEWELKKENSKRWNPEIQYTNNYNDPQFVDFAPDSTGEYRTTRPIGTRYLTRPL

SEQ ID NO: 862 - protein, 723 aa, Artificial Sequence
  source: /note="Description of Artificial Sequence: Synthetic polypeptide"
MSFVDHPPDWLEEVGEGLREFLGLEAGPPKPKPNQQHQDQARGLVLPGYNYLGPGNGLDRGEPVNRADEVAREHDISYNEQLEAGDNPYLKYNHADAEFQEKLADDTSFGGNLGKAVFQAKKRVLEPFGLVEEGAKTAPTGKRIDDHFPKRKKARTEEDSKPSTSSDAEAGPSGSQQLQIPAQPASSLGADTMSAGGGGPLGDNNQGADGVGNASGDWHCDSTWMGDRVVTKSTRTWVLPSYNNHQYREIKSGSVDGSNANAYFGYSTPWGYFDFNRFHSHWSPRDWQRLINNYWGFRPRSLRVKIFNIQVKEVTVQDSTTTIANNLTSTVQVFTDDDYQLPYVVGNGTEGCLPAFPPQVFTLPQYGYATLNRDNTENPTERSSFFCLEYFPSKMLRTGNNFEFTYNFEEVPFHSSFAPSQNLFKLANPLVDQYLYRFVSTNNTGGVQFNKNLAGRYANTYKNWFPGPMGRTQGWNLGSGVNRASVSAFATTNRMELEGASYQVPPQPNGMTNNLQGSNTYALENTMIFNSQPANPGTTATYLEGNMLITSESETQPVNRVAYNVGGQMATNNQSSTTAPATGTYNLQEIVPGSVWMERDVYLQGPIAKIPETGAHFHPSPAMGGFGLKHPPPMMLIKNTPVPGNITSFSDVPVSSFITQYSTGQVTVEMEWELKKENSKRWNPEIQYTNNYNDPQFVDFAPDSTGECRTTRPIGTRYLTRPL

SEQ ID NO: 863 - protein, 724 aa, Artificial Sequence
  source: /note="Description of Artificial Sequence: Synthetic polypeptide"
MSFVDHPPDWLEEVGEGLREFLGLEAGPPKPKPNQQHQDQARGLVLPGYNYLGPGNGLDRGEPVNRADEVAREHDISYNEQLEAGDNPYLKYNHADAEFQEKLADDTSFGGNLGKAVFQAKKRVLEPFGLVEEGAKTAPTGKRIDDHFPKRKKARTEEDSKPSTSSDAEAGPSGSQQLQIPAQPASSLGADTMSAGGGGPLGDNNQGADGVGNASGDWHCDSTWMGDRVVTKSTRTWVLPSYNNHQYREIKSGSVDGSNANAYFGYSTPWGYFDFNRFHSHWSPRDWQRLINNYWGFRPRSLRVKILNIQVKEVTVQDSTTTIANNLTSTVQVFTDDDYQLPYVVGNGTEGCLPAFPPQVFTLPQYGYATLNRDNTENPTERSSFFCLEYFPSKMLRTGNNFEFTYNFEEVPFHSSFAPSQNLFKLANPLVGQYLYRFVSTNNTGGVQFNENLAGRYANTYKNWFPGPMGRTQGWNLGSGVNRASVSAFATTNRMELEGASYQVPPQPNGMTNNLQGSNTYALENTMIFNSQPANPGTTATYLEGNMLITSESETQPVNRVAYNVGGQMATNNQSSTTAPATGTYNLQEIVPGSVWMERDVYLQGPIWAKIPETGAHFHPSPAMGGFGLKHPPPMMLIKNTPVPGNITSFSDVPVSSFITQYSTGQATVEMEWELKKENSKRWNPEIQYTNNYNDPQFVDFAPDSTGEYRTTRPIGTRYLTRPL

SEQ ID NO: 864 - protein, 724 aa, Artificial Sequence
  source: /note="Description of Artificial Sequence: Synthetic polypeptide"
MSFVDHPPDWLEEVGEGLREFLGLEAGPPKPKPNQQHQDQARGLVLPGYNYLGPGNGLDRGEPVNRADEVAREHDISYNEQLEAGDNPYLKYNHADAEFQEKLADDTSFGGNLGKAVFQAKKRVLEPFGLVEEGAKTAPTGKRIDDHFPKRKKARTEEDSKPSTSSDAEAGPSGSQQLQIPAQPASSLGADTMSAGGGGPLGDNNQGADGVGNASGDWHCDSTWMGDRVVTKSTRTWVLPSYNNHQYREIKSGSVDGSNANAYFGYSTPWGYFDFNRFHSHWSPRDWQRLINNYWGFRPRSLRVKIFNIQVKEVTVQDSTTIIANNLTSTVQVFTDDDYQLPYVVGNGTEGCLPAFPPQVFTLPQYGYATLNRDNTENPTERSSFFCLEYFPSKMLRTGNNFEFTYNFEEVPFHSSFAPSQNLFKLANPLVDQYLYRFVSTNNTGGVQFNKNLAGRYANTYKNWFPGPMGRTQGWNLGSGVNRASVSAFATTNRMELEGASYQVPPQPNGMTNNLQGSNTYALENTMIFNSQPANPGTTATYLEGNMLITSESETQPVNRVAYNVGGQMATNNQSSTTAPATGTYNLQEIVPGSVWMERDVYLQGPIWAKIPETGAHFHPSPAMGGFGLKHPPPMMLIKNTPVPGNITSFSDVPVSSFITQYSTGQVTVEMEWELKKENSKRWNPEIQYTNNYNDPQFVDFAPDSTGEYRTTRPIGTRYLTRPL

SEQ ID NO: 865 - protein, 724 aa, Artificial Sequence
  source: /note="Description of Artificial Sequence: Synthetic polypeptide"
MSFVDHPPDWLEEVGEGLREFLGLEAGPPKPKPNQQHQDQARGLVLPGYNYLGPGNGLDRGEPVNRADEVAREHDISYNEQLEAGDNPYLKYNHADAEFQEKLADDTSFGGNLGKAVFQAKKRVLEPFGLVEEGAKTAPTGKRIDDHFPKRKKARTEEDSKPSTSSDAEAGPSGSQQLQIPAQPASSLGADTMSAGGGGPLGDNNQGADGVGNASGDWHCDSTWMGDRVVTKSTRTWVLPSYNNHQYREIKSGSVDGSNANAYFGYSTPWGYFDFNRFHSHWSPRDWQRLINNYWGFRPRSLRVKIFNIQVKEVTVQDSTTTIANNLTSTVQVFTDDDYQLPYVVGNGTEGCLPAFPPQVFTLPQYGYATLNRDNTENPTERSSFFCLEYFPSKMLRTGNNFEFTYNFEEVPFHSSFAPSQNLFKLANPLVDQYLYRFVSTNNTGGVQFNKNLAGRYANTYKNWFPGPMGRTQGWNLGSGVNRASVSAFATTNRMELEGASYQVPPQPNGMTNNLQGSNTYALENTMIFNSQPANPGTTATYLEGNMLITSESETQPVNRVAYNVGGQMATNNQSSTTAPATGTYNLQEIVPGSVWMERDVYLQGPIWAKIPETGAHFHPSPAMGGFGLKHPPPMMLIKNTPVPGNITSLSDVPVSSFITQYSTGQVTVEMEWELKKENSKRWNPEIQYTNNYNDPQFVDFAPDSTGEYRTTRPIGTRYLTRPL

SEQ ID NO: 866 - protein, 724 aa, Artificial Sequence
  source: /note="Description of Artificial Sequence: Synthetic polypeptide"
MSFVDHPPDWLEEVGEGLREFLGLEAGPPKPKPNQQHQDQARGLVLPGYNYLGPGNGLDRGEPANRADEVAREHDISYNEQLEAGDNPYLKYNHAGAEFQEKLADDTSFGGNLGKAVFQAKKRVLEPFGLVEEGAKTAPTGKRIDDHFPKRKKARTEEDSKPSTSSDAEAGPSGSQQLQIPAQPASSLGADTMSAGGGGPLGDNNQGADGVGNASGDWHCDSTWMGDRVVTKSTRTWVLPGYNNHQYREIKSGSVDGSNANAYFGYSTPWGYFDFNRFHSHWSPRDWQRLINNYWGFRPRSLRVKIFNIQVKEVTVQDSTTTIANNLTSTVQVFTDDDYQLPYVVGNGTEGCLPAFPPQVFTLPQYGYATLNRDNTENPTERSSFFCLEYFPSKMLRTGNNFEFTYNFEEVPFHSSFAPSQNLFKLANPLVDQYLYRFVSTNNTGGVQFNKNLAGRYANTYKNWFPGPMGRTQGWNLGSGVNRASVSAFATTNRMELEGASYQVPPQPNGMTNNLQGSNTYALENTMIFNSQPANPGTTATYLEGNMLITSESETQPVNRVAYNVGGQMATNNQSSTTAPATGTYNLQEIVPGSVWMERDVYLQGPIWAKIPETGAHFHPSPAMGGFGLKHPPPMMLIKNTPVPGNITSFSDVPVSSFITQYSTGQVTVEMEWELKKENSKRWNPEIQYTNNYNDPQFVDFAPDSTGEYRTTRPIGTRYLTRPL

SEQ ID NO: 867 - protein, 724 aa, Artificial Sequence
  source: /note="Description of Artificial Sequence: Synthetic polypeptide"
MSFVDHPPDWLEEVGEGLREFLGLEAGPPKPKPNQQHQDQARGLVLPGYNYLGPGNGLDRGEPVNRADEVAREHDISYNEQLEAGDNPYLKYNHADAEFQEKLADDTSFGGNLGKAVFQAKKRVLEPFGLVEEGAKTAPTGKRIDDHFPKRKKARTEEDSKPPTSSDAEAGPSGSQQLQIPAQPASSLGADTMSAGGGGPLGDNNQGADGVGNASGDWHCDSTWMGDRVVTKSTRTWVLPSYNNHQYREIKSGSVDGSNANAYFGYSTPWGYFDFNRFHSHWSPRDWQRLINNYWGFRPRSLRVKIFNIQVKEVTVQDSATTIANNLTSTVQVFTDDDYQLPYVVGNGTEGCLPAFPPQVFTLPQYGYATLNRDNTENPTERSSFFCLEYFPSKMLRTGNNFEFTYNFEEVPFHSSFAPSQNLFKLANPLVDQYLYRFVSTNNTGGVQFNKNLAGRYANTYKNWFPGPMGRTQGWNLGSGVNRASVSAFATTNRMELEGASYQVPPQPNGMTNNLQGSNTYALENTMIFNSQPANPGTTATYLEGNMLITSESETQPVNRVAYNVGGQMATNNQSSTTAPATGTYNLQEIVPGSVWMERDVYLQGPIWAKIPETGAHFHPSPAMGGFGLKHPPPMMLIKNTPVPGNITSFSDVPVSSFITQYSTGQVTVEMEWELKKENSKRWNPEIQYTNNYNDPQFVDFAPDSTGEYRTTRPIGTRYLTRPL

SEQ ID NO: 868 - protein, 724 aa, Artificial Sequence
  source: /note="Description of Artificial Sequence: Synthetic polypeptide"
MSFVDHPPDWLEEVGEGLREFLGLEAGPPKPKPNQQHQDQARGLVLPGYNYLGPGNGLDRGEPVNRADEVAREHDISYNEQLEAGDNPYLKYNHADAEFQEKLADDTSFGGNLGKAVFQAKKRVLEPFGLVEEGAKTAPTGKRIDDHFPKRKKARTEEDSKPSTSSDAEAGPSGSQQPQIPAQPASSLGADTMSAGGGGPLGDNNQGADGVGNASGDWHCDSTWMGDRVVTKSTRTWVLPSYNNHQYREIKSGSVDGSNANAYFGYSTPWGYFDFNRFHSHWSPRDWQRLINNYWGFRPRSLRVKIFNIQVKEVTVQDSTTTIANNLTSTVQVFTDDDYQLPYVVGNGTEGCLPAFPPQVFTLPQYGYATLNRDNTENPTERSSFFCLEYFPSKMLRTGNNFEFTYNFEEVPFHSSFAPSQNLFKLANPLVDQYLYRFVSTNNTGGVQFNKNLAGRYANTYKNWFPGPMGRTQGWNLGSGVNRASVSAFATTNRMELEGASYQVPPQPNGMTNNLQGSNTYALENTMIFNSQPANPGTTATYLEGNMLITSESETQPVNRVAYNVGGQMATNNQSSTTAPATGTYNLQEIVPGSVWMERDVYLQGPIWAKIPETGAHFHPSPAMGGFGLKHPPPMMLIKNTPAPGNITSFSDVPVSSFITQYSTGQVTVEMEWELKKENSKRWNPEIQYTNNYNDPQFVDFAPDSTGEYRTTRPIGTRYLTRPL

SEQ ID NO: 869 - protein, 724 aa, Artificial Sequence
  source: /note="Description of Artificial Sequence: Synthetic polypeptide"
MSFVDHPPDWLEEVGEGLREFLGLEAGPPKPKPNQQHQDQARGLVLPGYNYLGPGNGLDRGEPVNRADEVAREHDISYNEQLEAGDNPYLKYNHADAEFQEKLADDTSFGGNLGKAVFQAKKRVLEPFGLVEEGAKTAPTGKRIDDHFPKRKKARTEEDSKPPTSSDAEAGPSGSQQLQIPAQPASSLGADTMSAGGGGPLGDNNQGADGVGNASGDWHCDSTWMGDRVVTKSTRTWVLPSYNNHQYREIKSGSVDGSNANAYFGYSTPWGYFDFNRFHSHWSPRDWQRLINNYWGFRPRSLRVKIFNIQVKEVTVQDSTTTIANNLTSTVQVFTDDDYQLPYVVGNGTEGCLPAFPPQVFTLPQYGYATLNRDNTENPTERSSFFCLEYFPSKMLRTGNNFEFTYNFEEVPFHSSFAPSQNLFKLANPLVDQYLYRFVSTNNTGGVQFNKNLAGRYANTYKNWFPGPMGRTQGWNLGSGVNRASVSAFATTNRMELEGASYQVPPQPNGMTNNLQGSNTYALENTMIFNSQPANPGTTATYLEGNMLITSESETQPVNRVAYNVGGQMATNNQSSTTAPATGTYNLQEIVPGSVWMERDVYLQGPIWAKIPETGAHFHPSPAMGGFGLKHPPPMMLIKNTPVPGNITSFSDVPVSSFITQYSTGQVTVEMEWELKKENSKRWNPEIQYTNNYNDPQFVDFAPDSTGEYRTTRPIGTRYLTRPL

SEQ ID NO: 870 - protein, 724 aa, Artificial Sequence
  source: /note="Description of Artificial Sequence: Synthetic polypeptide"
MSFVDHPPDWLEEVGEGLREFLGLEAGPPKPKPNQQHQDQARGLVLPGYNYLGPGNGLDRGEPVNRADEVAREHDISYNEQLEAGDNPYLKYNHADAEFQEKLADDTSFGGNLGKAVFQAKKRVLEPFGLVEEGAKTAPTGKRIDDHFPKRKKARTEEDSKPPTSSDAEAGPSGSQQLQIPAQPASSLGADTMSAGGGGPLGDNNQGADGVGNASGDWHCDSTWMGDRVVTKSTRTWVPPSYNNHQYREIKSGSVDGSNANAYFGYSTPWGYFDFNRFHSHWSPRDWQRLINNYWGFRPRSLRVKIFNIQVKEVTVQDSTTTIANNLTSTVQVFTDDDYQLPYVVGNGTEGCLPAFPPQVFTLPQYGYATLNRDNTENPTERSSFFCLEYFPSKMLRTGNNFEFTYNFEEVPFHSSFAPSQNLFKLANPLVDQYLYRFVSTNNTGGVQFNKNLAGRYANTYKNWFPGPMGRTQGWNLGSGVNRASVSAFATTNRMELEGASYQVPPQPNGMTNNLQGSNTYALENTMIFNSQPANPGTTATYLEGNMLITSESETQPVNRVAYNVGGQMATNNQSSTTAPATGTYNLQEIVPGSVWMERDVYLQGPIWAKIPETGAHFHPSPAMGGFGLKHPPPMMLIKNTPVPGNITSFSDVPVSSFITQYSTGQVAVEMEWELKKENSKRWNPEIQYTNNYNDPQFVDFAPDSTGEYRTTRPIGTRYLTRPL

SEQ ID NO: 871 - protein, 724 aa, Artificial Sequence
  source: /note="Description of Artificial Sequence: Synthetic polypeptide"
MSFVDHPPDWLEEVGEGLREFLGLEAGPPKPKPNQQHQDQARGLVLPGYNYLGPGNGLDRGEPVNRADEVAREHDISYNEQLEAGDNPYLKYNHADAEFQEKLADDTSFGGNLGKAVFQAKKRVLEPFGLVEEGAKTAPTGKRIDDHFPKRKKARTEEDSKPSTSSDAEAGPSGSQQLQIPAQPASSLGADTMSAGGGGPLGDNNQGADGVGNASGDWHCDSTWMGDRVVTKSTRTWVLPSYNNHQYREIKSGSVDGSNANAYFGYSTPWGYFDFNRFHSHWSPRDWQRLINNYWGFRPRSLRVKIFNIQVKEVTVQDSTTTIANNLTSTVQVFTDDDYQLPYVVGNGTEGCLPAFPPQVFTLPQYGYATLNRDNTENPTERSSFFCLEYFPSKMLRTGNNFEFTYNFEEVPFHSSFAPSQNLFKLANPLVDQYLYRFVSTNNTGGVQFNKNLAGRYANTYKNWFPGPMGRTQGWNLGSGVNRASVSAFATTNRMELEGASYQVPPQPNGMTNNLQGSNTYALENTMIFNSQPANPGTTATYLEGNMLITSESETQPVNRVAYNVGGQMATNNQSSTTAPATGTYNLQEIVPGSVWMERDVYLQGPIWAKIPETGAHFHPSPAMGGFGLKHPPPMMLIKNTPAPGNITSFSDVPVSSFITQYSTGQVTVEMEWELKKENSKRWNPEIQYTNNYNDPQFVDFAPDSTGEYRTTRPIGTRYLTRPL

SEQ ID NO: 872 - protein, 724 aa, Artificial Sequence
  source: /note="Description of Artificial Sequence: Synthetic polypeptide"
MSFVDHPPDWLEEVGEGLREFLGLEAGPPKPKPNQQHQDQARGLVLPGYNYLGPGNGLDRGEPVNRADEVAREHDISYNEQLEAGDNPYLKYNHADAEFQEKLADDTSFGGNLGKAVFQAKKRVLEPFGLAEEGAKTAPTGKRIDDHFPKRKKARTEEDSKPSTSSDAEAGPSGSQQLQIPAQPASSLGADTMSAGGGGPLGDNNQGADGVGNASGDWHCDSTWMGDRVVTKSTRTWVLPSYNNHQYREIKSGSVDGSNANAYFGYSTPWGYFDFNRFHSHWSPRDWQRLINNYWGFRPRSLRAKIFNIQVKEVTVQDSTTTIANNLTSTVQVFTDDDYQLPYVVGNGTEGCLPAFPPQVFTLPQYGYATLNRDNTENPTERSSFFCLEYFPSKMLRTGNNLEFTYNFEEVPFHSSFAPSQNLFKLANPLVDQYLYRFVSTNNTGGVQFNKNLAGRYANTYKNWFPGPMGRTQGWNLGSGVNRASVSAFATTNRMELEGASYQVPPQPNGMTNNLQGSNTYALENTMIFNSQPANPGTTATYLEGNMLITSESETQPVNRVVHNVGGQMATNNQSSTTAPATGTYNLQEIVPGSVWMERDVYLQGPIWAKIPETGAHFHPSPAMGGFGLKHPPPMMLIKNTPVPGNITSFSDVPVSSFITQYSTGQVTVEMEWELKKENSKRWNPEIQYTNNYNDPQFVDFAPDSTGEYRTTRPIGTRYLTRPL

SEQ ID NO: 873 - protein, 724 aa, Artificial Sequence
  source: /note="Description of Artificial Sequence: Synthetic polypeptide"
MSFVDHPPDWLEEVGEGLREFLGLEAGPPKPKPNQQHQDQARGLVLPGYNYLGPGNGLDRGEPVNRADEVAREHDISYNEQLEAGDNPYLKYNHADAEFQEKLADDTSFGGNLGKAVFQAKKRVLEPFGLVEEGAKTAPTGKRIDDHFPKRKKARTEEDSKPSTSSDAEAGPSGSQQLQIPAQPASSLGADTMSAGGGGPLGDNNQGADGVGNASGDWHCDSTWMGDRVVTKSTRTWVLPSYNNHQYREIKSGSVDGGNANAYFGYSTPWGYFDFNRFHSHWSPRDWQRLINNYWGFRPRSLRVKIFNIQVKEVTVQDSTTTIANNLTSTVQVFTDDDYQLPYVVGNGTEGCLPAFPPQVFTLPQYGYATLNRDNTENPTERSSFFCLEYFPSKMLRTGNNFEFTYNFEEVPFHSSFAPSQNLFKLANPLVDQYLYRFVSTNNTGGVQFNKNLAGRYANTYKNWFPGPMGRTQGWNLGSGVNRASVSAFATTNRMELEGASYQVPPQPNGMTNNLQGSNTYALENTMIFNSQPANPGTTATYLEGNMLITSESETQPVNRVAYNVGGQMATNNQSSTTAPATGTYNLQEIVPGSVWMERDVYLQGPIWAKIPETGAHFHPSPAMGGFGLKHPPPMMLIKNTPAPGNITSFSDVPVSSFITQYSTGQVTVEMEWELKKGNSKRWNPEIQYTNNYNDPQFVDFAPDSTGEYRTTRPIGTRYLTRPL

SEQ ID NO: 874 - protein, 724 aa, Artificial Sequence
  source: /note="Description of Artificial Sequence: Synthetic polypeptide"
MSFVDHPPDWLEEVGEGLREFLGLEAGPPKPKPNQQHQDQARGLVLPGYNYLGPGNGLDRGEPVNRADEVAREHDISYNEQLEAGDNPYLKYNHADAEFQEKLADDTSFGGNLGKAVFQAKKRVLEPFGLVEEGAKTAPTGKRIDDHFPKRKKARTEEDSKPSTSSDAEAGPSGSQQLQIPAQPASSLGADTMSAGGGGPLGDNNQGADGVGNASGDWHCDSTWMGDRVVTKSTRTWVLPSYNNHQYREIKSGSVDGSNANAYFGYSTPWGYFDFNRFHSHWSPRDWQRLINNYWGFRPRSLRVKIFNIQVKEVTVQDSTTTIANNLTSTVQVFTDDDYQLPYVVGNGTEGCLPAFPPQVFTLPQYGYATLNRDNTENPTERSSFFCLEYFPSKMLRTGNNFEFTYNFEEVPFHSSFAPSQNLFKLANPLVDQYLYRFVSTNNTGGVQFNKNLAGRYANTYKNWFPGPMGRTQGWNLGSGVNRASVSAFATTNRMELEGASYQVPPQPNGMTNNLQGSNTYALENTMIFNSQPANPGTTATYLEGNMLITSESETQPVNRVAYNVGGQMATNNQSSTTAPATGTYNLQEIVPGSVWMERDVYLQGPIWAKIPETGVHFHPSPAMGGFGLKHPPPMMLIKNTPVPGNITSFSDVPVSSFITQYSTGQVTVEMEWELKKENSKRWNPEIQYTNNYNDPQFVDFAPDSTGEYRTTRPIGTRYLTRPL

SEQ ID NO: 875 - protein, 724 aa, Artificial Sequence
  source: /note="Description of Artificial Sequence: Synthetic polypeptide"
  MOD_RES (551)..(551): Any naturally occurring amino acid
MSFVDHPPDWLEEVGEGLREFLGLEAGPPKPKPNQQHQDQARGLVLPGYNYLGPGNGLDRGEPVNRADEVAREHDISYNEQLEAGDNPYLKYNHADAEFQEKLADDTSFGGNLGKAVFQAKKRVLEPFGLVEEGAKTAPTGKRIDDHFPKRKKARTEEDSKPSTSSDAEAGPSGSQQLQIPAQPASSLGADTMSAGGGGPLGDNNQGADGVGNASGDWHCDSTWMGDRVVTKSTRTWVLPSYNNHQYREIKSGSVDGSNANAYFGYSTPWGYFDFNRFHSHWSPRDWQRLINNYWGFRPRSLRVKIFNIQVKEVTVQDSTTTIANNLTSTVQVFTDDDYQLPYVVGNGTEGCLPAFPPQVFTLPQYGYATLNRDNTENPTERSSFFCLEYFPSKMLRTGNNFEFTYNFEEVPFHSSFAPSQNLFKLANPLVDQYLYRFVSTNNTGGVQFNKNLAGRYANTYKNWFPGPMGRTQGWNLGSGVNRASVSAFATTNRMELEGASYQVPPQPNGMTNNLQGSNTYALENTMIFNSQPANPGTTATYLEGSMLITXESETQPVNRVAYNVGGQMATNNQSSTTAPATGTYNLQEIVPGSVWMERDVYLQGPIWAKIPETGAHFHPSPAMGGFGLKHPPPMMLIKNTPVPGNITSFSDVPVSSFITQYSTGQVTVEMEWELKKENSKRWNPEIQYTNNYNDPQFVDFAPDSTGEYRTTRPIGTRYLTRPL

SEQ ID NO: 876 - protein, 736 aa, Artificial Sequence; identical to SEQ ID NO: 50
  source: /note="Description of Artificial Sequence: Synthetic polypeptide"

SEQ ID NO: 877 - protein, 734 aa, Artificial Sequence; identical to SEQ ID NO: 68
  source: /note="Description of Artificial Sequence: Synthetic polypeptide"

SEQ ID NO: 878 - protein, 723 aa, Artificial Sequence
  source: /note="Description of Artificial Sequence: Synthetic polypeptide"
MSFVDHPPDWLEEVGEGLREFLGLEAGPPKPKPNQQHQDQARGLVLPGYNYLGPGNGLDRGEPVNRADEVAREHDISYNEQLEAGDNPYLKYNHADAEFQEKLADDTSFGGNLGKAVFQAKKRVLEPFGLVEEGAKTAPTGKRIDDHFPKRKKARTEEDSKPSTSSDAEAGPSGSQQLQIPAQPASSLGADTMSAGGGPLGDNNQGADGVGNASGDWHCDSTWMGDRVVTKSTRTWVLPSYNNHQYREIKSGSVDGSNANAYFGYSTPWGYFDFNRFHSHWSPRDWQRLINNYWGFRPRSLRVKIFNIQVKEVTVQDSTTTIANNLTSTVQVFTDDDYQLPYVVGNGTEGCLPAFPPQVFTLPQYGYATLNRDNTENPTERSSFFCLEYFPSKMLRTGNNFEFTYNFEEVPFHSSFAPSQNLFKLANPLVDQYLYRFVSTNNTGGVQFNKNLAGRYANTYKNWFPGPMGRTQGWNLGSGVNRASVSAFATTNRMELEGASYQVPPQPNGMTNNLQGSNTYALENTMIFNSQPANPGTTATYLEGNMLITSESETQPVNRVAYNVGGQMATNNQSSTTAPATGTYNLQEIVPGSVWMERDVYLQGPIWAKIPETGAHFHPSPAMGGFGLKHPPPMMLIKNTPVPGNITSFSDVPVSSFITQYSTGQVTVEMEWELKKENSKRWNPEIQYTNNYNDPQFVDFAPDSTGEYRTTRPIGTRYLTRPL

SEQ ID NO: 879 - protein, 534 aa, Artificial Sequence
  source: /note="Description of Artificial Sequence: Synthetic polypeptide"
MAEGGGGAMGDSSGGADGVGNASGNWHCDSQWMGNTVITKTTRTWVLPSYNNHIYKAITSGTSQDANVQYAGYSTPWGYFDFNRFHCHFSPRDWQRLINNHWGIRPKSLKFKIFNVQVKEVTTQDQTKTIANNLTSTIQVFTDDEHQLPYVLGSATEGTMPPFPSDVYALPQYGYCTMHTNQNGARFNDRSAFYCLEYFPSQMLRTGNNFEFTFDFEEVPFHSMFAHSQDLDRLMNPLVDQYLWNFNEVDSSRNAQFKKAVKGAYGTMGRNWLPGPKFLDQRVRAYTGGTDNYANWNIWSNGNKVNLKDRQYLLQPGPVSATYTEGEASSLPAQNILGIAKDPYRSGSTTAGISDIMVTEEQEVAPTNGVGWKPYGRTVTNEQNTTTAPTSSDLDVLGALPGMVWQNRDIYLQGPIGAKIPKTDGKFHPSPNLGGFGLHNPPPQVFIKNTPVPADPPVEYVHQKWNSYITQYSTGQCTVEMVWELRKENSKRWNPEIQFTSNFSNRTSIMFAPNETGGYVEDRLIGTRYLTQNL

SEQ ID NO: 880 - protein, 554 aa, Artificial Sequence
  source: /note="Description of Artificial Sequence: Synthetic polypeptide"
MTSVNSAEASTGAGGGGSNPVKSMWSEGATFSANSVTCTFSRQFLIPYDPEHHYKVFSPAASSCHNASGKEAKVCTISPIMGYSTPWRYLDFNALNLFFSPLEFQHLIENYGSIAPDALTVTISEIAVKDVTDKTGGGVQVTDSTTGRLCMLVDHEYKYPYVLGQGQDTLAPELPIWVYFPPQYAYLTVGDVNTQGISGDSKKLASEESAFYVLEHSSFQLLGTGGTATMSYKFPPVPPENLEGCSQHFYEMYNPLYGSRLGVPDTLGGDPKFRSLTHEDHAIQPQNFMPGPLVNSVSTKEGDSFNTGAGKALTGLSTGTSQNTRISLRPGPVSQPYHHWDTDKYVTGINAISHGQTTYGNAEDKEYQQGVGRFPNEKEQLKQLQGLNMHTYFPNKGTQQYTDQIERPLMVGSVWNRRALHYESQLWSKIPNLDDSFKTQFAALGGWGLHQPPPQIFLKILPQSGPIGGIKSMGITTLVQYAVGIMTVTMTFKLGPRKATGRWNPQPGVYPPHAAGHLPYVLYDPTATDAKQHHRHGYEKPEELWTAKSRVHPL

SEQ ID NO: 881 - protein, 587 aa, Artificial Sequence
  source: /note="Description of Artificial Sequence: Synthetic polypeptide"
MSDGTSQPDGGNAVHSAARVERAADGPGGSGGGGSGGGGVGVSTGSYDNQTHYRFLGDGWVEITALATRLVHLNMPKSENYCRIRVHNTTDTSVKGNMAKDDAHEQIWTPWSLVDANAWGVWLQPSDWQYICNTMSQLNLVSLDQEIFNVVLKTVTEQDSGGQAIKIYNNDLTACMMVAVDSNNILPYTPAANSMETLGFYPWKPTIASPYRYYFCVDRDLSVTYENQEGTIEHNVMGTPKGMNSQFFTIENTQQITLLRTGDEFATGTYYFDTNPVKLTHTWQTNRQLGQPPLLSTFPEADTDAGTLTAQGSRHGATQMEVNWVSEAIRTRPAQVGFCQPHNDFEASRAGPFAAPKVPADVTQGMDREANGSVRYSYGKQHGENWAAHGPAPERYTWDETNFGSGRDTRDGFIQSAPLVVPPPLNGILTNANPIGTKNDIHFSNVFNSYGPLTTFSHPSPVYPQGQIWDKELDLEHKPRLHITAPFVCKNNAPGQMLVRLGPNLTDQYDPNGATLSRIVTYGTFFWKGKLTMRAKLRANTTWNPVYQVSVEDNGNSYMSVTKWLPTATGNMQSVPLITRPVARNTY

SEQ ID NO: 882 - protein, 584 aa, Artificial Sequence
  source: /note="Description of Artificial Sequence: Synthetic polypeptide"
MSDGAVQPDGGQPAVRNERATGSGNGSGGGGGGGSGGVGISTGTFNNQTEFKFLENGWVEITANSSRLVHLNMPESENYKRVVVNNMDKTAVKGNMALDDIHVEIVTPWSLVDANAWGVWFNPGDWQLIVNTMSELHLVSFEQEIFNVVLKTVSESATQPPTKVYNNDLTASLMVALDSNNTMPFTPAAMRSETLGFYPWKPTIPTPWRYYFQWDRTLIPSHTGTSGTPTNVYHGTDPDDVQFYTIENSVPVHLLRTGDEFATGTFFFDCKPCRLTHTWQTNRALGLPPFLNSLPQSEGATNFGDIGVQQDKRRGVTQMGNTDYITEATIMRPAEVGYSAPYYSFEASTQGPFKTPIAAGRGGAQTDENQAADGDPRYAFGRQHGQKTTTTGETPERFTYIAHQDTGRYPEGDWIQNINFNLPVTNDNVLLPTDPIGGKTGINYTNIFNTYGPLTALNNVPPVYPNGQIWDKEFDTDLKPRLHINAPFVCQNNCPGQLFVKVAPNLTNQYDPDASANMSRIVTYSDFWWKGKLVFKAKLRASHTWNPIQQMSINVDNQFNYVPNNIGAMKIVYEKSQLAPRKLY

SEQ ID NO: 883 - protein, 548 aa, Artificial Sequence
  source: /note="Description of Artificial Sequence: Synthetic polypeptide"
GVGISTGTFNNQTEFKFLENGWVEITANSSRLVHLNMPESENYRRVVVNNMDKTAVNGNMALDDIHAQIVTPWSLVDANAWGVWFNPGDWQLIVNTMSELHLVSFEQEIFNVVLKTVSESATQPPTKVYNNDLTASLMVALDSNNTMPFTPAAMRSETLGFYPWKPTIPTPWRYYFQWDRTLIPSHTGTSGTPTNIYHGTDPDDVQFYTIENSVPVHLLRTGDEFATGTFFFDCKPCRLTHTWQTNRALGLPPFLNSLPQSEGATNFGDIGVQQDKRRGVTQMGNTNYITEATIMRPAEVGYSAPYYSFEASTQGPFKTPIAAGRGGAQTDENQAADGNPRYAFGRQHGQKTTTTGETPERFTYIAHQDTGRYPEGDWIQNINFNLPVTNDNVLLPTDPIGGKTGINYTNIFNTYGPLTALNNVPPVYPNGQIWDKEFDTDLKPRLHVNAPFVCQNNCPGQLFVKVAPNLTNEYDPDASANMSRIVTYSDFWWKGKLVFKAKLRASHTWNPIQQMSINVDNQFNYVPSNIGGMKIVYEKSQLAPRKLY

SEQ ID NO: 884 - protein, 736 aa, Artificial Sequence; identical to SEQ ID NO: 112
  source: /note="Description of Artificial Sequence: Synthetic polypeptide"

SEQ ID NO: 885 - protein, 736 aa, Artificial Sequence; identical to SEQ ID NO: 107
  source: /note="Description of Artificial Sequence: Synthetic polypeptide"

SEQ ID NO: 886 - protein, 736 aa, Artificial Sequence
  source: /note="Description of Artificial Sequence: Synthetic polypeptide"
MAADGYLPDWLEDTLSEGIRQWWKLKPGPPPPKPAERHKDDSRGLVLPGYKYLGPFNGLDKGEPVNEADAAALEHDKAYDRQLDSGDNPYLKYNHADAEFQERLKEDTSFGGNLGRAVFQAKKRVLEPLGLVEEPVKTAPGKKRPVEHSPVEEPDSSSGTGKAGQQPARKRLNFGQTGDADSVPDPQPLGQPPAAPSGLGTNTMATGSGAPMADNNEGADGVGNSSGNWHCDSTWMGDRVITTSTRTWALPTYNNHLYKQISSQSGASNDNHYFGYSTPWGYFDFNRFHCHFSPRDWQRLINNNWGFRPKRLNFKLFNIQVKEVTQNDGTTTIANNLTSTVQVFTDSEYQLPYVLGSAHQGCLPPFPADVFMVPQYGYLTLNNGSQAVGRSSFYCLEYFPSQMLRTGNNFTFSYTFEDVPFHSSYAHSQSLDRLMNPLIDQYLYYLSRTNTPSGTTTQSRLQFSQAGASDIRDQSRNWLPGPCYRQQRVSKTSADNNNSEYSWTGATKYHLNGRDSLVNPGPAMASHKDDEEKFFPQSGVLIFGKQGSEKTNVDIEKVMITDEEEIRTTNPVATEQYGSVSTNLQRGNRQAATADVNTQGVLPGMVWQDRDVYLQGPIWAKIPHTDGHFHPSPLMGGFGLKHPPPQILIKNTPVPANPSTTFSAAKFASFITQYSTGQVSVEIEWELQKENSKRWNPEIQYTSNYNKSVNVDFTVDTNGVYSEPRPIGTRYLTRNL

SEQ ID NO: 887 - protein, 736 aa, Artificial Sequence
  source: /note="Description of Artificial Sequence: Synthetic polypeptide"
MAADGYLPDWLEDNLSEGIREWWDLKPGAPKPKANQQKQDDGRGLVLPGYKYLGPFNGLDKGEPVNAADAAALEHDKAYDQQLKAGDNPYLRYNHADAEFQERLQEDTSFGGNLGRAVFQAKKRVLEPFGLVEEGAKTAPGKKRPVEQSPQEPDSSSGIGKTGQQPAKKRLNFGQTGDSESVPDPQPLGEPPATPAAVGPTTMASGGGAPMADNNEGADGVGNASGNWHCDSTWLGDRVITTSTRTWALPTYNNHLYKQISSASTGASNDNHYFGYSTPWGYFDFNRFHCHFSPRDWQRLINNNWGFRPKRLNFKLFNVQVKEVTTNDGVTTIANNLTSTVQVFSDSEYQLPYVLGSAHQGCLPPFPADVFMIPQYGYLTLNNGSQAVGRSSFYCLEYFPSQMLRTGNNFTFSYTFEDVPFHSSYAHSQSLDRLMNPLIDQYLYYLNRTQDQSGSAQNKDLLFSRGSPAGMSVQPKNWLPGPCYRQQRVSKTKTDNNNSNFTWTGASKYNLNGRESIINPGTAMASHKDDKNKFFPMSGVMIFGKESAGASNTALDNVMITDEEEIKATNPVATERFGTVAVNLQSSSTDPATGDVHVMGALPGMVWQDRDVYLQGPIWAKIPHTDGHFHPSPLMGGFGLKNPPPQILIKNTPVPANPPAEFSATKFASFITQYSTGQVSVEIEWELQKENSKRWNPEVQYTSNYAKSANVDFTVDNNGLYTEPRPIGTRYLTRPL

SEQ ID NO: 888 - protein, 737 aa, Artificial Sequence
  source: /note="Description of Artificial Sequence: Synthetic polypeptide"
MAADGYLPDWLEDTLSEGIRQWWKLKPGPPPPKPAERHKDDSRGLVLPGYKYLGPGNGLDKGEPVNAADAAALEHDKAYDQQLKAGDNPYLKYNHADAEFQERLKEDTSFGGNLGRAVFQAKKRVLEPLGLVEEGAKTAPGKKRPVEPSPQRSPDSSTGIGKKGQQPARKRLNFGQTGDSESVPDPQPLGEPPATPAAVGPTTMASGGGAPMADNNEGADGVGNASGNWHCDSTWLGDRVITTSTRTWALPTYNNHLYKQISSASTGASNDNHYFGYSTPWGYFDFNRFHCHFSPRDWQRLINNNWGFRPKRLNFKLFNIQVKEVTTNDGVTTIANNLTSTVQVFSDSEYQLPYVLGSAHQGCLPPFPADVFMIPQYGYLTLNNGSQAVGRSSFYCLEYFPSQMLRTGNNFTFSYTFEDVPFHSSYAHSQSLDRLMNPLIDQYLYYLNRTQNQSGSAQNKDLLFSRGSPAGMSVQPKNWLPGPCYRQQRVSKTKTDNNNSNFTWTGASKYNLNGRESIINPGTAMASHKDDKDKFFPMSGVMIFGKESAGASNTALDNVMITDEEEIKATNPVATERFGTVAVNLQSSSTDPATEDVHVMGALPGMVWQDRDVYLQGPIWAKIPHTDGHFHPSPLMGGFGLKNPPPQILIKNTPVPANPPAEFSATKFASFITQYSTGQVSVEIEWELQKENSKRWNPEVQYTSNYAKSANVDFTVDNNGLYTEPRPIGTRYLTRNL

SEQ ID NO: 889 - protein, 736 aa, Artificial Sequence
  source: /note="Description of Artificial Sequence: Synthetic polypeptide"
MAADGYLPDWLEDNLSEGIREWWDLKPGAPKPKANQQKQDDGRGLVLPGYKYLGPFNGLDKGEPVNAADAAALEHDKAYDQQLKAGDNPYLRYNHADAEFQERLQEDTSFGGNLGRAVFQAKKRVLEPFGLVEEGAKTAPGKKRPVEQSPQEPDSSSGIGKTGQQPAKKRLNFGQTGDSESVPDPQPLGEPPATPAAVGPTTMASGGGAPMADNNEGADGVGNASGNWHCDSTWLGDRVITTSTRTWALPTYNNHLYKQISSASTGASNDNHYFGYSTPWGYFDFNRFHCHFSPRDWQRLINNNWGFRPKRLNFKLFNVQVKEVTTNDGVTTIANNLTSTVQVFSDSEYQLPYVLGSAHQGCLPPFPADVFMIPQYGYLTLNNGSQAVGRSSFYCLEYFPSQMLRTGNNFTFSYTFEDVPFHSSYAHSQSLDRLMNPLIDQYLYYLNRTQDQSGSAQNKDLLFSRGSPAGMSVQPKNWLPGPCYRQQRVSKTKTDNNNSNFTWTGASKYNLNGRESIINPGTAMASHKDDKNKFFPMSGVMIFGKESAGASNTALDNVMITDEEEIKATNPVATERFGTVAVNLQSSSTDPATGDVHVMGALPGMVWQDRDVYLQGPIWAKIPHTDGHFHPSPLMGGFGLKHPPPQILIKNTPVPANPPAEFSATKFASFITQYSTGQVSVEIEWELQKENSKRWNPEVQYTSNYAKSANVDFTVDNNGLYTEPRPIGTRYLTRPL

SEQ ID NO: 890 - protein, 736 aa, Artificial Sequence
  source: /note="Description of Artificial Sequence: Synthetic polypeptide"
MAADGYLPDWLEDNLSEGIREWWDLKPGAPKPKANQQKQDDGRGLVLPGYKYLGPFNGLDKGEPVNAADAAALEHDKAYDQQLKAGDNPYLRYNHADAEFQERLQEDTSFGGNLGRAVFQAKKRVLEPFGLVEEGAKTAPGKKRPVEQSPQEPDSSSGIGKTGQQPAKKRLNFGQTGDSESVPDPQPLGEPPATPAAVGPTTMASGGGAPMADNNEGADGVGNASGNWHCDSTWLGDRVITTSTRTWALPTYNNHLYKQISSASTGASNDNHYFGYSTPWGYFDFNRFHCHFSPRDWQRLINNNWGFRPKRLNFKLFNVQVKEVTTNDGVTTIANNLTSTVQVFSDSEYQLPYVLGSAHQGCLPPFPADVFMIPQYGYLTLNNGSQAVGRSSFYCLEYFPSQMLRTGNNFTFSYTFEDVPFHSSYAHSQSLDRLMNPLIDQYLYYLNRTQDQSGSAQNKDLLFSRGSPAGMSVQPKNWLPGPCYRQQRVSKTKTDNNNSNFTWTGASKYNLNGRESIINPGTAMASHKDDKDKFFPMSGVMIFGKESAGASNTALDNVMITDEEEIKATNPVATERFGTVAVNLQSSSTDPATGDVHVMGALPGMVWQDRDVYLQGPIWAKIPHTDGHFHPSPLMGGFGLKHPPPQILIKNTPVPANPPAEFSATKFASFITQYSTGQVSVEIEWELQKENSKRWNPEVQYTSNYAKSANVDFTVDNNGLYTEPRPIGTRYLTRPL

SEQ ID NO: 891 - protein, 736 aa, Artificial Sequence
  source: /note="Description of Artificial Sequence: Synthetic polypeptide"
MAADGYLPDWLEDNLSEGIREWWDLKPGAPKPKANQQKQDDGRGLVLPGYKYLGPFNGLDKGEPVNAADAAALEHDKAYDQQLKAGDNPYLRYNHADAEFQERLQEDTSFGGNLGRAVFQAKKRVLEPFGLVEEGAKTAPGKKRPVEQSPQEPDSSSGIGKTGQQPAKKRLNFGQTGDSESVPDPQPLGEPPATPAAVGPTTMASGGGAPMADNNEGADGVGNASGNWHCDSTWLGDRVITTSTRTWALPTYNNHLYKQISSASTGASNDNHYFGYSTPWGYFDFNRFHCHFSPRDWQRLINNNWGFRPKRLNFKLFNIQVKEVTTNDGVTTIANNLTSTVQVFSDSEYQLPYVLGSAHQGCLPPFPADVFMIPQYGYLTLNNGSQAVGRSSFYCLEYFPSQMLRTGNNFTFSYTFEDVPFHSSYAHSQSLDRLMNPLIDQYLYYLNRTQDQSGSAQNKDLLFSRGSPAGMSVQPKNWLPGPCYRQQRVSKTKTDNNNSNFTWTGASKYNLNGRESIINPGTAMASHKDDKNKFFPMSGVMIFGKESAGASNTALDNVMITDEEEIKATNPVATERFGTVAVNLQSSSTDPATGDVHVMGALPGMVWQDRDVYLQGPIWAKIPHTDGHFHPSPLMGGFGLKHPPPQILIKNTPVPANPPAEFSATKFASFITQYSTGQVSVEIEWELQKENSKRWNPEVQYTSNYAKSANVDFTVDNNGLYTEPRPIGTRYLTRPL

SEQ ID NO: 892 - protein, 736 aa, Artificial Sequence
  source: /note="Description of Artificial Sequence: Synthetic polypeptide"
MAADGYLPDWLEDNLSEGIREWWDLKPGAPKPKANQQKQDDGRGLVLPGYKYLGPFNGLDKGEPVNAADAAALEHDKAYDQQLKAGDNPYLRYNHADAEFQERLQEDTSFGGNLGRAVFQAKKRVLEPFGLVEEGAKTAPGKKRPVEQSPQEPDSSSGIGKTGQQPAKKRLNFGQTGDSESVPDPQPLGEPPATPAAVGPTTMASGGGAPMADNNEGADGVGNASGNWHCDSTWLGDRVITTSTRTWALPTYNNHLYKQISSASTGASNDNHYFGYSTPWGYFDFNRFHCHFSPRDWQRLINNNWGFRPKRLNFKLFNVQVKEVTTNDGVTTIANNLTSTVQVFSDSEYQLPYVLGSAHQGCLPPFPADVFMIPQYGYLTLNNGSQAVGRSSFYCLEYFPSQMLRTGNNFTFSYTFEDVPFHSSYAHSQSLDRLMNPLIDQYLYYLNRTQNQSGSAQNKDLLFSRGSPAGMSVQPKNWLPGPCYRQQRVSKTKTDNNNSNFTWTGASKYNLNGRESIINPGTAMASHKDDKDKFFPMSGVMIFGKESAGASNTALDNVMITDEEEIKATNPVATERFGTVAVNLQSSSTDPATGDVHVMGALPGMVWQDRDVYLQGPIWAKIPHTDGHFHPSPLMGGFGLKHPPPQILIKNTPVPANPPAEFSATKFASFITQYSTGQVSVEIEWELQKENSKRWNPEVQYTSNYAKSANVDFTVDNNGLYTEPRPIGTRYLTRPL

SEQ ID NO: 893 - protein, 736 aa, Artificial Sequence
  source: /note="Description of Artificial Sequence: Synthetic polypeptide"
MAADGYLPDWLEDNLSEGIREWWDLKPGAPKPKANQQKQDDGRGLVLPGYKYLGPFNGLDKGEPVNAADAAALEHDKAYDQQLKAGDNPYLRYNHADAEFQERLQEDTSFGGNLGRAVFQAKKRVLEPFGLVEEGAKTAPGKKRPVEQSPQEPDSSSGIGKTGQQPAKKRLNFGQTGDSESVPDPQPLGEPPATPAAVGPTTMASGGGAPMADNNEGADGVGNASGNWHCDSTWLGDRVITTSTRTWALPTYNNHLYKQISSASTGASNDNHYFGYSTPWGYFDFNRFHCHFSPRDWQRLINNNWGFRPKRLNFKLFNVQVKEVTTNDGVTTIANNLTSTVQVFSDSEYQLPYVLGSAHQGCLPPFPADVFMIPQYGYLTLNNGSQAVGRSSFYCLEYFPSQMLRTGNNFTFSYTFEDVPFHSSYAHSQSLDRLMNPLIDQYLYYLNRTQNQSGSAQNKDLLFSRGSPAGMSVQPKNWLPGPCYRQQRVSKTKTDNNNSNFTWTGASKYNLNGRESIINPGTAMASHKDDKNKFFPMSGVMIFGKESAGASNTALDNVMITDEEEIKATNPVATERFGTVAVNLQSSSTDPATGDVHVMGALPGMVWQDRDVYLQGPIWAKIPHTDGHFHPSPLMGGFGLKHPPPQILIKNTPVPANPPAEFSATKFASFITQYSTGQVSVEIEWELQKENSKRWNPEVQYTSNYAKSANVDFTVDNNGLYTEPRPIGTRYLTRPL

SEQ ID NO: 894 - DNA, 2217 bp, Artificial Sequence
  source: /note="Description of Artificial Sequence: Synthetic polynucleotide"
atggctgccgatggttatcttccagattggctcgaggacaacctctctgagggcattcgcgagtggtgggacctgaaacctggagccccgaaacccaaagccaaccagcaaaagcaggacaacggccggggtctggtgcttcctggctacaagtacctcggacccttcaacggactcgacaagggggagcccgtcaacgcggcggacgcagcggccctcgagcacgacaaggcctacgaccagcagctccaagcgggtgacaatccgtacctgcggtataatcacgccgacgccgagtttcaggagcgtctgcaagaagatacgtcttttgggggcaacctcgggcgcgcagtcttccaggccaaaaagcgggttctcgaacctctgggcctggttgaatcgccggttaagacggctcctggaaagaagagaccggtagagccatcaccccagcgctctccagactcctctacgggcatcggcaagaaaggccagcagcccgcaaaaaagagactcaattttgggcagactggcgactcagagtcagtccccgaccctcaaccaatcggagaaccaccagcaggcccctctggtctgggatctggtacaatggctgcaggcggtggcgctccaatggcagacaataacgaaggcgccgacggagtgggtagttcctcaggaaattggcattgcgattccacatggctgggcgacagagtcatcaccaccagcacccgcacctgggccctgcccacctacaacaaccacctctacaagcaaatctccaacgggacctcgggaggaagcaccaacgacaacacctacttcggctacagcaccccctgggggtattttgacttcaacagattccactgccacttttcaccacgtgactggcagcgactcatcaacaacaactggggattccggcccaagaggctcaacttcaagctcttcaacatccaagtcaaggaggtcacgcagaatgaaggcaccaagaccatcgccaataaccttaccagcacgattcaggtctttacggactcggaataccagctcccgtacgtgctcggctcggcgcaccagggctgcctgcctccgttcccggcggacgtcttcatgattcctcagtacgggtacctgactctgaacaatggcagtcaggctgtgggccggtcgtccttctactgcctggagtactttccttctcaaatgctgagaacgggcaacaactttgaattcagctacaacttcgaggacgtgcccttccacagcagctacgcgcacagccagagcctggaccggctgatgaaccctctcatcgaccagtacttgtactacctgtcccggactcaaagcacgggcggtactgcaggaactcagcagttgctattttctcaggccgggcctaacaacatgtcggctcaggccaagaactggctacccggtccctgctaccggcagcaacgcgtctccacgacactgtcgcagaacaacaacagcaactttgcctggacgggtgccaccaagtatcatctgaatggcagagactctctggtgaatcctggcgttgccatggctacccacaaggacgacgaagagcgattttttccatccagcggagtcttaatgtttgggaaacagggagctggaaaagacaacgtggactatagcagcgtgatgctaaccagcgaggaagaaataaagaccaccaacccagtggccacagaacagtacggcgtggtggccgataacctgcaacagcaaaacgccgctcctattgtaggggccgtcaatagtcaaggagccttacctggcatggtgtggcagaaccgggacgtgtacctgcagggtcccatctgggccaagattcctcatacggacggcaactttcatccctcgccgctgatgggaggctttggactgaagcatccgcctcctcagatcctgattaaaaacacacctgttcccgcggatcctccgaccaccttcaatcaggccaagctggcttctttcatcacgcagtacagtaccggccaggtcagcgtggagatcgagtgggagctgcagaaggagaacagcaaacgctggaacccagagattcagtacacttccaactactacaaatctacaaatgtggactttgctgtcaatactgagggtacttattccgagcctcgccccattggcacccgttacctcacccgtaatctgtaa

SEQ ID NO: 895 - protein, 738 aa, Artificial Sequence
  source: /note="Description of Artificial Sequence: Synthetic polypeptide"
MAADGYLPDWLEDNLSEGIREWWDLKPGAPKPKANQQKQDNGRGLVLPGYKYLGPFNGLDKGEPVNAADAAALEHDKAYDQQLQAGDNPYLRYNHADAEFQERLQEDTSFGGNLGRAVFQAKKRVLEPLGLVESPVKTAPGKKRPVEPSPQRSPDSSTGIGKKGQQPAKKRLNFGQTGDSESVPDPQPIGEPPAGPSGLGSGTMAAGGGAPMADNNEGADGVGSSSGNWHCDSTWLGDRVITTSTRTWALPTYNNHLYKQISNGTSGGSTNDNTYFGYSTPWGYFDFNRFHCHFSPRDWQRLINNNWGFRPKRLNFKLFNIQVKEVTQNEGTKTIANNLTSTIQVFTDSEYQLPYVLGSAHQGCLPPFPADVFMIPQYGYLTLNNGSQAVGRSSFYCLEYFPSQMLRTGNNFEFSYNFEDVPFHSSYAHSQSLDRLMNPLIDQYLYYLSRTQSTGGTAGTQQLLFSQAGPNNMSAQAKNWLPGPCYRQQRVSTTLSQNNNSNFAWTGATKYHLNGRDSLVNPGVAMATHKDDEERFFPSSGVLMFGKQGAGKDNVDYSSVMLTSEEEIKTTNPVATEQYGVVADNLQQQNAAPIVGAVNSQGALPGMVWQNRDVYLQGPIWAKIPHTDGNFHPSPLMGGFGLKHPPPQILIKNTPVPADPPTTFNQAKLASFITQYSTGQVSVEIEWELQKENSKRWNPEIQYTSNYYKSTNVDFAVNTEGTYSEPRPIGTRYLTRNL

SEQ ID NO: 896 - protein, 738 aa, Artificial Sequence; identical to SEQ ID NO: 895
  source: /note="Description of Artificial Sequence: Synthetic polypeptide"

SEQ ID NO: 897 - DNA, 4472 bp, Artificial Sequence
  source: /note="Description of Artificial Sequence: Synthetic polynucleotide"
ctccatcactaggggtaaccgcgaagcgcctcccacgctgccgcgtcagcgctgacgtaaattacgtcataggggagtggtcctgtattagctgtcacgtgagtgcttttgcgacattttgcgacaccacgtggccattcatggtatatatggccgagtgagcgagcaggatctccattttgaccgcgaaatttgaacgagcagcagccatgccgggcttctacgagatcgtgcttaaggtgccgagcgacctggacgagcacctgccgggcatttctgactcgtttgtgaactgggtggcagagaaggaatgggagctgcccccggattctgacatggatcggaatctgattgagcaggcacccctgaccgtggccgagaagctacagcgcgacttcctggtccaatggcgccgcgtgagtaaggccccggaggccctcttctttgttcagttcgagaagggcgagtcctacttccacctccatattctggtagagaccacgggggtcaaatccatggtgctgggccgcttcctgagtcagattcgggacaagctggtgcagaccatctaccgcgggatcgagccgaccctgcccaactggttcgcggtgacaaagacgcgtaatggcgccggaggggggaacaaggtggtggacgagtgctacatccccaactacctgctgcccaagactcagcccgagctgcagtgggcgtggactaacatggaggagtatataagcgcgtgcttgaacctggccgagcgcaaacggctcgtggcgcagcacctgacccacgtcagccagacccaggagcagaacaaggagaatctgaacccgaattctgacgcgcctgtcatccggtcaaaaacctccgcgcgctacatggagctggtcgggtggctggtggaccggggcatcacctccgagaagcagtggatccaggaggaccaggcctcgtacatctccttcaacgccgcctccaactcgcggtctcagatcaaggccgcgctggacaatgccggcaagatcatggcgctgaccaaatccgcgcccgactacctggtaggccccgctctgcccgcggacattaaatccaaccgcatctaccgcatcctggagctgaatggctacgaccctgcctacgccggttccgtctttctcggctgggcccagaaaaagtttggcaaaaggaacaccatctggctgtttgggccggccaccacgggcaagaccaacatcgcggaagccatcgcccacgccgtgcccttctacggctgcgtcaactggaccaatgagaactttcccttcaacgattgcgtcgacaagatggtgatctggtgggaggagggcaagatgacggccaaggtcgtggagtccgccaaggccattctcggcggcagcaaggtgcgcgtggaccaaaagtgcaagtcgtccgcccagatcgatcccacccccgtgatcgtcacctccaacaccaacatgtgcgccgtgattgacgggaacagcaccaccttcgagcaccagcagccgttgcaggaccggatgttcaaatttgaacttacccgccgtctggagcacgactttggcaaggtgacaaagcaggaagtcaaagagttcttccgctgggcgcaggatcacgtgaccgaggtggcgcatgagttctacgtcagaaagggtggagctaacaaaagacccgcccccgatgacgcggatataagcgagcccaagcgggcctgcccctcagtcgcggatccatcgacgtcagacgcggaaggagctccggtggactttgccgacaggtaccaaaacaaatgttctcgtcacgcgggcatgcttcagatgctgtttccctgcaaaacatgcgagagaatgaatcagaatttcaacatttgcttcacgcacgggaccagagactgttcagaatgtttccctggcgtgtcagaatctcaaccggtcgtcagaaaaaagacgtatcggaaactctgtgcgattcatcatctgctggggcgggcacccgagattgcttgctcggcctgcgacctggtcaacgtggacctggatgactgtgtttctgagcaataaatgacttaaaccaggtatggctgccgatggttatcttccagattggctcgaggacaacctctctgagggcattcgcgagtggtgggacctgaaacctggagccccgaaacccaaagccaaccagcaaaagcaggacaacggccggggtctggtgcttcctggctacaagtacctcggacccttcaacggactcgacaagggggagcccgtcaacgcggcggacgcagcggccctcgagcacgacaaggcctacgaccagcagctccaagcgggtgacaatccgtacctgcggtataatcacgccgacgccgagtttcaggagcgtctgcaagaagatacgtcttttgggggcaacctcgggcgcgcagtcttccaggccaaaaagcgggttctcgaacctctgggcctggttgaatcgccggttaagacggctcctggaaagaagagaccggtagagccatcaccccagcgctctccagactcctctacgggcatcggcaagaaaggccagcagcccgcaaaaaagagactcaattttgggcagactggcgactcagagtcagtccccgaccctcaaccaatcggagaaccaccagcaggcccctctggtctgggatctggtacaatggctgcaggcggtggcgctccaatggcagacaataacgaaggcgccgacggagtgggtagttcctcaggaaattggcattgcgattccacatggctgggcgacagagtcatcaccaccagcacccgcacctgggccctgcccacctacaacaaccacctctacaagcaaatctccaacgggacctcgggaggaagcaccaacgacaacacctacttcggctacagcaccccctgggggtattttgacttcaacagattccactgccacttttcaccacgtgactggcagcgactcatcaacaacaactggggattccggcccaagaggctcaacttcaagctcttcaacatccaagtcaaggaggtcacgcagaatgaaggcaccaagaccatcgccaataaccttaccagcacgattcaggtctttacggactcggaataccagctcccgtacgtgctcggctcggcgcaccagggctgcctgcctccgttcccggcggacgtcttcatgattcctcagtacgggtacctgactctgaacaatggcagtcaggctgtgggccggtcgtccttctactgcctggagtactttccttctcaaatgctgagaacgggcaacaactttgaattcagctacaacttcgaggacgtgcccttccacagcagctacgcgcacagccagagcctggaccggctgatgaaccctctcatcgaccagtacttgtactacctgtcccggactcaaagcacgggcggtactgcaggaactcagcagttgctattttctcaggccgggcctaacaacatgtcggctcaggccaagaactggctacccggtccctgctaccggcagcaacgcgtctccacgacactgtcgcagaacaacaacagcaactttgcctggacgggtgccaccaagtatcatctgaatggcagagactctctggtgaatcctggcgttgccatggctacccacaaggacgacgaagagcgattttttccatccagcggagtcttaatgtttgggaaacagggagctggaaaagacaacgtggactatagcagcgtgatgctaaccagcgaggaagaaataaagaccaccaacccagtggccacagaacagtacggcgtggtggccgataacctgcaacagcaaaacgccgctcctattgtaggggccgtcaatagtcaaggagccttacctggcatggtgtggcagaaccgggacgtgtacctgcagggtcccatctgggccaagattcctcatacggacggcaactttcatccctcgccgctgatgggaggctttggactgaagcatccgcctcctcagatcctgattaaaaacacacctgttcccgcggatcctccgaccaccttcaatcaggccaagctggcttctttcatcacgcagtacagtaccggccaggtcagcgtggagatcgagtgggagctgcagaaggagaacagcaaacgctggaacccagagattcagtacacttccaactactacaaatctacaaatgtggactttgctgtcaatactgagggtacttattccgagcctcgccccattggcacccgttacctcacccgtaatctgtaattacatgttaatcaataaaccggttaattcgtttcagttgaactttggtctcctgtccttcttatcttatcggttaccatagaaactggttacttattaactgcttggtgcgcttcgcgataaaagacttacgtcatcgggttacccctagtgatgga

SEQ ID NO: 898 - protein, 738 aa, Artificial Sequence
  source: /note="Description of Artificial Sequence: Synthetic polypeptide"
MAADGYLPDWLEDNLSEGIREWWDLKPGAPKPKANQQKQDNGRGLVLPGYKYLGPFNGLDKGEPVNAADAAALEHDKAYDQQLQAGDNPYLRYNHADAEFQERLQEDTSFGGNLGRAVFQAKKRVLEPLGLVESPVKTAPGKKRPVEPSPQRSPDSSTGIGKKGQQPAKKRLNFGQTGDSESVPDPQPIGEPPAAPSGVGPNTMAAGGGAPMADNNEGADGVGSSSGNWHCDSTWLGDRVITTSTRTWALPTYNNHLYKQISNGTSGGSTNDNTYFGYSTPWGYFDFNRFHCHFSPRDWQRLINNNWGFRPKRLNFKLFNIQVKEVTQNEGTKTIANNLTSTIQVFTDSEYQLPYVLGSAHQGCLPPFPADVFMIPQYGYLTLNNGSQAVGRSSFYCLEYFPSQMLRTGNNFEFSYNFEDVPFHSSYAHSQSLDRLMNPLIDQYLYYLSRTQSTGGTAGTQQLLFSQAGPNNMSAQAKNWLPGPCYRQQRVSTTLSQNNNSNFAWTGATKYHLNGRDSLVNPGVAMATHKDDEERFFPSSGVLMFGKQGAGKDNVDYSSVMLTSEEEIKTTNPVATEQYGVVADNLQQQNAAPIVGAVNSQGALPGMVWQNRDVYLQGPIWAKIPHTDGNFHPSPLMGGFGLKHPPPQILIKNTPVPADPPTTFNQAKLASFITQYSTGQVSVEIEWELQKENSKRWNPEIQYTSNYYKSTNVDFAVNTEGTYSEPRPIGTRYLTRNL

SEQ ID NO: 899 - protein, 738 aa, Artificial Sequence
  source: /note="Description of Artificial Sequence: Synthetic polypeptide"
MAADGYLPDWLEDNLSEGIREWWDLKPGAPKPKANQQRQDNGRGLVLPGYRYLGPFNGLDKGEPVNAADAAALEHDRAYDQQLQAGDNPYLRYNHADAEFQERLQEDTSFGGNLGRAVFQAKKRVLEPLGLVESPVRTAPGKKRPVEPSPQRSPDSSTGIGKKGQQPARKRLNFGQTGDSESVPDPQPIGEPPAAPSGVGPNTMAAGGGAPMADNNEGADGVGSSSGNWHCDSTWLGDRVITTSTRTWALPTYNNHLYRQISNGTSGGSTNDNTYFGYSTPWGYFDFNRFHCHFSPRDWQRLINNNWGFRPKRLNFKLFNIQVKEVTQNEGTRTIANNLTSTIQVFTDSEYQLPYVLGSAHQGCLPPFPADVFMIPQYGYLTLNNGSQAVGRSSFYCLEYFPSQMLRTGNNFEFSYNFEDVPFHSSYAHSQSLDRLMNPLIDQYLYYLSRTQSTGGTAGTQQLLFSQAGPNNMSAQAKNWLPGPCYRQQRVSTTLSQNNNSNFAWTGATKYHLNGRDSLVNPGVAMATHRDDEERFFPSSGVLMFGRQGAGRDNVDYSSVMLTSEEEIRTTNPVATEQYGVVADNLQQQNAAPIVGAVNSQGALPGMVWQNRDVYLQGPIWAKIPHTDGNFHPSPLMGGFGLKHPPPQILIKNTPVPADPPTTFNQAKLASFITQYSTGQVSVEIEWELQKENSKRWNPEIQYTSNYYKSTNVDFAVNTEGTYSEPRPIGTRYLTRNL

SEQ ID NO: 900 - protein, 738 aa, Artificial Sequence
  source: /note="Description of Artificial Sequence: Synthetic polypeptide"
MAADGYLPDWLEDNLSEGIREWWDLKPGAPKPKANQQRQDNGRGLVLPGYRYLGPFNGLDKGEPVNAADAAALEHDRAYDQQLQAGDNPYLRYNHADAEFQERLQEDTSFGGNLGRAVFQAKKRVLEPLGLVESPVRTAPGKKRPVEPSPQRSPDSSTGIGKRGQQPARKRLNFGQTGDSESVPDPQPIGEPPAAPSGVGPNTMAAGGGAPMADNNEGADGVGSSSGNWHCDSTWLGDRVITTSTRTWALPTYNNHLYRQISNGTSGGSTNDNTYFGYSTPWGYFDFNRFHCHFSPRDWQRLINNNWGFRPKRLNFKLFNIQVKEVTQNEGTRTIANNLTSTIQVFTDSEYQLPYVLGSAHQGCLPPFPADVFMIPQYGYLTLNNGSQAVGRSSFYCLEYFPSQMLRTGNNFEFSYNFEDVPFHSSYAHSQSLDRLMNPLIDQYLYYLSRTQSTGGTAGTQQLLFSQAGPNNMSAQAKNWLPGPCYRQQRVSTTLSQNNNSNFAWTGATKYHLNGRDSLVNPGVAMATHRDDEERFFPSSGVLMFGKQGAGRDNVDYSSVMLTSEEEIRTTNPVATEQYGVVADNLQQQNAAPIVGAVNSQGALPGMVWQNRDVYLQGPIWAKIPHTDGNFHPSPLMGGFGLKHPPPQILIKNTPVPADPPTTFNQAKLASFITQYSTGQVSVEIEWELQKENSKRWNPEIQYTSNYYKSTNVDFAVNTEGTYSEPRPIGTRYLTRNL

SEQ ID NO: 901 - protein, 738 aa, Artificial Sequence
  source: /note="Description of Artificial Sequence: Synthetic polypeptide"
MAADGYLPDWLEDNLSEGIREWWDLKPGAPKPKANQQRQDNGRGLVLPGYRYLGPFNGLDKGEPVNAADAAALEHDRAYDQQLQAGDNPYLRYNHADAEFQERLQEDTSFGGNLGRAVFQAKKRVLEPLGLVESPVRTAPGKKRPVEPSPQRSPDSSTGIGKRGQQPAKKRLNFGQTGDSESVPDPQPIGEPPAAPSGVGPNTMAAGGGAPMADNNEGADGVGSSSGNWHCDSTWLGDRVITTSTRTWALPTYNNHLYRQISNGTSGGSTNDNTYFGYSTPWGYFDFNRFHCHFSPRDWQRLINNNWGFRPKRLNFKLFNIQVKEVTQNEGTRTIANNLTSTIQVFTDSEYQLPYVLGSAHQGCLPPFPADVFMIPQYGYLTLNNGSQAVGRSSFYCLEYFPSQMLRTGNNFEFSYNFEDVPFHSSYAHSQSLDRLMNPLIDQYLYYLSRTQSTGGTAGTQQLLFSQAGPNNMSAQAKNWLPGPCYRQQRVSTTLSQNNNSNFAWTGATKYHLNGRDSLVNPGVAMATHRDDEERFFPSSGVLMFGRQGAGRDNVDYSSVMLTSEEEIRTTNPVATEQYGVVADNLQQQNAAPIVGAVNSQGALPGMVWQNRDVYLQGPIWAKIPHTDGNFHPSPLMGGFGLKHPPPQILIKNTPVPADPPTTFNQAKLASFITQYSTGQVSVEIEWELQKENSKRWNPEIQYTSNYYKSTNVDFAVNTEGTYSEPRPIGTRYLTRNL

SEQ ID NO: 902 - protein, 738 aa, Artificial Sequence
  source: /note="Description of Artificial Sequence: Synthetic polypeptide"
MAADGYLPDWLEDNLSEGIREWWDLKPGAPKPKANQQRQDNGRGLVLPGYRYLGPFNGLDKGEPVNAADAAALEHDRAYDQQLQAGDNPYLRYNHADAEFQERLQEDTSFGGNLGRAVFQAKKRVLEPLGLVESPVRTAPGKKRPVEPSPQRSPDSSTGIGKRGQQPAKKRLNFGQTGDSESVPDPQPIGEPPAAPSGVGPNTMAAGGGAPMADNNEGADGVGSSSGNWHCDSTWLGDRVITTSTRTWALPTYNNHLYRQISNGTSGGSTNDNTYFGYSTPWGYFDFNRFHCHFSPRDWQRLINNNWGFRPKRLNFKLFNIQVKEVTQNEGTRTIANNLTSTIQVFTDSEYQLPYVLGSAHQGCLPPFPADVFMIPQYGYLTLNNGSQAVGRSSFYCLEYFPSQMLRTGNNFEFSYNFEDVPFHSSYAHSQSLDRLMNPLIDQYLYYLSRTQSTGGTAGTQQLLFSQAGPNNMSAQAKNWLPGPCYRQQRVSTTLSQNNNSNFAWTGATKYHLNGRDSLVNPGVAMATHRDDEERFFPSSGVLMFGKQGAGRDNVDYSSVMLTSEEEIRTTNPVATEQYGVVADNLQQQNAAPIVGAVNSQGALPGMVWQNRDVYLQGPIWAKIPHTDGNFHPSPLMGGFGLKHPPPQILIKNTPVPADPPTTFNQARLASFITQYSTGQVSVEIEWELQKENSKRWNPEIQYTSNYYKSTNVDFAVNTEGTYSEPRPIGTRYLTRNL

SEQ ID NO: 903 - protein, 738 aa, Artificial Sequence
  source: /note="Description of Artificial Sequence: Synthetic polypeptide"
MAADGYLPDWLEDNLSEGIREWWDLKPGAPKPKANQQRQDNGRGLVLPGYRYLGPFNGLDKGEPVNAADAAALEHDRAYDQQLQAGDNPYLRYNHADAEFQERLQEDTSFGGNLGRAVFQAKKRVLEPLGLVESPVRTAPGKKRPVEPSPQRSPDSSTGIGKKGQQPAKKRLNFGQTGDSESVPDPQPIGEPPAAPSGVGPNTMAAGGGAPMADNNEGADGVGSSSGNWHCDSTWLGDRVITTSTRTWALPTYNNHLYRQISNGTSGGSTNDNTYFGYSTPWGYFDFNRFHCHFSPRDWQRLINNNWGFRPKRLNFKLFNIQVKEVTQNEGTRTIANNLTSTIQVFTDSEYQLPYVLGSAHQGCLPPFPADVFMIPQYGYLTLNNGSQAVGRSSFYCLEYFPSQMLRTGNNFEFSYNFEDVPFHSSYAHSQSLDRLMNPLIDQYLYYLSRTQSTGGTAGTQQLLFSQAGPNNMSAQAKNWLPGPCYRQQRVSTTLSQNNNSNFAWTGATKYHLNGRDSLVNPGVAMATHRDDEERFFPSSGVLMFGRQGAGRDNVDYSSVMLTSEEEIRTTNPVATEQYGVVADNLQQQNAAPIVGAVNSQGALPGMVWQNRDVYLQGPIWAKIPHTDGNFHPSPLMGGFGLKHPPPQILIKNTPVPADPPTTFNQARLASFITQYSTGQVSVEIEWELQKENSKRWNPEIQYTSNYYKSTNVDFAVNTEGTYSEPRPIGTRYLTRNL

SEQ ID NO: 904 - DNA, 2214 bp, Artificial Sequence
  source: /note="Description of Artificial Sequence: Synthetic polynucleotide"
atggctgccgatggttatcttccagattggctcgaggacaacctctctgagggcattcgcgagtggtgggacctgaaacctggagccccgaaacccaaagccaaccagcaaaagcaggacaacggccggggtctggtgcttcctggctacaagtacctcggacccttcaacggactcgacaagggggagcccgtcaacgcggcggacgcagcggccctcgagcacgacaaggcctacgaccagcagctccaagcgggtgacaatccgtacctgcggtataatcacgccgacgccgagtttcaggagcgtctgcaagaagatacgtcttttgggggcaacctcgggcgcgcagtcttccaggccaaaaagcgggttctcgaacctctgggcctggttgaatcgccggttaagacggctcctggaaagaagagaccggtagagccatcaccccagcgctctccagactcctctacgggcatcggcaagaaaggccagcagcccgcaaaaaagagactcaattttgggcagactggcgactcagagtcagtccccgaccctcaaccaatcggagaaccaccagcagccccctctggtgtgggacctaatacaatggctgcaggcggtggcgctccaatggcagacaataacgaaggcgccgacggagtgggtagttcctcaggaaattggcattgcgattccacatggctgggcgacagagtcatcaccaccagcacccgcacctgggccctgcccacctacaacaaccacctctacaagcaaatctccaacgggacctcgggaggaagcaccaacgacaacacctacttcggctacagcaccccctgggggtattttgacttcaacagattccactgccacttttcaccacgtgactggcagcgactcatcaacaacaactggggattccggcccaagaggctcaacttcaagctcttcaacatccaagtcaaggaggtcacgcagaatgaaggcaccaagaccatcgccaataaccttaccagcacgattcaggtctttacggactcggaataccagctcccgtacgtgctcggctcggcgcaccagggctgcctgcctccgttcccggcggacgtcttcatgattcctcagtacgggtacctgactctgaacaatggcagtcaggctgtgggccggtcgtccttctactgcctggagtactttccttctcaaatgctgagaacgggcaacaactttgaattcagctacaacttcgaggacgtgcccttccacagcagctacgcgcacagccagagcctggaccggctgatgaaccctctcatcgaccagtacttgtactacctgtcccggactcaaagcacgggcggtactgcaggaactcagcagttgctattttctcaggccgggcctaacaacatgtcggctcaggccaagaactggctacccggtccctgctaccggcagcaacgcgtctccacgacactgtcgcagaacaacaacagcaactttgcctggacgggtgccaccaagtatcatctgaatggcagagactctctggtgaatcctggcgttgccatggctacccacaaggacgacgaagagcgattttttccatccagcggagtcttaatgtttgggaaacagggagctggaaaagacaacgtggactatagcagcgtgatgctaaccagcgaggaagaaataaagaccaccaacccagtggccacagaacagtacggcgtggtggccgataacctgcaacagcaaaacgccgctcctattgtaggggccgtcaatagtcaaggagccttacctggcatggtgtggcagaaccgggacgtgtacctgcagggtcccatctgggccaagattcctcatacggacggcaactttcatccctcgccgctgatgggaggctttggactgaagcatccgcctcctcagatcctgattaaaaacacacctgttcccgcggatcctccgaccaccttcaatcaggccaagctggcttctttcatcacgcagtacagtaccggccaggtcagcgtggagatcgagtgggagctgcagaaggagaacagcaaacgctggaacccagagattcagtacacttccaactactacaaatctacaaatgtggactttgctgtcaatactgagggtacttattccgagcctcgccccattggcacccgttacctcacccgtaatctg

SEQ ID NO: 905 - DNA, 2217 bp, Artificial Sequence
  source: /note="Description of Artificial Sequence: Synthetic polynucleotide"
atggctgccgatggttatcttccagattggctcgaggacaacctctctgagggcattcgcgagtggtgggacctgaaacctggagccccgaaacccaaagccaaccagcaaaggcaggacaacggccggggtctggtgcttcctggctacaggtacctcggacccttcaacggactcgacaagggggagcccgtcaacgcggcggacgcagcggccctcgagcacgacagggcctacgaccagcagctccaagcgggtgacaatccgtacctgcggtataatcacgccgacgccgagtttcaggagcgtctgcaagaagatacgtcttttgggggcaacctcgggcgcgcagtcttccaggccaaaaagcgggttctcgaacctctgggcctggttgaatcgccggttaggacggctcctggaaagaagagaccggtagagccatcaccccagcgctctccagactcctctacgggcatcggcaagaaaggccagcagcccgcaagaaagagactcaattttgggcagactggcgactcagagtcagtccccgaccctcaaccaatcggagaaccaccagcagccccctctggtgtgggacctaatacaatggctgcaggcggtggcgctccaatggcagacaataacgaaggcgccgacggagtgggtagttcctcaggaaattggcattgcgattccacatggctgggcgacagagtcatcaccaccagcacccgcacctgggccctgcccacctacaacaaccacctctacaggcaaatctccaacgggacctcgggaggaagcaccaacgacaacacctacttcggctacagcaccccctgggggtattttgacttcaacagattccactgccacttttcaccacgtgactggcagcgactcatcaacaacaactggggattccggcccaagaggctcaacttcaagctcttcaacatccaagtcaaggaggtcacgcagaatgaaggcaccaggaccatcgccaataaccttaccagcacgattcaggtctttacggactcggaataccagctcccgtacgtgctcggctcggcgcaccagggctgcctgcctccgttcccggcggacgtcttcatgattcctcagtacgggtacctgactctgaacaatggcagtcaggctgtgggccggtcgtccttctactgcctggagtactttccttctcaaatgctgagaacgggcaacaactttgaattcagctacaacttcgaggacgtgcccttccacagcagctacgcgcacagccagagcctggaccggctgatgaaccctctcatcgaccagtacttgtactacctgtcccggactcaaagcacgggcggtactgcaggaactcagcagttgctattttctcaggccgggcctaacaacatgtcggctcaggccaagaactggctacccggtccctgctaccggcagcaacgcgtctccacgacactgtcgcagaacaacaacagcaactttgcctggacgggtgccaccaagtatcatctgaatggcagagactctctggtgaatcctggcgttgccatggctacccacagggacgacgaagagcgattttttccatccagcggagtcttaatgtttgggagacagggagctggaagagacaacgtggactatagcagcgtgatgctaaccagcgaggaagaaataaggaccaccaacccagtggccacagaacagtacggcgtggtggccgataacctgcaacagcaaaacgccgctcctattgtaggggccgtcaatagtcaaggagccttacctggcatggtgtggcagaaccgggacgtgtacctgcagggtcccatctgggccaagattcctcatacggacggcaactttcatccctcgccgctgatgggaggctttggactgaagcatccgcctcctcagatcctgattaaaaacacacctgttcccgcggatcctccgaccaccttcaatcaggccaagctggcttctttcatcacgcagtacagtaccggccaggtcagcgtggagatcgagtgggagctgcagaaggagaacagcaaacgctggaacccagagattcagtacacttccaactactacaaatctacaaatgtggactttgctgtcaatactgagggtacttattccgagcctcgccccattggcacccgttacctcacccgtaatctgtaa

SEQ ID NO: 906 - DNA, 2217 bp, Artificial Sequence
  source: /note="Description of Artificial Sequence: Synthetic polynucleotide"
atggctgccgatggttatcttccagattggctcgaggacaacctctctgagggcattcgcgagtggtgggacctgaaacctggagccccgaaacccaaagccaaccagcaaaggcaggacaacggccggggtctggtgcttcctggctacaggtacctcggacccttcaacggactcgacaagggggagcccgtcaacgcggcggacgcagcggccctcgagcacgacagggcctacgaccagcagctccaagcgggtgacaatccgtacctgcggtataatcacgccgacgccgagtttcaggagcgtctgcaagaagatacgtcttttgggggcaacctcgggcgcgcagtcttccaggccaaaaagcgggttctcgaacctctgggcctggttgaatcgccggttaggacggctcctggaaagaagagaccggtagagccatcaccccagcgctctccagactcctctacgggcatcggcaagagaggccagcagcccgcaagaaagagactcaattttgggcagactggcgactcagagtcagtccccgaccctcaaccaatcggagaaccaccagcagccccctctggtgtgggacctaatacaatggctgcaggcggtggcgctccaatggcagacaataacgaaggcgccgacggagtgggtagttcctcaggaaattggcattgcgattccacatggctgggcgacagagtcatcaccaccagcacccgcacctgggccctgcccacctacaacaaccacctctacaggcaaatctccaacgggacctcgggaggaagcaccaacgacaacacctacttcggctacagcaccccctgggggtattttgacttcaacagattccactgccacttttcaccacgtgactggcagcgactcatcaacaacaactggggattccggcccaagaggctcaacttcaagctcttcaacatccaagtcaaggaggtcacgcagaatgaaggcaccaggaccatcgccaataaccttaccagcacgattcaggtctttacggactcggaataccagctcccgtacgtgctcggctcggcgcaccagggctgcctgcctccgttcccggcggacgtcttcatgattcctcagtacgggtacctgactctgaacaatggcagtcaggctgtgggccggtcgtccttctactgcctggagtactttccttctcaaatgctgagaacgggcaacaactttgaattcagctacaacttcgaggacgtgcccttccacagcagctacgcgcacagccagagcctggaccggctgatgaaccctctcatcgaccagtacttgtactacctgtcccggactcaaagcacgggcggtactgcaggaactcagcagttgctattttctcaggccgggcctaacaacatgtcggctcaggccaagaactggctacccggtccctgctaccggcagcaacgcgtctccacgacactgtcgcagaacaacaacagcaactttgcctggacgggtgccaccaagtatcatctgaatggcagagactctctggtgaatcctggcgttgccatggctacccacagggacgacgaagagcgattttttccatccagcggagtcttaatgtttgggaaacagggagctggaagagacaacgtggactatagcagcgtgatgctaaccagcgaggaagaaataaggaccaccaacccagtggccacagaacagtacggcgtggtggccgataacctgcaacagcaaaacgccgctcctattgtaggggccgtcaatagtcaaggagccttacctggcatggtgtggcagaaccgggacgtgtacctgcagggtcccatctgggccaagattcctcatacggacggcaactttcatccctcgccgctgatgggaggctttggactgaagcatccgcctcctcagatcctgattaaaaacacacctgttcccgcggatcctccgaccaccttcaatcaggccaagctggcttctttcatcacgcagtacagtaccggccaggtcagcgtggagatcgagtgggagctgcagaaggagaacagcaaacgctggaacccagagattcagtacacttccaactactacaaatctacaaatgtggactttgctgtcaatactgagggtacttattccgagcctcgccccattggcacccgttacctcacccgtaatctgtaa

SEQ ID NO: 907 - DNA, 2217 bp, Artificial Sequence
  source: /note="Description of Artificial Sequence: Synthetic polynucleotide"
atggctgccgatggttatcttccagattggctcgaggacaacctctctgagggcattcgcgagtggtgggacctgaaacctggagccccgaaacccaaagccaaccagcaaaggcaggacaacggccggggtctggtgcttcctggctacaggtacctcggacccttcaacggactcgacaagggggagcccgtcaacgcggcggacgcagcggccctcgagcacgacagggcctacgaccagcagctccaagcgggtgacaatccgtacctgcggtataatcacgccgacgccgagtttcaggagcgtctgcaagaagatacgtcttttgggggcaacctcgggcgcgcagtcttccaggccaaaaagcgggttctcgaacctctgggcctggttgaatcgccggttaggacggctcctggaaagaagagaccggtagagccatcaccccagcgctctccagactcctctacgggcatcggcaagagaggccagcagcccgcaaaaaagagactcaattttgggcagactggcgactcagagtcagtccccgaccctcaaccaatcggagaaccaccagcagccccctctggtgtgggacctaatacaatggctgcaggcggtggcgctccaatggcagacaataacgaaggcgccgacggagtgggtagttcctcaggaaattggcattgcgattccacatggctgggcgacagagtcatcaccaccagcacccgcacctgggccctgcccacctacaacaaccacctctacaggcaaatctccaacgggacctcgggaggaagcaccaacgacaacacctacttcggctacagcaccccctgggggtattttgacttcaacagattccactgccacttttcaccacgtgactggcagcgactcatcaacaacaactggggattccggcccaagaggctcaacttcaagctcttcaacatccaagtcaaggaggtcacgcagaatgaaggcaccaggaccatcgccaataaccttaccagcacgattcaggtctttacggactcggaataccagctcccgtacgtgctcggctcggcgcaccagggctgcctgcctccgttcccggcggacgtcttcatgattcctcagtacgggtacctgactctgaacaatggcagtcaggctgtgggccggtcgtccttctactgcctggagtactttccttctcaaatgctgagaacgggcaacaactttgaattcagctacaacttcgaggacgtgcccttccacagcagctacgcgcacagccagagcctggaccggctgatgaaccctctcatcgaccagtacttgtactacctgtcccggactcaaagcacgggcggtactgcaggaactcagcagttgctattttctcaggccgggcctaacaacatgtcggctcaggccaagaactggctacccggtccctgctaccggcagcaacgcgtctccacgacactgtcgcagaacaacaacagcaactttgcctggacgggtgccaccaagtatcatctgaatggcagagactctctggtgaatcctggcgttgccatggctacccacagggacgacgaagagcgattttttccatccagcggagtcttaatgtttgggagacagggagctggaagagacaacgtggactatagcagcgtgatgctaaccagcgaggaagaaataaggaccaccaacccagtggccacagaacagtacggcgtggtggccgataacctgcaacagcaaaacgccgctcctattgtaggggccgtcaatagtcaaggagccttacctggcatggtgtggcagaaccgggacgtgtacctgcagggtcccatctgggccaagattcctcatacggacggcaactttcatccctcgccgctgatgggaggctttggactgaagcatccgcctcctcagatcctgattaaaaacacacctgttcccgcggatcctccgaccaccttcaatcaggccaagctggcttctttcatcacgcagtacagtaccggccaggtcagcgtggagatcgagtgggagctgcagaaggagaacagcaaacgctggaacccagagattcagtacacttccaactactacaaatctacaaatgtggactttgctgtcaatactgagggtacttattccgagcctcgccccattggcacccgttacctcacccgtaatctgtaa

SEQ ID NO: 908 - DNA, 2217 bp, Artificial Sequence
  source: /note="Description of Artificial Sequence: Synthetic polynucleotide"
atggctgccgatggttatcttccagattggctcgaggacaacctctctgagggcattcgcgagtggtgggacctgaaacctggagccccgaaacccaaagccaaccagcaaaggcaggacaacggccggggtctggtgcttcctggctacaggtacctcggacccttcaacggactcgacaagggggagcccgtcaacgcggcggacgcagcggccctcgagcacgacagggcctacgaccagcagctccaagcgggtgacaatccgtacctgcggtataatcacgccgacgccgagtttcaggagcgtctgcaagaagatacgtcttttgggggcaacctcgggcgcgcagtcttccaggccaaaaagcgggttctcgaacctctgggcctggttgaatcgccggttaggacggctcctggaaagaagagaccggtagagccatcaccccagcgctctccagactcctctacgggcatcggcaagagaggccagcagcccgcaaaaaagagactcaattttgggcagactggcgactcagagtcagtccccgaccctcaaccaatcggagaaccaccagcagccccctctggtgtgggacctaatacaatggctgcaggcggtggcgctccaatggcagacaataacgaaggcgccgacggagtgggtagttcctcaggaaattggcattgcgattccacatggctgggcgacagagtcatcaccaccagcacccgcacctgggccctgcccacctacaacaaccacctctacaggcaaatctccaacgggacctcgggaggaagcaccaacgacaacacctacttcggctacagcaccccctgggggtattttgacttcaacagattccactgccacttttcaccacgtgactggcagcgactcatcaacaacaactggggattccggcccaagaggctcaacttcaagctcttcaacatccaagtcaaggaggtcacgcagaatgaaggcaccaggaccatcgccaataaccttaccagcacgattcaggtctttacggactcggaataccagctcccgtacgtgctcggctcggcgcaccagggctgcctgcctccgttcccggcggacgtcttcatgattcctcagtacgggtacctgactctgaacaatggcagtcaggctgtgggccggtcgtccttctactgcctggagtactttccttctcaaatgctgagaacgggcaacaactttgaattcagctacaacttcgaggacgtgcccttccacagcagctacgcgcacagccagagcctggaccggctgatgaaccctctcatcgaccagtacttgtactacctgtcccggactcaaagcacgggcggtactgcaggaactcagcagttgctattttctcaggccgggcctaacaacatgtcggctcaggccaagaactggctacccggtccctgctaccggcagcaacgcgtctccacgacactgtcgcagaacaacaacagcaactttgcctggacgggtgccaccaagtatcatctgaatggcagagactctctggtgaatcctggcgttgccatggctacccacagggacgacgaagagcgattttttccatccagcggagtcttaatgtttgggaaacagggagctggaagagacaacgtggactatagcagcgtgatgctaaccagcgaggaagaaataaggaccaccaacccagtggccacagaacagtacggcgtggtggccgataacctgcaacagcaaaacgccgctcctattgtaggggccgtcaatagtcaaggagccttacctggcatggtgtggcagaaccgggacgtgtacctgcagggtcccatctgggccaagattcctcatacggacggcaactttcatccctcgccgctgatgggaggctttggactgaagcatccgcctcctcagatcctgattaaaaacacacctgttcccgcggatcctccgaccaccttcaatcaggccaggctggcttctttcatcacgcagtacagtaccggccaggtcagcgtggagatcgagtgggagctgcagaaggagaacagcaaacgctggaacccagagattcagtacacttccaactactacaaatctacaaatgtggactttgctgtcaatactgagggtacttattccgagcctcgccccattggcacccgttacctcacccgtaatctgtaa

SEQ ID NO: 909 - DNA, 2217 bp, Artificial Sequence
  source: /note="Description of Artificial Sequence: Synthetic polynucleotide"
atggctgccgatggttatcttccagattggctcgaggacaacctctctgagggcattcgcgagtggtgggacctgaaacctggagccccgaaacccaaagccaaccagcaaaggcaggacaacggccggggtctggtgcttcctggctacaggtacctcggacccttcaacggactcgacaagggggagcccgtcaacgcggcggacgcagcggccctcgagcacgacagggcctacgaccagcagctccaagcgggtgacaatccgtacctgcggtataatcacgccgacgccgagtttcaggagcgtctgcaagaagatacgtcttttgggggcaacctcgggcgcgcagtcttccaggccaaaaagcgggttctcgaacctctgggcctggttgaatcgccggttaggacggctcctggaaagaagagaccggtagagccatcaccccagcgctctccagactcctctacgggcatcggcaagaaaggccagcagcccgcaaaaaagagactcaattttgggcagactggcgactcagagtcagtccccgaccctcaaccaatcggagaaccaccagcagccccctctggtgtgggacctaatacaatggctgcaggcggtggcgctccaatggcagacaataacgaaggcgccgacggagtgggtagttcctcaggaaattggcattgcgattccacatggctgggcgacagagtcatcaccaccagcacccgcacctgggccctgcccacctacaacaaccacctctacaggcaaatctccaacgggacctcgggaggaagcaccaacgacaacacctacttcggctacagcaccccctgggggtattttgacttcaacagattccactgccacttttcaccacgtgactggcagcgactcatcaacaacaactggggattccggcccaagaggctcaacttcaagctcttcaacatccaagtcaaggaggtcacgcagaatgaaggcaccaggaccatcgccaataaccttaccagcacgattcaggtctttacggactcggaataccagctcccgtacgtgctcggctcggcgcaccagggctgcctgcctccgttcccggcggacgtcttcatgattcctcagtacgggtacctgactctgaacaatggcagtcaggctgtgggccggtcgtccttctactgcctggagtactttccttctcaaatgctgagaacgggcaacaactttgaattcagctacaacttcgaggacgtgcccttccacagcagctacgcgcacagccagagcctggaccggctgatgaaccctctcatcgaccagtacttgtactacctgtcccggactcaaagcacgggcggtactgcaggaactcagcagttgctattttctcaggccgggcctaacaacatgtcggctcaggccaagaactggctacccggtccctgctaccggcagcaacgcgtctccacgacactgtcgcagaacaacaacagcaactttgcctggacgggtgccaccaagtatcatctgaatggcagagactctctggtgaatcctggcgttgccatggctacccacagggacgacgaagagcgattttttccatccagcggagtcttaatgtttgggagacagggagctggaagagacaacgtggactatagcagcgtgatgctaaccagcgaggaagaaataaggaccaccaacccagtggccacagaacagtacggcgtggtggccgataacctgcaacagcaaaacgccgctcctattgtaggggccgtcaatagtcaaggagccttacctggcatggtgtggcagaaccgggacgtgtacctgcagggtcccatctgggccaagattcctcatacggacggcaactttcatccctcgccgctgatgggaggctttggactgaagcatccgcctcctcagatcctgattaaaaacacacctgttcccgcggatcctccgaccaccttcaatcaggccaggctggcttctttcatcacgcagtacagtaccggccaggtcagcgtggagatcgagtgggagctgcagaaggagaacagcaaacgctggaacccagagattcagtacacttccaactactacaaatctacaaatgtggactttgctgtcaatactgagggtacttattccgagcctcgccccattggcacccgttacctcacccgtaatctgtaa

SEQ ID NO: 910 - protein, 744 aa, Artificial Sequence
  source: /note="Description of Artificial Sequence: Synthetic polypeptide"
MAADGYLPDWLEDTLSEGIRQWWKLKPGPPPPKPAERHKDDSRGLVLPGYKYLGPFNGLDKGEPVNEADAAALEHDKAYDRQLDSGDNPYLKYNHADAEFQERLKEDTSFGGNLGRAVFQAKKRVLEPLGLVEEPVKTAPGKKRPVEHSPVEPDSSSGTGKAGQQPARKRLNFGQTGDADSVPDPQPLGQPPAAPSGLGTNTMATGSGAPMADNNEGADGVGNSSGNWHCDSTWMGDRVITTSTRTWALPTYNNHLYKQISSQSGASNDNHYFGYSTPWGYFDFNRFHCHFSPRDWQRLINNNWGFRPKRLNFKLFNIQVKEVTQNDGTTTIANNLTSTVQVFTDSEYQLPYVLGSAHQGCLPPFPADVFMVPQYGYLTLNNGSQAVGRSSFYCLEYFPSQMLRTGNNFTFSYTFEDVPFHSSYAHSQSLDRLMNPLIDQYLYYLSRTNTPSGTTTQSRLQFSQAGASDIRDQSRNWLPGPCYRQQRVSKTSADNNNSEYSWTGATKYHLNGRDSLVNPGPAMASHKDDEEKFFPQSGVLIFGKQGSEKTNVDIEKVMITDEEEIRTTNPVATEQYGSVSTNLQRGQRGESGHGYFAQAATADVNTQGVLPGMVWQDRDVYLQGPIWAKIPHTDGHFHPSPLMGGFGLKHPPPQILIKNTPVPANPSTTFSAAKFASFITQYSTGQVSVEIEWELQKENSKRWNPEIQYTSNYNKSVNVDFTVDTNGVYSEPRPIGTRYLTRNL

SEQ ID NO: 911 - DNA, 8359 bp, Artificial Sequence
  source: /note="Description of Artificial Sequence: Synthetic polynucleotide"
catcatcaataatataccttattttggattgaagccaatatgataatgagggggtggagtttgtgacgtggcgcggggcgtgggaacggggcgggtgacgtagtagctctagaggtcctgtattagaggtcacgtgagtgttttgcgacattttgcgacaccatgtggtcacgctgggtatttaagcccgagtgagcacgcagggtctccattttgaagcgggaggtttgaacgcgcagccgccatgccggggttttacgagattgtgattaaggtccccagcgaccttgacgagcatctgcccggcatttctgacagctttgtgaactgggtggccgagaaggaatgggagttgccgccagattctgacatggatctgaatctgattgagcaggcacccctgaccgtggccgagaagctgcagcgcgactttctgacggaatggcgccgtgtgagtaaggcaccggaggcccttttctttgtgcaatttgagaagggagagagctacttccacatgcacgtgctcgtggaaaccaccggggtgaaatccatggttttgggacgtttcctgagtcagattcgcgaaaaactgattcagagaatttaccgcgggatcgagccgactttgccaaactggttcgcggtcacaaagaccagaaatggcgccggaggcgggaacaaggtggtggatgagtgctacatccccaattacttgctccccaaaacccagcctgagctccagtgggcgtggactaatatggaacagtatttaagcgcctgtttgaatctcacggagcgtaaacggttggtggcgcagcatctgacgcacgtgtcgcagacgcaggagcagaacaaagagaatcagaatcccaattctgatgcgccggtgatcagatcaaaaacttcagccaggtacatggagctggtcgggtggctcgtggacaaggggattacctcggagaagcagtggatccaggaggaccaggcctcatacatctccttcaatgcggcctccaactcgcggtcccaaatcaaggctgccttggacaatgcgggaaagattatgagcctgactaaaaccgcccccgactacctggtgggccagcagcccgtggaggacatttccagcaatcggatttataaaattttggaactaaacgggtacgatccccaatatgcggcttccgtctttctgggatgggccacgaaaaagttcggcaagaggaacaccatctggctgtttgggcctgcaactaccgggaagaccaacatcgcggaggccatagcccacactgtgcccttctacgggtgcgtaaactggaccaatgagaactttcccttcaacgactgtgtcgacaagatggtgatctggtgggaggaggggaagatgaccgccaaggtcgtggagtcggccaaagccattctcggaggaagcaaggtgcgcgtggaccagaaatgcaagtcctcggcccagatagacccgactcccgtgatcgtcacctccaacaccaacatgtgcgccgtgattgacgggaactcaacgaccttcgaacaccagcagccgttgcaagaccggatgttcaaatttgaactcacccgccgtctggatcatgactttgggaaggtcaccaagcaggaagtcaaagactttttccggtgggcaaaggatcacgtggttgaggtggagcatgaattctacgtcaaaaagggtggagccaagaaaagacccgcccccagtgacgcagatataagtgagcccaaacgggtgcgcgagtcagttgcgcagccatcgacgtcagacgcggaagcttcgatcaactacgcagacaggtaccaaaacaaatgttctcgtcacgtgggcatgaatctgatgctgtttccctgcagacaatgcgagagaatgaatcagaattcaaatatctgcttcactcacggacagaaagactgtttagagtgctttcccgtgtcagaatctcaacccgtttctgtcgtcaaaaaggcgtatcagaaactgtgctacattcatcatatcatgggaaaggtgccagacgcttgcactgcctgcgatctggtcaatgtggatttggatgactgcatctttgaacaataaatgatttaaatcaggtatggctgccgatggttatcttccagattggctcgaggacactctctctgaaggaataagacagtggtggaagctcaaacctggcccaccaccaccaaagcccgcagagcggcataaggacgacagcaggggtcttgtgcttcctgggtacaagtacctcggacccttcaacggactcgacaagggagagccggtcaacgaggcagacgccgcggccctcgagcacgacaaagcctacgaccggcagctcgacagcggagacaacccgtacctcaagtacaaccacgccgacgcggagtttcaggagcgccttaaagaagatacgtcttttgggggcaacctcggacgagcagtcttccaggcgaaaaagagggttcttgaacctctgggcctggttgaggaacctgttaagacggctccgggaaaaaagaggccggtagagcactctcctgtggagccagactcctcctcgggaaccggaaaggcgggccagcagcctgcaagaaaaagattgaattttggtcagactggagacgcagactcagtacctgacccccagcctctcggacagccaccagcagccccctctggtctgggaactaatacgatggctacaggcagtggcgcaccaatggcagacaataacgagggcgccgacggagtgggtaattcctcgggaaattggcattgcgattccacatggatgggcgacagagtcatcaccaccagcacccgaacctgggccctgcccacctacaacaaccacctctacaaacaaatttccagccaatcaggagcctcgaacgacaatcactactttggctacagcaccccttgggggtattttgacttcaacagattccactgccacttttcaccacgtgactggcaaagactcatcaacaacaactggggattccgacccaagagactcaacttcaagctctttaacattcaagtcaaagaggtcacgcagaatgacggtacgacgacgattgccaataaccttaccagcacggttcaggtgtttactgactcggagtaccagctcccgtacgtcctcggctcggcgcatcaaggatgcctcccgccgttcccagcagacgtcttcatggtgccacagtatggatacctcaccctgaacaacgggagtcaggcagtaggacgctcttcattttactgcctggagtactttccttctcagatgctgcgtaccggaaacaactttaccttcagctacacttttgaggacgttcctttccacagcagctacgctcacagccagagtctggaccgtctcatgaatcctctcatcgaccagtacctgtattacttgagcagaacaaacactccaagtggaaccaccacgcagtcaaggcttcagttttctcaggccggagcgagtgacattcgggaccagtctaggaactggcttcctggaccctgttaccgccagcagcgagtatcaaagacatctgcggataacaacaacagtgaatactcgtggactggagctaccaagtaccacctcaatggcagagactctctggtgaatccgggcccggccatggcaagccacaaggacgatgaagaaaagttttttcctcagagcggggttctcatctttgggaagcaaggctcagagaaaacaaatgtggacattgaaaaggtcatgattacagacgaagaggaaatcaggacaaccaatcccgtggctacggagcagtatggttctgtatctaccaacctccagagaggccagagaggcgagtctggtcatggttattttgcccaggcggccaccgcagatgtcaacacacaaggcgttcttccaggcatggtctggcaggacagagatgtgtaccttcaggggcccatctgggcaaagattccacacacggacggacattttcacccctctcccctcatgggtggattcggacttaaacaccctcctccacagattctcatcaagaacaccccggtacctgcgaatccttcgaccaccttcagtgcggcaaagtttgcttccttcatcacacagtactccacgggacaggtcagcgtggagatcgagtgggagctgcagaaggaaaacagcaaacgctggaatcccgaaattcagtacacttccaactacaacaagtctgttaatgtggactttactgtggacactaatggcgtgtattcagagcctcgccccattggcaccagatacctgactcgtaatctgtaattgcttgttaatcaataaaccgtttaattcgtttcagttgaactttggtctctgcgtatttctttcttatctagtttccatgctctagaggtcctgtattagaggtcacgtgagtgttttgcgacattttgcgacaccatgtggtcacgctgggtatttaagcccgagtgagcacgcagggtctccattttgaagcgggaggtttgaacgcgcagccaccacggcggggttttacgagattgtgattaaggtccccagcgaccttgacgagcatctgcccggcatttctgacagctttgtgaactgggtggccgagaaggaatgggagttgccgccagattctgacatggatctgaatctgattgagcaggcacccctgaccgtggccgagaagctgcatcgctggcgtaatagcgaagaggcccgcaccgatcgcccttcccaacagttgcgcagcctgaatggcgaatggcgattccgttgcaatggctggcggtaatattgttctggatattaccagcaaggccgatagtttgagttcttctactcaggcaagtgatgttattactaatcaaagaagtattgcgacaacggttaatttgcgtgatggacagactcttttactcggtggcctcactgattataaaaacacttctcaggattctggcgtaccgttcctgtctaaaatccctttaatcggcctcctgtttagctcccgctctgattctaacgaggaaagcacgttatacgtgctcgtcaaagcaaccatagtacgcgccctgtagcggcgcattaagcgcggcgggtgtggtggttacgcgcagcgtgaccgctacacttgccagcgccctagcgcccgctcctttcgctttcttcccttcctttctcgccacgttcgccggctttccccgtcaagctctaaatcgggggctccctttagggttccgatttagtgctttacggcacctcgaccccaaaaaacttgattagggtgatggttcacgtagtgggccatcgccctgatagacggtttttcgccctttgacgttggagtccacgttctttaatagtggactcttgttccaaactggaacaacactcaaccctatctcggtctattcttttgatttataagggattttgccgatttcggcctattggttaaaaaatgagctgatttaacaaaaatttaacgcgaattttaacaaaatattaacgtttacaatttaaatatttgcttatacaatcttcctgtttttggggcttttctgattatcaaccggggtacatatgattgacatgctagttttacgattaccgttcatcgattctcttgtttgctccagactctcaggcaatgacctgatagcctttgtagagacctctcaaaaatagctaccctctccggcatgaatttatcagctagaacggttgaatatcatattgatggtgatttgactgtctccggcctttctcacccgtttgaatctttacctacacattactcaggcattgcatttaaaatatatgagggttctaaaaatttttatccttgcgttgaaataaaggcttctcccgcaaaagtattacagggtcataatgtttttggtacaaccgatttagctttatgctctgaggctttattgcttaattttgctaattctttgccttgcctgtatgatttattggatgttggaattcctgatgcggtattttctccttacgcatctgtgcggtatttcacaccgcatatggtgcactctcagtacaatctgctctgatgccgcatagttaagccagccccgacacccgccaacacccgctgacgcgccctgacgggcttgtctgctcccggcatccgcttacagacaagctgtgaccgtctccgggagctgcatgtgtcagaggttttcaccgtcatcaccgaaacgcgcgagacgaaagggcctcgtgatacgcctatttttataggttaatgtcatgataataatggtttcttagacgtcaggtggcacttttcggggaaatgtgcgcggaacccctatttgtttatttttctaaatacattcaaatatgtatccgctcatgagacaataaccctgataaatgcttcaataatattgaaaaaggaagagtatgagtattcaacatttccgtgtcgcccttattcccttttttgcggcattttgccttcctgtttttgctcacccagaaacgctggtgaaagtaaaagatgctgaagatcagttgggtgcacgagtgggttacatcgaactggatctcaacagcggtaagatccttgagagttttcgccccgaagaacgttttccaatgatgagcacttttaaagttctgctatgtggcgcggtattatcccgtattgacgccgggcaagagcaactcggtcgccgcatacactattctcagaatgacttggttgagtactcaccagtcacagaaaagcatcttacggatggcatgacagtaagagaattatgcagtgctgccataaccatgagtgataacactgcggccaacttacttctgacaacgatcggaggaccgaaggagctaaccgcttttttgcacaacatgggggatcatgtaactcgccttgatcgttgggaaccggagctgaatgaagccataccaaacgacgagcgtgacaccacgatgcctgtagcaatggcaacaacgttgcgcaaactattaactggcgaactacttactctagcttcccggcaacaattaatagactggatggaggcggataaagttgcaggaccacttctgcgctcggcccttccggctggctggtttattgctgataaatctggagccggtgagcgtgggtctcgcggtatcattgcagcactggggccagatggtaagccctcccgtatcgtagttatctacacgacggggagtcaggcaactatggatgaacgaaatagacagatcgctgagataggtgcctcactgattaagcattggtaactgtcagaccaagtttactcatatatactttagattgatttaaaacttcatttttaatttaaaaggatctaggtgaagatcctttttgataatctcatgaccaaaatcccttaacgtgagttttcgttccactgagcgtcagaccccgtagaaaagatcaaaggatcttcttgagatcctttttttctgcgcgtaatctgctgcttgcaaacaaaaaaaccaccgctaccagcggtggtttgtttgccggatcaagagctaccaactctttttccgaaggtaactggcttcagcagagcgcagataccaaatactgtccttctagtgtagccgtagttaggccaccacttcaagaactctgtagcaccgcctacatacctcgctctgctaatcctgttaccagtggctgctgccagtggcgataagtcgtgtcttaccgggttggactcaagacgatagttaccggataaggcgcagcggtcgggctgaacggggggttcgtgcacacagcccagcttggagcgaacgacctacaccgaactgagatacctacagcgtgagctatgagaaagcgccacgcttcccgaagggagaaaggcggacaggtatccggtaagcggcagggtcggaacaggagagcgcacgagggagcttccagggggaaacgcctggtatctttatagtcctgtcgggtttcgccacctctgacttgagcgtcgatttttgtgatgctcgtcaggggggcggagcctatggaaaaacgccagcaacgcggcctttttacggttcctggccttttgctggccttttgctcacatgttctttcctgcgttatcccctgattctgtggataaccgtattaccgcctttgagtgagctgataccgctcgccgcagccgaacgaccgagcgcagcgagtcagtgagcgaggaagcggaagagcgcccaatacgcaaaccgcctctccccgcgcgttggccgattcattaatgcagaattcc

SEQ ID NO: 912 - protein, 736 aa, Artificial Sequence
  source: /note="Description of Artificial Sequence: Synthetic polypeptide"
  VARIANT (168)..(168): /replace="Arg"
  VARIANT (204)..(204): /replace="Ser"
  VARIANT (266)..(266): /replace="Gly"
  VARIANT (311)..(311): /replace="Lys"
  VARIANT (411)..(411): /replace="Gln"
  VARIANT (460)..(460): /replace="Glu"
  VARIANT (493)..(493): /replace="Thr"
  VARIANT (562)..(562): /replace="Asn"
  VARIANT (576)..(576): /replace="Glu"
  VARIANT (587)..(587): /replace="Ala"
  VARIANT (609)..(609): /replace="Asp"
  SITE (1)..(736): /note="Variant residues given in the sequence have no preference with respect to those in the annotations for variant positions"
MAADGYLPDWLEDNLSEGIREWWDLKPGAPKPKANQQKQDDGRGLVLPGYKYLGPFNGLDKGEPVNAADAAALEHDKAYDQQLKAGDNPYLRYNHADAEFQERLQEDTSFGGNLGRAVFQAKKRVLEPLGLVEEGAKTAPGKKRPVEQSPQEPDSSSGIGKKGQQPAKKRLNFGQTGDSESVPDPQPLGEPPAAPSGVGSNTMAAGGGAPMADNNEGADGVGNASGNWHCDSTWLGDRVITTSTRTWALPTYNNHLYKQISSQSGASTNDNTYFGYSTPWGYFDFNRFHCHFSPRDWQRLINNNWGFRPKRLNFKLFNIQVKEVTTNDGTTTIANNLTSTVQVFTDSEYQLPYVLGSAHQGCLPPFPADVFMIPQYGYLTLNNGSQAVGRSSFYCLEYFPSQMLRTGNNFEFSYTFEDVPFHSSYAHSQSLDRLMNPLIDQYLYYLSRTQTTSGTAGNRTLQFSQAGPSSMANQAKNWLPGPCYRQQRVSKTANQNNNSNFAWTGATKYHLNGRDSLVNPGPAMATHKDDEDKFFPMSGVLIFGKQGAGNSNVDLDNVMITSEEEIKTTNPVATEQYGTVATNLQSSNTAPATGTVNSQGALPGMVWQNRDVYLQGPIWAKIPHTDGHFHPSPLMGGFGLKHPPPQILIKNTPVPANPPTTFSPAKFASFITQYSTGQVSVEIEWELQKENSKRWNPEIQYTSNYNKSTNVDFAVDTNGVYSEPRPIGTRYLTRNL

SEQ ID NO: 913 - DNA, 2208 bp, Artificial Sequence
  source: /note="Description of Artificial Sequence: Synthetic polynucleotide"
  variation (502)..(504): /replace="agg"
  variation (610)..(612): /replace="agc"
  variation (796)..(798): /replace="ggc"
  variation (931)..(933): /replace="aag"
  variation (1231)..(1233): /replace="cag"
  variation (1378)..(1380): /replace="gag"
  variation (1477)..(1479): /replace="acc"
  variation (1684)..(1686): /replace="aac"
  variation (1726)..(1728): /replace="gag"
  variation (1759)..(1761): /replace="gcc"
  variation (1825)..(1827): /replace="gac"
  misc_feature (1)..(2208): /note="Variant nucleotides given in the sequence have no preference with respect to those in the annotations for variant positions"
atggctgccgatggttatcttccagattggctcgaggacaacctctctgagggcattcgcgagtggtgggacttgaaacctggagccccgaaacccaaagccaaccagcaaaagcaggacgacggccggggtctggtgcttcctggctacaagtacctcggacccttcaacggactcgacaagggggagcccgtcaacgcggcggacgcagcggccctcgagcacgacaaggcctacgaccagcagctcaaagcgggtgacaatccgtacctgcggtataaccacgccgacgccgagtttcaggagcgtctgcaagaagatacgtcttttgggggcaacctcgggcgagcagtcttccaggccaagaagcgggttctcgaacctctcggtctggttgaggaaggcgctaagacggctcctggaaagaagagaccggtagagcaatcaccccaggaaccagactcctcttcgggcatcggcaagaaaggccagcagcccgcgaagaagagactcaactttgggcagacaggcgactcagagtcagtgcccgaccctcaaccactcggagaaccccccgcagccccctctggtgtgggatctaatacaatggcagcaggcggtggcgctccaatggcagacaataacgaaggcgccgacggagtgggtaacgcctcaggaaattggcattgcgattccacatggctgggcgacagagtcatcaccaccagcacccgaacctgggccctccccacctacaacaaccacctctacaagcaaatctccagccaatcgggagcaagcaccaacgacaacacctacttcggctacagcaccccctgggggtattttgactttaacagattccactgccacttctcaccacgtgactggcagcgactcatcaacaacaactggggattccggcccaagagactcaacttcaagctcttcaacatccaggtcaaggaggtcacgacgaatgatggcaccacgaccatcgccaataaccttaccagcacggttcaggtctttacggactcggaataccagctcccgtacgtcctcggctctgcgcaccagggctgcctgcctccgttcccggcggacgtcttcatgattcctcagtacgggtacctgactctgaacaatggcagtcaggccgtgggccgttcctccttctactgcctggagtactttccttctcaaatgctgagaacgggcaacaactttgagttcagctacacgtttgaggacgtgccttttcacagcagctacgcgcacagccaaagcctggaccggctgatgaaccccctcatcgaccagtacctgtactacctgtctcggactcagaccacgagtggtaccgcaggaaatcggacgttgcaattttctcaggccgggcctagtagcatggcgaatcaggccaaaaactggctacccgggccctgctaccggcagcaacgcgtctccaagacagcgaatcaaaataacaacagcaactttgcctggaccggtgccaccaagtatcatctgaatggcagagactctctggtaaatcccggtcccgctatggcaacccacaaggacgacgaagacaaattttttccgatgagcggagtcttaatatttgggaaacagggagctggaaatagcaacgtggaccttgacaacgttatgataaccagtgaggaagaaattaaaaccaccaacccagtggccacagaacagtacggcacggtggccactaacctgcaatcgtcaaacaccgctcctgctacagggaccgtcaacagtcaaggagccttacctggcatggtctggcagaaccgggacgtgtacctgcagggtcctatctgggccaagattcctcacacggacggacactttcatccctcgccgctgatgggaggctttggactgaaacacccgcctcctcagatcctgattaagaatacacctgttcccgcgaatcctccaactaccttcagtccagctaagtttgcgtcgttcatcacgcagtacagcaccggacaggtcagcgtggaaattgaatgggagctgcagaaagaaaacagcaaacgctggaacccagagattcaatacacttccaactacaacaaatctacaaatgtggactttgctgttgacacaaatggcgtttattctgagcctcgccccatcggcacccgttacctcacccgtaatctg

SEQ ID NO: 914 - protein, 737 aa, Artificial Sequence
  source: /note="Description of Artificial Sequence: Synthetic polypeptide"
  VARIANT (157)..(157): /replace="Ser"
  VARIANT (168)..(168): /replace="Arg"
  VARIANT (262)..(262): /replace="Ser"
  VARIANT (263)..(263): /replace="His"
  VARIANT (312)..(312): /replace="Lys"
  VARIANT (412)..(412): /replace="Gln"
  VARIANT (460)..(460): /replace="Gln"
  VARIANT (461)..(461): /replace="Glu"
  VARIANT (552)..(552): /replace="Ser"
  VARIANT (556)..(556): /replace="Tyr"
  VARIANT (557)..(557): /replace="Ser"
  VARIANT (563)..(563): /replace="Asn"
  VARIANT (580)..(580): /replace="Ile"
  VARIANT (588)..(588): /replace="Ser"
  VARIANT (664)..(664): /replace="Thr"
  SITE (1)..(737): /note="Variant residues given in the sequence have no preference with respect to those in the annotations for variant positions"
MAADGYLPDWLEDNLSEGIREWWDLKPGAPKPKANQQKQDDGRGLVLPGYKYLGPFNGLDKGEPVNAADAAALEHDKAYDQQLKAGDNPYLRYNHADAEFQERLQEDTSFGGNLGRAVFQAKKRVLEPLGLVEEGAKTAPGKKRPVEQSPQEPDSSTGIGKKGQQPAKKRLNFGQTGDSESVPDPQPLGEPPAAPSGVGSNTMAAGGGAPMADNNEGADGVGNASGNWHCDSTWLGDRVITTSTRTWALPTYNNHLYKQISNSQSGGSTNDNTYFGYSTPWGYFDFNRFHCHFSPRDWQRLINNNWGFRPKRLNFKLFNIQVKEVTTNDGTTTIANNLTSTVQVFTDSEYQLPYVLGSAHQGCLPPFPADVFMIPQYGYLTLNNGSQAVGRSSFYCLEYFPSQMLRTGNNFEFSYTFEDVPFHSSYAHSQSLDRLMNPLIDQYLYYLSRTQTTGGTAGNRTLQFSQAGPSSMANQAKNWLPGPCYRQQRVSKTTNQNNNSNFAWTGATKYHLNGRDSLVNPGVAMATHKDDEDRFFPSSGVLIFGKQGAGNDNVDLDNVMITSEEEIKTTNPVATEEYGVVATNLQSANTAPQTGTVNSQGALPGMVWQNRDVYLQGPIWAKIPHTDGNFHPSPLMGGFGLKHPPPQILIKNTPVPANPPTTFSPAKFASFITQYSTGQVSVEIEWELQKENSKRWNPEIQYTSNYNKSTNVDFAVDTEGVYSEPRPIGTRYLTRNL

SEQ ID NO: 915 - DNA, 2211 bp, Artificial Sequence
  source: /note="Description of Artificial Sequence: Synthetic polynucleotide"
  variation (469)..(471): /replace="agc"
  variation (502)..(504): /replace="aga"
  variation (784)..(786): /replace="agt"
  variation (787)..(789): /replace="cac"
  variation (934)..(936): /replace="aag"
  variation (1234)..(1236): /replace="cag"
  variation (1378)..(1380): /replace="cag"
  variation (1381)..(1383): /replace="gag"
  variation (1654)..(1656): /replace="agc"
  variation (1666)..(1668): /replace="tac"
  variation (1669)..(1671): /replace="agc"
  variation (1687)..(1689): /replace="aac"
  variation (1738)..(1740): /replace="atc"
  variation (1762)..(1764): /replace=" agc"
  variation (1990)..(1992): /replace="acc"
  misc_feature (1)..(2211): /note="Variant nucleotides given in the sequence have no preference with respect to those in the annotations for variant positions"
atggctgccgatggttatcttccagattggctcgaggacaacctctctgagggcattcgcgagtggtgggacttgaaacctggagccccgaaacccaaagccaaccagcaaaagcaggacgacggccggggtctggtgcttcctggctacaagtacctcggacccttcaacggactcgacaagggggagcccgtcaacgcggcggacgcagcggccctcgagcacgacaaggcctacgaccagcagctcaaagcgggtgacaatccgtacctgcggtataaccacgccgacgccgagtttcaggagcgtctgcaagaagatacgtcttttgggggcaacctcgggcgagcagtcttccaggccaagaagcgggttctcgaacctctcggtctggttgaggaaggcgctaagacggctcctggaaagaagagaccggtagagcaatcaccccaggaaccagactcctctacgggcatcggcaagaaaggccagcagcccgcgaaaaagagactcaactttgggcagactggcgactcagagtcagtgcccgaccctcaaccactcggagaaccccccgcagccccctctggtgtgggatctaatacaatggctgcaggcggtggcgctccaatggcagacaataacgaaggcgccgacggagtgggtaatgcctcaggaaattggcattgcgattccacatggctgggcgacagagtcatcaccaccagcacccgaacctgggccctccccacctacaacaaccacctctacaagcaaatctccaacagccaatcgggaggaagcaccaacgacaacacctacttcggctacagcaccccctgggggtattttgactttaacagattccactgccacttctcaccacgtgactggcagcgactcatcaacaacaactggggattccggcccaagagactcaacttcaagctcttcaacatccaggtcaaggaggtcacgacgaatgatggcaccacgaccatcgccaataaccttaccagcacggttcaggtctttacggactcggaataccagctcccgtacgtcctcggctctgcgcaccagggctgcctgcctccgttcccggcggacgtcttcatgattcctcagtacgggtacctgactctgaacaatggcagtcaggccgtgggccgttcctccttctactgcctggagtactttccttctcaaatgctgagaacgggcaacaactttgagttcagctacacgtttgaggacgtgccttttcacagcagctacgcgcacagccaaagcctggaccggctgatgaaccccctcatcgaccagtacctgtactacctgtctcggactcagaccacgggaggtaccgcaggaaatcggacgttgcaattttctcaggccgggcctagtagcatggcgaatcaggccaaaaactggctacccgggccctgctaccggcagcaacgcgtctccaagacaacgaatcaaaataacaacagcaactttgcctggaccggtgccaccaagtatcatctgaatggcagagactctctggtaaatcccggtgtcgctatggcaacccacaaggacgacgaagaccgattttttccgtccagcggagtcttaatatttgggaaacagggagctggaaatgacaacgtggaccttgacaacgttatgataaccagtgaggaagaaattaaaaccaccaacccagtggccacagaagagtacggcgtggtggccactaacctgcaatcggcaaacaccgctcctcaaacagggaccgtcaacagtcaaggagccttacctggcatggtctggcagaaccgggacgtgtacctgcagggtcctatctgggccaagattcctcacacggacggaaactttcatccctcgccgctgatgggaggctttggactgaaacacccgcctcctcagatcctgattaagaatacacctgttcccgcgaatcctccaactaccttcagtccagctaagtttgcgtcgttcatcacgcagtacagcaccggacaggtcagcgtggaaattgaatgggagctgcagaaagaaaacagcaaacgctggaacccagagattcaatacacttccaactacaacaaatctacaaatgtggactttgctgttgacacagaaggcgtttattctgagcctcgccccatcggcacccgttacctcacccgtaatctg

SEQ ID NO: 916 - protein, 738 aa, Artificial Sequence
  source: /note="Description of Artificial Sequence: Synthetic polypeptide"
  VARIANT (158)..(158): /replace="Ser"
  VARIANT (169)..(169): /replace="Arg"
  VARIANT (564)..(564): /replace="Asn"
  SITE (1)..(738): /note="Variant residues given in the sequence have no preference with respect to those in the annotations for variant positions"
MAADGYLPDWLEDNLSEGIREWWDLKPGAPKPKANQQKQDDGRGLVLPGYKYLGPFNGLDKGEPVNAADAAALEHDKAYDQQLKAGDNPYLRYNHADAEFQERLQEDTSFGGNLGRAVFQAKKRVLEPLGLVEEGAKTAPGKKRPVEQSPQREPDSSTGIGKKGQQPAKKRLNFGQTGDSESVPDPQPLGEPPAAPSGVGSNTMAAGGGAPMADNNEGADGVGNSSGNWHCDSTWLGDRVITTSTRTWALPTYNNHLYKQISNGTSGGSTNDNTYFGYSTPWGYFDFNRFHCHFSPRDWQRLINNNWGFRPKRLNFKLFNIQVKEVTTNEGTKTIANNLTSTVQVFTDSEYQLPYVLGSAHQGCLPPFPADVFMIPQYGYLTLNNGSQAVGRSSFYCLEYFPSQMLRTGNNFQFSYTFEDVPFHSSYAHSQSLDRLMNPLIDQYLYYLSRTQTTGGTAGTQTLQFSQAGPSSMANQAKNWLPGPCYRQQRVSTTTNQNNNSNFAWTGATKYHLNGRDSLVNPGVAMATHKDDEDRFFPSSGVLIFGKQGAGNDNVDYSNVMITSEEEIKTTNPVATEEYGVVATNLQSANTAPQTGTVNSQGALPGMVWQNRDVYLQGPIWAKIPHTDGNFHPSPLMGGFGLKHPPPQILIKNTPVPADPPTTFNQAKLNSFITQYSTGQVSVEIEWELQKENSKRWNPEIQYTSNYYKSTNVDFAVNTEGVYSEPRPIGTRYLTRNL

SEQ ID NO: 917 - DNA, 2214 bp, Artificial Sequence
  source: /note="Description of Artificial Sequence: Synthetic polynucleotide"
  variation (472)..(474): /replace="agc"
  variation (505)..(507): /replace="aga"
  variation (1690)..(1692): /replace="aac"
  misc_feature (1)..(2214): /note="Variant nucleotides given in the sequence have no preference with respect to those in the annotations for variant positions"
atggctgccgatggttatcttccagattggctcgaggacaacctctctgagggcattcgcgagtggtgggacctgaaacctggagccccgaaacccaaagccaaccagcaaaagcaggacgacggccggggtctggtgcttcctggctacaagtacctcggacccttcaacggactcgacaagggggagcccgtcaacgcggcggacgcagcggccctcgagcacgacaaggcctacgaccagcagctcaaagcgggtgacaatccgtacctgcggtataatcacgccgacgccgagtttcaggagcgtctgcaagaagatacgtcttttgggggcaacctcgggcgagcagtcttccaggccaagaagcgggttctcgaacctctcggtctggttgaggaaggcgctaagacggctcctggaaagaagagaccggtagagcagtcaccacagcgtgagcccgactcctccacgggcatcggcaagaaaggccagcagcccgccaaaaagagactcaatttcggtcagactggcgactcagagtcagtccccgaccctcaacctctcggagaacctccagcagcgccctctggtgtgggatctaatacaatggctgcaggcggtggcgcaccaatggcagacaataacgaaggtgccgacggagtgggtaattcctcgggaaattggcattgcgattccacatggctgggcgacagagtcatcaccaccagcacccgaacctgggccctgcccacctacaacaaccacctctacaagcaaatctccaacgggacctcgggaggcagcaccaacgacaacacctactttggctacagcaccccctgggggtattttgactttaacagattccactgccacttctcaccacgtgactggcagcgactcatcaacaacaactggggattccggcccaagagactcaacttcaagctcttcaacatccaggtcaaagaggtcacgacgaatgaaggcaccaagaccatcgccaataacctcaccagcaccgtccaggtgtttacggactcggaataccagctgccgtacgtcctcggctctgcccaccagggctgcctgcctccgttcccggcggacgtcttcatgattcctcagtacggctacctgactctcaacaacggtagtcaggccgtgggacgttcctccttctactgcctggagtacttcccctctcagatgctgagaacgggcaacaactttcaattcagctacactttcgaggacgtgcctttccacagcagctacgcgcacagccagagtttggacaggctgatgaatcctctcatcgaccagtacctgtactacctgtcaagaacccagactacgggaggcacagcgggaacccagacgttgcagttttctcaggccgggcctagcagcatggcgaatcaggccaaaaactggctgcctggaccctgctacagacagcagcgcgtctccacgacaacgaatcaaaacaacaacagcaactttgcctggactggtgccaccaagtatcatctgaacggcagagactctctggtgaatccgggcgtcgccatggcaacccacaaggacgacgaggaccgcttcttcccatccagcggcgtcctcatatttggcaagcagggagctggaaatgacaacgtggactatagcaacgtgatgataaccagcgaggaagaaatcaagaccaccaaccccgtggccacagaagagtatggcgtggtggctactaacctacagtcggcaaacaccgctcctcaaacggggaccgtcaacagccagggagccttacctggcatggtctggcagaaccgggacgtgtacctgcagggtcctatttgggccaagattcctcacacagatggcaactttcacccgtctcctttaatgggcggctttggacttaaacatccgcctcctcagatcctcatcaaaaacactcctgttcctgcggatcctccaacaacgttcaaccaggccaagctgaattctttcatcacgcagtacagcaccggacaagtcagcgtggagatcgagtgggagctgcagaaggagaacagcaagcgctggaacccagagattcagtatacttccaactactacaaatctacaaatgtggactttgctgttaatactgagggtgtttactctgagcctcgccccattggcactcgttacctcacccgtaatctg

SEQ ID NO: 918 - protein, 738 aa, Artificial Sequence
  source: /note="Description of Artificial Sequence: Synthetic polypeptide"
  VARIANT (158)..(158): /replace="Ser"
  VARIANT (169)..(169): /replace="Lys"
  VARIANT (315)..(315): /replace="Ser"
  VARIANT (413)..(413): /replace="Glu"
  VARIANT (472)..(472): /replace="Thr" or"Ser"
  VARIANT (534)..(534): /replace="Glu"
  VARIANT (542)..(542): /replace="Val"
  VARIANT (595)..(595): /replace="Val"
  SITE (1)..(738): /note="Variant residues given in the sequence have no preference with respect to those in the annotations for variant positions"
MAADGYLPDWLEDNLSEGIREWWDLKPGAPKPKANQQKQDDGRGLVLPGYKYLGPFNGLDKGEPVNAADAAALEHDKAYDQQLKAGDNPYLRYNHADAEFQERLQEDTSFGGNLGRAVFQAKKRVLEPLGLVEEGAKTAPGKKRPVEQSPQREPDSSTGIGKKGQQPARKRLNFGQTGDSESVPDPQPLGEPPAAPSGVGSNTMAAGGGAPMADNNEGADGVGSSSGNWHCDSTWLGDRVITTSTRTWALPTYNNHLYKQISNGTSGGSTNDNTYFGYSTPWGYFDFNRFHCHFSPRDWQRLINNNWGFRPKRLNFKLFNIQVKEVTQNEGTKTIANNLTSTIQVFTDSEYQLPYVLGSAHQGCLPPFPADVFMIPQYGYLTLNNGSQAVGRSSFYCLEYFPSQMLRTGNNFQFSYTFEDVPFHSSYAHSQSLDRLMNPLIDQYLYYLSRTQTTGGTAGTQTLQFSQAGPSNMANQAKNWLPGPCYRQQRVSTTTSQNNNSNFAWTGATKYHLNGRDSLVNPGVAMATHKDDEDRFFPSSGILIFGKQGAGKDNVDYSNVMLTSEEEIKTTNPVATEEYGVVADNLQQQNTAPQIGTVNSQGALPGMVWQNRDVYLQGPIWAKIPHTDGNFHPSPLMGGFGLKHPPPQILIKNTPVPADPPTTFNQAKLNSFITQYSTGQVSVEIEWELQKENSKRWNPEIQYTSNYYKSTNVDFAVNTEGVYSEPRPIGTRYLTRNL

SEQ ID NO: 919 - DNA, 2214 bp, Artificial Sequence
  source: /note="Description of Artificial Sequence: Synthetic polynucleotide"
  variation (472)..(474): /replace="agc"
  variation (505)..(507): /replace="aag"
  variation (943)..(945): /replace="agc"
  variation (1237)..(1239): /replace="gaa"
  variation (1414)..(1416): /replace="aac" or"agc"
  variation (1600)..(1602): /replace="gag"
  variation (1624)..(1626): /replace="gtc"
  variation (1783)..(1785): /replace="gta"
  misc_feature (1)..(2214): /note="Variant nucleotides given in the sequence have no preference with respect to those in the annotations for variant positions"
atggctgccgatggttatcttccagattggctcgaggacaacctctctgagggcattcgcgagtggtgggacctgaaacctggagccccgaaacccaaagccaaccagcaaaagcaggacgacggccggggtctggtgcttcctggctacaagtacctcggacccttcaacggactcgacaagggggagcccgtcaacgcggcggacgcagcggccctcgagcacgacaaggcctacgaccagcagctcaaagcgggtgacaatccgtacctgcggtataatcacgccgacgccgagtttcaggagcgtctgcaagaagatacgtcttttgggggcaacctcgggcgagcagtcttccaggccaagaagcgggttctcgaacctctcggtctggttgaggaaggcgctaagacggctcctggaaagaagagaccggtagagcagtcaccacagcgtgagcccgactcctccacgggcatcggcaagaaaggccagcagcccgccagaaagagactcaatttcggtcagactggcgactcagagtcagtccccgaccctcaacctctcggagaacctccagcagcgccctctggtgtgggatctaatacaatggctgcaggcggtggcgcaccaatggcagacaataacgaaggtgccgacggagtgggtagttcctcgggaaattggcattgcgattccacatggctgggcgacagagtcatcaccaccagcacccgaacctgggccctgcccacctacaacaaccacctctacaagcaaatctccaacgggacctcgggaggcagcaccaacgacaacacctactttggctacagcaccccctgggggtattttgactttaacagattccactgccacttctcaccacgtgactggcagcgactcatcaacaacaactggggattccggcccaagagactcaacttcaagctcttcaacatccaggtcaaagaggtcacgcagaatgaaggcaccaagaccatcgccaataacctcaccagcaccatccaggtgtttacggactcggaataccagctgccgtacgtcctcggctctgcccaccagggctgcctgcctccgttcccggcggacgtcttcatgattcctcagtacggctacctgactctcaacaacggtagtcaggccgtgggacgttcctccttctactgcctggagtacttcccctctcagatgctgagaacgggcaacaactttcaattcagctacactttcgaggacgtgcctttccacagcagctacgcgcacagccagagtttggacaggctgatgaatcctctcatcgaccagtacctgtactacctgtcaagaacccagactacgggaggcacagcgggaacccagacgttgcagttttctcaggccgggcctagcaccatggcgaatcaggccaaaaactggctgcctggaccctgctacagacagcagcgcgtctccacgacaacgtcgcaaaacaacaacagcaactttgcctggactggtgccaccaagtatcatctgaacggcagagactctctggtgaatccgggcgtcgccatggcaacccacaaggacgacgaggaccgcttcttcccatccagcggcatcctcatatttggcaagcagggagctggaaaagacaacgtggactatagcaacgtgatgctaaccagcgaggaagaaatcaagaccaccaaccccgtggccacagaagagtatggcgtggtggctgataacctacagcagcaaaacaccgctcctcaaatagggaccgtcaacagccagggagccttacctggcatggtctggcagaaccgggacgtgtacctgcagggtcctatttgggccaagattcctcacacagatggcaactttcacccgtctcctttaatgggcggctttggacttaaacatccgcctcctcagatcctcatcaaaaacactcctgttcctgcggatcctccaacaacgttcaaccaggccaagctgaattctttcatcacgcagtacagcaccggacaagtcagcgtggagatcgagtgggagctgcagaaggagaacagcaagcgctggaacccagagattcagtatacttccaactactacaaatctacaaatgtggactttgctgttaatactgagggtgtttactctgagcctcgccccattggcactcgttacctcacccgtaatctg

SEQ ID NO: 920 - protein, 738 aa, Artificial Sequence
  source: /note="Description of Artificial Sequence: Synthetic polypeptide"
  VARIANT (169)..(169): /replace="Lys"
  VARIANT (315)..(315): /replace="Ser"
  VARIANT (534)..(534): /replace="Glu"
  VARIANT (542)..(542): /replace="Val"
  SITE (1)..(738): /note="Variant residues given in the sequence have no preference with respect to those in the annotations for variant positions"
MAADGYLPDWLEDNLSEGIREWWDLKPGAPKPKANQQKQDDGRGLVLPGYKYLGPFNGLDKGEPVNAADAAALEHDKAYDQQLKAGDNPYLRYNHADAEFQERLQEDTSFGGNLGRAVFQAKKRVLEPLGLVEEGAKTAPGKKRPVEPSPQRSPDSSTGIGKKGQQPARKRLNFGQTGDSESVPDPQPIGEPPAAPSGVGSGTMAAGGGAPMADNNEGADGVGSSSGNWHCDSTWLGDRVITTSTRTWALPTYNNHLYKQISNGTSGGSTNDNTYFGYSTPWGYFDFNRFHCHFSPRDWQRLINNNWGFRPKRLNFKLFNIQVKEVTQNEGTKTIANNLTSTIQVFTDSEYQLPYVLGSAHQGCLPPFPADVFMIPQYGYLTLNNGSQAVGRSSFYCLEYFPSQMLRTGNNFEFSYTFEDVPFHSSYAHSQSLDRLMNPLIDQYLYYLSRTQSTGGTAGTQQLLFSQAGPSNMSAQAKNWLPGPCYRQQRVSTTLSQNNNSNFAWTGATKYHLNGRDSLVNPGVAMATHKDDEDRFFPSSGILMFGKQGAGKDNVDYSNVMLTSEEEIKTTNPVATEQYGVVADNLQQQNTAPIVGAVNSQGALPGMVWQNRDVYLQGPIWAKIPHTDGNFHPSPLMGGFGLKHPPPQILIKNTPVPADPPTTFNQAKLNSFITQYSTGQVSVEIEWELQKENSKRWNPEIQYTSNYYKSTNVDFAVNTEGVYSEPRPIGTRYLTRNL

SEQ ID NO: 921 - DNA, 2214 bp, Artificial Sequence
  source: /note="Description of Artificial Sequence: Synthetic polynucleotide"
  variation (505)..(507): /replace="aaa"
  variation (943)..(945): /replace="agc"
  variation (1600)..(1602): /replace="gag"
  variation (1624)..(1626): /replace="gtc"
  misc_feature (1)..(2214): /note="Variant nucleotides given in the sequence have no preference with respect to those in the annotations for variant positions"
atggctgccgatggttatcttccagattggctcgaggacaacctctctgagggcattcgcgagtggtgggacctgaaacctggagccccgaaacccaaagccaaccagcaaaagcaggacgacggccggggtctggtgcttcctggctacaagtacctcggacccttcaacggactcgacaagggggagcccgtcaacgcggcggacgcagcggccctcgagcacgacaaggcctacgaccagcagctcaaagcgggtgacaatccgtacctgcggtataatcacgccgacgccgagtttcaggagcgtctgcaagaagatacgtcttttgggggcaacctcgggcgagcagtcttccaggccaagaagcgggttctcgaacctctcggtctggttgaggaaggcgctaagacggctcctggaaagaagagaccggtagagccgtcaccacagcgttcccccgactcctccacgggcatcggcaagaaaggccagcagcccgccagaaagagactcaatttcggtcagactggcgactcagagtcagtccccgaccctcaacctatcggagaacctccagcagcgccctctggtgtgggatctggtacaatggctgcaggcggtggcgcaccaatggcagacaataacgaaggtgccgacggagtgggtagttcctcgggaaattggcattgcgattccacatggctgggcgacagagtcatcaccaccagcacccgaacctgggccctgcccacctacaacaaccacctctacaagcaaatctccaacgggacctcgggaggcagcaccaacgacaacacctactttggctacagcaccccctgggggtattttgactttaacagattccactgccacttctcaccacgtgactggcagcgactcatcaacaacaactggggattccggcccaagagactcaacttcaagctcttcaacatccaggtcaaagaggtcacgcagaatgaaggcaccaagaccatcgccaataacctcaccagcaccatccaggtgtttacggactcggaataccagctgccgtacgtcctcggctctgcccaccagggctgcctgcctccgttcccggcggacgtcttcatgattcctcagtacggctacctgactctcaacaacggtagtcaggccgtgggacgttcctccttctactgcctggagtacttcccctctcagatgctgagaacgggcaacaactttgagttcagctacactttcgaggacgtgcctttccacagcagctacgcgcacagccagagtttggacaggctgatgaatcctctcatcgaccagtacctgtactacctgtcaagaacccagtctacgggaggcacagcgggaacccagcagttgctgttttctcaggccgggcctagcaacatgtcggctcaggccaaaaactggctgcctggaccctgctacagacagcagcgcgtctccacgacactgtcgcaaaacaacaacagcaactttgcctggactggtgccaccaagtatcatctgaacggcagagactctctggtgaatccgggcgtcgccatggcaacccacaaggacgacgaggaccgcttcttcccatccagcggcatcctcatgtttggcaagcagggagctggaaaagacaacgtggactatagcaacgtgatgctaaccagcgaggaagaaatcaagaccaccaaccccgtggccacagaacagtatggcgtggtggctgataacctacagcagcaaaacaccgctcctattgtgggggccgtcaacagccagggagccttacctggcatggtctggcagaaccgggacgtgtacctgcagggtcctatttgggccaagattcctcacacagatggcaactttcacccgtctcctttaatgggcggctttggacttaaacatccgcctcctcagatcctcatcaaaaacactcctgttcctgcggatcctccaacaacgttcaaccaggccaagctgaattctttcatcacgcagtacagcaccggacaagtcagcgtggagatcgagtgggagctgcagaaggagaacagcaagcgctggaacccagagattcagtatacttccaactactacaaatctacaaatgtggactttgctgttaatactgagggtgtttactctgagcctcgccccattggcactcgttacctcacccgtaatctg

SEQ ID NO: 922 - protein, 738 aa, Artificial Sequence
  source: /note="Description of Artificial Sequence: Synthetic polypeptide"
  VARIANT (471)..(471): /replace="Asn"
  SITE (1)..(738): /note="Variant residues given in the sequence have no preference with respect to those in the annotations for variant positions"
MAADGYLPDWLEDNLSEGIREWWDLKPGAPKPKANQQKQDDGRGLVLPGYKYLGPFNGLDKGEPVNAADAAALEHDKAYDQQLKAGDNPYLRYNHADAEFQERLQEDTSFGGNLGRAVFQAKKRVLEPLGLVEEGAKTAPGKKRPVEPSPQRSPDSSTGIGKKGQQPAKKRLNFGQTGDSESVPDPQPIGEPPAGPSGLGSGTMAAGGGAPMADNNEGADGVGSSSGNWHCDSTWLGDRVITTSTRTWALPTYNNHLYKQISNGTSGGSTNDNTYFGYSTPWGYFDFNRFHCHFSPRDWQRLINNNWGFRPKRLNFKLFNIQVKEVTQNEGTKTIANNLTSTIQVFTDSEYQLPYVLGSAHQGCLPPFPADVFMIPQYGYLTLNNGSQAVGRSSFYCLEYFPSQMLRTGNNFEFSYTFEDVPFHSSYAHSQSLDRLMNPLIDQYLYYLSRTQSTGGTAGTQQLLFSQAGPSNMSAQAKNWLPGPCYRQQRVSTTLSQNNNSNFAWTGATKYHLNGRDSLVNPGVAMATHKDDEERFFPSSGVLMFGKQGAGKDNVDYSSVMLTSEEEIKTTNPVATEQYGVVADNLQQQNTAPIVGAVNSQGALPGMVWQNRDVYLQGPIWAKIPHTDGNFHPSPLMGGFGLKHPPPQILIKNTPVPADPPTTFSQAKLASFITQYSTGQVSVEIEWELQKENSKRWNPEIQYTSNYYKSTNVDFAVNTEGTYSEPRPIGTRYLTRNL

SEQ ID NO: 923 - DNA, 2214 bp, Artificial Sequence
  source: /note="Description of Artificial Sequence: Synthetic polynucleotide"
  variation (1411)..(1413): /replace="aat"
  misc_feature (1)..(2214): /note="Variant nucleotides given in the sequence have no preference with respect to those in the annotations for variant positions"
atggctgccgatggttatcttccagattggctcgaggacaacctctctgagggcattcgcgagtggtgggacttgaaacctggagccccgaaacccaaagccaaccagcaaaagcaggacgacggccggggtctggtgcttcctggctacaagtacctcggacccttcaacggactcgacaagggggagcccgtcaacgcggcggacgcagcggccctcgagcacgacaaggcctacgaccagcagctcaaagcgggtgacaatccgtacctgcggtataaccacgccgacgccgagtttcaggagcgtctgcaagaagatacgtcttttgggggcaacctcgggcgagcagtcttccaggccaagaagcgggttctcgaacctctcggtctggttgaggaaggcgctaagacggctcctggaaagaagagaccggtagagccatcaccccagcgttctccagactcctctacgggcatcggcaagaaaggccagcagcccgcgaaaaagagactcaactttgggcagactggcgactcagagtcagtgcccgaccctcaaccaatcggagaaccccccgcaggcccctctggtctgggatctggtacaatggctgcaggcggtggcgctccaatggcagacaataacgaaggcgccgacggagtgggtagttcctcaggaaattggcattgcgattccacatggctgggcgacagagtcatcaccaccagcacccgaacctgggccctccccacctacaacaaccacctctacaagcaaatctccaacgggacttcgggaggaagcaccaacgacaacacctacttcggctacagcaccccctgggggtattttgactttaacagattccactgccacttctcaccacgtgactggcagcgactcatcaacaacaactggggattccggcccaagagactcaacttcaagctcttcaacatccaggtcaaggaggtcacgcagaatgaaggcaccaagaccatcgccaataaccttaccagcacgattcaggtctttacggactcggaataccagctcccgtacgtcctcggctctgcgcaccagggctgcctgcctccgttcccggcggacgtcttcatgattcctcagtacgggtacctgactctgaacaatggcagtcaggccgtgggccgttcctccttctactgcctggagtactttccttctcaaatgctgagaacgggcaacaactttgagttcagctacacgtttgaggacgtgccttttcacagcagctacgcgcacagccaaagcctggaccggctgatgaaccccctcatcgaccagtacctgtactacctgtctcggactcagtccacgggaggtaccgcaggaactcagcagttgctattttctcaggccgggcctagtaacatgtcggctcaggccaaaaactggctacccgggccctgctaccggcagcaacgcgtctccacgacactgtcgcaaaataacaacagcaactttgcctggaccggtgccaccaagtatcatctgaatggcagagactctctggtaaatcccggtgtcgctatggcaacccacaaggacgacgaagagcgattttttccgtccagcggagtcttaatgtttgggaaacagggagctggaaaagacaacgtggactatagcagcgttatgctaaccagtgaggaagaaattaaaaccaccaacccagtggccacagaacagtacggcgtggtggccgataacctgcaacagcaaaacaccgctcctattgtaggggccgtcaacagtcaaggagccttacctggcatggtctggcagaaccgggacgtgtacctgcagggtcctatctgggccaagattcctcacacggacggaaactttcatccctcgccgctgatgggaggctttggactgaaacacccgcctcctcagatcctgattaagaatacacctgttcccgcggatcctccaactaccttcagtcaagctaagctggcgtcgttcatcacgcagtacagcaccggacaggtcagcgtggaaattgaatgggagctgcagaaagaaaacagcaaacgctggaacccagagattcaatacacttccaactactacaaatctacaaatgtggactttgctgttaacacagaaggcacttattctgagcctcgccccatcggcacccgttacctcacccgtaatctg

SEQ ID NO: 924 - protein, 737 aa, Artificial Sequence
  source: /note="Description of Artificial Sequence: Synthetic polypeptide"
  VARIANT (148)..(148): /replace="Gln"
  VARIANT (169)..(169): /replace="Arg"
  VARIANT (314)..(314): /replace="Asn"
  VARIANT (466)..(466): /replace="His"
  VARIANT (563)..(563): /replace="Ser"
  VARIANT (580)..(580): /replace="Ile"
  VARIANT (588)..(588): /replace="Ser"
  SITE (1)..(737): /note="Variant residues given in the sequence have no preference with respect to those in the annotations for variant positions"
MAADGYLPDWLEDNLSEGIREWWDLKPGAPKPKANQQKQDDGRGLVLPGYKYLGPFNGLDKGEPVNAADAAALEHDKAYDQQLKAGDNPYLRYNHADAEFQERLQEDTSFGGNLGRAVFQAKKRVLEPLGLVEEGAKTAPGKKRPVEPSPQRSPDSSTGIGKKGQQPAKKRLNFGQTGDSESVPDPQPLGEPPAAPSGVGSGTMAAGGGAPMADNNEGADGVGNASGNWHCDSTWLGDRVITTSTRTWALPTYNNHLYKQISSQSAGSTNDNTYFGYSTPWGYFDFNRFHCHFSPRDWQRLINNNWGFRPKKLRFKLFNIQVKEVTTNDGVTTIANNLTSTVQVFSDSEYQLPYVLGSAHQGCLPPFPADVFMIPQYGYLTLNNGSQSVGRSSFYCLEYFPSQMLRTGNNFEFSYTFEDVPFHSSYAHSQSLDRLMNPLIDQYLYYLARTQSTTGGTAGNRELQFYQAGPSTMAEQAKNWLPGPCYRQQRVSKTLDQNNNSNFAWTGATKYHLNGRNSLVNPGVAMATHKDDEDRFFPSSGVLIFGKTGAANKTTLENVLMTNEEEIKTTNPVATEEYGVVSSNLQSANTAPQTQTVNSQGALPGMVWQNRDVYLQGPIWAKIPHTDGNFHPSPLMGGFGLKHPPPQILIKNTPVPANPPEVFTPAKFASFITQYSTGQVSVEIEWELQKENSKRWNPEIQYTSNYDKSTNVDFAVDSEGVYSEPRPIGTRYLTRNL

SEQ ID NO: 925 - DNA, 2211 bp, Artificial Sequence
  source: /note="Description of Artificial Sequence: Synthetic polynucleotide"
  variation (442)..(444): /replace="cag"
  variation (505)..(507): /replace="aga"
  variation (940)..(942): /replace="aac"
  variation (1396)..(1398): /replace="cac"
  variation (1687)..(1689): /replace="agt"
  variation (1738)..(1740): /replace="ata"
  variation (1762)..(1764): /replace="tct"
  misc_feature (1)..(2211): /note="Variant nucleotides given in the sequence have no preference with respect to those in the annotations for variant positions"
atggctgccgatggttatcttccagattggctcgaggacaacctctctgagggcattcgcgagtggtgggacctgaaacctggagccccgaaacccaaagccaaccagcaaaagcaggacgacggccggggtctggtgcttcctggctacaagtacctcggacccttcaacggactcgacaagggggagcccgtcaacgcggcggacgcagcggccctcgagcacgacaaggcctacgaccagcagctcaaagcgggtgacaatccgtacctgcggtataaccacgccgacgccgagtttcaggagcgtctgcaagaagatacgtcatttgggggcaacctcgggcgagcagtcttccaggccaagaagcgggttctcgaacctctcggtctggttgaggaaggcgctaagacggctcctggaaagaagagaccggtagagccgtcacctcagcgttcccccgactcctccacgggcatcggcaagaaaggccagcagcccgccaaaaagagactcaatttcggtcagactggcgactcagagtcagtccccgaccctcaacctctcggagaacctccagcagcgccctctggtgtgggatctggtacaatggctgcaggcggtggcgcaccaatggcagacaataacgaaggtgccgacggagtgggtaatgcctcaggaaattggcattgcgattccacatggctgggcgacagagtcattaccaccagcacccgaacctgggccctgcccacctacaacaaccacctctacaagcaaatctccagtcaaagtgcaggtagtaccaacgacaacacctacttcggctacagcaccccctgggggtattttgactttaacagattccactgccacttctcaccacgtgactggcagcgactcatcaacaacaactggggattccggcccaagaagctgcggttcaagctcttcaacatccaggtcaaggaggtcacgacgaatgacggcgttacgaccatcgctaataaccttaccagcacggttcaggtattctcggactcggaataccagctgccgtacgtcctcggctctgcgcaccagggctgcctgcctccgttcccggcggacgtcttcatgattcctcagtacggctacctgactctcaacaatggcagtcagtctgtgggacgttcctccttctactgcctggagtacttcccctctcagatgctgagaacgggcaacaactttgagttcagctacaccttcgaggacgtgcctttccacagcagctacgcacacagccagagcctggaccggctgatgaatcccctcatcgaccagtacttgtactacctggccagaacacagagtaccacaggaggcacagctggcaatcgggaactgcagttttaccaggccgggccttcaactatggccgaacaagccaagaattggttacctggaccttgctaccggcaacaaagagtctccaaaacgctggatcaaaacaacaacagcaactttgcttggactggtgccaccaaatatcacctgaacggcagaaactcgttggttaatcccggcgtcgccatggcaactcacaaggacgacgaggaccgctttttcccatccagcggagtcctgatttttggaaaaactggagcagctaacaaaactacattggaaaatgtgttaatgacaaatgaagaagaaattaaaactactaatcctgtagccacggaagaatacggggtagtcagcagcaacttacaatcggctaatactgcaccccagacacaaactgtcaacagccagggagccttacctggcatggtctggcagaaccgggacgtgtacctgcagggtcccatctgggccaagattcctcacacggatggcaactttcacccgtctcctttgatgggcggctttggacttaaacatccgcctcctcagatcctgatcaagaacactcccgttcccgctaatcctccggaggtgtttactcctgccaagtttgcttcgttcatcacacagtacagcaccggacaagtcagcgtggaaatcgagtgggagctgcagaaggaaaacagcaagcgctggaacccggagattcagtacacctccaactatgataagtcgactaatgtggactttgccgttgacagcgagggtgtttactctgagcctcgccctattggcactcgttacctcacccgtaatctg

SEQ ID NO: 926 - protein, 735 aa, Artificial Sequence
  source: /note="Description of Artificial Sequence: Synthetic polypeptide"
  VARIANT (162)..(162): /replace="Thr"
  VARIANT (168)..(168): /replace="Arg"
  VARIANT (224)..(224): /replace="Ser"
  VARIANT (310)..(310): /replace="Lys"
  VARIANT (410)..(410): /replace="Gln"
  VARIANT (446)..(446): /replace="Asn"
  VARIANT (461)..(461): /replace="Leu"
  VARIANT (471)..(471): /replace="Ser"
  VARIANT (708)..(708): /replace="Thr"
  SITE (1)..(735): /note="Variant residues given in the sequence have no preference with respect to those in the annotations for variant positions"
MAADGYLPDWLEDNLSEGIREWWDLKPGAPKPKANQQKQDDGRGLVLPGYKYLGPFNGLDKGEPVNAADAAALEHDKAYDQQLKAGDNPYLRYNHADAEFQERLQEDTSFGGNLGRAVFQAKKRVLEPLGLVEEGAKTAPGKKRPVEQSPQEPDSSSGIGKSGQQPAKKRLNFGQTGDSESVPDPQPLGEPPAAPSGVGSNTMASGGGAPMADNNEGADGVGNASGNWHCDSTWLGDRVITTSTRTWALPTYNNHLYKQISSQSGASNDNHYFGYSTPWGYFDFNRFHCHFSPRDWQRLINNNWGFRPKRLNFKLFNIQVKEVTTNDGTTTIANNLTSTVQVFTDSEYQLPYVLGSAHQGCLPPFPADVFMIPQYGYLTLNNGSQAVGRSSFYCLEYFPSQMLRTGNNFTFSYTFEDVPFHSSYAHSQSLDRLMNPLIDQYLYYLSRTQTTSGTAQNRELQFSQAGPSSMANQAKNWLPGPCYRQQRVSKTANDNNNSNFAWTGATKYHLNGRDSLVNPGPAMASHKDDEDKFFPMSGVLIFGKQGAGASNVDLDNVMITDEEEIKTTNPVATEQYGTVATNLQSSNTAPATGTVNSQGALPGMVWQDRDVYLQGPIWAKIPHTDGHFHPSPLMGGFGLKHPPPQILIKNTPVPANPPTTFSPAKFASFITQYSTGQVSVEIEWELQKENSKRWNPEIQYTSNYNKSANVDFTVDTNGVYSEPRPIGTRYLTRNL

SEQ ID NO: 927 - DNA, 2205 bp, Artificial Sequence
  source: /note="Description of Artificial Sequence: Synthetic polynucleotide"
  variation (484)..(486): /replace="aca"
  variation (502)..(504): /replace="aga"
  variation (670)..(672): /replace="tcc"
  variation (928)..(930): /replace="aaa"
  variation (1228)..(1230): /replace="cag"
  variation (1336)..(1338): /replace="aac"
  variation (1381)..(1383): /replace="ctg"
  variation (1411)..(1413): /replace="tct"
  variation (2122)..(2124): /replace="acc"
  misc_feature (1)..(2205): /note="Variant nucleotides given in the sequence have no preference with respect to those in the annotations for variant positions"
atggctgccgatggttatcttccagattggctcgaggacaacctctctgagggcattcgcgagtggtgggacttgaaacctggagccccgaaacccaaagccaaccagcaaaagcaggacgacggccggggtctggtgcttcctggctacaagtacctcggacccttcaacggactcgacaagggggagcccgtcaacgcggcggatgcagcggccctcgagcacgacaaggcctacgaccagcagctcaaagcgggtgacaatccgtacctgcggtataaccacgccgacgccgagtttcaggagcgtctgcaagaagatacgtcttttgggggcaacctcgggcgagcagtcttccaggccaagaagagggttctcgaacctcttggtctggttgaggaaggtgctaagacggctcctggaaagaaacgtccggtagagcagtcgccacaagagccagactcctcctcgggcattggcaagtcaggccagcagcccgctaaaaagagactcaattttggtcagactggcgactcagagtcagtccccgacccacaacctctcggagaacctccagcagccccctctggtgtgggatctaatacaatggcttcaggcggtggcgcaccaatggcagacaataacgaaggcgccgacggagtgggtaatgcctcaggaaattggcattgcgattccacatggctgggcgacagagtcatcaccaccagcacccgaacatgggccttgcccacctataacaaccacctctacaagcaaatctccagtcaatcaggggccagcaacgacaaccactacttcggctacagcaccccctgggggtattttgatttcaacagattccactgccatttctcaccacgtgactggcagcgactcatcaacaacaattggggattccggcccaagagactcaacttcaagctcttcaacatccaagtcaaggaggtcacgacgaatgatggcaccacgaccatcgctaataaccttaccagcacggttcaagtcttcacggactcggagtaccagttgccgtacgtcctcggctctgcgcaccagggctgcctccctccgttcccggcggacgtgttcatgattccgcagtacggctacctaacgctcaacaatggcagccaggcagtgggacggtcatccttttactgcctggaatatttcccatcgcagatgctgagaacgggcaataactttaccttcagctacaccttcgaggacgtgcctttccacagcagctacgcgcacagccagagcctggaccggctgatgaatcctctcatcgaccagtacctgtattacctgagcagaactcagactacgtccggaactgcccaaaacagggagttgcagtttagccaggcgggtccatctagcatggctaatcaggccaaaaactggctacctggaccctgttaccggcagcagcgcgtttctaaaacagcaaatgacaacaacaacagcaactttgcctggactggtgctacaaaatatcaccttaatgggcgtgattctttagtcaaccctggccctgctatggcctcacacaaagacgacgaagacaagttctttcccatgagcggtgtcttgatttttggaaagcagggcgccggagcttcaaacgttgatttggacaatgtcatgatcacagacgaagaggaaatcaaaaccactaaccccgtggccaccgaacaatatgggactgtggcaaccaatctccagagcagcaacacagcccctgcgaccggaactgtgaattctcagggagccttacctggaatggtgtggcaagacagagacgtatacctgcagggtcctatttgggccaaaattcctcacacggatggacactttcacccgtctcctctcatgggcggctttggacttaagcacccgcctcctcagatcctcatcaaaaacacgcctgttcctgcgaatcctccgacaacgttttcgcctgcaaagtttgcttcattcatcacccagtattccacaggacaagtgagcgtggagattgaatgggagctgcagaaagaaaacagcaaacgctggaatcccgaaatacagtatacatctaactataataaatctgccaacgttgatttcactgtggacaccaatggagtttatagtgagcctcgccccattggcacccgttacctcacccgtaacctg

SEQ ID NO: 928 - protein, 735 aa, Artificial Sequence
  source: /note="Description of Artificial Sequence: Synthetic polypeptide"
  VARIANT (42)..(42): /replace="Ser"
  VARIANT (168)..(168): /replace="Lys"
  VARIANT (310)..(310): /replace="Arg"
  VARIANT (410)..(410): /replace="Gln"
  VARIANT (446)..(446): /replace="Arg"
  VARIANT (461)..(461): /replace="Leu"
  VARIANT (471)..(471): /replace="Ser"
  VARIANT (475)..(475): /replace="Arg"
  VARIANT (504)..(504): /replace="Ala"
  VARIANT (539)..(539): /replace="Asn"
  SITE (1)..(735): /note="Variant residues given in the sequence have no preference with respect to those in the annotations for variant positions"
MAADGYLPDWLEDNLSEGIREWWDLKPGAPQPKANQQHQDDGRGLVLPGYKYLGPFNGLDKGEPVNEADAAALEHDKAYDQQLKAGDNPYLKYNHADAEFQERLQEDTSFGGNLGRAVFQAKKRVLEPLGLVEEAAKTAPGKKRPVEQSPQEPDSSSGIGKSGQQPARKRLNFGQTGDSESVPDPQPLGEPPAAPSGVGSNTMASGGGAPMADNNEGADGVGNSSGNWHCDSTWLGDRVITTSTRTWALPTYNNHLYKQISSQSGASNDNHYFGYSTPWGYFDFNRFHCHFSPRDWQRLINNNWGFRPKKLNFKLFNIQVKEVTQNDGTTTIANNLTSTVQVFTDSEYQLPYVLGSAHQGCLPPFPADVFMIPQYGYLTLNNGSQAVGRSSFYCLEYFPSQMLRTGNNFTFSYTFEDVPFHSSYAHSQSLDRLMNPLIDQYLYYLSRTQTTSGTTQQSRLQFSQAGPSSMAQQAKNWLPGPCYRQQRVSKTANDNNNSNFAWTGATKYHLNGRDSLVNPGPAMASHKDDEEKFFPMHGVLIFGKQGTGASNVDLDNVMITDEEEIRTTNPVATEQYGTVATNLQSSNTAPATGTVNSQGALPGMVWQDRDVYLQGPIWAKIPHTDGHFHPSPLMGGFGLKHPPPQILIKNTPVPANPPTTFSPAKFASFITQYSTGQVSVEIEWELQKENSKRWNPEIQYTSNYNKSVNVDFTVDTNGVYSEPRPIGTRYLTRNL

SEQ ID NO: 929 - DNA, 2205 bp, Artificial Sequence
  source: /note="Description of Artificial Sequence: Synthetic polynucleotide"
  variation (124)..(126): /replace="agt"
  variation (502)..(504): /replace="aaa"
  variation (928)..(930): /replace="aga"
  variation (1228)..(1230): /replace="cag"
  variation (1336)..(1338): /replace="aga"
  variation (1381)..(1383): /replace="ctc"
  variation (1411)..(1413): /replace="tct"
  variation (1423)..(1425): /replace="aga"
  variation (1510)..(1512): /replace="gcg"
  variation (1615)..(1617): /replace="aac"
  misc_feature (1)..(2205): /note="Variant nucleotides given in the sequence have no preference with respect to those in the annotations for variant positions"
atggctgctgacggttatcttccagattggctcgaggacaacctttctgaaggcattcgtgagtggtgggatctgaaacctggagcccctcaacccaaagcgaaccaacaacaccaggacgacggtcggggtcttgtgcttccgggttacaaatacctcggaccctttaacggactcgacaaaggagagccggtcaacgaggcggacgcggcagccctcgaacacgacaaagcttacgaccagcagctcaaggccggtgacaacccgtacctcaagtacaaccacgccgacgccgagtttcaggagcgtcttcaagaagatacgtcttttgggggcaaccttggcagagcagtcttccaggccaaaaagagggtccttgagcctcttggtctggttgaggaagcagctaaaacggctcctggaaagaagaggcctgtagaacagtctcctcaggaaccggactcatcatctggtattggcaaatcgggccaacagcctgccagaaaaagactaaatttcggtcagactggagactcagagtcagtcccagaccctcaacctctcggagaaccaccagcagccccctcaggtgtgggatctaatacaatggcttcaggcggtggcgcaccaatggcagacaataacgagggtgccgatggagtgggtaattcctcaggaaattggcattgcgattccacatggctgggcgacagagtcatcaccaccagcaccagaacctgggccctgcccacttacaacaaccatctctacaagcaaatctccagccaatcaggagcttcaaacgacaaccactactttggctacagcaccccttgggggtattttgactttaacagattccactgccacttctcaccacgtgactggcagcgactcattaacaacaactggggattccggcccaagaaactcaacttcaagctcttcaacatccaagttaaagaggtcacgcagaacgatggcacgacgactattgccaataaccttaccagcacggttcaagtgtttacggactcggagtatcagctcccgtacgtgctcgggtcggcgcaccaaggctgtctcccgccgtttccagcggacgtcttcatgatccctcagtatggatacctcaccctgaacaacggaagtcaagcggtgggacgctcatccttttactgcctggagtacttcccttcgcagatgctaaggactggaaataacttcacattcagctataccttcgaggatgtaccttttcacagcagctacgctcacagccagagtttggatcgcttgatgaatcctcttattgatcagtatctgtactacctgagcagaacgcaaacaacctctggaacaacccaacaatcacggctgcaatttagccaggctgggccttcgtctatggctcagcaggccaaaaattggctacctgggccctgctaccggcaacagagagtttcaaagactgctaacgacaacaacaacagtaactttgcttggacaggggccaccaaatatcatctcaatggccgcgactcgctggtgaatccaggaccagctatggccagtcacaaggacgatgaagaaaaatttttccctatgcacggcgttctaatatttggcaaacaagggacaggggcaagtaacgtagatttagataatgtaatgattacggatgaagaagagattcgtaccaccaatcctgtggcaacagagcagtatggaactgtggcaactaacttgcagagctcaaatacagctcccgcgactggaactgtcaatagtcagggggccttacctggcatggtgtggcaagatcgtgacgtgtaccttcaaggacctatctgggcaaagattcctcacacggatggacactttcatccttctcctctgatgggaggctttggactgaaacatccgcctcctcaaatcttgatcaaaaatactccggtaccggcaaatcctccgacgactttcagcccggccaagtttgcttcatttatcactcagtactccactggacaggtcagcgtggaaattgagtgggagctacagaaagaaaacagcaaacgttggaatccagagattcagtacacttccaactacaacaagtctgttaatgtggactttactgtagacactaatggtgtttatagtgaacctcgccctattggaacccggtatctcacacgaaacttg

SEQ ID NO: 930 - protein, 736 aa, Artificial Sequence
  source: /note="Description of Artificial Sequence: Synthetic polypeptide"
MAADGYLPDWLEDNLSEGIREWWDLKPGAPKPKANQQKQDDGRGLVLPGYKYLGPFNGLDKGEPVNAADAAALEHDKAYDQQLKAGDNPYLRYNHADAEFQERLQEDTSFGGNLGRAVFQAKKRVLEPLGLVEEGAKTAPGKKRPVEQSPQEPDSSSGIGKKGQQPARKRLNFGQTGDSESVPDPQPLGEPPAAPSGVGSNTMAAGGGAPMADNNEGADGVGNASGNWHCDSTWLGDRVITTSTRTWALPTYNNHLYKQISSQSGGSTNDNTYFGYSTPWGYFDFNRFHCHFSPRDWQRLINNNWGFRPKRLNFKLFNIQVKEVTTNDGTTTIANNLTSTVQVFTDSEYQLPYVLGSAHQGCLPPFPADVFMIPQYGYLTLNNGSQAVGRSSFYCLEYFPSQMLRTGNNFEFSYTFEDVPFHSSYAHSQSLDRLMNPLIDQYLYYLSRTQTTSGTAGNRTLQFSQAGPSSMANQAKNWLPGPCYRQQRVSKTANQNNNSNFAWTGATKYHLNGRDSLVNPGPAMATHKDDEDKFFPMSGVLIFGKQGAGNSNVDLDNVMITNEEEIKTTNPVATEQYGTVATNLQSANTAPATGTVNSQGALPGMVWQDRDVYLQGPIWAKIPHTDGHFHPSPLMGGFGLKHPPPQILIKNTPVPANPPTTFSPAKFASFITQYSTGQVSVEIEWELQKENSKRWNPEIQYTSNYNKSTNVDFAVDTNGVYSEPRPIGTRYLTRNL

SEQ ID NO: 931 - protein, 736 aa, Artificial Sequence
  source: /note="Description of Artificial Sequence: Synthetic polypeptide"
MAADGYLPDWLEDNLSEGIREWWDLKPGAPKPKANQQKQDDGRGLVLPGYKYLGPFNGLDKGEPVNAADAAALEHDKAYDQQLKAGDNPYLRYNHADAEFQERLQEDTSFGGNLGRAVFQAKKRVLEPLGLVEEGAKTAPGKKRPVEQSPQEPDSSSGIGKKGQQPAKKRLNFGQTGDSESVPDPQPLGEPPAAPSGVGSNTMASGGGAPMADNNEGADGVGNASGNWHCDSTWLGDRVITTSTRTWALPTYNNHLYKQISSQSGASTNDNTYFGYSTPWGYFDFNRFHCHFSPRDWQRLINNNWGFRPKRLNFKLFNIQVKEVTTNDGTTTIANNLTSTVQVFTDSEYQLPYVLGSAHQGCLPPFPADVFMIPQYGYLTLNNGSQAVGRSSFYCLEYFPSQMLRTGNNFQFSYTFEDVPFHSSYAHSQSLDRLMNPLIDQYLYYLSRTQTTSGTAGNRELQFSQAGPSSMANQAKNWLPGPCYRQQRVSKTTNQNNNSNFAWTGATKYHLNGRDSLVNPGPAMATHKDDEDKFFPMSGVLIFGKQGAGNSNVDLDNVMITNEEEIKTTNPVATEEYGTVATNLQSANTAPATGTVNSQGALPGMVWQNRDVYLQGPIWAKIPHTDGHFHPSPLMGGFGLKHPPPQILIKNTPVPANPPTTFSPAKFASFITQYSTGQVSVEIEWELQKENSKRWNPEIQYTSNYNKSTNVDFAVDTNGVYSEPRPIGTRYLTRNL

SEQ ID NO: 932 - protein, 736 aa, Artificial Sequence
  source: /note="Description of Artificial Sequence: Synthetic polypeptide"
MAADGYLPDWLEDNLSEGIREWWDLKPGAPKPKANQQKQDDGRGLVLPGYKYLGPFNGLDKGEPVNAADAAALEHDKAYDQQLKAGDNPYLRYNHADAEFQERLQEDTSFGGNLGRAVFQAKKRVLEPLGLVEEGAKTAPGKKRPVEQSPQEPDSSSGIGKKGQQPARKRLNFGQTGDSESVPDPQPLGEPPAAPSGVGSNTMAAGGGAPMADNNEGADGVGNASGNWHCDSTWLGDRVITTSTRTWALPTYNNHLYKQISSQSGGSTNDNTYFGYSTPWGYFDFNRFHCHFSPRDWQRLINNNWGFRPKRLNFKLFNIQVKEVTTNDGTTTIANNLTSTVQVFTDSEYQLPYVLGSAHQGCLPPFPADVFMIPQYGYLTLNNGSQAVGRSSFYCLEYFPSQMLRTGNNFEFSYTFEDVPFHSSYAHSQSLDRLMNPLIDQYLYYLSRTQTTSGTAGNRELQFSQAGPSSMANQAKNWLPGPCYRQQRVSKTTNQNNNSNFAWTGATKYHLNGRDSLVNPGPAMATHKDDEDKFFPMSGVLIFGKQGAGNSNVDLDNVMITSEEEIKTTNPVATEEYGTVATNLQSSNTAPATGTVNSQGALPGMVWQERDVYLQGPIWAKIPHTDGHFHPSPLMGGFGLKHPPPQILIKNTPVPANPPTTFSPAKFASFITQYSTGQVSVEIEWELQKENSKRWNPEIQYTSNYNKSTNVDFAVDTNGVYSEPRPIGTRYLTRNL

SEQ ID NO: 933 - protein, 736 aa, Artificial Sequence
  source: /note="Description of Artificial Sequence: Synthetic polypeptide"
MAADGYLPDWLEDNLSEGIREWWDLKPGAPKPKANQQKQDDGRGLVLPGYKYLGPFNGLDKGEPVNAADAAALEHDKAYDQQLKAGDNPYLRYNHADAEFQERLQEDTSFGGNLGRAVFQAKKRVLEPLGLVEEGAKTAPGKKRPVEQSPQEPDSSSGIGKKGQQPARKRLNFGQTGDSESVPDPQPLGEPPAAPSGVGSNTMASGGGAPMADNNEGADGVGNASGNWHCDSTWLGDRVITTSTRTWALPTYNNHLYKQISSQSGGSTNDNTYFGYSTPWGYFDFNRFHCHFSPRDWQRLINNNWGFRPKKLNFKLFNIQVKEVTTNDGTTTIANNLTSTVQVFTDSEYQLPYVLGSAHQGCLPPFPADVFMIPQYGYLTLNNGSQAVGRSSFYCLEYFPSQMLRTGNNFEFSYTFEDVPFHSSYAHSQSLDRLMNPLIDQYLYYLSRTQTTSGTAGNRELQFSQAGPSSMANQAKNWLPGPCYRQQRVSKTTNQNNNSNFAWTGATKYHLNGRDSLVNPGPAMATHKDDEDKFFPMSGVLIFGKQGAGNSNVDLDNVMITSEEEIKTTNPVATEEYGTVATNLQSANTAPATGTVNSQGALPGMVWQDRDVYLQGPIWAKIPHTDGHFHPSPLMGGFGLKHPPPQILIKNTPVPANPPTTFSPAKFASFITQYSTGQVSVEIEWELQKENSKRWNPEIQYTSNYNKSTNVDFAVDTNGVYSEPRPIGTRYLTRNL

SEQ ID NO: 934 - protein, 736 aa, Artificial Sequence
  source: /note="Description of Artificial Sequence: Synthetic polypeptide"
MAADGYLPDWLEDNLSEGIREWWDLKPGAPKPKANQQKQDDGRGLVLPGYKYLGPFNGLDKGEPVNAADAAALEHDKAYDQQLKAGDNPYLRYNHADAEFQERLQEDTSFGGNLGRAVFQAKKRVLEPLGLVEEGAKTAPGKKRPVEQSPQEPDSSSGIGKKGQQPARKRLNFGQTGDSESVPDPQPLGEPPAAPSGVGSNTMAAGGGAPMADNNEGADGVGNASGNWHCDSTWLGDRVITTSTRTWALPTYNNHLYKQISSQSGGSTNDNTYFGYSTPWGYFDFNRFHCHFSPRDWQRLINNNWGFRPKKLNFKLFNIQVKEVTTNDGTTTIANNLTSTVQVFTDSEYQLPYVLGSAHQGCLPPFPADVFMIPQYGYLTLNNGSQAVGRSSFYCLEYFPSQMLRTGNNFQFSYTFEDVPFHSSYAHSQSLDRLMNPLIDQYLYYLSRTQTTSGTAGNRTLQFSQAGPSSMANQAKNWLPGPCYRQQRVSKTTNQNNNSNFAWTGATKYHLNGRDSLVNPGPAMATHKDDEDKFFPMSGVLIFGKQGAGNSNVDLDNVMITNEEEIKTTNPVATEEYGTVATNLQSANTAPATGTVNSQGALPGMVWQDRDVYLQGPIWAKIPHTDGHFHPSPLMGGFGLKHPPPQILIKNTPVPANPPTTFSPAKFASFITQYSTGQVSVEIEWELQKENSKRWNPEIQYTSNYNKSTNVDFAVDTNGVYSEPRPIGTRYLTRNL

SEQ ID NO: 935 - protein, 736 aa, Artificial Sequence
  source: /note="Description of Artificial Sequence: Synthetic polypeptide"
MAADGYLPDWLEDNLSEGIREWWDLKPGAPKPKANQQKQDDGRGLVLPGYKYLGPFNGLDKGEPVNAADAAALEHDKAYDQQLKAGDNPYLRYNHADAEFQERLQEDTSFGGNLGRAVFQAKKRVLEPLGLVEEGAKTAPGKKRPVEQSPQEPDSSSGIGKKGQQPAKKRLNFGQTGDSESVPDPQPLGEPPAAPSGVGSNTMAAGGGAPMADNNEGADGVGNASGNWHCDSTWLGDRVITTSTRTWALPTYNNHLYKQISSQSGGSTNDNTYFGYSTPWGYFDFNRFHCHFSPRDWQRLINNNWGFRPKKLNFKLFNIQVKEVTTNDGTTTIANNLTSTVQVFTDSEYQLPYVLGSAHQGCLPPFPADVFMIPQYGYLTLNNGSQAVGRSSFYCLEYFPSQMLRTGNNFEFSYTFEDVPFHSSYAHSQSLDRLMNPLIDQYLYYLSRTQTTSGTAGNRTLQFSQAGPSSMANQAKNWLPGPCYRQQRVSKTANQNNNSNFAWTGATKYHLNGRDSLVNPGPAMATHKDDEDKFFPMSGVLIFGKQGAGNSNVDLDNVMITSEEEIKTTNPVATEQYGTVATNLQSSNTAPATGTVNSQGALPGMVWQNRDVYLQGPIWAKIPHTDGHFHPSPLMGGFGLKHPPPQILIKNTPVPANPPTTFSPAKFASFITQYSTGQVSVEIEWELQKENSKRWNPEIQYTSNYNKSTNVDFAVDTNGVYSEPRPIGTRYLTRNL

SEQ ID NO: 936 - protein, 736 aa, Artificial Sequence
  source: /note="Description of Artificial Sequence: Synthetic polypeptide"
MAADGYLPDWLEDNLSEGIREWWDLKPGAPKPKANQQKQDDGRGLVLPGYKYLGPFNGLDKGEPVNAADAAALEHDKAYDQQLKAGDNPYLRYNHADAEFQERLQEDTSFGGNLGRAVFQAKKRVLEPLGLVEEGAKTAPGKKRPVEQSPQEPDSSSGIGKKGQQPAKKRLNFGQTGDSESVPDPQPLGEPPAAPSGVGSNTMASGGGAPMADNNEGADGVGNASGNWHCDSTWLGDRVITTSTRTWALPTYNNHLYKQISSQSGGSTNDNTYFGYSTPWGYFDFNRFHCHFSPRDWQRLINNNWGFRPKKLNFKLFNIQVKEVTTNDGTTTIANNLTSTVQVFTDSEYQLPYVLGSAHQGCLPPFPADVFMIPQYGYLTLNNGSQAVGRSSFYCLEYFPSQMLRTGNNFEFSYTFEDVPFHSSYAHSQSLDRLMNPLIDQYLYYLSRTQTTSGTAGNRTLQFSQAGPSSMANQAKNWLPGPCYRQQRVSKTANQNNNSNFAWTGATKYHLNGRDSLVNPGPAMATHKDDEDKFFPMSGVLIFGKQGAGNSNVDLDNVMITSEEEIKTTNPVATEEYGTVATNLQSSNTAPATGTVNSQGALPGMVWQNRDVYLQGPIWAKIPHTDGHFHPSPLMGGFGLKHPPPQILIKNTPVPANPPTTFSPAKFASFITQYSTGQVSVEIEWELQKENSKRWNPEIQYTSNYNKSTNVDFAVDTNGVYSEPRPIGTRYLTRNL

SEQ ID NO: 937 - protein, 736 aa, Artificial Sequence
  source: /note="Description of Artificial Sequence: Synthetic polypeptide"
MAADGYLPDWLEDNLSEGIREWWDLKPGAPKPKANQQKQDDGRGLVLPGYKYLGPFNGLDKGEPVNAADAAALEHDKAYDQQLKAGDNPYLRYNHADAEFQERLQEDTSFGGNLGRAVFQAKKRVLEPLGLVEEGAKTAPGKKRPVEQSPQEPDSSSGIGKKGQQPAKKRLNFGQTGDSESVPDPQPLGEPPAAPSGVGSNTMASGGGAPMADNNEGADGVGNASGNWHCDSTWLGDRVITTSTRTWALPTYNNHLYKQISSQSGGSTNDNTYFGYSTPWGYFDFNRFHCHFSPRDWQRLINNNWGFRPKKLNFKLFNIQVKEVTTNDGTTTIANNLTSTVQVFTDSEYQLPYVLGSAHQGCLPPFPADVFMIPQYGYLTLNNGSQAVGRSSFYCLEYFPSQMLRTGNNFQFSYTFEDVPFHSSYAHSQSLDRLMNPLIDQYLYYLSRTQTTSGTAGNRELQFSQAGPSSMANQAKNWLPGPCYRQQRVSKTTNQNNNSNFAWTGATKYHLNGRDSLVNPGPAMATHKDDEDKFFPMSGVLIFGKQGAGNSNVDLDNVMITNEEEIKTTNPVATEQYGTVATNLQSANTAPATGTVNSQGALPGMVWQDRDVYLQGPIWAKIPHTDGHFHPSPLMGGFGLKHPPPQILIKNTPVPANPPTTFSPAKFASFITQYSTGQVSVEIEWELQKENSKRWNPEIQYTSNYNKSTNVDFAVDTNGVYSEPRPIGTRYLTRNL

SEQ ID NO: 938 - DNA, 2211 bp, Artificial Sequence
  source: /note="Description of Artificial Sequence: Synthetic polynucleotide"
atggctgccgatggttatcttccagattggctcgaggacaacctctctgagggcattcgcgagtggtgggacttgaaacctggagccccgaaacccaaagccaaccagcaaaagcaggacgacggccggggtctggtgcttcctggctacaagtacctcggacccttcaacggactcgacaagggggagcccgtcaacgcggcggacgcagcggccctcgagcacgacaaggcctacgaccagcagctcaaagcgggtgacaatccgtacctgcggtataaccacgccgacgccgagtttcaggagcgtctgcaagaagatacgtcttttgggggcaacctcgggcgagcagtcttccaggccaagaagcgggttctcgaacctctcggtctggttgaggaaggcgctaagacggctcctggaaagaagagaccggtagagcaatcaccccaggaaccagactcctcttcgggcatcggcaagaaaggccagcagcccgcgaaaaagagactcaactttgggcagacaggcgactcagagtcagtgcccgaccctcaaccactcggagaaccccccgcagccccctctggtgtgggatctaatacaatggctgcaggcggtggcgctccaatggcagacaataacgaaggcgccgacggagtgggtaacgcctcaggaaattggcattgcgattccacatggctgggcgacagagtcatcaccaccagcacccgaacctgggccctccccacctacaacaaccacctctacaagcaaatctccagccaatcgggagcaagcaccaacgacaacacctacttcggctacagcaccccctgggggtattttgactttaacagattccactgccacttctcaccacgtgactggcagcgactcatcaacaacaactggggattccggcccaagagactcaacttcaagctcttcaacatccaggtcaaggaggtcacgacgaatgatggcaccacgaccatcgccaataaccttaccagcacggttcaggtctttacggactcggaataccagctcccgtacgtcctcggctctgcgcaccagggctgcctgcctccgttcccggcggacgtcttcatgattcctcagtacgggtacctgactctgaacaatggcagtcaggccgtgggccgttcctccttctactgcctggagtactttccttctcaaatgctgagaacgggcaacaactttgagttcagctacacgtttgaggacgtgccttttcacagcagctacgcgcacagccaaagcctggaccggctgatgaaccccctcatcgaccagtacctgtactacctgtctcggactcagaccacgagtggtaccgcaggaaatcggacgttgcaattttctcaggccgggcctagtagcatggcgaatcaggccaaaaactggctacccgggccctgctaccggcagcaacgcgtctccaagacagcgaatcaaaataacaacagcaactttgcctggaccggtgccaccaagtatcatctgaatggcagagactctctggtaaatcccggtcccgctatggcaacccacaaggacgacgaagacaaattttttccgatgagcggagtcttaatatttgggaaacagggagctggaaatagcaacgtggaccttgacaacgttatgataaccagtgaggaagaaattaaaaccaccaacccagtggccacagaacagtacggcacggtggccactaacctgcaatcgtcaaacaccgctcctgctacagggaccgtcaacagtcaaggagccttacctggcatggtctggcagaaccgggacgtgtacctgcagggtcctatctgggccaagattcctcacacggacggacactttcatccctcgccgctgatgggaggctttggactgaaacacccgcctcctcagatcctgattaagaatacacctgttcccgcgaatcctccaactaccttcagtccagctaagtttgcgtcgttcatcacgcagtacagcaccggacaggtcagcgtggaaattgaatgggagctgcagaaagaaaacagcaaacgctggaacccagagattcaatacacttccaactacaacaaatctacaaatgtggactttgctgttgacacaaatggcgtttattctgagcctcgccccatcggcacccgttacctcacccgtaatctgtaa

SEQ ID NO: 939 - protein, 738 aa, Artificial Sequence; identical to SEQ ID NO: 18
  source: /note="Description of Artificial Sequence: Synthetic polypeptide"

SEQ ID NO: 940 - DNA, 2211 bp, Artificial Sequence
  source: /note="Description of Artificial Sequence: Synthetic polynucleotide"
atggctgccgatggttatcttccagattggctcgaggacaacctctctgagggcattcgcgagtggtgggacttgaaacctggagccccgaaacccaaagccaaccagcaaaagcaggacgacggccggggtctggtgcttcctggctacaagtacctcggacccttcaacggactcgacaagggggagcccgtcaacgcggcggacgcagcggccctcgagcacgacaaggcctacgaccagcagctcaaagcgggtgacaatccgtacctgcggtataaccacgccgacgccgagtttcaggagcgtctgcaagaagatacgtcttttgggggcaacctcgggcgagcagtcttccaggccaagaagcgggttctcgaaccttttggtctggttgaggaaggcgctaagacggctcctggaaagaaacgtccggtagagcagtcgccacaagagccagactcctcctcgggcatcggcaagacaggccagcagcccgctaaaaagagactcaattttggtcagactggcgactcagagtcagtccccgacccacaacctctcggagaacctccagcaacccccgctgctgtgggacctactacaatggcttcaggcggtggcgcaccaatggcagacaataacgaaggcgccgacggagtgggtaatgcctcaggaaattggcattgcgattccacatggctgggcgacagagtcatcaccaccagcacccgcacctgggccttgcccacctacaataaccacctctacaagcaaatctccagtgcttcaacgggggccagcaacgacaaccactacttcggctacagcaccccctgggggtattttgatttcaacagattccactgccacttttcaccgcgtgactggcagcgactcatcaacaacaattggggattccggcccaagagactcaacttcaagctcttcaacatccaagtcaaggaggtcacgacgagtgatggcgtcacaaccatcgctaataaccttaccagcacggttcaagtcttctcggactcggagtaccagcttccgtacgtcctcggctctgcgcaccagggctgcctccctccgttcccggcggacgtgttcatgattccgcaatacggctacctgacgctcaacaatggcagccaagccgtgggacgttcatccttttactgcctggaatatttcccttctcagatgctgagaacgggcaacaactttaccttcagctacacctttgaggaagtgcctttccacagcagctacgcgcacagccagagcctggaccggctgatgaatcctctcatcgaccaatacctgtattacctgaacagaactcaaaatcagtccggaagtgcccaaaacaaggacttgctgtttagccgtgggtctccagctggcatgtctgttcagcccaaaaactggctacctggaccctgttatcggcagcagcgcgtttctaaaacaaaaacaggcaacaacaacagcaattttacctggactggtgcttcaaaatataacctcaatgggcatgaatccatcatcaaccctggcactgctatggcctcacacaaagacgacgaagacaagttctttcccatgagcggtgtcatgatttttggaaaagagagcgccggagcttcaaacactgcattggacaatgtcatgattacagacgaagaggaaattaaagccactaaccctgtggccaccgaaagatttgggaccgtggcagtcaatttccagagcagcagcacacaccctgcgaccggagatgtgcatgttatgggagcattacctggcatggtgtggcaagatagagacgtgtacctgcagggtcccatctgggccaaaattcctcacacagatggacactttcacccgtctcctcttatgggcggctttggactcaagcacccgcctcctcagatcctcatcaaaaacacgcctgttcctgcgaatcctccggcggagttttcagctacaaagtttgcttcattcatcacccaatactccacaggacaagtgagtgtggaaattgaatgggagctgcagaaagaaaacagcaagcgctggaatcccgaagtgcagtacacatccaattatgcaaaatctgccaacgttgattttaccgtggacaacaatggactttatactgagcctcgccccattggcacccgttaccttacccgtcccctgtaa

SEQ ID NO: 941 - DNA, 2211 bp, Artificial Sequence; identical to SEQ ID NO: 940
  source: /note="Description of Artificial Sequence: Synthetic polynucleotide"

SEQ ID NO: 942 - DNA, 2202 bp, Artificial Sequence
  source: /note="Description of Artificial Sequence: Synthetic polynucleotide"
atgactgacggttaccttccagattggctagaggacaacctctctgaaggcgttcgagagtggtgggcgctgcaacctggagcccctaaacccaaggcaaatcaacaacatcaggacaacgctcggggtcttgtgcttccgggttacaaatacctcggacccggcaacggacttgacaagggggaacccgtcaacgcagcggacgcggcagccctcgaacacgacaaggcctacgaccagcagctcaaggccggtgacaacccctacctcaagtacaaccacgccgacgccgagtttcaggagcgtcttcaagaagatacgtcttttgggggcaacctcggacgagcagtcttccaggccaaaaagaggatccttgagcctctgggtctggttgaggaagcggctaagacggctcctggaaaaaagagacctgtagagcaatctccagcagaaccggactcctcttcgggcatcggcaaatcaggccagcagcccgctagaaaaagactgaattttggtcagactggcgacacagagtcagtcccagaccctcaaccactcggacaacctcccgcagccccctctggtgtgggatctactacaatggcttcaggcggtggcgcaccaatggcagacaataacgagggtgccgatggagtgggtaattcctcaggaaattggcattgcgattcccaatggctgggcgacagagtcatcaccaccagcacccgcacctgggccctgcccacctacaacaatcacctctacaagcaaatctccagccaatcaggagccaccaacgacaaccactactttggctacagcaccccctgggggtattttgacttcaacagattccactgccacttttcaccacgtgactggcaaagactcatcaacaacaactggggattccgacccaagagactcaacttcaagctctttaacattcaagtcaaagaggtcacgcagaatgacggtacgacgacgattgccaataaccttaccagcacggttcaggtgtttactgactccgagtaccagctcccgtacgtcctcggctcggcgcatcagggatgcctcccgccgttcccagcagacgtcttcatggtcccacagtatggatacctcaccctgaacaacgggagtcaggcggtaggacgctcttccttttactgcctggagtactttccttctcagatgctgcgtactggaaacaactttcagtttagctacacttttgaagacgtgcctttccacagcagctacgctcacagccaaagtctggaccgtctcatgaatcctctgatcgaccagtacctgtactatctgaacaggacacaaacagccagtggaactcagcagtctcggctactgtttagccaagctggacccaccagtatgtctcttcaagctaaaaactggctgcctggaccttgctacagacagcagcgtctgtcaaagcaggcaaacgacaacaacaacagcaactttccctggactggtgccaccaaatatcatctgaatggccgggactcattggtgaacccgggccctgctatggccagtcacaaggatgacaaagaaaagtttttccccatgcatggaaccctgatatttggtaaagaaggaacaaatgccaacaacgcggatttggaaaatgtcatgattacagatgaagaagaaatccgcaccaccaatcccgtggctacggagcagtacgggactgtgtcaaataatttgcaaaactcaaacgctggtccaactactggaactgtcaatcaccaaggagcgttacctggtatggtgtggcaggatcgagacgtgtacctgcagggacccatttgggccaagattcctcacaccgatggacactttcatccttctccactgatgggaggttttgggctcaaacacccgcctcctcagatcatgatcaaaaacactcccgttccagccaatcctcccacaaactttagtgcggcaaagtttgcttccttcatcacacagtactccacggggcaggtcagcgtggagatcgagtgggagctgcagaaggagaacagcaaacgctggaatcccgaaattcagtacacttccaactacaacaaatctgttaatgtggactttactgtggacactaatggtgtgtattcagagcctcgccccattggcaccagatacctgactcgtaatctgtaa

SEQ ID NO: 943 - DNA, 2211 bp, Artificial Sequence
  source: /note="Description of Artificial Sequence: Synthetic polynucleotide"
atggctgccgatggttatcttccagattggctcgaggacaacctctctgagggcattcgcgagtggtgggacttgaaacctggagccccgaaacccaaagccaaccagcaaaagcaggacgacggccggggtctggtgcttcctggctacaagtacctcggacccttcaacggactcgacaagggggagcccgtcaacgcggcggacgcagcggccctcgagcacgacaaggcctacgaccagcagctcaaagcgggtgacaatccgtacctgcggtataaccacgccgacgccgagtttcaggagcgtctgcaagaagatacgtcttttgggggcaacctcgggcgagcagtcttccaggccaagaagcgggttctcgaaccttttggtctggttgaggaaggcgctaagacggctcctggaaagaaacgtccggtagagcagtcgccacaagagccagactcctcctcgggcatcggcaagacaggccagcagcccgctaaaaagagactcaattttggtcagactggcgactcagagtcagtccccgacccacaacctctcggagaacctccagcaacccccgctgctgtgggacctactacaatggcttcaggcggtggcgcaccaatggcagacaataacgaaggcgccgacggagtgggtaatgcctcaggaaattggcattgcgattccacatggctgggcgacagagtcatcaccaccagcacccgcacctgggccttgcccacctacaataaccacctctacaagcaaatctccagtgcttcaacgggggccagcaacgacaaccactacttcggctacagcaccccctgggggtattttgatttcaacagattccactgccacttttcaccacgtgactggcagcgactcatcaacaacaattggggattccggcccaagagactcaacttcaagctcttcaacatccaagtcaaggaggtcacgacgaatgatggcgtcacaaccatcgctaataaccttaccagcacggttcaagtcttctcggactcggagtaccagcttccgtacgtcctcggctctgcgcaccagggctgcctccctccgttcccggcggacgtgttcatgattccgcaatacggctacctgacgctcaacaatggcagccaagccgtgggacgttcatccttttactgcctggaatatttcccttctcagatgctgagaacgggcaacaactttaccttcagctacacctttgaggaagtgcctttccacagcagctacgcgcacagccagagcctggaccggctgatgaatcctctcatcgaccaatacctgtattacctgaacagaactcaaaatcagtccggaagtgcccaaaacaaggacttgctgtttagccgtgggtctccagctggcatgtctgttcagcccaaaaactggctacctggaccctgttatcggcagcagcgcgtttctaaaacaaaaacagacaacaacaacagcaattttacctggactggtgcttcaaaatataacctcaatgggcgtgaatccatcatcaaccctggcactgctatggcctcacacaaagacgacgaagacaagttctttcccatgagcggtgtcatgatttttggaaaagagagcgccggagcttcaaacactgcattggacaatgtcatgattacagacgaagaggaaattaaagccactaaccctgtggccaccgaaagatttgggaccgtggcagtcaatttccagagcagcagcacagaccctgcgaccggagatgtgcatgttatgggagcattacctggcatggtgtggcaagatagagacgtgtacctgcagggtcccatctgggccaaaattcctcacacagatggacactttcacccgtctcctcttatgggcggctttggactcaagcacccgcctcctcagatcctcatcaaaaacacgcctgttcctgcgaatcctccggcggagttttcagctacaaagtttgcttcattcatcacccaatactccacaggacaagtgagtgtggaaattgaatgggagctgcagaaagaaaacagcaagcgctggaatcccgaagtgcagtacacatccaattatgcaaaatctgccaacgttgattttaccgtggacaacaatggactttatactgagcctcgccccattggcacccgttaccttacccgtcccctgtaa

SEQ ID NO: 944 - DNA, 2211 bp, Artificial Sequence
  source: /note="Description of Artificial Sequence: Synthetic polynucleotide"
atggctgccgatggttatcttccagattggctcgaggacaacctctctgagggcattcgcaagtggtgggacttgaaacctggagccccgaaacccaaagccaaccagcaaaagcaggacgacggccggggtctggtgcttcctggctacaagtacctcggacccttcaacggactcgacaagggggagcccgtcaacgcggcggacgcagcggccctcgagcacgacaaggcctacgaccagcagctcaaagcgggtgacaatccgtacctgcggtataaccacgccgacgccgagtttcaggagcgtctgcaagaagatacgtcttttgggggcaacctcgggagagcagtcttccaggccaagaagcgggttctcgaaccttttggtctggttgaggaaggcgctaagacggctcctggaaagaaacgtccggtagagcagtcgccacaagagccagactcctcctcgggcatcggcaagacaggccagcagcccgctaaaaagagactcaattttggtcagactggcgactcagagtcagtccccgacccacaacctctcggagaacctccagcaacccccgctgctgtgggacctactacaatggcttcaggcggtggcgcaccaatggcagacaataacgaaggcgccgacggagtgggtaatgcctcaggaaattggcattgcgattccacatggctgggcgacagagtcatcaccaccagcacccgcacctgggccttgcccacctacaataaccacctctacaagcaaatctccagtgcttcaacgggggccagcaacgacaaccactacttcggctacagcaccccctgggggtattttgatttcaacagattccactgccacttttcaccacgtgactggcagcgactcatcaacaacaattggggattccggcccaagagactcaacttcaagctcttcaacatccaagtcaaggaggtcacgacgaatgatggcgtcacaaccatcgctaataaccttaccagcacggttcaagtcttctcggactcggagtaccagcttccgtacgtcctcggctctgcgcaccagggctgcctccctccgttcccggcggacgtgttcatgattccgcaatacggctacctgacgctcaacaatggcagccaagccgtgggacgttcatccttttactgcctggaatatttcccttctcagatgctgagaacgggcaacaactttaccttcagctacacctttgaggaagtgcctttccacagcagctacgcgcacagccagagcctggaccggctgatgaatcctctcatcgaccaatacctgtattacctgaacagaactcaaaatcagtccggaagtgcccaaaacaaggacttgctgtttagccgtgggtctccagctggcatgtctgttcagcccaaaaactggctacctggaccctgttatcggcagcagcgcgtttctaaaacaaaaacagacaacaacaacagcaattttacctggactggtgcttcaaaatataacctcaatgggcgtgaatccatcatcaaccctggcactgctatggcctcacacaaagacgacaaagacaagttctttcccatgagcggtgtcatgatttttggaaaagagagcgccggagcttcaaacactgcattggacaatgtcatgattacagacgaagaggaaattaaagccactaaccctgtggccaccgaaagatttgggaccgtggcagtcaatttccagagcagcagcacagaccctgcgaccggagatgtgcatgttatgggagcattacctggcatggtgtggcaagatagagacgtgtacctgcagggtcccatttgggccaaaattcctcacacagatggacactttcacccgtctcctcttatgggcggctttggactcaagcacccgcctcctcagatcctcatcaaaaacacacctgttcctgcgaatcctccggcggagttttcagctacaaagtttgcttcattcatcacccaatactccacaggacaagtgagtgtggaaattgaatgggagctgcagaaagaaaacagcaagcgctggaatcccgaagtgcagtacacatccaattatgcaaaatctgccaacgttgattttaccgtggacaacaatggactttatactgagcctcgccccattggcacccgttaccttacccgtcccctgtaa

SEQ ID NO: 945 - DNA, 2211 bp, Artificial Sequence
  source: /note="Description of Artificial Sequence: Synthetic polynucleotide"
atggctgccgatggttatcttccagattggctcgaggacaacctctctgagggcattcgcgagtggtgggacttgaaacctggagccccgaaacccaaagccaaccagcaaaagcaggacaacggccggggtctggtgcttcctggctacaagtacctcggacccttcaacggactcgacaagggggagcccgtcaacgcggcggacgcagcggccctcgagcacgacaaggcctacgaccagcagctcaaagcgggtgacaatccgtacctgcggtataaccacgccgacgccgagtttcaggagcgtctgcaagaagatacgtcttttgggggcaacctcgggcgagcagtcttccaggccaagaagcgggttctcgaaccttttggtctggttgaggaaggcgctaagacggctcctggaaagaaacgtccggtagagcagtcgccacaagagccagactcctcctcgggcatcggcaagacaggccagcagcccgctaaaaagagactcaattttggtcagactggcgactcagagtcagtccccgacccacaacctctcggagaacctccagcaacccccgctgctgtgggacctactacaatggcttcaggcggtggcgcaccaatggcagacaataacgaaggcgccgacggagtgggtaatgcctcaggaaattggcattgcgattccacatggctgggcgacagagtcatcaccaccagcacccgcacctgggccttgcccacctacaataaccacctctacaagcaaatctccagtgcttcaacgggggccagcaacgacaaccactacttcggctacagcaccccctgggggtattttgatttcaacagattccactgccacttttcaccacgtgactggcagcgactcatcaacaacaattggggattccggcccaagagactcaacttcaagctcttcaacatccaagtcaaggaggtcacgacgaatgatggcgtcacaaccatcgctaataaccttaccagcacggttcaagtcttctcggactcggagtaccagcttccgtacgtcctcggctctgcgcaccagggctgcctccctccgttcccggcggacgtgttcatgattccgcaatacggctacctgacgctcaacaatggcagccaagccgtgggacgttcatccttttactgcctggaatatttcccttctcagatgctgagaacgggcaacaactttaccttcagctacacctttgaggaagtgcctttccacagcagctacgcgcacagccagagcctggaccggctgatgaatcctctcatcgaccaatacctgtattacctgaacagaactcaaaatcagtccggaagtgcccaaaacaaggacttgctgtttagccgtgggtctccagctggcatgtctgttcagcccaaaaactggctacctggaccctgttatcggcagcagcgcgtttctaaaacaaaaacagacaacaacaacagcaattttacctggactggtgcttcaaaatataacctcaatgggcgtgaatccatcatcaaccctggcactgctatggcctcacacaaagacgacgaagacaagttctttcccatgagcggtgtcatgatttttggaaaagagagcgccggagcttcaaacactgcattggacaatgtcatgattacagacgaagaggaaattaaagccactaaccctgtggccaccgaaagatttgggaccgtggcagtcaatttccagagcagcagcacacaccctgcgaccggagatgtgcatgttatgggagcattacctggcatggtgtggcaagatagagacgtgtacctgcagggtcccatctgggccaaaattcctcacacagatggacactttcacccgtctcctcttatgggcggctttggactcaagcacccgcctcctcagatcctcatcaaaaacacgcctgttcctgcgaatcctccggcggagttttcagctacaaagtttgcttcattcatcacccaatactccacaggacaagtgagtgtggaaattgaatgggagctgcagaaagaaaacagcaagcgctggaatcccgaagtgcagtacacatccaattatgcaaaatctgccaacgttgattttaccgtggacaacaatggactttatactgagcctcgccccattggcacccgttaccttacccgtcccctgtaa

SEQ ID NO: 946 - DNA, 2211 bp, Artificial Sequence
  source: /note="Description of Artificial Sequence: Synthetic polynucleotide"
atggctgccgatggttatcttccagattggctcgaggacaacctctctgagggcattcgcgagtggtgggacttgaaacctggagccccgaaacccaaagccaaccagcaaaagcaggacgacggccggggtctggtgcttcctggctacaagtacctcggacccttcaacggactcgacaagggggagcccgtcaacgcggcggacgcagcggccctcgagcacgacaaggcctacgaccagcagctcaaagcgggtgacaatccgtacctgcggtataaccacgccgacgccgagtttcaggagcgtctgcaagaagatacgtcttttgggggcaacctcgggcgagcagtcttccaggccaaaaagcgggttctcgaaccttttggtctggttgaggaaggcgctaagacggctcctggaaagaaacgtccggtagagcagtcgccacaagagccagactcctcctcgggcatcggcaagacaggccagcagcccgctaaaaagagactcaattttggtcagactggcgactcagagtcagtccccgacccacaacctctcggagaacctccagcaacccccgctgctgtgggacctactacaatggcttcaggcggtggcgcaccaatggcagacaataacgaaggcgccgacggagtgggtaatgcctcaggaaattggcattgcgattccacatggctgggcgacagagtcatcaccaccagcacccgcacctgggccttgcccacctacaataaccacctctacaagcaaatctccagtgcttcaacgggggccagcaacgacaaccactacttcggctacagcaccccctgggggtattttgatttcaacagattccactgccacttttcaccacgtgactggcagcgactcatcaacaacaattggggattccggcccaagagactcaacttcaagctcttcaacatccaagtcaaggaggtcacgacgaatgatggcgtcacaaccatcgctaataaccttaccagcacggttcaagtcttctcggactcggagtaccagcttccgtacgtcctcggctctgcgcaccagggctgcctccctccgttcccggcggacgtgttcatgattccgcaatacggctacctgacgctcaacaatggcagccaagccgtgggacgttcatccttttattgcctggaatatttcccatcgcagatgctgagaacgggcaataactttaccttcagctacacctttgaggacgtgcctttccacagcagctacgcgcacagccagagcctggaccggctgatgaatcctctcatcgaccagtacctgtattacctgaacagaactcagaaccagtccggaagtgcccaaaacaaggacttgctgtttagccgggggtctccagctggcatgtctgttcagctcaaaaactggctacctggaccctgttatcggcagcagcgcgtttctaaaacaaaaacagacaacaacaacagcaattttacctggactggtgcttcaaaatataaccttaatgggcgtgaatccatcatcaaccctggcactgctatggcctcacacaaagacgacgaagacaagttctttcccatgagcggtgtcatgatttttggaaaagagagcgccggagcttcaaacactgcattggacaatgtcatgattacagacgaagaggaaattaaagccactaaccctgtggccaccgaaagatttgggaccgtggcagtcaatttccagagcagcagcacagaccctgcgaccggagatgtgcatgttatgggagcattacctggcatggtgtggcaagatagagacgtgtacctgcagggtcccatttgggccaaaattcctcacacagatggacactttcacccgtctcctcttatgggcggctttggactcaaacacccgcctcctcagatcctcatcaaaaacacacctgttcctgcgaatcctccggcggagttttcagctacaaagtttgcttcattcatcacccaatactccacaggacaagtgagcgtggaaattgaatgggagctgcagaaagaaaacagcaagcgctggaatcccgaagtgcagtacacatccaattatgcaaaatctgccaacgttgattttaccgtggacaacaatggactttatactgagcctcgccccattggcacccgttaccttacccgtcccctgtaa

SEQ ID NO: 947 - DNA, 2211 bp, Artificial Sequence
  source: /note="Description of Artificial Sequence: Synthetic polynucleotide"
atggctgccgatggttatcttccagattggctcgaggacaacctctctgagggcattcgcgagtggtgggacttgaaacctggagccccgaaacccaaagccaaccagcaaaagcaggacgacggccggggtctggtgcttcctggctacaagtacctcggacccttcaacggactcgacaagggggagcccgtcaacgcggcggacgcagcggccctcgagcacgacaaggcctacgaccagcagctcaaagcgggtgacaatccgtacctgcggtataaccacgccgacgccgagtttcaggagcgtctgcaagaagatacgtcttttgggggcaacctcgggcgagcagtcttccaggccaagaagcgggttctcgaaccttttggtctggttgaggaaggtgctaagacggctcctggaaagaagagaccggtagagcagtcgccccaagaaccagactcctcatcgggcatcggcaaatcaggccagcagcccgctaaaaagagactcaattttggtcagactggcgactcagagtcagtccccgacccacaacctctcggagaacctccagcaacccccgctgctgtgggacctactacaatggcttcaggcggtggcgcaccaatggcagacaataacgaaggcgccgacggagtgggtaatgcctcaggaaattggcattgcgattccacatggctgggcgacagagtcattaccaccagcacccgaacctgggccctgcccacctataacaaccacctctacaaacaaatctccagcgcttcaacgggggccagcaacgacaaccactacttcggctacagcaccccctgggggtattttgattttaacagattccactgccacttctcaccacgtgactggcagcgactcatcaacaacaattggggattccggcccaagagactcaacttcaagctcttcaacatccaagtcaaggaggtcacgacgaacgatggcgtcacgaccatcgctaataaccttaccagcacggttcaagtcttctcggactcggagtaccagttgccgtacgtcctcggctctgcgcaccagggctgcctccctccgttcccggcggacgtgttcatgattccgcagtacggctacctaacactcaacaatggcagccaggccgtgggacgttcatccttttactgcctggaatatttcccatcgcagatgctgagaacgggcaataactttaccttcagctacacattcgaggacgtgcctttccacagcagctacgcgcacagccaaagcctggaccggctgatgaatcctctcatcgaccagtacttgtattacctaaacagaactcaaaatcagtccggaagtgcccaaaacaaggacttgctgtttagccgggggtctccagctggcatgtctgttcagcccaaaaactggctacctggaccctgttatcggcagcagcgcgtttctaaaacaaaaacagacaacaacaacagcaactttacctggactggtgcttcaaaatataaccttaatgggcgtgaatctataatcaaccctggcactgctatggcttcacacaaagacgacgaagacaagttctttccaatgagcggtgtcatgatttttggcaaggagagcgccggagcttcaaacactgcattggacaatgtcatgattacagacgaagaggaaattaaagccactaaccctgtggccaccgaaagatttgggaccgtggcagtcaatttccagagcagcagcacagaccctgcgaccggagatgtgcatgttatgggagcattacctggcatggtgtggcaagatagagacgtgtacctgcagggtccaatttgggccaaaattcctcacacagatggacactttcacccgtctcctcttatgggcggctttggacttaagcacccgcctcctcagatcctcatcaaaaacacgcctgttcctgcgaatcctccggcagagttttcggctacaaagtttgcttcattcatcacccagtattccacaggacaagtgagtgtggaaattgaatgggagttgcagaaagaaaacagcaagcgttggaatcccgaagtgcagtacacatctaattatgcaaaatctgccaacgttgatttcactgtggacaacaatggactttatactgagcctcgccccattggcacccgttacctcacccgtcccctgtaa

SEQ ID NO: 948 - DNA, 2211 bp, Artificial Sequence
  source: /note="Description of Artificial Sequence: Synthetic polynucleotide"
atggctgccgatggttatcttccagattggctcgaggacaacctctctgagggcattcgcgagtggtgggacttgaaacctggagccccgaaacccaaagccaaccagcaaaagcaggacgacggccggggtctggtgcttcctggctacaagtacctcggacccttcaacggactcgacaagggggagcccgtcaacgcggcggacgcagcggccctcgagcacgacaaggcctacgaccagcagctcaaagcgggtgacaatccgtacctgcggtataaccacgccgacgccgagtttcaggagcgtctgcaagaagatacgtcttttgggggcaacctcgggcgagcagtcttccaggccaagaagagggttctcgaaccttttggtctggttgaggaaggtgctaagacggctcctggaaagaaacgtccggtagagcagtcaccccaagaaccagactcctcctcgggcattggcaaatcaggccagcagcccgctaaaaagagactcaattttggtcagactggcgactcagagtcagtccccgacccacaacctctcggagaacctccagcaacccccgctgctttgggacctactacaatggcttcaggcggtggcgcaccaatggcagacaataacgaaggcgccgacggagtgggtaatgcctcaggaaattggcattgcgattccacatggctgggcgacagagtcatcaccaccagcacccgcacctgggccttgcccacctacaataaccacctctacaagcaaatctccagtgcttcaacgggggccagcaacgacaaccactacttcggctacagcaccccctgggggtattttgatttcaacagattccactgccatttctcaccacgtgactggcagcgactcatcaacaacaactggggattccggcccaagagactcaacttcaagctcttcaacatccaagtcaaggaggtcacgacgaacgatggcgtcacgaccatcgctaataaccttaccagcacggttcaagtcttctcggactcggagtaccagcttccgtacgtcctcggctctgcgcaccagggctgcctccctccgttcccggcggacgtgttcatgattccgcagtacggctacctgacgctcaacaatggcagcaaagccgtgggacgttcatccttttactgcctggaatatttcccttctcagatgctgagaacgggcaacaactttaccttcagctacacctttgaggaagtgcctttccacagcagctacgcgcacagccagagcctggaccggctgatgaatcctctcatcgaccaatacctgtattacctgaacagaactcaaaatcagtccggaagtgcccaaaacaaggacttgctgtttagccgtgggtctccagctggcatgtctgttcagcccaaaaactggctacctggaccctgttatcggcagcagcgcgtttctaaaacaaaaacagacaacaacaacagcaattttacctggactggtgcttcaaaatataacctcaatgggcgtgaatccatcatcaaccctggcactgctatggcctcacacaaagacgacgaagacaagttctttcccatgagcggtgtcatgatttttggaaaagagagcgccggagcttcaaacactgcattggacaatgtcatgattacagacgaagaggaaattaaagccactaaccctgtggccaccgaaagatttgggaccgtggcagtcaatttccagagcagcagcacagaccctgcgaccggagatgtgcatgttatgggagcattacctggcatggtgtggcaagatagagacgtgtacctgcagggtcccatttgggccaaaattcctcacacggatggacactttcacccgtctcctcttatgggcggctttggactcaagcacccgcctcctcagatcctcatcaaaaacacacctgttcctgcgaatcctccggcagagttttcggctacaaagtttgcttcattcatcacccagtactccacaggacaagtgagcgtggaaattgaatgggagttgcagaaagaaaacagtaagcgctggaatcccgaagtgcagtacacatctaattatgcaaaatctgccaacgttgacttcactgtggacaacaatggactttatactgagcctcgccccattggcacccgttacctcacccgtcccctgtaa

SEQ ID NO: 949 - DNA, 2970 bp, Artificial Sequence
  source: /note="Description of Artificial Sequence: Synthetic polynucleotide"
agatgaccgccaaggtcgtagagtccgccaaggccattctgggcggcagcaaggtgcgcgtggaccaaaaatgcaaggcctctgcgcagatcgaccccacccccgtgatcgtcacctccaacaccaacatgtgcgccgtgattgacgggaacagcaccaccttcgagcaccagcagcccctgcaggaccggatgttcaagtttgaactcacccgccgcctcgactacgactttggcaaggtcaccaagcaggaagtcaaggactttttccggtgggcggctgatcacgtgactgacgtggctcatgagttttacgtcacaaagggtggagctaagaaaaggcccgccccctctgacgaggatataagcgagcccaagcggccgcgcgtgtcatttgcgcagccggagacgtcagacgcggaagctcccggagacttcgccgacaggtaccaaaacaaatgttctcgtcacgcgggtatgctgcagatgctctttccctgcaagacgtgcgagagaatgaatcagaattccaacgtctgcttcacgcacggtcagaaagattgcggggagtgctttcccgggtcagaatctcaaccggtttctgtcgtcagaaaaacgtatcagaaactgtgcatccttcatcagctccggggggcacccgagatcgcctgctctgcttgcgaccaactcaaccccgatttggacgattgccaatttgagcaataaatgactgaaatcaggtatggctgctgacggttatcttccagattggctcgaggacaacctctctgaaggcattcgcgagtggtgggcgctgaaacctggagctccacaacccaaggccaaccaacagcatcaggacaacggcaggggtcttgtgcttcctgggtacaagtacctcggacccttcaacggactcgacaagggagagccggtcaacgaggcagacgccgcggccctcgagcacgacaaggcctacgacaagcagctcgagcagggggacaacccgtatctcaagtacaaccacggcgacgccgagttccagcagcgcttggcgaccgacacctcttttgggggcaacctcgggcgagcagtcttccaggccaaaaagaggattctcgagcctctgggtctggttgaagagggcgttaaaacggctcctggaaagaaacgcccattagaaaagactccaaatcggccgaccaacccggactctgggaaggccccggccaagaaaaagcaaaaagacggcgaaccagccgactctgctagaaggacactcgactttgaagactctggagcaggagacggaccccctgagggatcatcttccggagaaatgtctcatgatgctgagatgcgtgcggcgccaggcggaaatgctgtcgaggcgggacaaggtgccgatggagtgggtaatgcctccggtgattggcattgcgattccacctggtcagagggccgagtcaccaccaccagcacccgaacctgggtcctacccacgtacaacaaccacctgtacctgcgaatcggaacaacggccaacagcaacacctacaacggattctccaccccctggggatactttgactttaaccgcttccactgccacttttccccacgcgactggcagcgactcatcaacaacaactggggactcaggccgaaatcgatgcgtgttaaaatcttcaacatacaggtcaaggaggtcacgacgtcaaacggcgagactacggtcgctaataaccttaccagcacggttcagatctttgcggattcgacgtatgaactcccatacgtgatggacgccggtcaggaggggagctttcctccgtttcccaacgacgtctttatggttccccaatacggatactgcggagttgtcactggaaaaaaccagaaccagacagacagaaatgccttttactgcctggaatactttccatcccaaatgctaagaactggcaacaattttgaagtcagttaccaatttgaaaaagttcctttccattcaatgtacgcgcacagccagagcctggacagaatgatgaatcctttactggatcagtacctgtggcatctgcaatcgaccactaccggaaattcccttaatcaaggaacagctaccaccacgtacgggaaaattaccactggagactttgcctactacaggaaaaactggttgcctggagcctgcattaaacaacaaaaattttcaaagaatgccaatcaaaactacaagattcccgccagcgggggagacgcccttttaaagtatgacacgcataccactctaaatgggcgatggagtaacatggctcctggacctccaatggcaaccgcaggtgccggggactcggattttagcaacagccagctgatctttgccggacccaatccgagcggtaacacgaccacatcttcaaacaatttgttgtttacctcagaagaggagattgccacaacaaacccacgagacacggacatgtttggacagattgcagataataatcaaaatgccaccaccgcccctcacatcgctaacctggacgctatgggaattgttcccggaatggtctggcaaaacagagacatctactaccagggccctatttgggccaaggtccctcacacggacggacactttcacccttcgccgctgatgggaggatttggactgaaacacccgcctccacagattttcatcaaaaacacccccgtacccgccaatcccaatactacctttagcgctgcaaggattaattcttttctgacgcagtacagcaccggacaagttgccgttcagatcgactgggaaattcagaaggagcattccaaacgctggaatcccgaagttcaatttacttcaaactacggcactcaaaattctatgctgtgggctcccgacaatgctggcaactaccacgaactccgggctattgggtcccgtttcctcacccaccacttgtaa

SEQ ID NO: 950 - protein, 736 aa, Artificial Sequence
  source: /note="Description of Artificial Sequence: Synthetic polypeptide"
MAADGYLPDWLEDNLSEGIREWWDLKPGAPKPKANQQKQDDGRGLVLPGYKYLGPFNGLDKGEPVNAADAAALEHDKAYDQQLKAGDNPYLRYNHADAEFQERLQEDTSFGGNLGRAVFQAKKRVLEPFGLVEEGAKTAPGKKRPVEQSPQEPDSSSGIGKTGQQPAKKRLNFGQTGDSESVPDPQPLGEPPATPAAVGPTTMASGGGAPMADNNEGADGVGNASGNWHCDSTWLGDRVITTSTRTWALPTYNNHLYKQISSASTGASNDNHYFGYSTPWGYFDFNRFHCHFSPRDWQRLINNNWGFRPKRLNFKLFNIQVKEVTTSDGVTTIANNLTSTVQVFSDSEYQLPYVLGSAHQGCLPPFPADVFMIPQYGYLTLNNGSQAVGRSSFYCLEYFPSQMLRTGNNFTFSYTFEEVPFHSSYAHSQSLDRLMNPLIDQYLYYLNRTQNQSGSAQNKDLLFSRGSPAGMSVQPKNWLPGPCYRQQRVSKTKTGNNNSNFTWTGASKYNLNGHESIINPGTAMASHKDDEDKFFPMSGVMIFGKESAGASNTALDNVMITDEEEIKATNPVATERFGTVAVNFQSSSTHPATGDVHVMGALPGMVWQDRDVYLQGPIWAKIPHTDGHFHPSPLMGGFGLKHPPPQILIKNTPVPANPPAEFSATKFASFITQYSTGQVSVEIEWELQKENSKRWNPEVQYTSNYAKSANVDFTVDNNGLYTEPRPIGTRYLTRPL

SEQ ID NO: 951 - protein, 736 aa, Artificial Sequence; identical to SEQ ID NO: 950
  source: /note="Description of Artificial Sequence: Synthetic polypeptide"

SEQ ID NO: 952 - protein, 733 aa, Artificial Sequence
  source: /note="Description of Artificial Sequence: Synthetic polypeptide"
MTDGYLPDWLEDNLSEGVREWWALQPGAPKPKANQQHQDNARGLVLPGYKYLGPGNGLDKGEPVNAADAAALEHDKAYDQQLKAGDNPYLKYNHADAEFQERLQEDTSFGGNLGRAVFQAKKRILEPLGLVEEAAKTAPGKKRPVEQSPAEPDSSSGIGKSGQQPARKRLNFGQTGDTESVPDPQPLGQPPAAPSGVGSTTMASGGGAPMADNNEGADGVGNSSGNWHCDSQWLGDRVITTSTRTWALPTYNNHLYKQISSQSGATNDNHYFGYSTPWGYFDFNRFHCHFSPRDWQRLINNNWGFRPKRLNFKLFNIQVKEVTQNDGTTTIANNLTSTVQVFTDSEYQLPYVLGSAHQGCLPPFPADVFMVPQYGYLTLNNGSQAVGRSSFYCLEYFPSQMLRTGNNFQFSYTFEDVPFHSSYAHSQSLDRLMNPLIDQYLYYLNRTQTASGTQQSRLLFSQAGPTSMSLQAKNWLPGPCYRQQRLSKQANDNNNSNFPWTGATKYHLNGRDSLVNPGPAMASHKDDKEKFFPMHGTLIFGKEGTNANNADLENVMITDEEEIRTTNPVATEQYGTVSNNLQNSNAGPTTGTVNHQGALPGMVWQDRDVYLQGPIWAKIPHTDGHFHPSPLMGGFGLKHPPPQIMIKNTPVPANPPTNFSAAKFASFITQYSTGQVSVEIEWELQKENSKRWNPEIQYTSNYNKSVNVDFTVDTNGVYSEPRPIGTRYLTRNL

SEQ ID NO: 953 - protein, 736 aa, Artificial Sequence; identical to SEQ ID NO: 768
  source: /note="Description of Artificial Sequence: Synthetic polypeptide"

SEQ ID NO: 954 - protein, 736 aa, Artificial Sequence
  source: /note="Description of Artificial Sequence: Synthetic polypeptide"
MAADGYLPDWLEDNLSEGIRKWWDLKPGAPKPKANQQKQDDGRGLVLPGYKYLGPFNGLDKGEPVNAADAAALEHDKAYDQQLKAGDNPYLRYNHADAEFQERLQEDTSFGGNLGRAVFQAKKRVLEPFGLVEEGAKTAPGKKRPVEQSPQEPDSSSGIGKTGQQPAKKRLNFGQTGDSESVPDPQPLGEPPATPAAVGPTTMASGGGAPMADNNEGADGVGNASGNWHCDSTWLGDRVITTSTRTWALPTYNNHLYKQISSASTGASNDNHYFGYSTPWGYFDFNRFHCHFSPRDWQRLINNNWGFRPKRLNFKLFNIQVKEVTTNDGVTTIANNLTSTVQVFSDSEYQLPYVLGSAHQGCLPPFPADVFMIPQYGYLTLNNGSQAVGRSSFYCLEYFPSQMLRTGNNFTFSYTFEEVPFHSSYAHSQSLDRLMNPLIDQYLYYLNRTQNQSGSAQNKDLLFSRGSPAGMSVQPKNWLPGPCYRQQRVSKTKTDNNNSNFTWTGASKYNLNGRESIINPGTAMASHKDDKDKFFPMSGVMIFGKESAGASNTALDNVMITDEEEIKATNPVATERFGTVAVNFQSSSTDPATGDVHVMGALPGMVWQDRDVYLQGPIWAKIPHTDGHFHPSPLMGGFGLKHPPPQILIKNTPVPANPPAEFSATKFASFITQYSTGQVSVEIEWELQKENSKRWNPEVQYTSNYAKSANVDFTVDNNGLYTEPRPIGTRYLTRPL

SEQ ID NO: 955 - protein, 736 aa, Artificial Sequence
  source: /note="Description of Artificial Sequence: Synthetic polypeptide"
MAADGYLPDWLEDNLSEGIREWWDLKPGAPKPKANQQKQDNGRGLVLPGYKYLGPFNGLDKGEPVNAADAAALEHDKAYDQQLKAGDNPYLRYNHADAEFQERLQEDTSFGGNLGRAVFQAKKRVLEPFGLVEEGAKTAPGKKRPVEQSPQEPDSSSGIGKTGQQPAKKRLNFGQTGDSESVPDPQPLGEPPATPAAVGPTTMASGGGAPMADNNEGADGVGNASGNWHCDSTWLGDRVITTSTRTWALPTYNNHLYKQISSASTGASNDNHYFGYSTPWGYFDFNRFHCHFSPRDWQRLINNNWGFRPKRLNFKLFNIQVKEVTTNDGVTTIANNLTSTVQVFSDSEYQLPYVLGSAHQGCLPPFPADVFMIPQYGYLTLNNGSQAVGRSSFYCLEYFPSQMLRTGNNFTFSYTFEEVPFHSSYAHSQSLDRLMNPLIDQYLYYLNRTQNQSGSAQNKDLLFSRGSPAGMSVQPKNWLPGPCYRQQRVSKTKTDNNNSNFTWTGASKYNLNGRESIINPGTAMASHKDDEDKFFPMSGVMIFGKESAGASNTALDNVMITDEEEIKATNPVATERFGTVAVNFQSSSTHPATGDVHVMGALPGMVWQDRDVYLQGPIWAKIPHTDGHFHPSPLMGGFGLKHPPPQILIKNTPVPANPPAEFSATKFASFITQYSTGQVSVEIEWELQKENSKRWNPEVQYTSNYAKSANVDFTVDNNGLYTEPRPIGTRYLTRPL

SEQ ID NO: 956 - protein, 736 aa, Artificial Sequence
  source: /note="Description of Artificial Sequence: Synthetic polypeptide"
MAADGYLPDWLEDNLSEGIREWWDLKPGAPKPKANQQKQDDGRGLVLPGYKYLGPFNGLDKGEPVNAADAAALEHDKAYDQQLKAGDNPYLRYNHADAEFQERLQEDTSFGGNLGRAVFQAKKRVLEPFGLVEEGAKTAPGKKRPVEQSPQEPDSSSGIGKTGQQPAKKRLNFGQTGDSESVPDPQPLGEPPATPAAVGPTTMASGGGAPMADNNEGADGVGNASGNWHCDSTWLGDRVITTSTRTWALPTYNNHLYKQISSASTGASNDNHYFGYSTPWGYFDFNRFHCHFSPRDWQRLINNNWGFRPKRLNFKLFNIQVKEVTTNDGVTTIANNLTSTVQVFSDSEYQLPYVLGSAHQGCLPPFPADVFMIPQYGYLTLNNGSQAVGRSSFYCLEYFPSQMLRTGNNFTFSYTFEDVPFHSSYAHSQSLDRLMNPLIDQYLYYLNRTQNQSGSAQNKDLLFSRGSPAGMSVQLKNWLPGPCYRQQRVSKTKTDNNNSNFTWTGASKYNLNGRESIINPGTAMASHKDDEDKFFPMSGVMIFGKESAGASNTALDNVMITDEEEIKATNPVATERFGTVAVNFQSSSTDPATGDVHVMGALPGMVWQDRDVYLQGPIWAKIPHTDGHFHPSPLMGGFGLKHPPPQILIKNTPVPANPPAEFSATKFASFITQYSTGQVSVEIEWELQKENSKRWNPEVQYTSNYAKSANVDFTVDNNGLYTEPRPIGTRYLTRPL

SEQ ID NO: 957 - protein, 736 aa, Artificial Sequence
  source: /note="Description of Artificial Sequence: Synthetic polypeptide"
MAADGYLPDWLEDNLSEGIREWWDLKPGAPKPKANQQKQDDGRGLVLPGYKYLGPFNGLDKGEPVNAADAAALEHDKAYDQQLKAGDNPYLRYNHADAEFQERLQEDTSFGGNLGRAVFQAKKRVLEPFGLVEEGAKTAPGKKRPVEQSPQEPDSSSGIGKSGQQPAKKRLNFGQTGDSESVPDPQPLGEPPATPAAVGPTTMASGGGAPMADNNEGADGVGNASGNWHCDSTWLGDRVITTSTRTWALPTYNNHLYKQISSASTGASNDNHYFGYSTPWGYFDFNRFHCHFSPRDWQRLINNNWGFRPKRLNFKLFNIQVKEVTTNDGVTTIANNLTSTVQVFSDSEYQLPYVLGSAHQGCLPPFPADVFMIPQYGYLTLNNGSQAVGRSSFYCLEYFPSQMLRTGNNFTFSYTFEDVPFHSSYAHSQSLDRLMNPLIDQYLYYLNRTQNQSGSAQNKDLLFSRGSPAGMSVQPKNWLPGPCYRQQRVSKTKTDNNNSNFTWTGASKYNLNGRESIINPGTAMASHKDDEDKFFPMSGVMIFGKGSAGASNTALDNVMITDEEEIKATNPVATERFGTVAVNFQSSSTDPATGDVHVMGALPGMVWQDRDVYLQGPIWAKIPHTDGHFHPSPLMGGFGLKHPPPQILIKNTPVPANPPAEFSATKFASFITQYSTGQVSVEIEWELQKENSKRWNPEVQYTSNYAKSANVDFTVDNNGLYTEPRPIGTRYLTRPL

SEQ ID NO: 958 - protein, 736 aa, Artificial Sequence; identical to SEQ ID NO: 699
  source: /note="Description of Artificial Sequence: Synthetic polypeptide"

SEQ ID NO: 959 - protein, 742 aa, Artificial Sequence
  source: /note="Description of Artificial Sequence: Synthetic polypeptide"
MAADGYLPDWLEDNLSEGIREWWALKPGAPQPKANQQHQDNGRGLVLPGYKYLGPFNGLDKGEPVNEADAAALEHDKAYDKQLEQGDNPYLKYNHADAEFQQRLATDTSFGGNLGRAVFQAKKRILEPLGLVEEGVKTAPGKKRPLEKTPNRPTNPDSGKAPAKKKQKDGEPADSARRTLDFEDSGAGDGPPEGSSSGEMSHDAEMRAAPGGNAVEAGQGADGVGNASGDWHCDSTWSEGRVTTTSTRTWVLPTYNNHLYLRIGTTANSNTYNGFSTPWGYFDFNRFHCHFSPRDWQRLINNNWGLRPKSMRVKIFNIQVKEVTTSNGETTVANNLTSTVQIFADSTYELPYVMDAGQEGSFPPFPNDVFMVPQYGYCGVVTGKNQNQTDRNAFYCLEYFPSQMLRTGNNFEVSYQFEKVPFHSMYAHSQSLDRMMNPLLDQYLWHLQSTTTGNSLNQGTATTTYGKITTGDFAYYRKNWLPGACIKQQKFSKNANQNYKIPASGGDALLKYDTHTTLNGRWSNMAPGPPMATAGAGDSDFSNSQLIFAGPNPSGNTTTSSNNLLFTSEEEIATTNPRDTDMFGQIADNNQNATTAPHIANLDAMGIVPGMVWQNRDIYYQGPIWAKVPHTDGHFHPSPLMGGFGLKHPPPQIFIKNTPVPANPNTTFSAARINSFLTQYSTGQVAVQIDWEIQKEHSKRWNPEVQFTSNYGTQNSMLWAPDNAGNYHELRAIGSRFLTHHL

SEQ ID NO: 960 - DNA, 2211 bp, Artificial Sequence
  source: /note="Description of Artificial Sequence: Synthetic polynucleotide"
atggctgccgatggttatcttccagattggctcgaggacaacctctctgagggcattcgcgagtggtgggacttgaaacctggagccccgaagcccaaagccaaccagcaaaagcaggacgacggccggggtctggtgcttcctggctacaagtacctcggacccttcaacggactcgacaagggggagcccgtcaacgcggcggacgcagcggccctcgagcacgacaaggcctacgaccagcagctcaaagcgggtgacaatccgtacctgcggtataaccacgccgacgccgagtttcaggagcgtctgcaagaagatacgtcttttgggggcaacctcgggcgagcagtcttccaggccaagaagcgggttctcgaacctctcggtctggttgaggaaggcgctaaggcggctcctggaaagaaacgtccggtagagcagtcgccacaagagccagactcctcctcgggcatcggcaagacaggccagcagcccgctaaaaagagactcaattttggtcagactggcgactcagagtcagtccccgatccacaacctctcggagaacctccagcagccccctcaggtctgggacctaatacaatggcttcaggcggtggcgctccaatggcagacaataacgaaggcgccgacggagtgggtaattcctcgggaaattggcattgcgattccacatggctgggggacagagtcatcaccaccagcacccgaacctgggccctgcccacctacaacaaccacctctacaagcaaatctccaacggcacctcgggaggaagcaccaacgacaacacctattttggctacagcaccccctgggggtattttgacttcaacagattccactgtcacttttcaccacgtgactggcaacgactcatcaacaacaattggggattccggcccaaaagactcaacttcaagctgttcaacatccaggtcaaggaagtcacgacgaacgaaggcaccaagaccatcgccaataatctcaccagcaccgtgcaggtctttacggactcggagtaccagttaccgtacgtgctaggatccgctcaccagggatgtctgcctccgttcccggcggacgtcttcatggttcctcagtacggctatttaactttaaacaatggaagccaagccctgggacgttcctccttctactgtctggagtatttcccatcgcagatgctgagaaccggcaacaactttcagttcagctacaccttcgaggacgtgcctttccacagcagctacgcgcacagccagagcctggacaggctgatgaatcccctcatcgaccagtacctgtactacctggtcagaacgcaaacgactggaactggagggacgcagactctggcattcagccaagcgggtcctagctcaatggccaaccaggctagaaattgggtgcccggaccttgctaccggcagcagcgcgtctccacgacaaccaaccagaacaacaacagcaactttgcctggacgggagctgccaagtttaagctgaacggccgagactctctaatgaatccgggcgtggcaatggcttcccacaaggatgacgacgaccgcttcttcccttcgagcggggtcctgatttttggcaagcaaggagccgggaacgatggagtggattacagccaagtgctgattacagatgaggaagaaatcaaggctaccaaccccgtggccacagaagaatatggagcagtggccatcaacaaccaggccgccaatacgcaggcgcagaccggactcgtgcacaaccagggggtgattcccggcatggtgtggcagaatagagacgtgtacctgcagggtcccatctgggccaaaattcctcacacggacggcaactttcacccgtctcccctgatgggcggctttggactgaagcacccgcctcctcaaattctcatcaagaacacaccggttccagcggacccgccgcttaccttcaaccaggccaagctgaactctttcatcacgcagtacagcaccggacaggtcagcgtggaaatcgagtgggagctgcagaaagaaaacagcaaacgctggaatccagagattcaatacacttccaactactacaaatctacaaatgtggactttgctgtcaacacggagggggtttatagcgagcctcgccccattggcacccgttacctcacccgcaacctgtaa

SEQ ID NO: 961 - DNA, 2592 bp, Artificial Sequence
  source: /note="Description of Artificial Sequence: Synthetic polynucleotide"
ctggctgccgatggttatcttccagattggctcgaggacaacctctctgagggcattcgcgagtggtgggacttgaaacctggagccccgaagcccaaagccaaccagcaaaagcaggacgacggccggggtctggtgcttcctggctacaagtacctcggacccttcaacggactcgacaagggggagcccgtcaacgcggcggacgcagcggccctcgagcacgacaaggcctacgaccagcagctcaaagcgggtgacaatccgtacctgcggtataaccacgccgacgccgagtttcaggagcgtctgcaagaagatacgtcttttgggggcaacctcgggcgagcagtcttccaggccaagaagcgggttctcgaacctctcggtctggttgaggaaggcgctaagatggaagtgcagctccaagccagtggtggcggactggtgcaggcaggaggcagcttgaggctcagctgtgccgccagcggcttcaagatcacccactacaccatgggctggttccggcaggcccctggcaaggagagggagttcgtgagcaggattacctggggtggtgacaacaccttctacagcaacagcgtgaagggcaggttcaccatcagcagggacaacgccaagaacaccgtgtacctgcagatgaacagcctgaagcccgaggacaccgccgactactactgtgcagccggcagtaccagcaccgctacccccctgagggtggactactggggcaaaggcactcaggtgacagtgtcttcaggagggggtggcagcgctcctggaaagaaacgtccggtagagcagtcgccacaagagccagactcctcctcgggcatcggcaagacaggccagcagcccgctaaaaagagactcaattttggtcagactggcgactcagagtcagtccccgatccacaacctctcggagaacctccagcagccccctcaggtctgggacctaatacaatggcttcaggcggtggcgctccaatggcagacaataacgaaggcgccgacggagtgggtaattcctcgggaaattggcattgcgattccacatggctgggggacagagtcatcaccaccagcacccgaacctgggccctgcccacctacaacaaccacctctacaagcaaatctccaacggcacctcgggaggaagcaccaacgacaacacctattttggctacagcaccccctgggggtattttgacttcaacagattccactgtcacttttcaccacgtgactggcaacgactcatcaacaacaattggggattccggcccaaaagactcaacttcaagctgttcaacatccaggtcaaggaagtcacgacgaacgaaggcaccaagaccatcgccaataatctcaccagcaccgtgcaggtctttacggactcggagtaccagttaccgtacgtgctaggatccgctcaccagggatgtctgcctccgttcccggcggacgtcttcatggttcctcagtacggctatttaactttaaacaatggaagccaagccctgggacgttcctccttctactgtctggagtatttcccatcgcagatgctgagaaccggcaacaactttcagttcagctacaccttcgaggacgtgcctttccacagcagctacgcgcacagccagagcctggacaggctgatgaatcccctcatcgaccagtacctgtactacctggtcagaacgcaaacgactggaactggagggacgcagactctggcattcagccaagcgggtcctagctcaatggccaaccaggctagaaattgggtgcccggaccttgctaccggcagcagcgcgtctccacgacaaccaaccagaacaacaacagcaactttgcctggacgggagctgccaagtttaagctgaacggccgagactctctaatgaatccgggcgtggcaatggcttcccacaaggatgacgacgaccgcttcttcccttcgagcggggtcctgatttttggcaagcaaggagccgggaacgatggagtggattacagccaagtgctgattacagatgaggaagaaatcaaggctaccaaccccgtggccacagaagaatatggagcagtggccatcaacaaccaggccgccaatacgcaggcgcagaccggactcgtgcacaaccagggggtgattcccggcatggtgtggcagaatagagacgtgtacctgcagggtcccatctgggccaaaattcctcacacggacggcaactttcacccgtctcccctgatgggcggctttggactgaagcacccgcctcctcaaattctcatcaagaacacaccggttccagcggacccgccgcttaccttcaaccaggccaagctgaactctttcatcacgcagtacagcaccggacaggtcagcgtggaaatcgagtgggagctgcagaaagaaaacagcaaacgctggaatccagagattcaatacacttccaactactacaaatctacaaatgtggactttgctgtcaacacggagggggtttatagcgagcctcgccccattggcacccgttacctcacccgcaacctgtaa

SEQ ID NO: 962 - DNA, 2601 bp, Artificial Sequence
  source: /note="Description of Artificial Sequence: Synthetic polynucleotide"
ctggctgccgatggttatcttccagattggctcgaggacaacctctctgagggcattcgcgagtggtgggacttgaaacctggagccccgaagcccaaagccaaccagcaaaagcaggacgacggccggggtctggtgcttcctggctacaagtacctcggacccttcaacggactcgacaagggggagcccgtcaacgcggcggacgcagcggccctcgagcacgacaaggcctacgaccagcagctcaaagcgggtgacaatccgtacctgcggtataaccacgccgacgccgagtttcaggagcgtctgcaagaagatacgtcttttgggggcaacctcgggcgagcagtcttccaggccaagaagcgggttctcgaacctctcggtctggttgaggaaggcgctaagatggaggtgcagctgcaggcttctggaggaggactggtgcaggctggagggagtctgaggctgtcttgcagtgcctcagtgaggactttctccatctacgccatgggctggtttaggcaggctcccgggaaggagcgcgaattcgtggccggaatcaaccggtctggcgacgtgaccaagtacgctgatttcgtgaaaggccggtttagcatttccagagacaacgccaagaatatggtgtatctgcagatgaactccctgaaacctgaagacacagctctgtactattgtgccgctacttgggcctacgataccgtgggggctctgacatcaggatataatttttggggccaggggacccaggtgacagtgagctccggaggaggaggaagcgctcctggaaagaaacgtccggtagagcagtcgccacaagagccagactcctcctcgggcatcggcaagacaggccagcagcccgctaaaaagagactcaattttggtcagactggcgactcagagtcagtccccgatccacaacctctcggagaacctccagcagccccctcaggtctgggacctaatacaatggcttcaggcggtggcgctccaatggcagacaataacgaaggcgccgacggagtgggtaattcctcgggaaattggcattgcgattccacatggctgggggacagagtcatcaccaccagcacccgaacctgggccctgcccacctacaacaaccacctctacaagcaaatctccaacggcacctcgggaggaagcaccaacgacaacacctattttggctacagcaccccctgggggtattttgacttcaacagattccactgtcacttttcaccacgtgactggcaacgactcatcaacaacaattggggattccggcccaaaagactcaacttcaagctgttcaacatccaggtcaaggaagtcacgacgaacgaaggcaccaagaccatcgccaataatctcaccagcaccgtgcaggtctttacggactcggagtaccagttaccgtacgtgctaggatccgctcaccagggatgtctgcctccgttcccggcggacgtcttcatggttcctcagtacggctatttaactttaaacaatggaagccaagccctgggacgttcctccttctactgtctggagtatttcccatcgcagatgctgagaaccggcaacaactttcagttcagctacaccttcgaggacgtgcctttccacagcagctacgcgcacagccagagcctggacaggctgatgaatcccctcatcgaccagtacctgtactacctggtcagaacgcaaacgactggaactggagggacgcagactctggcattcagccaagcgggtcctagctcaatggccaaccaggctagaaattgggtgcccggaccttgctaccggcagcagcgcgtctccacgacaaccaaccagaacaacaacagcaactttgcctggacgggagctgccaagtttaagctgaacggccgagactctctaatgaatccgggcgtggcaatggcttcccacaaggatgacgacgaccgcttcttcccttcgagcggggtcctgatttttggcaagcaaggagccgggaacgatggagtggattacagccaagtgctgattacagatgaggaagaaatcaaggctaccaaccccgtggccacagaagaatatggagcagtggccatcaacaaccaggccgccaatacgcaggcgcagaccggactcgtgcacaaccagggggtgattcccggcatggtgtggcagaatagagacgtgtacctgcagggtcccatctgggccaaaattcctcacacggacggcaactttcacccgtctcccctgatgggcggctttggactgaagcacccgcctcctcaaattctcatcaagaacacaccggttccagcggacccgccgcttaccttcaaccaggccaagctgaactctttcatcacgcagtacagcaccggacaggtcagcgtggaaatcgagtgggagctgcagaaagaaaacagcaaacgctggaatccagagattcaatacacttccaactactacaaatctacaaatgtggactttgctgtcaacacggagggggtttatagcgagcctcgccccattggcacccgttacctcacccgcaacctgtaa

SEQ ID NO: 963 - DNA, 2367 bp, Artificial Sequence
  source: /note="Description of Artificial Sequence: Synthetic polynucleotide"
ctggctgccgatggttatcttccagattggctcgaggacaacctctctgagggcattcgcgagtggtgggacttgaaacctggagccccgaagcccaaagccaaccagcaaaagcaggacgacggccggggtctggtgcttcctggctacaagtacctcggacccttcaacggactcgacaagggggagcccgtcaacgcggcggacgcagcggccctcgagcacgacaaggcctacgaccagcagctcaaagcgggtgacaatccgtacctgcggtataaccacgccgacgccgagtttcaggagcgtctgcaagaagatacgtcttttgggggcaacctcgggcgagcagtcttccaggccaagaagcgggttctcgaacctctcggtctggttgaggaaggcgctaagatgccaagcagtgtaatcgatgcgctgcagtacaagctggagggcaccacgaggctgaccaggaagaggggtctgaagctggccacggccctcagccttagcaataagttcgtagagggcagccccagcggcggcggcggcagcggcggcggcggcagcgctcctggaaagaaacgtccggtagagcagtcgccacaagagccagactcctcctcgggcatcggcaagacaggccagcagcccgctaaaaagagactcaattttggtcagactggcgactcagagtcagtccccgatccacaacctctcggagaacctccagcagccccctcaggtctgggacctaatacaatggcttcaggcggtggcgctccaatggcagacaataacgaaggcgccgacggagtgggtaattcctcgggaaattggcattgcgattccacatggctgggggacagagtcatcaccaccagcacccgaacctgggccctgcccacctacaacaaccacctctacaagcaaatctccaacggcacctcgggaggaagcaccaacgacaacacctattttggctacagcaccccctgggggtattttgacttcaacagattccactgtcacttttcaccacgtgactggcaacgactcatcaacaacaattggggattccggcccaaaagactcaacttcaagctgttcaacatccaggtcaaggaagtcacgacgaacgaaggcaccaagaccatcgccaataatctcaccagcaccgtgcaggtctttacggactcggagtaccagttaccgtacgtgctaggatccgctcaccagggatgtctgcctccgttcccggcggacgtcttcatggttcctcagtacggctatttaactttaaacaatggaagccaagccctgggacgttcctccttctactgtctggagtatttcccatcgcagatgctgagaaccggcaacaactttcagttcagctacaccttcgaggacgtgcctttccacagcagctacgcgcacagccagagcctggacaggctgatgaatcccctcatcgaccagtacctgtactacctggtcagaacgcaaacgactggaactggagggacgcagactctggcattcagccaagcgggtcctagctcaatggccaaccaggctagaaattgggtgcccggaccttgctaccggcagcagcgcgtctccacgacaaccaaccagaacaacaacagcaactttgcctggacgggagctgccaagtttaagctgaacggccgagactctctaatgaatccgggcgtggcaatggcttcccacaaggatgacgacgaccgcttcttcccttcgagcggggtcctgatttttggcaagcaaggagccgggaacgatggagtggattacagccaagtgctgattacagatgaggaagaaatcaaggctaccaaccccgtggccacagaagaatatggagcagtggccatcaacaaccaggccgccaatacgcaggcgcagaccggactcgtgcacaaccagggggtgattcccggcatggtgtggcagaatagagacgtgtacctgcagggtcccatctgggccaaaattcctcacacggacggcaactttcacccgtctcccctgatgggcggctttggactgaagcacccgcctcctcaaattctcatcaagaacacaccggttccagcggacccgccgcttaccttcaaccaggccaagctgaactctttcatcacgcagtacagcaccggacaggtcagcgtggaaatcgagtgggagctgcagaaagaaaacagcaaacgctggaatccagagattcaatacacttccaactactacaaatctacaaatgtggactttgctgtcaacacggagggggtttatagcgagcctcgccccattggcacccgttacctcacccgcaacctgtaa

SEQ ID NO: 964 - DNA, 2328 bp, Artificial Sequence
  source: /note="Description of Artificial Sequence: Synthetic polynucleotide"
ctggctgccgatggttatcttccagattggctcgaggacaacctctctgagggcattcgcgagtggtgggacttgaaacctggagccccgaagcccaaagccaaccagcaaaagcaggacgacggccggggtctggtgcttcctggctacaagtacctcggacccttcaacggactcgacaagggggagcccgtcaacgcggcggacgcagcggccctcgagcacgacaaggcctacgaccagcagctcaaagcgggtgacaatccgtacctgcggtataaccacgccgacgccgagtttcaggagcgtctgcaagaagatacgtcttttgggggcaacctcgggcgagcagtcttccaggccaagaagcgggttctcgaacctctcggtctggttgaggaaggcgctaagatgtataccatctggatgcccgagaaccccaggcccggtaccccctgcgacatcttcaccaacagcaggggcaagcgagccagcaacggcggcggcggcggcagcggcggcggcggcagcgctcctggaaagaaacgtccggtagagcagtcgccacaagagccagactcctcctcgggcatcggcaagacaggccagcagcccgctaaaaagagactcaattttggtcagactggcgactcagagtcagtccccgatccacaacctctcggagaacctccagcagccccctcaggtctgggacctaatacaatggcttcaggcggtggcgctccaatggcagacaataacgaaggcgccgacggagtgggtaattcctcgggaaattggcattgcgattccacatggctgggggacagagtcatcaccaccagcacccgaacctgggccctgcccacctacaacaaccacctctacaagcaaatctccaacggcacctcgggaggaagcaccaacgacaacacctattttggctacagcaccccctgggggtattttgacttcaacagattccactgtcacttttcaccacgtgactggcaacgactcatcaacaacaattggggattccggcccaaaagactcaacttcaagctgttcaacatccaggtcaaggaagtcacgacgaacgaaggcaccaagaccatcgccaataatctcaccagcaccgtgcaggtctttacggactcggagtaccagttaccgtacgtgctaggatccgctcaccagggatgtctgcctccgttcccggcggacgtcttcatggttcctcagtacggctatttaactttaaacaatggaagccaagccctgggacgttcctccttctactgtctggagtatttcccatcgcagatgctgagaaccggcaacaactttcagttcagctacaccttcgaggacgtgcctttccacagcagctacgcgcacagccagagcctggacaggctgatgaatcccctcatcgaccagtacctgtactacctggtcagaacgcaaacgactggaactggagggacgcagactctggcattcagccaagcgggtcctagctcaatggccaaccaggctagaaattgggtgcccggaccttgctaccggcagcagcgcgtctccacgacaaccaaccagaacaacaacagcaactttgcctggacgggagctgccaagtttaagctgaacggccgagactctctaatgaatccgggcgtggcaatggcttcccacaaggatgacgacgaccgcttcttcccttcgagcggggtcctgatttttggcaagcaaggagccgggaacgatggagtggattacagccaagtgctgattacagatgaggaagaaatcaaggctaccaaccccgtggccacagaagaatatggagcagtggccatcaacaaccaggccgccaatacgcaggcgcagaccggactcgtgcacaaccagggggtgattcccggcatggtgtggcagaatagagacgtgtacctgcagggtcccatctgggccaaaattcctcacacggacggcaactttcacccgtctcccctgatgggcggctttggactgaagcacccgcctcctcaaattctcatcaagaacacaccggttccagcggacccgccgcttaccttcaaccaggccaagctgaactctttcatcacgcagtacagcaccggacaggtcagcgtggaaatcgagtgggagctgcagaaagaaaacagcaaacgctggaatccagagattcaatacacttccaactactacaaatctacaaatgtggactttgctgtcaacacggagggggtttatagcgagcctcgccccattggcacccgttacctcacccgcaacctgtaa

SEQ ID NO: 965 - DNA, 2298 bp, Artificial Sequence
  source: /note="Description of Artificial Sequence: Synthetic polynucleotide"
ctggctgccgatggttatcttccagattggctcgaggacaacctctctgagggcattcgcgagtggtgggacttgaaacctggagccccgaagcccaaagccaaccagcaaaagcaggacgacggccggggtctggtgcttcctggctacaagtacctcggacccttcaacggactcgacaagggggagcccgtcaacgcggcggacgcagcggccctcgagcacgacaaggcctacgaccagcagctcaaagcgggtgacaatccgtacctgcggtataaccacgccgacgccgagtttcaggagcgtctgcaagaagatacgtcttttgggggcaacctcgggcgagcagtcttccaggccaagaagcgggttctcgaacctctcggtctggttgaggaaggcgctaagatgaccttcttctacggcggcagcaggggcaagaggaacaacttcaagaccgaggagtacggcggcggcggcagcggcggcggcggcagcgctcctggaaagaaacgtccggtagagcagtcgccacaagagccagactcctcctcgggcatcggcaagacaggccagcagcccgctaaaaagagactcaattttggtcagactggcgactcagagtcagtccccgatccacaacctctcggagaacctccagcagccccctcaggtctgggacctaatacaatggcttcaggcggtggcgctccaatggcagacaataacgaaggcgccgacggagtgggtaattcctcgggaaattggcattgcgattccacatggctgggggacagagtcatcaccaccagcacccgaacctgggccctgcccacctacaacaaccacctctacaagcaaatctccaacggcacctcgggaggaagcaccaacgacaacacctattttggctacagcaccccctgggggtattttgacttcaacagattccactgtcacttttcaccacgtgactggcaacgactcatcaacaacaattggggattccggcccaaaagactcaacttcaagctgttcaacatccaggtcaaggaagtcacgacgaacgaaggcaccaagaccatcgccaataatctcaccagcaccgtgcaggtctttacggactcggagtaccagttaccgtacgtgctaggatccgctcaccagggatgtctgcctccgttcccggcggacgtcttcatggttcctcagtacggctatttaactttaaacaatggaagccaagccctgggacgttcctccttctactgtctggagtatttcccatcgcagatgctgagaaccggcaacaactttcagttcagctacaccttcgaggacgtgcctttccacagcagctacgcgcacagccagagcctggacaggctgatgaatcccctcatcgaccagtacctgtactacctggtcagaacgcaaacgactggaactggagggacgcagactctggcattcagccaagcgggtcctagctcaatggccaaccaggctagaaattgggtgcccggaccttgctaccggcagcagcgcgtctccacgacaaccaaccagaacaacaacagcaactttgcctggacgggagctgccaagtttaagctgaacggccgagactctctaatgaatccgggcgtggcaatggcttcccacaaggatgacgacgaccgcttcttcccttcgagcggggtcctgatttttggcaagcaaggagccgggaacgatggagtggattacagccaagtgctgattacagatgaggaagaaatcaaggctaccaaccccgtggccacagaagaatatggagcagtggccatcaacaaccaggccgccaatacgcaggcgcagaccggactcgtgcacaaccagggggtgattcccggcatggtgtggcagaatagagacgtgtacctgcagggtcccatctgggccaaaattcctcacacggacggcaactttcacccgtctcccctgatgggcggctttggactgaagcacccgcctcctcaaattctcatcaagaacacaccggttccagcggacccgccgcttaccttcaaccaggccaagctgaactctttcatcacgcagtacagcaccggacaggtcagcgtggaaatcgagtgggagctgcagaaagaaaacagcaaacgctggaatccagagattcaatacacttccaactactacaaatctacaaatgtggactttgctgtcaacacggagggggtttatagcgagcctcgccccattggcacccgttacctcacccgcaacctgtaa

SEQ ID NO: 966 - DNA, 2211 bp, Artificial Sequence
  source: /note="Description of Artificial Sequence: Synthetic polynucleotide"
atggctgccgatggttatcttccagattggctcgaggacaaccttagtgaaggaattcgcgagtggtgggctttgaaacctggagcccctcaacccaaggcaaatcaacaacatcaagacaacgctcgaggtcttgtgcttccgggttacaaataccttggacccggcaacggactcgacaagggggagccggtcaacgcagcagacgcggcggccctcgagcacgacaaggcctacgaccagcagctcaaggccggagacaacccgtacctcaagtacaaccacgccgacgccgagttccaggagcggctcaaagaagatacgtcttttgggggcaacctcgggcgagcagtcttccaggccaaaaagaggcttcttgaacctcttggtctggttgaggaagcggctaaggcggctcctggaaagaagaggcctgtagagcagtctcctcaggaaccggactcctccgcgggtattggcaaatcgggtgcacagcccgctaaaaagagactcaatttcggtcagactggcgacacagagtcagtcccagaccctcaaccaatcggagaacctcccgcagccccctcaggtgtgggatctcttacaatggcttcaggtggtggcgcaccagtggcagacaataacgaaggtgccgatggagtgggtagttcctcgggaaattggcattgcgattcccaatggctgggggacagagtcatcaccaccagcacccgaacctgggccctgcccacctacaacaatcacctctacaagcaaatctccaacagcacatctggaggatcttcaaatgacaacgcctacttcggctacagcaccccctgggggtattttgacttcaacagattccactgccacttctcaccacgtgactggcagcgactcatcaacaacaactggggattccggcctaagcgactcaacttcaagctcttcaacattcaggtcaaagaggttacggacaacaatggagtcaagaccatcgccaataaccttaccagcacggtccaggtcttcacggactcagactatcagctcccgtacgtgctcgggtcggctcacgagggctgcctcccgccgttcccagcggacgttttcatgattcctcagtacgggtatctgacgcttaatgatggaagccaggccgtgggtcgttcgtccttttactgcctggaatatttcccgtcgcaaatgctaagaacgggtaacaacttccagttcaactacgagtttgagaacgtacctttccatagcagctacgctcacagccaaagcctggaccgactaatgaatccactcatcgaccaatacttgtactatctctcaaagactattaacgattctggacagaatcaacaaacgctaaaattcagtgtggccggacccagcaacatggctgtccagggaagaaactacatacctggacccagctaccgacaacaacgtgtctcaaccactgtgactcaaaacaacaacagcgaatttgcttggcctggagcttcttcttgggctctcaatggacgtaatagcttgatgaatcctggacctgctatggccagccacaaagaaggagaggaccgtttctttcctttgtctggatctttaatttttggcaaacaaggaactggaagagacaacgtggatgcggacgaagtcatgataaccaacgaagaagaaattaaaactactaacccggtagcaacggagtcctatggacaagtggccataaaccaccagagtgcccaagcacaggcgcagaccggctgggttcaaaaccaaggaatacttccgggtatggtttggcaggacagagatgtgtacctgcaaggacccatttgggccaaaattcctcacacggacggcaactttcacccttctccgctgatgggagggtttggaatgaagcacccgcctcctcagatcctcatcaaaaacacacctgtacctgcggatcctccaacggccttcaacaaggacaagctgaactctttcatcacccagtattctactggccaagtcagcgtggagatcgagtgggagctgcagaaggaaaacagcaagcgctggaacccggagatccagtacacttccaactattacaagtctaataatgttgaatttgctgttaatactgaaggtgtatatagtgaaccccgccccattggcaccagatacctgactcgtaatctgtaa

SEQ ID NO: 967 - DNA, 2277 bp, Artificial Sequence
  source: /note="Description of Artificial Sequence: Synthetic polynucleotide"
ctggctgccgatggttatcttccagattggctcgaggacaaccttagtgaaggaattcgcgagtggtgggctttgaaacctggagcccctcaacccaaggcaaatcaacaacatcaagacaacgctcgaggtcttgtgcttccgggttacaaataccttggacccggcaacggactcgacaagggggagccggtcaacgcagcagacgcggcggccctcgagcacgacaaggcctacgaccagcagctcaaggccggagacaacccgtacctcaagtacaaccacgccgacgccgagttccaggagcggctcaaagaagatacgtcttttgggggcaacctcgggcgagcagtcttccaggccaaaaagaggcttcttgaacctcttggtctggttgaggaagcggctaagatgaacaaccagaagatcgtgaacctgaaggagaaggtggcccagctggaggccggcggcggcggcagcgctcctggaaagaagaggcctgtagagcagtctcctcaggaaccggactcctccgcgggtattggcaaatcgggtgcacagcccgctaaaaagagactcaatttcggtcagactggcgacacagagtcagtcccagaccctcaaccaatcggagaacctcccgcagccccctcaggtgtgggatctcttacaatggcttcaggtggtggcgcaccagtggcagacaataacgaaggtgccgatggagtgggtagttcctcgggaaattggcattgcgattcccaatggctgggggacagagtcatcaccaccagcacccgaacctgggccctgcccacctacaacaatcacctctacaagcaaatctccaacagcacatctggaggatcttcaaatgacaacgcctacttcggctacagcaccccctgggggtattttgacttcaacagattccactgccacttctcaccacgtgactggcagcgactcatcaacaacaactggggattccggcctaagcgactcaacttcaagctcttcaacattcaggtcaaagaggttacggacaacaatggagtcaagaccatcgccaataaccttaccagcacggtccaggtcttcacggactcagactatcagctcccgtacgtgctcgggtcggctcacgagggctgcctcccgccgttcccagcggacgttttcatgattcctcagtacgggtatctgacgcttaatgatggaagccaggccgtgggtcgttcgtccttttactgcctggaatatttcccgtcgcaaatgctaagaacgggtaacaacttccagttcaactacgagtttgagaacgtacctttccatagcagctacgctcacagccaaagcctggaccgactaatgaatccactcatcgaccaatacttgtactatctctcaaagactattaacgattctggacagaatcaacaaacgctaaaattcagtgtggccggacccagcaacatggctgtccagggaagaaactacatacctggacccagctaccgacaacaacgtgtctcaaccactgtgactcaaaacaacaacagcgaatttgcttggcctggagcttcttcttgggctctcaatggacgtaatagcttgatgaatcctggacctgctatggccagccacaaagaaggagaggaccgtttctttcctttgtctggatctttaatttttggcaaacaaggaactggaagagacaacgtggatgcggacgaagtcatgataaccaacgaagaagaaattaaaactactaacccggtagcaacggagtcctatggacaagtggccataaaccaccagagtgcccaagcacaggcgcagaccggctgggttcaaaaccaaggaatacttccgggtatggtttggcaggacagagatgtgtacctgcaaggacccatttgggccaaaattcctcacacggacggcaactttcacccttctccgctgatgggagggtttggaatgaagcacccgcctcctcagatcctcatcaaaaacacacctgtacctgcggatcctccaacggccttcaacaaggacaagctgaactctttcatcacccagtattctactggccaagtcagcgtggagatcgagtgggagctgcagaaggaaaacagcaagcgctggaacccggagatccagtacacttccaactattacaagtctaataatgttgaatttgctgttaatactgaaggtgtatatagtgaaccccgccccattggcaccagatacctgactcgtaatctgtaa

SEQ ID NO: 968 - DNA, 2313 bp, Artificial Sequence
  source: /note="Description of Artificial Sequence: Synthetic polynucleotide"
ctggctgccgatggttatcttccagattggctcgaggacaaccttagtgaaggaattcgcgagtggtgggctttgaaacctggagcccctcaacccaaggcaaatcaacaacatcaagacaacgctcgaggtcttgtgcttccgggttacaaataccttggacccggcaacggactcgacaagggggagccggtcaacgcagcagacgcggcggccctcgagcacgacaaggcctacgaccagcagctcaaggccggagacaacccgtacctcaagtacaaccacgccgacgccgagttccaggagcggctcaaagaagatacgtcttttgggggcaacctcgggcgagcagtcttccaggccaaaaagaggcttcttgaacctcttggtctggttgaggaagcggctaagatgtataccatctggatgcccgagaaccccaggcccggtaccccctgcgacatcttcaccaacagcaggggcaagcgagccagcaacggcggcggcggcggcagcgctcctggaaagaagaggcctgtagagcagtctcctcaggaaccggactcctccgcgggtattggcaaatcgggtgcacagcccgctaaaaagagactcaatttcggtcagactggcgacacagagtcagtcccagaccctcaaccaatcggagaacctcccgcagccccctcaggtgtgggatctcttacaatggcttcaggtggtggcgcaccagtggcagacaataacgaaggtgccgatggagtgggtagttcctcgggaaattggcattgcgattcccaatggctgggggacagagtcatcaccaccagcacccgaacctgggccctgcccacctacaacaatcacctctacaagcaaatctccaacagcacatctggaggatcttcaaatgacaacgcctacttcggctacagcaccccctgggggtattttgacttcaacagattccactgccacttctcaccacgtgactggcagcgactcatcaacaacaactggggattccggcctaagcgactcaacttcaagctcttcaacattcaggtcaaagaggttacggacaacaatggagtcaagaccatcgccaataaccttaccagcacggtccaggtcttcacggactcagactatcagctcccgtacgtgctcgggtcggctcacgagggctgcctcccgccgttcccagcggacgttttcatgattcctcagtacgggtatctgacgcttaatgatggaagccaggccgtgggtcgttcgtccttttactgcctggaatatttcccgtcgcaaatgctaagaacgggtaacaacttccagttcaactacgagtttgagaacgtacctttccatagcagctacgctcacagccaaagcctggaccgactaatgaatccactcatcgaccaatacttgtactatctctcaaagactattaacgattctggacagaatcaacaaacgctaaaattcagtgtggccggacccagcaacatggctgtccagggaagaaactacatacctggacccagctaccgacaacaacgtgtctcaaccactgtgactcaaaacaacaacagcgaatttgcttggcctggagcttcttcttgggctctcaatggacgtaatagcttgatgaatcctggacctgctatggccagccacaaagaaggagaggaccgtttctttcctttgtctggatctttaatttttggcaaacaaggaactggaagagacaacgtggatgcggacgaagtcatgataaccaacgaagaagaaattaaaactactaacccggtagcaacggagtcctatggacaagtggccataaaccaccagagtgcccaagcacaggcgcagaccggctgggttcaaaaccaaggaatacttccgggtatggtttggcaggacagagatgtgtacctgcaaggacccatttgggccaaaattcctcacacggacggcaactttcacccttctccgctgatgggagggtttggaatgaagcacccgcctcctcagatcctcatcaaaaacacacctgtacctgcggatcctccaacggccttcaacaaggacaagctgaactctttcatcacccagtattctactggccaagtcagcgtggagatcgagtgggagctgcagaaggaaaacagcaagcgctggaacccggagatccagtacacttccaactattacaagtctaataatgttgaatttgctgttaatactgaaggtgtatatagtgaaccccgccccattggcaccagatacctgactcgtaatctgtaa

SEQ ID NO: 969 - DNA, 2283 bp, Artificial Sequence
  source: /note="Description of Artificial Sequence: Synthetic polynucleotide"
ctggctgccgatggttatcttccagattggctcgaggacaaccttagtgaaggaattcgcgagtggtgggctttgaaacctggagcccctcaacccaaggcaaatcaacaacatcaagacaacgctcgaggtcttgtgcttccgggttacaaataccttggacccggcaacggactcgacaagggggagccggtcaacgcagcagacgcggcggccctcgagcacgacaaggcctacgaccagcagctcaaggccggagacaacccgtacctcaagtacaaccacgccgacgccgagttccaggagcggctcaaagaagatacgtcttttgggggcaacctcgggcgagcagtcttccaggccaaaaagaggcttcttgaacctcttggtctggttgaggaagcggctaagatgaccttcttctacggcggcagcaggggcaagaggaacaacttcaagaccgaggagtacggcggcggcggcagcgctcctggaaagaagaggcctgtagagcagtctcctcaggaaccggactcctccgcgggtattggcaaatcgggtgcacagcccgctaaaaagagactcaatttcggtcagactggcgacacagagtcagtcccagaccctcaaccaatcggagaacctcccgcagccccctcaggtgtgggatctcttacaatggcttcaggtggtggcgcaccagtggcagacaataacgaaggtgccgatggagtgggtagttcctcgggaaattggcattgcgattcccaatggctgggggacagagtcatcaccaccagcacccgaacctgggccctgcccacctacaacaatcacctctacaagcaaatctccaacagcacatctggaggatcttcaaatgacaacgcctacttcggctacagcaccccctgggggtattttgacttcaacagattccactgccacttctcaccacgtgactggcagcgactcatcaacaacaactggggattccggcctaagcgactcaacttcaagctcttcaacattcaggtcaaagaggttacggacaacaatggagtcaagaccatcgccaataaccttaccagcacggtccaggtcttcacggactcagactatcagctcccgtacgtgctcgggtcggctcacgagggctgcctcccgccgttcccagcggacgttttcatgattcctcagtacgggtatctgacgcttaatgatggaagccaggccgtgggtcgttcgtccttttactgcctggaatatttcccgtcgcaaatgctaagaacgggtaacaacttccagttcaactacgagtttgagaacgtacctttccatagcagctacgctcacagccaaagcctggaccgactaatgaatccactcatcgaccaatacttgtactatctctcaaagactattaacgattctggacagaatcaacaaacgctaaaattcagtgtggccggacccagcaacatggctgtccagggaagaaactacatacctggacccagctaccgacaacaacgtgtctcaaccactgtgactcaaaacaacaacagcgaatttgcttggcctggagcttcttcttgggctctcaatggacgtaatagcttgatgaatcctggacctgctatggccagccacaaagaaggagaggaccgtttctttcctttgtctggatctttaatttttggcaaacaaggaactggaagagacaacgtggatgcggacgaagtcatgataaccaacgaagaagaaattaaaactactaacccggtagcaacggagtcctatggacaagtggccataaaccaccagagtgcccaagcacaggcgcagaccggctgggttcaaaaccaaggaatacttccgggtatggtttggcaggacagagatgtgtacctgcaaggacccatttgggccaaaattcctcacacggacggcaactttcacccttctccgctgatgggagggtttggaatgaagcacccgcctcctcagatcctcatcaaaaacacacctgtacctgcggatcctccaacggccttcaacaaggacaagctgaactctttcatcacccagtattctactggccaagtcagcgtggagatcgagtgggagctgcagaaggaaaacagcaagcgctggaacccggagatccagtacacttccaactattacaagtctaataatgttgaatttgctgttaatactgaaggtgtatatagtgaaccccgccccattggcaccagatacctgactcgtaatctgtaa

SEQ ID NO: 970 - DNA, 2283 bp, Artificial Sequence
  source: /note="Description of Artificial Sequence: Synthetic polynucleotide"
ctggctgccgatggttatcttccagattggctcgaggacaaccttagtgaaggaattcgcgagtggtgggctttgaaacctggagcccctcaacccaaggcaaatcaacaacatcaagacaacgctcgaggtcttgtgcttccgggttacaaataccttggacccggcaacggactcgacaagggggagccggtcaacgcagcagacgcggcggccctcgagcacgacaaggcctacgaccagcagctcaaggccggagacaacccgtacctcaagtacaaccacgccgacgccgagttccaggagcggctcaaagaagatacgtcttttgggggcaacctcgggcgagcagtcttccaggccaaaaagaggcttcttgaacctcttggtctggttgaggaagcggctaagatggcagctgcggccgccgcggctgcagcggctgcagccgccgcagctgcggctgcagcgggcggcggcggcagcgctcctggaaagaagaggcctgtagagcagtctcctcaggaaccggactcctccgcgggtattggcaaatcgggtgcacagcccgctaaaaagagactcaatttcggtcagactggcgacacagagtcagtcccagaccctcaaccaatcggagaacctcccgcagccccctcaggtgtgggatctcttacaatggcttcaggtggtggcgcaccagtggcagacaataacgaaggtgccgatggagtgggtagttcctcgggaaattggcattgcgattcccaatggctgggggacagagtcatcaccaccagcacccgaacctgggccctgcccacctacaacaatcacctctacaagcaaatctccaacagcacatctggaggatcttcaaatgacaacgcctacttcggctacagcaccccctgggggtattttgacttcaacagattccactgccacttctcaccacgtgactggcagcgactcatcaacaacaactggggattccggcctaagcgactcaacttcaagctcttcaacattcaggtcaaagaggttacggacaacaatggagtcaagaccatcgccaataaccttaccagcacggtccaggtcttcacggactcagactatcagctcccgtacgtgctcgggtcggctcacgagggctgcctcccgccgttcccagcggacgttttcatgattcctcagtacgggtatctgacgcttaatgatggaagccaggccgtgggtcgttcgtccttttactgcctggaatatttcccgtcgcaaatgctaagaacgggtaacaacttccagttcaactacgagtttgagaacgtacctttccatagcagctacgctcacagccaaagcctggaccgactaatgaatccactcatcgaccaatacttgtactatctctcaaagactattaacgattctggacagaatcaacaaacgctaaaattcagtgtggccggacccagcaacatggctgtccagggaagaaactacatacctggacccagctaccgacaacaacgtgtctcaaccactgtgactcaaaacaacaacagcgaatttgcttggcctggagcttcttcttgggctctcaatggacgtaatagcttgatgaatcctggacctgctatggccagccacaaagaaggagaggaccgtttctttcctttgtctggatctttaatttttggcaaacaaggaactggaagagacaacgtggatgcggacgaagtcatgataaccaacgaagaagaaattaaaactactaacccggtagcaacggagtcctatggacaagtggccataaaccaccagagtgcccaagcacaggcgcagaccggctgggttcaaaaccaaggaatacttccgggtatggtttggcaggacagagatgtgtacctgcaaggacccatttgggccaaaattcctcacacggacggcaactttcacccttctccgctgatgggagggtttggaatgaagcacccgcctcctcagatcctcatcaaaaacacacctgtacctgcggatcctccaacggccttcaacaaggacaagctgaactctttcatcacccagtattctactggccaagtcagcgtggagatcgagtgggagctgcagaaggaaaacagcaagcgctggaacccggagatccagtacacttccaactattacaagtctaataatgttgaatttgctgttaatactgaaggtgtatatagtgaaccccgccccattggcaccagatacctgactcgtaatctgtaa

SEQ ID NO: 971 - protein, 726 aa, Artificial Sequence
  source: /note="Description of Artificial Sequence: Synthetic polypeptide"
MEVQLQASGGGLVQAGGSLRLSCAASGFKITHYTMGWFRQAPGKEREFVSRITWGGDNTFYSNSVKGRFTISRDNAKNTVYLQMNSLKPEDTADYYCAAGSTSTATPLRVDYWGKGTQVTVSSGGGGSAPGKKRPVEQSPQEPDSSSGIGKTGQQPAKKRLNFGQTGDSESVPDPQPLGEPPAAPSGLGPNTMASGGGAPMADNNEGADGVGNSSGNWHCDSTWLGDRVITTSTRTWALPTYNNHLYKQISNGTSGGSTNDNTYFGYSTPWGYFDFNRFHCHFSPRDWQRLINNNWGFRPKRLNFKLFNIQVKEVTTNEGTKTIANNLTSTVQVFTDSEYQLPYVLGSAHQGCLPPFPADVFMVPQYGYLTLNNGSQALGRSSFYCLEYFPSQMLRTGNNFQFSYTFEDVPFHSSYAHSQSLDRLMNPLIDQYLYYLVRTQTTGTGGTQTLAFSQAGPSSMANQARNWVPGPCYRQQRVSTTTNQNNNSNFAWTGAAKFKLNGRDSLMNPGVAMASHKDDDDRFFPSSGVLIFGKQGAGNDGVDYSQVLITDEEEIKATNPVATEEYGAVAINNQAANTQAQTGLVHNQGVIPGMVWQNRDVYLQGPIWAKIPHTDGNFHPSPLMGGFGLKHPPPQILIKNTPVPADPPLTFNQAKLNSFITQYSTGQVSVEIEWELQKENSKRWNPEIQYTSNYYKSTNVDFAVNTEGVYSEPRPIGTRYLTRNL

SEQ ID NO: 972 - protein, 729 aa, Artificial Sequence
  source: /note="Description of Artificial Sequence: Synthetic polypeptide"
MEVQLQASGGGLVQAGGSLRLSCSASVRTFSIYAMGWFRQAPGKEREFVAGINRSGDVTKYADFVKGRFSISRDNAKNMVYLQMNSLKPEDTALYYCAATWAYDTVGALTSGYNFWGQGTQVTVSSGGGGSAPGKKRPVEQSPQEPDSSSGIGKTGQQPAKKRLNFGQTGDSESVPDPQPLGEPPAAPSGLGPNTMASGGGAPMADNNEGADGVGNSSGNWHCDSTWLGDRVITTSTRTWALPTYNNHLYKQISNGTSGGSTNDNTYFGYSTPWGYFDFNRFHCHFSPRDWQRLINNNWGFRPKRLNFKLFNIQVKEVTTNEGTKTIANNLTSTVQVFTDSEYQLPYVLGSAHQGCLPPFPADVFMVPQYGYLTLNNGSQALGRSSFYCLEYFPSQMLRTGNNFQFSYTFEDVPFHSSYAHSQSLDRLMNPLIDQYLYYLVRTQTTGTGGTQTLAFSQAGPSSMANQARNWVPGPCYRQQRVSTTTNQNNNSNFAWTGAAKFKLNGRDSLMNPGVAMASHKDDDDRFFPSSGVLIFGKQGAGNDGVDYSQVLITDEEEIKATNPVATEEYGAVAINNQAANTQAQTGLVHNQGVIPGMVWQNRDVYLQGPIWAKIPHTDGNFHPSPLMGGFGLKHPPPQILIKNTPVPADPPLTFNQAKLNSFITQYSTGQVSVEIEWELQKENSKRWNPEIQYTSNYYKSTNVDFAVNTEGVYSEPRPIGTRYLTRNL

SEQ ID NO: 973 - protein, 651 aa, Artificial Sequence
  source: /note="Description of Artificial Sequence: Synthetic polypeptide"
MPSSVIDALQYKLEGTTRLTRKRGLKLATALSLSNKFVEGSPSGGGGSGGGGSAPGKKRPVEQSPQEPDSSSGIGKTGQQPAKKRLNFGQTGDSESVPDPQPLGEPPAAPSGLGPNTMASGGGAPMADNNEGADGVGNSSGNWHCDSTWLGDRVITTSTRTWALPTYNNHLYKQISNGTSGGSTNDNTYFGYSTPWGYFDFNRFHCHFSPRDWQRLINNNWGFRPKRLNFKLFNIQVKEVTTNEGTKTIANNLTSTVQVFTDSEYQLPYVLGSAHQGCLPPFPADVFMVPQYGYLTLNNGSQALGRSSFYCLEYFPSQMLRTGNNFQFSYTFEDVPFHSSYAHSQSLDRLMNPLIDQYLYYLVRTQTTGTGGTQTLAFSQAGPSSMANQARNWVPGPCYRQQRVSTTTNQNNNSNFAWTGAAKFKLNGRDSLMNPGVAMASHKDDDDRFFPSSGVLIFGKQGAGNDGVDYSQVLITDEEEIKATNPVATEEYGAVAINNQAANTQAQTGLVHNQGVIPGMVWQNRDVYLQGPIWAKIPHTDGNFHPSPLMGGFGLKHPPPQILIKNTPVPADPPLTFNQAKLNSFITQYSTGQVSVEIEWELQKENSKRWNPEIQYTSNYYKSTNVDFAVNTEGVYSEPRPIGTRYLTRNL

SEQ ID NO: 974 - protein, 638 aa, Artificial Sequence
  source: /note="Description of Artificial Sequence: Synthetic polypeptide"
MYTIWMPENPRPGTPCDIFTNSRGKRASNGGGGGSGGGGSAPGKKRPVEQSPQEPDSSSGIGKTGQQPAKKRLNFGQTGDSESVPDPQPLGEPPAAPSGLGPNTMASGGGAPMADNNEGADGVGNSSGNWHCDSTWLGDRVITTSTRTWALPTYNNHLYKQISNGTSGGSTNDNTYFGYSTPWGYFDFNRFHCHFSPRDWQRLINNNWGFRPKRLNFKLFNIQVKEVTTNEGTKTIANNLTSTVQVFTDSEYQLPYVLGSAHQGCLPPFPADVFMVPQYGYLTLNNGSQALGRSSFYCLEYFPSQMLRTGNNFQFSYTFEDVPFHSSYAHSQSLDRLMNPLIDQYLYYLVRTQTTGTGGTQTLAFSQAGPSSMANQARNWVPGPCYRQQRVSTTTNQNNNSNFAWTGAAKFKLNGRDSLMNPGVAMASHKDDDDRFFPSSGVLIFGKQGAGNDGVDYSQVLITDEEEIKATNPVATEEYGAVAINNQAANTQAQTGLVHNQGVIPGMVWQNRDVYLQGPIWAKIPHTDGNFHPSPLMGGFGLKHPPPQILIKNTPVPADPPLTFNQAKLNSFITQYSTGQVSVEIEWELQKENSKRWNPEIQYTSNYYKSTNVDFAVNTEGVYSEPRPIGTRYLTRNL

SEQ ID NO: 975 - protein, 628 aa, Artificial Sequence
  source: /note="Description of Artificial Sequence: Synthetic polypeptide"
MTFFYGGSRGKRNNFKTEEYGGGGSGGGGSAPGKKRPVEQSPQEPDSSSGIGKTGQQPAKKRLNFGQTGDSESVPDPQPLGEPPAAPSGLGPNTMASGGGAPMADNNEGADGVGNSSGNWHCDSTWLGDRVITTSTRTWALPTYNNHLYKQISNGTSGGSTNDNTYFGYSTPWGYFDFNRFHCHFSPRDWQRLINNNWGFRPKRLNFKLFNIQVKEVTTNEGTKTIANNLTSTVQVFTDSEYQLPYVLGSAHQGCLPPFPADVFMVPQYGYLTLNNGSQALGRSSFYCLEYFPSQMLRTGNNFQFSYTFEDVPFHSSYAHSQSLDRLMNPLIDQYLYYLVRTQTTGTGGTQTLAFSQAGPSSMANQARNWVPGPCYRQQRVSTTTNQNNNSNFAWTGAAKFKLNGRDSLMNPGVAMASHKDDDDRFFPSSGVLIFGKQGAGNDGVDYSQVLITDEEEIKATNPVATEEYGAVAINNQAANTQAQTGLVHNQGVIPGMVWQNRDVYLQGPIWAKIPHTDGNFHPSPLMGGFGLKHPPPQILIKNTPVPADPPLTFNQAKLNSFITQYSTGQVSVEIEWELQKENSKRWNPEIQYTSNYYKSTNVDFAVNTEGVYSEPRPIGTRYLTRNL

SEQ ID NO: 976 - protein, 621 aa, Artificial Sequence
  source: /note="Description of Artificial Sequence: Synthetic polypeptide"
MNNQKIVNLKEKVAQLEAGGGGSAPGKKRPVEQSPQEPDSSAGIGKSGAQPAKKRLNFGQTGDTESVPDPQPIGEPPAAPSGVGSLTMASGGGAPVADNNEGADGVGSSSGNWHCDSQWLGDRVITTSTRTWALPTYNNHLYKQISNSTSGGSSNDNAYFGYSTPWGYFDFNRFHCHFSPRDWQRLINNNWGFRPKRLNFKLFNIQVKEVTDNNGVKTIANNLTSTVQVFTDSDYQLPYVLGSAHEGCLPPFPADVFMIPQYGYLTLNDGSQAVGRSSFYCLEYFPSQMLRTGNNFQFNYEFENVPFHSSYAHSQSLDRLMNPLIDQYLYYLSKTINDSGQNQQTLKFSVAGPSNMAVQGRNYIPGPSYRQQRVSTTVTQNNNSEFAWPGASSWALNGRNSLMNPGPAMASHKEGEDRFFPLSGSLIFGKQGTGRDNVDADEVMITNEEEIKTTNPVATESYGQVAINHQSAQAQAQTGWVQNQGILPGMVWQDRDVYLQGPIWAKIPHTDGNFHPSPLMGGFGMKHPPPQILIKNTPVPADPPTAFNKDKLNSFITQYSTGQVSVEIEWELQKENSKRWNPEIQYTSNYYKSNNVEFAVNTEGVYSEPRPIGTRYLTRNL

SEQ ID NO: 977 - protein, 633 aa, Artificial Sequence
  source: /note="Description of Artificial Sequence: Synthetic polypeptide"
MYTIWMPENPRPGTPCDIFTNSRGKRASNGGGGGSAPGKKRPVEQSPQEPDSSAGIGKSGAQPAKKRLNFGQTGDTESVPDPQPIGEPPAAPSGVGSLTMASGGGAPVADNNEGADGVGSSSGNWHCDSQWLGDRVITTSTRTWALPTYNNHLYKQISNSTSGGSSNDNAYFGYSTPWGYFDFNRFHCHFSPRDWQRLINNNWGFRPKRLNFKLFNIQVKEVTDNNGVKTIANNLTSTVQVFTDSDYQLPYVLGSAHEGCLPPFPADVFMIPQYGYLTLNDGSQAVGRSSFYCLEYFPSQMLRTGNNFQFNYEFENVPFHSSYAHSQSLDRLMNPLIDQYLYYLSKTINDSGQNQQTLKFSVAGPSNMAVQGRNYIPGPSYRQQRVSTTVTQNNNSEFAWPGASSWALNGRNSLMNPGPAMASHKEGEDRFFPLSGSLIFGKQGTGRDNVDADEVMITNEEEIKTTNPVATESYGQVAINHQSAQAQAQTGWVQNQGILPGMVWQDRDVYLQGPIWAKIPHTDGNFHPSPLMGGFGMKHPPPQILIKNTPVPADPPTAFNKDKLNSFITQYSTGQVSVEIEWELQKENSKRWNPEIQYTSNYYKSNNVEFAVNTEGVYSEPRPIGTRYLTRNL

SEQ ID NO: 978 - protein, 623 aa, Artificial Sequence
  source: /note="Description of Artificial Sequence: Synthetic polypeptide"
MTFFYGGSRGKRNNFKTEEYGGGGSAPGKKRPVEQSPQEPDSSAGIGKSGAQPAKKRLNFGQTGDTESVPDPQPIGEPPAAPSGVGSLTMASGGGAPVADNNEGADGVGSSSGNWHCDSQWLGDRVITTSTRTWALPTYNNHLYKQISNSTSGGSSNDNAYFGYSTPWGYFDFNRFHCHFSPRDWQRLINNNWGFRPKRLNFKLFNIQVKEVTDNNGVKTIANNLTSTVQVFTDSDYQLPYVLGSAHEGCLPPFPADVFMIPQYGYLTLNDGSQAVGRSSFYCLEYFPSQMLRTGNNFQFNYEFENVPFHSSYAHSQSLDRLMNPLIDQYLYYLSKTINDSGQNQQTLKFSVAGPSNMAVQGRNYIPGPSYRQQRVSTTVTQNNNSEFAWPGASSWALNGRNSLMNPGPAMASHKEGEDRFFPLSGSLIFGKQGTGRDNVDADEVMITNEEEIKTTNPVATESYGQVAINHQSAQAQAQTGWVQNQGILPGMVWQDRDVYLQGPIWAKIPHTDGNFHPSPLMGGFGMKHPPPQILIKNTPVPADPPTAFNKDKLNSFITQYSTGQVSVEIEWELQKENSKRWNPEIQYTSNYYKSNNVEFAVNTEGVYSEPRPIGTRYLTRNL

SEQ ID NO: 979 - protein, 623 aa, Artificial Sequence
  source: /note="Description of Artificial Sequence: Synthetic polypeptide"
MAAAAAAAAAAAAAAAAAAAGGGGSAPGKKRPVEQSPQEPDSSAGIGKSGAQPAKKRLNFGQTGDTESVPDPQPIGEPPAAPSGVGSLTMASGGGAPVADNNEGADGVGSSSGNWHCDSQWLGDRVITTSTRTWALPTYNNHLYKQISNSTSGGSSNDNAYFGYSTPWGYFDFNRFHCHFSPRDWQRLINNNWGFRPKRLNFKLFNIQVKEVTDNNGVKTIANNLTSTVQVFTDSDYQLPYVLGSAHEGCLPPFPADVFMIPQYGYLTLNDGSQAVGRSSFYCLEYFPSQMLRTGNNFQFNYEFENVPFHSSYAHSQSLDRLMNPLIDQYLYYLSKTINDSGQNQQTLKFSVAGPSNMAVQGRNYIPGPSYRQQRVSTTVTQNNNSEFAWPGASSWALNGRNSLMNPGPAMASHKEGEDRFFPLSGSLIFGKQGTGRDNVDADEVMITNEEEIKTTNPVATESYGQVAINHQSAQAQAQTGWVQNQGILPGMVWQDRDVYLQGPIWAKIPHTDGNFHPSPLMGGFGMKHPPPQILIKNTPVPADPPTAFNKDKLNSFITQYSTGQVSVEIEWELQKENSKRWNPEIQYTSNYYKSNNVEFAVNTEGVYSEPRPIGTRYLTRNL

SEQ ID NO: 980 - DNA, 2214 bp, Artificial Sequence
  source: /note="Description of Artificial Sequence: Synthetic polynucleotide"
atggctgccgatggttatcttccagattggctcgaggacaacctctctgagggcattcgcgagtggtgggacttgaaacctggagccccgaagcccaaagccaaccagcaaaagcaggacgacggccggggtctggtgcttcctggctacaagtacctcggacccttcaacggactcgacaagggggagcccgtcaacgcggcggacgcagcggccctcgagcacgacaaggcctacgaccagcagctcaaagcgggtgacaatccgtacctgcggtataaccacgccgacgtcgagtttcaggagcgtctgcaagaagatacgtcttttgggggcaacctcgggcgagcagtcttccaggccaagaagagggttctcgaaccttttggtctggttgaggaaggcgctaagacggctcctggaaagaaacgtccggtagagcagtcgccacaagagccagactcctcctcgggcatcggcaagaaaggccaacagcccgccagaaaaagactcaattttggccagactggcgactcagagtcagttccagaccctcaacctctcggagaacctccagcagcgccctctggtgtgggacctaatacaatggctgcaggcggtggcgcaccaatggcagacaataacgagggcgccgacggagtgggtaattcctcgggaaattggcattgcgattccacatggatgggggacagagtcatcaccaccagcacccgaacctgggccctgcccacctacaacaaccacctctacaagcaaatctccaacggcacctcgggaggaagcaccaacgacaacacctattttggctacagcaccccctgggggtattttgatttcaacagattccactgccacttctcaccacgtgactggcagcgactcatcaacaacaactggggattccggccaaaaagactcagcttcaagctcttcaacatccaggtcaaggaggtcacgcagaatgaaggcaccaagaccatcgccaataaccttaccagcacgattcaggtatttacggactcggaataccagctgccatacgtcctcggctccgcgcaccagggctgcctgcctccgttcccggcggacgtcttcatgattccccagtacggctaccttacactgaacaatggaagtcaagccgtaggccgttcctccttctactgcctggaatattttccttctcaaatgctgagaacgggcaacaactttgagttcagctaccagtttgaggacgtgccttttcacagcagctacgcgcacagccaaagcctggaccggctgatgaaccccctcatcgaccagtacctgtactacctgtctcggactcagtccacgggaggtaccgcaagaactcagcagttgctattttctcaggccgggcctaatacaatggccaatcaggcaaagaactggctgccaggaccctgttaccgccaacaacgcgtctcaacgacaaccgggcaaaacaacaatagcaactctgcctggactgctgggaccaaataccatctgaatggaagaaattcattggctaatcctggcatcgctatggcaacacacaaagacgacgaggagcgtttttttcccagtaacgggatcctgatttttggcaaacaaaatgctgccagagacaatgcggattacagcgatgtcatgctcaccagcgaggaagaaatcaaaaccactaaccctgtggctacagaggaatacggtatcgtggcagataacttgcagcagcaaaacacggctcctcaaattggaactgtcaacagccagggggccttacccggtatggtctggcagaaccgggacgtgtacctgcagggtcccatctgggccaagattcctcacacggacggcaacttccacccatctccgctgatgggcggctttggcctgaaacatcctccgcctcagatcctgatcaagaacacgcctgtacctgcggatcctccgaccaccttcaaccagtcaaagctgaactctttcatcacgcaatacagcaccggacaggtcagcgtggaaattgaatgggagctacagaaggaaaacagcaagcgctggaaccccgagatccagtacacctccaactactacaaatctacaagtgtggactttgctgttaatacagaaggcgtgtactctgaaccccgccccattggcacccgttacctcacccgtaatctgtaa

SEQ ID NO: 981 - DNA, 2214 bp, Artificial Sequence
  source: /note="Description of Artificial Sequence: Synthetic polynucleotide"
atggctgccgatggttatcttccagattggctcgaggacaacctctctgagggcattcgcgagtggtgggcgctgaaacctggagccccgaagcccaaagccaaccagcaaaagcaggacgacggccggggtctggtgcttcctggctacaagtacctcggacccttcaacggactcgacaagggggagcccgtcaacgcggcggacgcagcggccctcgagcacgacaaggcctacgaccagcagctcaaagcgggtgacaatccgtacctgcggtataaccacgccgacgccgagtttcaggagcgtctgcaagaagatacgtcttttgggggcaacctcgggcgagcagtcttccaggccaagaagcgggttctcgaacctctcggtctggttgaggacggcgctaagacggctcctggaaagaagagaccagtagagcagtcaccccaagaaccagactcctcctcgggcatcggcaagaaaggccaacagcccgccagaaaaagactcaattttggccagactggcgactcagagtcagttccagaccctcaacctctcggagaacctccagcaacccccgctgctgtgggacctactacaatggcttcaggcggtggcgcaccaatggcagacaataacgaaggcgccgacggagtgggtagttcctcgggaaattggcattgcgattccacatggctgggcgacagagtcatcaccaccagcacccgaacctgggccctgcccacctacaacaaccacctctacaagcaaatctccaacgggacatcgggaggagccaccaacgacaacacctacttcggctacagcaccccctgggggtattttgactttaacagattccactgccacttttcaccacgtgactggcagcgactcatcaacaacaactggggattccggcccaagagactcagcttcaagctcttcaacatccaggtcaaggaggtcacgcagaatgaaggcaccaagaccatcgccaataacctcaccagcaccatccaggtgtttacggactcggagtaccagctgccgtacgttctcggctctgcccaccagggctgcctgcctccgttcccggcggacgtgttcatgattccccagtacggctacctaacactcaacaacggtagtcaggccgtgggacgctcctccttctactgcctggaatactttccttcgcagatgctgagaaccggcaacaacttccagtttacttacaccttcgaggacgtgcctttccacagcagctacgcccacagccagagcttggaccggctgatgaatcctctgattgaccagtacctgtactacttgtctcggactcaaacaacaggaggcacggcaaatacgcagactctgggcttcagccaaggtgggcctaatacaatggccaatcaggcaaagaactggctgccaggaccctgttaccgccaacaacgcgtctcaacgacaaccgggcaaaacaacaatagcaactttgcctggactgctgggaccaaataccatctgaatggaagaaattcattggctaatcctggcatcgctatggcaacacacaaggacgacgaggagcgtttttttcccagtaacgggatcctgatttttggcaaacaaaatgctgccagagacaatgcggattacagcgatgtcatgctcaccagcgaggaagaaatcaaaaccactaaccctgtggctacagaggaatacggtatcgtggcagataacttgcagcagcaaaacacggctcctcaaattggaactgtcaacagccagggggccttacccggtatggtctggcagaaccgggacgtgtacctgcagggtcccatctgggccaagattcctcacacggacggcaacttccacccgtctccgctgatgggcggctttggcctgaaacatcctccgcctcagatcctgatcaagaacacgcctgtacctgcggatcctccgaccaccttcaaccagtcaaagctgaactctttcatcacgcaatacagcaccggacaggtcagcgtggaaatcgagtgggagctgcagaaagaaaacagcaagcgctggaaccccgagatccagtacacctccaactactacaaatctacaaatgtggactttgctgtcaacacggagggggtttatagcgagcctcgccccattggcacccgttacctcacccgcaacctgtaa

SEQ ID NO: 982 - DNA, 2211 bp, Artificial Sequence
  source: /note="Description of Artificial Sequence: Synthetic polynucleotide"
  modified_base (715)..(715): a, c, g or t
atggctgccgatggttatcttccagattggctcgaggacaacctctctgagggcattcgcgagtggtgggcgctgaaacctggagccccgaagcccaaagccaaccagcaaaagcaggacgacggccggggtctggtgcttcctggctacaagtacctcggacccttcaacggactcgacaagggggagcccgtcaacgcggcggacgcagcggccctcgagcacgacaaggcctacgaccagcagctcaaagcgggtgacaatccgtacctgcggtataaccacgccgacgccgagtttcaggagcgtctgcaagaagatacgtcttttgggggcaacctcgggcgagcagtcttccaggccaagaagcgggttctcgaacctctcggtctggttgaggaaggcgctaagacggctcctggaaagaaacgtccggtagagcagtcgccacaagagccagactcctcctcgggcatcggcaagacaggccagcagcccgctaaaaagaggctcaattttggtcagactggcgactcagagtcagtccccgacccacaacctctcggagaacctccagcaacccccgctgctgtgggacctactacaatggcttcaggcggtggcgcaccaatggcagacaataacgaaggcgccgacggagtgggtaatgcctcaggaaattggcattgcgattccacatggctgggcgacagantcatcaccaccagcacccgaacatgggccttgcccacctataacaaccacctctacaagcaaatctccagtgcttcaacgggggccagcaacgacaaccactacttcggctacagcaccccctgggggtattttgatttcaacagattccactgccatttctcaccacgtgactggcagcgactcatcaacaacaattggggattccggcccaagagactcaacttcaagctcttcaacatccaagtcaaggaggtcacgcagaatgaaggcaccaagaccatcgccaataacctcaccagcaccatccaggtgtttacggactcggagtaccagctgccgtacgttctcggctctgcccaccagggctgcctgcctccgttcccggcggacgtgttcatgattccccagtacggctacctaacactcaacaacggtagtcaggccgtgggacgctcctccttctactgcctggaatattttccatctcaaatgctgcgaactggaaacaattttgaattcagctacaccttcgaggacgtgcctttccacagcagctacgcacacagccagagcttggaccgactgatgaatcctctcatcgaccagtacctgtactacttgtctcggactcaaacaacaggaggcacggcaaatacgcagactctgggcttcagccaaggtgggcctaatacaatggccaatcaggcaaagaactggctgccaggaccctgttaccgccaacaacgcgtctcaacgacaaccgggcaaaacaacaatagcaactttgcctggactgctgggaccaaataccatctgaatggaagaaattcattggctaatcctggcatcgctatggcaacacacaaagacgacgaggagcgtttttttcccagtaacgggatcctgatttttggcaaacaaaatgctgccagagacaatgcggattacagcgatgtcatgctcaccagcgaggaagaaatcaaaaccactaaccctgtggctacagaggaatacggtatcgtggcagataacttgcagcagcaaaacacggctcctcaaattggaactgtcaacagccaggggaccttacccggtatggtctggcagaaccgggacgtgtacctgcagggtcccatctgggccaagattcctcacacggacggcaacttccacccgtctccgctgatgggcggctttggcctgaaacatcctccgcctcagatcctgatcaagaacacgcctgtacctgcggatcctccgaccaccttcaaccagtcaaagctgaactctttcatcacgcaatacagcaccggacaggtcagcgtggaaattgaatgggagctacagaaggaaaacagcaagcgctggaaccccgagatccagtacacctccaattactacaaatctacaagtgtggactttgctgttaatacagaaggcgtgtactctgaaccccgccccattggcacgcgtttcctcacccgtaatctgtaa

SEQ ID NO: 983 - DNA, 2214 bp, Artificial Sequence
  source: /note="Description of Artificial Sequence: Synthetic polynucleotide"
atggctgccgatggttatcttccagattggctcgaggacaacctctctgagggcattcgcgagtggtgggcgctgaaacctggagccccgaagcccaaagccaaccagcaaaagcaggacgacggccggggtctggtgcttcctggctacaagtacctcggacccttcaacggactcgacaagggggagcccgtcaacgcggcggacgcagcggccctcgagcacgacaaggcctacgaccagcagctcaaagcgggtgacaatccgtacctgcggtataaccacgccgacgccgagtttcaggagcgtctgcaagaagatacgtcttttgggggcaacctcgggcgagcagtcttccaggccaagaagcgggttctcgaacctctcggtctggttgaggaaggcgctaagacggctcctggaaagaaacgtccggtagagcagtcgccacaagagccagactcctcctcgggcatcggcaagacaggccagcagcccgctaaaaagaggctcaattttggccagactggcgactcagagtcagttccagaccctcaacctctcggagaacctccagcagcgccctctggtgtgggacctaatacaatggctgcaggcggtggcgcaccaatggcagacaataacgaaggcgccgacggagtgggtagttcctcgggaaattggcattgcgattccacatggctgggcgacagagtcatcaccaccagcacccgaacctgggccctgcccacctacaacaaccacctctacaagcaaatctccaacgggacatcgggaggagccaccaacgacaacacctacttcggctacagcaccccctgggggtattttgactttaacagattccactgccacttttcaccacgtgactggcagcgactcatcaacaacaactggggattccggcccaagagactcagcttcaagctcttcaacatccaggtcaaggaggtcacgcagaatgaaggcaccaagaccatcgccaataacctcaccagcaccatccaggtgtttacggactcggagtaccagctgccgtacgtactaggatccgctcaccagggatgtctgcctccgttcccggcggacgtgttcatgattccccagtacggctacctaacactcaacaacggtagtcaggccgtgggacgctcctccttctactgcctggaatattttccatctcagatgctgagaacgggcaataactttaccttcagctacaccttcgaggacgtgcctttccacagcagctatgcccacagccagagcttggaccggctgatgaatcctctgattgaccagtacctgtactacttgtctcggactcaaacaacaggaggcacggcaaatacgcagactctgggcttcagccaaggtgggcctaatacaatggccaatcaggcaaagaactggctgccaggaccctgttaccgccaacaacgcgtctcaacgacaaccgggcaaaacaacaatagcaactttgcctggactgctgggaccaaataccatctgaatggaagaaattcattggctaatcctggcatcgctatggcaacacacaaagacgacgaggagcgtttttttcccagtaacgggatcctgatttttggcaaacaaaatgctgccagagacaatgcggattacagcgatgtcatgctcaccagcgaggaagaaatcaaaaccactaaccctgtggctacagaggaatacggtatcgtggcagataacttgcagcagcaaaacacggctcctcaaattggaactgtcaacagccagggggccttacccggtatggtctggcagaaccgggacgtgtacctgcagggtcccatctgggccaagattcctcacacggacggcaacttccacccgtctccgctaatgggaggatttggactgaagcacccacctcctcagatcctgatcaagaacacgccggtacctgcggatcctccgaccaccttcaaccagtcaaagctgtactctttcatcacgcaatacagcaccggacaggtcagcgtggaaattgaatgggagctgcagaaggaaaacagcaagcgctggaaccccgagatccaatacacctccaactactacaaatctacaagtgtggactttgctgttaatacagaaggcgtgtactctgaaccccgccccattggcacccgttacctcacccgtaatctgtaa

SEQ ID NO: 984 - protein, 737 aa, Artificial Sequence
  source: /note="Description of Artificial Sequence: Synthetic polypeptide"
MAADGYLPDWLEDNLSEGIREWWDLKPGAPKPKANQQKQDDGRGLVLPGYKYLGPFNGLDKGEPVNAADAAALEHDKAYDQQLKAGDNPYLRYNHADVEFQERLQEDTSFGGNLGRAVFQAKKRVLEPFGLVEEGAKTAPGKKRPVEQSPQEPDSSSGIGKKGQQPARKRLNFGQTGDSESVPDPQPLGEPPAAPSGVGPNTMAAGGGAPMADNNEGADGVGNSSGNWHCDSTWMGDRVITTSTRTWALPTYNNHLYKQISNGTSGGSTNDNTYFGYSTPWGYFDFNRFHCHFSPRDWQRLINNNWGFRPKRLSFKLFNIQVKEVTQNEGTKTIANNLTSTIQVFTDSEYQLPYVLGSAHQGCLPPFPADVFMIPQYGYLTLNNGSQAVGRSSFYCLEYFPSQMLRTGNNFEFSYQFEDVPFHSSYAHSQSLDRLMNPLIDQYLYYLSRTQSTGGTARTQQLLFSQAGPNTMANQAKNWLPGPCYRQQRVSTTTGQNNNSNSAWTAGTKYHLNGRNSLANPGIAMATHKDDEERFFPSNGILIFGKQNAARDNADYSDVMLTSEEEIKTTNPVATEEYGIVADNLQQQNTAPQIGTVNSQGALPGMVWQNRDVYLQGPIWAKIPHTDGNFHPSPLMGGFGLKHPPPQILIKNTPVPADPPTTFNQSKLNSFITQYSTGQVSVEIEWELQKENSKRWNPEIQYTSNYYKSTSVDFAVNTEGVYSEPRPIGTRYLTRNL

SEQ ID NO: 985 - protein, 737 aa, Artificial Sequence
  source: /note="Description of Artificial Sequence: Synthetic polypeptide"
MAADGYLPDWLEDNLSEGIREWWALKPGAPKPKANQQKQDDGRGLVLPGYKYLGPFNGLDKGEPVNAADAAALEHDKAYDQQLKAGDNPYLRYNHADAEFQERLQEDTSFGGNLGRAVFQAKKRVLEPLGLVEDGAKTAPGKKRPVEQSPQEPDSSSGIGKKGQQPARKRLNFGQTGDSESVPDPQPLGEPPATPAAVGPTTMASGGGAPMADNNEGADGVGSSSGNWHCDSTWLGDRVITTSTRTWALPTYNNHLYKQISNGTSGGATNDNTYFGYSTPWGYFDFNRFHCHFSPRDWQRLINNNWGFRPKRLSFKLFNIQVKEVTQNEGTKTIANNLTSTIQVFTDSEYQLPYVLGSAHQGCLPPFPADVFMIPQYGYLTLNNGSQAVGRSSFYCLEYFPSQMLRTGNNFQFTYTFEDVPFHSSYAHSQSLDRLMNPLIDQYLYYLSRTQTTGGTANTQTLGFSQGGPNTMANQAKNWLPGPCYRQQRVSTTTGQNNNSNFAWTAGTKYHLNGRNSLANPGIAMATHKDDEERFFPSNGILIFGKQNAARDNADYSDVMLTSEEEIKTTNPVATEEYGIVADNLQQQNTAPQIGTVNSQGALPGMVWQNRDVYLQGPIWAKIPHTDGNFHPSPLMGGFGLKHPPPQILIKNTPVPADPPTTFNQSKLNSFITQYSTGQVSVEIEWELQKENSKRWNPEIQYTSNYYKSTNVDFAVNTEGVYSEPRPIGTRYLTRNL

SEQ ID NO: 986 - protein, 736 aa, Artificial Sequence
  source: /note="Description of Artificial Sequence: Synthetic polypeptide"
  MOD_RES (239)..(239): Any naturally occurring amino acid
MAADGYLPDWLEDNLSEGIREWWALKPGAPKPKANQQKQDDGRGLVLPGYKYLGPFNGLDKGEPVNAADAAALEHDKAYDQQLKAGDNPYLRYNHADAEFQERLQEDTSFGGNLGRAVFQAKKRVLEPLGLVEEGAKTAPGKKRPVEQSPQEPDSSSGIGKTGQQPAKKRLNFGQTGDSESVPDPQPLGEPPATPAAVGPTTMASGGGAPMADNNEGADGVGNASGNWHCDSTWLGDRXITTSTRTWALPTYNNHLYKQISSASTGASNDNHYFGYSTPWGYFDFNRFHCHFSPRDWQRLINNNWGFRPKRLNFKLFNIQVKEVTQNEGTKTIANNLTSTIQVFTDSEYQLPYVLGSAHQGCLPPFPADVFMIPQYGYLTLNNGSQAVGRSSFYCLEYFPSQMLRTGNNFEFSYTFEDVPFHSSYAHSQSLDRLMNPLIDQYLYYLSRTQTTGGTANTQTLGFSQGGPNTMANQAKNWLPGPCYRQQRVSTTTGQNNNSNFAWTAGTKYHLNGRNSLANPGIAMATHKDDEERFFPSNGILIFGKQNAARDNADYSDVMLTSEEEIKTTNPVATEEYGIVADNLQQQNTAPQIGTVNSQGTLPGMVWQNRDVYLQGPIWAKIPHTDGNFHPSPLMGGFGLKHPPPQILIKNTPVPADPPTTFNQSKLNSFITQYSTGQVSVEIEWELQKENSKRWNPEIQYTSNYYKSTSVDFAVNTEGVYSEPRPIGTRFLTRNL

SEQ ID NO: 987 - protein, 737 aa, Artificial Sequence
  source: /note="Description of Artificial Sequence: Synthetic polypeptide"
MAADGYLPDWLEDNLSEGIREWWALKPGAPKPKANQQKQDDGRGLVLPGYKYLGPFNGLDKGEPVNAADAAALEHDKAYDQQLKAGDNPYLRYNHADAEFQERLQEDTSFGGNLGRAVFQAKKRVLEPLGLVEEGAKTAPGKKRPVEQSPQEPDSSSGIGKTGQQPAKKRLNFGQTGDSESVPDPQPLGEPPAAPSGVGPNTMAAGGGAPMADNNEGADGVGSSSGNWHCDSTWLGDRVITTSTRTWALPTYNNHLYKQISNGTSGGATNDNTYFGYSTPWGYFDFNRFHCHFSPRDWQRLINNNWGFRPKRLSFKLFNIQVKEVTQNEGTKTIANNLTSTIQVFTDSEYQLPYVLGSAHQGCLPPFPADVFMIPQYGYLTLNNGSQAVGRSSFYCLEYFPSQMLRTGNNFTFSYTFEDVPFHSSYAHSQSLDRLMNPLIDQYLYYLSRTQTTGGTANTQTLGFSQGGPNTMANQAKNWLPGPCYRQQRVSTTTGQNNNSNFAWTAGTKYHLNGRNSLANPGIAMATHKDDEERFFPSNGILIFGKQNAARDNADYSDVMLTSEEEIKTTNPVATEEYGIVADNLQQQNTAPQIGTVNSQGALPGMVWQNRDVYLQGPIWAKIPHTDGNFHPSPLMGGFGLKHPPPQILIKNTPVPADPPTTFNQSKLYSFITQYSTGQVSVEIEWELQKENSKRWNPEIQYTSNYYKSTSVDFAVNTEGVYSEPRPIGTRYLTRNL

SEQ ID NO: 988 - DNA, 2208 bp, Artificial Sequence
  source: /note="Description of Artificial Sequence: Synthetic polynucleotide"
atggctgccgatggttatcttccagattggctcgaggacaacctctctgagggcattcgcgagtggtgggacttgaaacctggagccccgaaacccaaagccaaccagcaaaagcaggacgacggccggggtctggtgcttcctggctacaagtacctcggacccttcaacggactcgacaagggggagcccgtcaacgcggcggatgcagcggccctcgagcacgacaaagcctacgaccggcagctcgacagcggagacaacccgtacctcaagtacaaccacgccgacgcggagtttcaggagcgccttaaagaagatacgtcttttgggggcaacctcggacgagcagtcttccaggccaagaagagggttctcgaaccttttggtctggttgaggaaggtgctaagacggctcctggaaagaaacgtccggtagagcagtcgccacaagagccagactcctcctcgggcattggcaagacaggccagcagcccgctaaaaagagactcaattttggtcagactggcgactcagagtcagtccccgacccacaacctctcggagaacctccagcaacccccgctgctgtgggacctactacaatggcttcaggtggtggcgcaccagtggcagacaataacgaaggcgccgacggagtgggtagttcctcgggaaattggcattgcgattccacatggctgggcgacagagtcatcaccaccagcacccgaacatgggccttgcccacctataacaaccacctctacaagcaaatctccagtgcttcgacgggggccagcaacgacaaccactacttcggctacagcaccccctgggggtattttgatttcaacaggttccactgccatttctcaccacgtgactggcagcgactcatcaacaacaattggggattccggcccaaaagactcaacttcaagctgttcaacatccaggtcaaggaagtcacgacgaacgaaggcaccaagaccatcgccaataatctcaccagcaccgtgcaggtctttacggactcggagtaccagttaccgtacgtgctaggatccgctcaccagggatgtctgcctccgttcccggcggacgtcttcatggttcctcagtacggctatttaactttaaacaatggaagccaagccctgggacgttcctccttctactgtctggagtatttcccatcgcagatgctgagaacgggcaacaactttacctttagctacaccttcgaggacgtgcctttccacagcagctacgcgcacagccagagcctggacaggctgatgaatcccctcatcgaccagtacctgtactacctggtcagaacgcaaacgactggaactggagggacgcagactctggcattcagccaagcgggtcctagctcaatggccaaccaggctagaaattgggtgcccggaccttgctaccggcagcagcgcgtctccacgacaaccaaccagaacaacaacagcaactttgcctggacgggagctgccaagtttaagctgaacggccgagactctctaatgaatccgggcgtggcaatggcttcccacaaggatgacgacgaccgcttcttcccttcgagcggggtcctgatttttggcaagcaaggagccgggaacgatggagtggattacagccaagtgctgattacagatgaggaagaaatcaaggctaccaaccccgtggccacagaagaatatggagcagtggccatcaacaaccaggccgccaatacgcaggcgcagaccggactcgtgcacaaccagggggtgattcccggcatggtgtggcagaatagagacgtgtacctgcagggtcccatctgggccaaaattcctcacacggacggcaactttcacccgtctcccctgatgggcggctttggactgaagcacccgcctcctcaaattctcatcaagaacacaccggttccagcggacccgccgcttaccttcaaccaggccaagctgaactctttcatcacgcagtacagcaccggacaggtcagcgtggaaatcgagtgggagctgcagaaagaaaacagcaaacgctggaatccagagattcaatacacttccaactactacaaatctacaaatgtggactttgctgtcaacacggagggggtttatagcgagcctcgccccattggcacccgttacctcacccgcaacctgtaa

SEQ ID NO: 989 - DNA, 2211 bp, Artificial Sequence
  source: /note="Description of Artificial Sequence: Synthetic polynucleotide"
  modified_base (337)..(337): a, c, g or t
atggctgccgatggttatcttccagattggctcgaggacactctctctgaaggaataagacagtggtggaagctcaaacctggcccaccaccaccaaagcccgcagagcggcataaggacgacagcaggggtcttgtgcttcctggctacaagtacctcggacccttcaacggactcgacaagggggagcccgtcaacgcggcggacgcagcgaccctcgagcacgacaaggcctacgaccagcagctcaaagcgggtgacaatccgtacctgcggtataaccacgccgacgccgagtttcaggagcgtctgcaagaagatacgtcttttgggggcnacctcgggcgagcagtcttccaggccaagaagcgggttctcgaacctctcggtctggttgaggaagctgctaagacggctcctggaaagaagagaccagtagagccatcaccccagcgttctccagactcctctacgggcatcggcaagaaaggccaacagcccgccagaaaaagactcaattttggtcagactggcgactcagagtcagttccagaccctcaacctctcggagaacctccagcagcgccctctggtgtgggacctaatacaatggctgcaggcggtggcgcaccaatggcagacaataacgaaggcgccgacggagtgggtagttcctcgggaaattggcattgcgattccacatggctgggcgacagagtcatcaccaccagcacccgaacctgggccctgcccacctacaacaaccacctctacaagcaaatctccagtgcttcaacgggggccagcaacgacaaccactacttcggctacagcaccccctgggggtattttgatttcaacagattccactgccatttctcaccacgtgactggcagcgactcatcaacaacaattggggattccggcccaagagactcaacttcaagctcttcaacatccaagtcaaggaggtcacgacgaatgatggcgtcacgaccatcgctaataaccttaccagcacggttcaagtcttctcggactcagactatcagctcccgtacgtgctcgggtcggctcacgagggctgcctcccgccgttcccagcggacgttttcatgattcctcagtacggctatttaactttaaacaatggaagccaagccctgggacgttcctccttctactgtctggagtatttcccatcgcagatgctgagaaccggcaacaactttcagttcagctacaccttcgaggacgtgcctttccacagcagctacgcgcacagccagagcctggacaggctgatgaatcccctcatcgaccagtacctgtactacctggtcagaacgcaaacgactggaactggagggacgcagactctggcattcagccaagcgggtcctagctcaatggccaaccaggctagaaattgggtgcccggaccttgctaccggcagcagcgcgtctccacgacaaccaaccagaacaacaacagcaactttgcctggacgggagctgccaagtttaagctgaacggccgagactctctaatgaatccgggcgtggcaatggcttcccacaaggatgacgacgaccgcttcttcccttcgagcggggtcctgatttttggcaagcaaggagccgggaacgatggagtggattacagccaagtgctgattacagatgaggaagaaatcaaggctaccaaccccgtagccacagaagaatatggagcagtggccatcaacaaccaggccgccaatacgcaggcgcagaccggactcgtgcacaaccagggggtgattcccggaatggtgtggcaagacagagacgtatacctgcagggtcctatttgggccaaaattcctcacacggatggacactttcacccgtctcctctcatgggcggctttggacttaagcacccgcctcctcagatcctcatcaaaaacacgcctgttcctgcgaatcctccggcagagttttcggctacaaagtttgcttcattcatcacccagtattccacaggacaagtgagcgtggagattgaatgggagctgcagaaagaaaacagcaaacgctggaatcccgaagtgcagtatacatctaactatgcaaaatctgccaacgttgatttcactgtggacaacaatggactttatactgagcctcgccccattggcacccgttacctcacccgtcccctgtaa

SEQ ID NO: 990 - DNA, 2214 bp, Artificial Sequence
  source: /note="Description of Artificial Sequence: Synthetic polynucleotide"
  modified_base (335)..(335): a, c, g or t
atgactgacggttaccttccagattggctagaggacaacctctctgaaggcgttcgagagtggtgggcgctgcaacctggagccccgaagcccaaagccaaccagcaaaagcaggacgacggccggggtctggtgcttcctggctacaagtacctcggacccttcaacggactcgacaagggggagcccgtcaacgcggcggacgcagcggccctcgagcacgacaaggcctacgaccagcagctcaaagcgggtgacaatccgtacctgcggtataaccacgccgacgccgagtttcaggagcgtctgcaagaagatacgtcttttgggggcancctcgggcgagcagtcttccaggccaagaagcgggttctcgaacctctcggtctggttgaggaaggcgctaagacggctcctggaaagaaacgtccggtagagccatcaccccagcgttctccagactcctctacgggcatcggcaagaaaggccaacagcccgccagaaaaagactcaattttggtcagactggcgactcagagtcagttccagaccctcaacctctcggagaacctccagcagcgccctcaggtgtgggatctcttacaatggcttcaggtggtggcgcaccagtggcagacaataacgaaggtgccgatggagtgggtagttcctcgggaaattggcattgcgattcccaatggctgggggacagagtcatcaccaccagcacccgaacctgggccctgcccacctacaacaatcacctctacaagcaaatctccaacagcacatctggaggatcttcaaatgacaacgcctacttcggctacagcaccccctgggggtattttgacttcaacagattccactgccacttctcaccacgtgactggcagcgactcatcaacaacaactggggattccggcccaagagactcagcttcaagctcttcaacatccaggtcaaggaggtcacgcagaatgaaggcaccaagaccatcgccaataacctcaccagcaccatccaggtgtttacggactcggagtaccagctgccgtacgttctcggctctgcccaccagggctgcctgcctccgttcccggcggacgtgttcatgattccccagtacggctacctaacactcaacaacggtagtcaggccgtgggacgctcctccttctactgcctggaatactttccttcgcagatgctgagaaccggcaacaacttccagtttacttacaccttcgaggacgtgcctttccacagcagctacgcccacagccagagcttggaccggctgatgaatcctctgattgaccagtacctgtactacttgtctcggactcaaacaacaggaggcacggcaaatacgcagactctgggcttcagccaaggtgggcctaatacaatggccaatcaggcaaagaactggctgccaggaccctgttaccgccaacaacgcgtctcaacgacaaccgggcaaaacaacaatagcaactttgcctggactgctgggaccaaataccatctgaatggaagaaattcattggctaatcctggcatcgctatggcaacacacaaagacgacgaggagcgtttttttcccagtaacgggatcctgatttttggcaaacaaaatgctgccagagacaatgcggattacagcgatgtcatgctcaccagcgaggaagaaatcaaaaccactaaccctgtggctacagaggaatacggtatcgtggcagataacttgcagcagcaaaacacggctcctcaaattggaactgtcaacagccagggggccttacccggtatggtctggcagaaccgggacgtgtacctgcagggtcccatctgggccaagattcctcacacggacggcaacttccacccgtctccgctgatgggcggctttggcctgaaacatcctccgcctcagatcctgatcaagaacacgcctgtacctgcggatcctccgaccaccttaaaccaggccaagctgaactctttcatcacgcaatacagcaccggacaggtcagcgtggaaattgaatgggagctgcagaaggaaaacagcaagcgctggaacccagagattcagtacacttcaaactactacaaatctacaaatgtggactttgctgtcaatacagagggaacttatagtgaaccccgccccattggcaccagatttctgactcgtaatctgtaa

SEQ ID NO: 991 - DNA, 2211 bp, Artificial Sequence
  source: /note="Description of Artificial Sequence: Synthetic polynucleotide"
  modified_base (338)..(338): a, c, g or t
atggctgccgatggttatcttccagattggctcgaggacactctctctgaaggaataagacagtggtggaagctcaaacctggcccaccaccaccaaagcccgcagagcggcataaggacgacagcaggggtcttgtgcttcctgggtacaagtacctcggccccttcaacggactcgacaagggggagcccgtcaacgcggcggacgcagcggccctcgagcacgacaaggcctacgaccagcagctcgaagcgggtgacaatccgtacctgcggtataaccacgccgacgccgagtttcaggagcgtctgcaagaagatacgtcttttgggggcancctcgggcgagcagtcttccaggccaagaagcgggttctcgaacctctcggtctggttgaggaaggcgctaagacggctcctggaaagaagagaccagtagagcagtcaccccaagaaccagactcctcctcgggcatcggcaggaaaggccaacagcccgccagaaaaagactcaattttggccagactggcgactcagagtcagttccagaccctcaacctctcggagaacctccagcagcgccctctggtgtgggacctaatacaatggcttcaggcggtggcgctccaatggcagacaataacgaaggcgccgacggagtgggtaatgcctcaggaaattggcattgcgattccacatggctgggcgacagagtcatcaccaccagcacccgcacctgggccttgcccacctacaataaccacctctacaagcaaatctccagtgcttcaacgggggccagcaacgacaaccactacttcggctacagcaccccctgggggtattttgatttcaacagattccactgccacttttcaccacgtgactggcagcgactcatcaacaacaattggggattccggcccaagagactcaacttcaaactcttcaacatccaggtcaaggaggtcacgcagaatgaaggcactaagaccatcgccaataaccttaccagcacgattcaggtatttacggactcggaataccagctgccgtacgtcctcggctccgcgcaccagggctgcctgcctccgttcccggcggacgtcttcatgattccccagtacggctaccttacactgaacaatggaagtcaagccgtaggccgttcctccttctactgcctggaatattttccatctcaaatgctgcgaactggcaacaacttccagtttacctacaccttcgaggacgtgcctttccacagcagctacgcccacagccagagcttggaccggctgatgaatcctctgattgaccagtacctgtactacttgtctcggactcagtccacaggaggaactcaaggtacccagcaattgttattttctcaagctgggcctgcaaacatgtcggctcaggctaagaactggctacctggaccttgctaccggcagcagcgagtctctacgacactgtcgcaaaacaacaacagcaactttgcttggactggtgccaccaaatatcacctgaacggaagagactctttggtaaatcccggtgtcgccatggcaacccacaaggacgacgaggaacgcttcttcccgtcgagtggagtcctgatgtttggaaaacagggtgctggaagagacaatgtggactacagcagcgttatgctaaccagcgaagaagaaattaaaaccactaaccctgtagccacagaacaatacggtgtggtggttgataacttgcagcaaaccaatacggggcctattgtgggaaatgtcaacagccaaggagccttacctggtatggtctggcagaaccgggacgtgtacctgcagggtcccatctgggccaagattcctcacacggacggcaacttccacccgtctccgctgatgggcggctttggcctgaaacatcctccgcctcagatcctcatcaaaaacacacctgtacctgcggatcctccaacggccttcaacaaggacaagctgaactctttcatcacccagtattctactggccaagtcagcgtggagatcgagtgggagctgcagaaggaaaacagcaagcgctggaacccggagatccagtacacttccaactattacaagtctaataatgttgaatttgctgttaatactgaaggtgtatatagtgaaccccgccccattggcaccagatacctgactcgtaatctgtaa

SEQ ID NO: 992 - protein, 735 aa, Artificial Sequence
  source: /note="Description of Artificial Sequence: Synthetic polypeptide"
MAADGYLPDWLEDNLSEGIREWWDLKPGAPKPKANQQKQDDGRGLVLPGYKYLGPFNGLDKGEPVNAADAAALEHDKAYDRQLDSGDNPYLKYNHADAEFQERLKEDTSFGGNLGRAVFQAKKRVLEPFGLVEEGAKTAPGKKRPVEQSPQEPDSSSGIGKTGQQPAKKRLNFGQTGDSESVPDPQPLGEPPATPAAVGPTTMASGGGAPVADNNEGADGVGSSSGNWHCDSTWLGDRVITTSTRTWALPTYNNHLYKQISSASTGASNDNHYFGYSTPWGYFDFNRFHCHFSPRDWQRLINNNWGFRPKRLNFKLFNIQVKEVTTNEGTKTIANNLTSTVQVFTDSEYQLPYVLGSAHQGCLPPFPADVFMVPQYGYLTLNNGSQALGRSSFYCLEYFPSQMLRTGNNFTFSYTFEDVPFHSSYAHSQSLDRLMNPLIDQYLYYLVRTQTTGTGGTQTLAFSQAGPSSMANQARNWVPGPCYRQQRVSTTTNQNNNSNFAWTGAAKFKLNGRDSLMNPGVAMASHKDDDDRFFPSSGVLIFGKQGAGNDGVDYSQVLITDEEEIKATNPVATEEYGAVAINNQAANTQAQTGLVHNQGVIPGMVWQNRDVYLQGPIWAKIPHTDGNFHPSPLMGGFGLKHPPPQILIKNTPVPADPPLTFNQAKLNSFITQYSTGQVSVEIEWELQKENSKRWNPEIQYTSNYYKSTNVDFAVNTEGVYSEPRPIGTRYLTRNL

SEQ ID NO: 993 - protein, 736 aa, Artificial Sequence
  source: /note="Description of Artificial Sequence: Synthetic polypeptide"
  MOD_RES (113)..(113): Any naturally occurring amino acid
MAADGYLPDWLEDTLSEGIRQWWKLKPGPPPPKPAERHKDDSRGLVLPGYKYLGPFNGLDKGEPVNAADAATLEHDKAYDQQLKAGDNPYLRYNHADAEFQERLQEDTSFGGXLGRAVFQAKKRVLEPLGLVEEAAKTAPGKKRPVEPSPQRSPDSSTGIGKKGQQPARKRLNFGQTGDSESVPDPQPLGEPPAAPSGVGPNTMAAGGGAPMADNNEGADGVGSSSGNWHCDSTWLGDRVITTSTRTWALPTYNNHLYKQISSASTGASNDNHYFGYSTPWGYFDFNRFHCHFSPRDWQRLINNNWGFRPKRLNFKLFNIQVKEVTTNDGVTTIANNLTSTVQVFSDSDYQLPYVLGSAHEGCLPPFPADVFMIPQYGYLTLNNGSQALGRSSFYCLEYFPSQMLRTGNNFQFSYTFEDVPFHSSYAHSQSLDRLMNPLIDQYLYYLVRTQTTGTGGTQTLAFSQAGPSSMANQARNWVPGPCYRQQRVSTTTNQNNNSNFAWTGAAKFKLNGRDSLMNPGVAMASHKDDDDRFFPSSGVLIFGKQGAGNDGVDYSQVLITDEEEIKATNPVATEEYGAVAINNQAANTQAQTGLVHNQGVIPGMVWQDRDVYLQGPIWAKIPHTDGHFHPSPLMGGFGLKHPPPQILIKNTPVPANPPAEFSATKFASFITQYSTGQVSVEIEWELQKENSKRWNPEVQYTSNYAKSANVDFTVDNNGLYTEPRPIGTRYLTRPL

SEQ ID NO: 994 - protein, 737 aa, Artificial Sequence
  source: /note="Description of Artificial Sequence: Synthetic polypeptide"
  MOD_RES (112)..(112): Any naturally occurring amino acid
MTDGYLPDWLEDNLSEGVREWWALQPGAPKPKANQQKQDDGRGLVLPGYKYLGPFNGLDKGEPVNAADAAALEHDKAYDQQLKAGDNPYLRYNHADAEFQERLQEDTSFGGXLGRAVFQAKKRVLEPLGLVEEGAKTAPGKKRPVEPSPQRSPDSSTGIGKKGQQPARKRLNFGQTGDSESVPDPQPLGEPPAAPSGVGSLTMASGGGAPVADNNEGADGVGSSSGNWHCDSQWLGDRVITTSTRTWALPTYNNHLYKQISNSTSGGSSNDNAYFGYSTPWGYFDFNRFHCHFSPRDWQRLINNNWGFRPKRLSFKLFNIQVKEVTQNEGTKTIANNLTSTIQVFTDSEYQLPYVLGSAHQGCLPPFPADVFMIPQYGYLTLNNGSQAVGRSSFYCLEYFPSQMLRTGNNFQFTYTFEDVPFHSSYAHSQSLDRLMNPLIDQYLYYLSRTQTTGGTANTQTLGFSQGGPNTMANQAKNWLPGPCYRQQRVSTTTGQNNNSNFAWTAGTKYHLNGRNSLANPGIAMATHKDDEERFFPSNGILIFGKQNAARDNADYSDVMLTSEEEIKTTNPVATEEYGIVADNLQQQNTAPQIGTVNSQGALPGMVWQNRDVYLQGPIWAKIPHTDGNFHPSPLMGGFGLKHPPPQILIKNTPVPADPPTTLNQAKLNSFITQYSTGQVSVEIEWELQKENSKRWNPEIQYTSNYYKSTNVDFAVNTEGTYSEPRPIGTRFLTRNL

SEQ ID NO: 995 - protein, 736 aa, Artificial Sequence
  source: /note="Description of Artificial Sequence: Synthetic polypeptide"
  MOD_RES (113)..(113): Any naturally occurring amino acid
MAADGYLPDWLEDTLSEGIRQWWKLKPGPPPPKPAERHKDDSRGLVLPGYKYLGPFNGLDKGEPVNAADAAALEHDKAYDQQLEAGDNPYLRYNHADAEFQERLQEDTSFGGXLGRAVFQAKKRVLEPLGLVEEGAKTAPGKKRPVEQSPQEPDSSSGIGRKGQQPARKRLNFGQTGDSESVPDPQPLGEPPAAPSGVGPNTMASGGGAPMADNNEGADGVGNASGNWHCDSTWLGDRVITTSTRTWALPTYNNHLYKQISSASTGASNDNHYFGYSTPWGYFDFNRFHCHFSPRDWQRLINNNWGFRPKRLNFKLFNIQVKEVTQNEGTKTIANNLTSTIQVFTDSEYQLPYVLGSAHQGCLPPFPADVFMIPQYGYLTLNNGSQAVGRSSFYCLEYFPSQMLRTGNNFQFTYTFEDVPFHSSYAHSQSLDRLMNPLIDQYLYYLSRTQSTGGTQGTQQLLFSQAGPANMSAQAKNWLPGPCYRQQRVSTTLSQNNNSNFAWTGATKYHLNGRDSLVNPGVAMATHKDDEERFFPSSGVLMFGKQGAGRDNVDYSSVMLTSEEEIKTTNPVATEQYGVVVDNLQQTNTGPIVGNVNSQGALPGMVWQNRDVYLQGPIWAKIPHTDGNFHPSPLMGGFGLKHPPPQILIKNTPVPADPPTAFNKDKLNSFITQYSTGQVSVEIEWELQKENSKRWNPEIQYTSNYYKSNNVEFAVNTEGVYSEPRPIGTRYLTRNL

SEQ ID NO: 996 - DNA, 2211 bp, Artificial Sequence
  source: /note="Description of Artificial Sequence: Synthetic polynucleotide"
  source: /note="AAV9 VP1"
atggccgccgacggctacctgcccgactggctggaggacaacctgagcgagggcatccgcgagtggtgggccctgaagcccggcgccccccagcccaaggccaaccagcagcaccaggacaacgcccgcggcctggtgctgcccggctacaagtacctgggccccggcaacggcctggacaagggcgagcccgtgaacgccgccgacgccgccgccctggagcacgacaaggcctacgaccagcagctgaaggccggcgacaacccctacctgaagtacaaccacgccgacgccgagttccaggagcgcctgaaggaggacaccagcttcggcggcaacctgggccgcgccgtgttccaggccaagaagcgcctgctggagcccctgggcctggtggaggaggccgccaagaccgcccccggcaagaagcgccccgtggagcagagcccccaggagcccgacagcagcgccggcatcggcaagagcggcgcccagcccgccaagaagcgcctgaacttcggccagaccggcgacaccgagagcgtgcccgacccccagcccatcggcgagccccccgccgcccccagcggcgtgggcagcctgaccatggccagcggcggcggcgcccccgtggccgacaacaacgagggcgccgacggcgtgggcagcagcagcggcaactggcactgcgacagccagtggctgggcgaccgcgtgatcaccaccagcacccgcacctgggccctgcccacctacaacaaccacctgtacaagcagatcagcaacagcaccagcggcggcagcagcaacgacaacgcctacttcggctacagcaccccctggggctacttcgacttcaaccgcttccactgccacttcagcccccgcgactggcagcgcctgatcaacaacaactggggcttccgccccaagcgcctgaacttcaagctgttcaacatccaggtgaaggaggtgaccgacaacaacggcgtgaagaccatcgccaacaacctgaccagcaccgtgcaggtgttcaccgacagcgactaccagctgccctacgtgctgggcagcgcccacgagggctgcctgccccccttccccgccgacgtgttcatgatcccccagtacggctacctgaccctgaacgacggcagccaggccgtgggccgcagcagcttctactgcctggagtacttccccagccagatgctgcgcaccggcaacaacttccagttcagctacgagttcgagaacgtgcccttccacagcagctacgcccacagccagagcctggaccgcctgatgaaccccctgatcgaccagtacctgtactacctgagcaagaccatcaacggcagcggccagaaccagcagaccctgaagttcagcgtggccggccccagcaacatggccgtgcagggccgcaactacatccccggccccagctaccgccagcagcgcgtgagcaccaccgtgacccagaacaacaacagcgagttcgcctggcccggcgccagcagctgggccctgaacggccgcaacagcctgatgaaccccggccccgccatggccagccacaaggagggcgaggaccgcttcttccccctgagcggcagcctgatcttcggcaagcagggcaccggccgcgacaacgtggacgccgacaaggtgatgatcaccaacgaggaggagatcaagaccaccaaccccgtggccaccgagagctacggccaggtggccaccaaccaccagagcgcccaggcccaggcccagaccggctgggtgcagaaccagggcatcctgcccggcatggtgtggcaggaccgcgacgtgtacctgcagggccccatctgggccaagatcccccacaccgacggcaacttccaccccagccccctgatgggcggcttcggcatgaagcacccccccccccagatcctgatcaagaacacccccgtgcccgccgacccccccaccgccttcaacaaggacaagctgaacagcttcatcacccagtacagcaccggccaggtgagcgtggagatcgagtgggagctgcagaaggagaacagcaagcgctggaaccccgagatccagtacaccagcaactactacaagagcaacaacgtggagttcgccgtgaacaccgagggcgtgtacagcgagccccgccccatcggcacccgctacctgacccgcaacctgtaa

SEQ ID NO: 997 - DNA, 2211 bp, Artificial Sequence
  source: /note="Description of Artificial Sequence: Synthetic polynucleotide"
atggctgccgatggttatcttccagattggctcgaggacactctctctgaaggaataagacagtggtggaagctcaaacctggcccaccaccaccaaagcccgcagagcggcataaggacgacagcaggggtcttgtgcttcctgggtacaagtacctcggacccttcaacggactcgacaagggagagccggtcaacgaggcagacgccgcggccctcgagcacgacaaggcctacgaccagcagctcaaggccggagacaacccgtacctcaagtacaaccacgccgacgccgagttccaggagcggctcaaagaagatacgtcttttgggggcaacctcggacgagcagtcttccaggccaagaagcgggttctcgaacctctcggtctggttgaggaaggcgctaagacggctcctggaaagaaacgtccggtagagcagtcgccacaagagccagactcctcctcgggcattggcaagacaggccagcagcccgctaaaaagagactcaattttggtcagactggcgactcagagtcagtccccgacccacaacctctcggagaacctccagcaacccccgctgctgtgggacctactacaatggcttcaggcggtggcgcaccaatggcggacaataacgaaggcgccgatggagtgggtagttcctcgggaaattggcattgcgattcccaatggctgggggacagagtcatcaccaccagcacccgaacatgggccttgcccacctataacaaccacctctacaagcaaatctccagtgcttcaacgggggccagcaacgacaaccactacttcggctacagcaccccctgggggtattttgacttcaacagattccactgccacttctcaccacgtgactggcagcgactcatcaacaacaactggggattccgacccaagagactcaacttcaagctctttaacattcaagtcaaggaggtcacgcagaatgaaggcaccaagaccatcgccaataacctcaccagcaccatccaggtgtttacggactcggagtaccagctgccgtacgttctcggctccgcccaccagggctgcctgcctccgttcccggcggacgtgttcatgattccccagtacggctacctaacactcaacaacggtagtcaggccgtgggacgctcctccttctactgcctggaatactttccttcgcagatgctgagaaccggcaacaacttccagtttacttacaccttcgaggacgtgcctttccacagcagctacgcccacagccagagcttggaccggctgatgaatcctctgattgaccagtacctgtactacttgtctcggactcaaacaacaggaggcacggcaaatacgcagactctgggcttcagccaaggtgggcctaatacaatggccaatcaggcaaagaactggctgccaggaccctgttaccgccaacaacgcgtctcaacgacaaccgggcaaaacaacaatagcaactttgcctggactgctgggaccaaataccatctgaatggaagaaattcattggctaatcctggcatcgctatggcaacacacaaagacgacaaggagcgtttttttcccagtaacgggatcctgatttttggcaaacaaaatgctgccagagacaatgcggattacagcgatgtcatgctcaccagcgaggaagaaatcaaaaccactaaccctgtggctacagaggaatacggtatcgtggcagataacttgcagcagcaaaacacggctcctcaaattggaactgtcaacagccagggggccttacccggtatggtctggcagaaccgggacgtgtacctgcagggtcccatctgggccaagattcctcacacggacggcaacttccacccgtctccgctgatgggcggctttggcctgaaacatcctccgcctcagatcctgatcaagaacacgcctgtacctgcggatcctccgaccaccttcaaccagtcaaagctgaactctttcatcacgcaatacagcaccggacaggtcagcgtggaaattgaatgggagctgcagaaagaaaacagcaaacgctggaacccagagattcaatacacttccaactactacaaatctacaagtgtggactttgctgttaatacagaaggcgtgtactctgaaccccaccccattggcacccgttacctcacccgtcccctgtaa

SEQ ID NO: 998 - DNA, 2211 bp, Artificial Sequence
  source: /note="Description of Artificial Sequence: Synthetic polynucleotide"
atggctgccgatggttatcttccagattggctcgaggacaacctctctgagggcattcgcgagtggtgggcgctgaaacctggagccccgaagcccaaagccaaccagcaaaagcaggacgacggccggggtctggtgcttcctggctacaagtacctcggacccttcaacggactcgacaagggggagccggtcaacgcagcagacgcggcggccctcgagcacgacaaggcctacgaccagcagctcaaggccggagacaacccgtacctcaagtacaaccacgccgacgccgagttccaggagcggctcaaagaagatacgtcttttgggggcaacctcgggcgagcagtcttccaggccaaaaagaggcttcttgaacctcttggtctggttgaggaagcggctaagacggctcctggaaagaagaggcctgtagagcagtctcctcaggaaccggactcctccgcgggtattggcaaatcgggtgcacagcccgctaaaaagagactcaattttggtcagactggcgactcagagtcagtccccgacccacaacctctcggagaacctccagcaacccccgctgctgtgggacctactacaatggcttcaggcggtggcgcaccaatggcagacaataacgaaggcgccgacggagtgggtaatgcctcaggaaattggcattgcgattccacatggctgggcgacagagtcatcaccaccagcacccgaacctgggccctgcccacctacaataaccacctctacaagcaaatctccagtgcttcaacgggggccagcaacgacaaccactacttcggctacagcaccccctgggggtattttgatttcaacagattccactgccacttttcaccacgtgactggcagcgactcatcaacaacaattggggattccggcccaagagactcaacttcaaactcttcaacatccaagtcaaggaggtcacgcagaatgaaggcaccaagaccatcgccaataacctcaccagcaccatccaggtgtttacggactcggagtaccagctgccgtacgttctcggctctgcccaccagggctgcctgcctccgttcccggcggacgtgttcatgattccccagtacggctacctaacactcaacaacggtagtcaggccgtgggacgctcctccttctactgcctggaatactttccttcgcagatgctgagaaccggcaacaacttccagtttacttacaccttcgaggacgtgcctttccacagcagctacgcccacagccagagcttggaccggctgatgaatcctctgattgaccagtacctgtactacttgtctcggactcaaacaacaggaggcacggcaaatacgcagactctgggcttcagccaaggtgggcctaatacaatggccaatcaggcaaagaactggctgccaggaccctgttaccgccaacaacgcgtctcaacgacaaccgggcaaaacaacaatagcaactttgcctggactgctgggaccaaataccatctgaatggaagaaattcattggctaatcctggcatcgctatggcaacacacaaagacgacaaggagcgtttttttcccagtaacgggatcctgatttttggcaaacaaaatgctgccagagacaatgcggattacagcgatgtcatgctcaccagcgaggaagaaatcaaagccactaaccctgtggctacagaggaatacggtatcgtggcagataacttgcagcagcaaaacacggctcctcaaattggaactgtcaacagccagggggccttacccggtatggtttggcagaaccgggacgtgtacctgcagggtcccatctgggccaagattcctcacacggacggcaacttccacccgtctccgctgatgggcggctttggcctgaaacatcctccgcctcagatcctgatcaagaacacgcctgtacctgcggatcctccgaccaccttcaaccagtcaaagctgaactctttcatcacgcaatacagcaccggacaggtcagcgtggaaattgaatgggagctgcagaaggaaaacagcaagcgctggaaccccgagatccagtacacctccaactactacaaatctacaagtgtggactttgctgttaatacagaaggcgtgtactctgaaccccaccccattggcacccgttacctcacccgtcccctgtaa

SEQ ID NO: 999 - DNA, 2214 bp, Artificial Sequence
  source: /note="Description of Artificial Sequence: Synthetic polynucleotide"
atggctgccgatggttatcttccagattggctcgaggacaacctctctgagggcattcgcgagtggtgggacttgaaacctggagccccgaagcccaaagccaaccagcaaaagcaggacgacggccggggtctggtgcttcctggctacaagtacctcggacccttcaacggactcgacaagggggagcccgtcaacgcggcggacgcagcggccctcgagcacgacaaggcctacgaccagcagctcaaagcgggtgacaatccgtacctgcggtataaccacgccgacgccgagtttcaggagcgtctgcaagaagatacgtcttttgggggcaacctcgggcgagcagtcttccaggccaagaagcgggttctcgaacctctcggtctggttgaggaaggcgctaatacggctcctggaaagaaacgtccggtagagcagtcgccacaagagccagactcctccgcgggtattggcaaatcgggtgcacagcccgctaaaaagagactcaatttcggtcagactggcgacacagagtcagtcccagaccctcaaccaatcggagaacctcccgcagccccctcaggtgtgggatctcttacaatggcttcaggtggtggcgcaccagtggcagacaataacgaaggtgccgatggagtgggtagttcctcgggaaattggcattgcgattcccaatggctgggggacagagtcatcaccaccagcacccgaacctgggccctgcccacctacaacaatcacctctacaagcaaatctccaacagcacatctggaggatcttcaaatgacaacgcctacttcggctacagcaccccctgggggtattttgacttcaacagattccactgccacttctcaccacgtgactggcagcgactcatcaacaacaactggggattccggcctaagcgactcaacttcaagctcttcaacattcaggtcaaagaggttacggacaacaatggagtcaagaccatcgccaataacctcaccagcaccatccaggtgtttacggactcggagtaccagctgccgtacgttctcggctccgcccaccagggctgcctgcctccgttcccggcggacgtgttcatgattccccagtacggctacctaacactcaacaacggtagtcaggccgtgggacgctcctccttctactgcctggaatactttccttcgcagatgctgagaaccggcaacaacttccagtttacttacaccttcgaggacgtgcctttccacagcagctacgcccacagccagagcttggaccggctgatgaatcctctgattgaccagtacctgtactacttgtctcggactcaaacaacaggaggcacggcaaatacgcagactctgggcttcagccaaggtgggcctaatacaatggccaatcaggcaaagaactggctgccaggaccctgttaccgccaacaacgcgtctcaacgacaaccgggcaaaacaacaatagcaactttgcctggactgctgggaccaaataccatctgaatggaagaaattcattggctaatcctggcatcgctatggcctcacacaaagacgacaaggagcgtttttttcccagtaacgggatcctgatttttggcaaacaaaatgctgccagagacaatgcggattacagcgatgtcatgctcaccagcgaggaagaaatcaaaaccactaaccctgtggctacagaggaatacggtatcgtggcagataacttgcagcagcaaaacacggctcctcaaattggaactgtcaacagtcaaggagccttacctggcatggtctggcagaaccgggacgtgtacctgcagggtcccatctgggccaagattcctcacacggacggcaacttccacccgtctccgctgatgggcggctttggcctgaaacatcctccgcctcagatcctgatcaagaacacgcctgtacctgcggatcctccgaccaccttcaaccagtcaaagctgaactctttcatcacgcaatacagcaccggacaggtcagcgtggaaattgaatgggagctgcagaaggaaaacagcaagcgctggaaccccgagatccagtacaccaccaactactacaaatctacaagtgtggactttgctgttaatacagaaggcgtgtactctgaaccccaccccattggcacccgttacctcacccgtcccctgtaa

SEQ ID NO: 1000 - DNA, 2211 bp, Artificial Sequence
  source: /note="Description of Artificial Sequence: Synthetic polynucleotide"
atggctgccgatggttatcttccagattggctcgaggacaacctctctgagggcattcgcgagtggtgggcgctgaaacctggagccccgaagcccaaagccaaccagcaaaagcaggacgacggccggggtctggtgcttcctggctacaagtacctcggacccttcaacggactcgacaaaggagagccggtcaacgaggcggacgcggcagccctcgaacacgacaaagcttacgaccagcagctcaaggccggtgacaatccgtacctgcggtataaccacgccgacgccgagtttcaggagcgtcttcaagaagatacgtcttttgggggcaacctcgggcgagcagtcttccaggccaagaagcgggttctcgaacctctcggtctggttgaggaaggcgctaagacggctcctggaaagaaacgtccggtagagcagtcgccacaagagccagactcctcctcgggcatcggcaagacaggccagcagcccgctaaaaagagactcaattttggtcagactggcgactcagagtcagtccccgacccacaacctctcggagaacctccagcaacccccgctgctgtgggacctactacaatggcttcaggcggtggcgcaccaatggcagacaataacgaaggcgccgacggagtgggtaatgcctcaggaaattggcattgcgattccacatggctgggcgacagagtcatcaccaccagcacccgcacctgggccttgcccacctacaataaccacctctacaagcaaatctccagtgcttcaacgggggccagcaacgacaaccactacttcggctacagcaccccctgggggtattttgactttaacagattccactgccacttttcaccacgtgactggcaaagactcatcaacaacaactggggattccggcccaagagactcaacttcaagctcttcaacatccaggtcaaggaggtcacgcagaatgaaggcaccaagaccatcgccaataaccttaccagcacgattcaggtctttacggactcggaataccagctcccgtacgtcctcggctctgcgcaccagggctgcctccctccgttcccggcggacgtgttcatgattccgcagtacggctacctaacactcaacaacggtagtcaggccgtgggacgctcctccttctactgcctggaatactttccttcgcagatgctgagaaccggcaacaacttccagtttacttacaccttcgaggacgtgcctttccacagcagctacgcccacagccagagcttggaccggctgatgaatcctctgattgaccagtacctgtactacttgtctcggactcaaacaacaggaggcacggcaaatacgcagactctgggcttcagccaaggtgggcctaatacaatggccaatcaggcaaagaactggctgccaggaccctgttaccgccaacaacgcgtctcaacgacaaccgggcaaaacaacaatagcaactttgcctggactgctgggaccaaataccatctgaatggaagaaattcattggctaatcctggcatcgctatggcaacacacaaagacgacaaggagcgtttttttcccagtaacgggatcctgatttttggcaaacaaaatgctgccagagacaatgcggattacagcgatgtcatgctcaccagcgaggaagaaatcaaaaccactaaccctgtggctacagaggaatacggtatcgtggcagataacttgcagcagcaaaacacggctcctcaaattggaactgtcaacagccagggggccttacccggtatggtctggcagaaccgggacgtgtacctgcagggtcccatctgggccaagattcctcacacggacggcaacttccacccgtctccgctgatgggcggctttggcctgaaacatcctccgcctcagatcctgatcaagaacacgcctgtacctgcggatcctccgaccaccttcaaccagtcaaagctgaactctttcatcacgcaatacagcaccggacaggtcagcgtggaaattgaatgggagctgcagaaggaaaacagcaagcgctggaaccccgagatccagtacacctccaactactacaaatctacaagtgtggactttgctgttaatacagaaggcgtgtactctgaaccccaccccattggcacccgttacctcacccgtcccctgtaa

SEQ ID NO: 1001 - DNA, 2211 bp, Artificial Sequence
  source: /note="Description of Artificial Sequence: Synthetic polynucleotide"
atggctgccgatggttatcttccagattggctcgaggacaacctctctgagggcattcgcgagtggtgggcgctgaaacctggagccccgaagcccaaagccaaccagcaaaagcaggacgacggccggggtctggtgcttcctggctacaagtacctcggacccttcaacggactcgacaaaggagagccggtcaacgaggcggacgcggcagccctcgaacacgacaaagcttacgaccagcagctcaaagcgggtgacaatccgtacctgcggtataaccacgccgacgccgagtttcaggagcgtctgcaagaagatacgtcttttgggggcaacctcgggcgagcagtcttccaggccaagaagagggttctcgaaccttttggtctggttgaggaaggtgctaagacggctcctggaaagaaacgtccggtagagcagtcgccacaagagccagactcctcctcgggcattggcaagacaggccagcagcccgctaaaaagagactcaattttggtcagactggcgactcagagtcagtccccgacccacaacctctcggagaacctccagcaacccccgctgctgtgggacctactacaatggcttcaggcggtggcgcaccaatggcagacaataacgaaggcgccgacggagtgggtaatgcctcaggaaattggcattgcgattcccaatggctgggcgacagagtcatcaccaccagcaccagaacctgggccttgcccacctataacaaccacctctacaagcaaatctccagtgcttcaacgggggccagcaacgacaaccactacttcggctacagcaccccctgggggtattttgatttcaacagattccactgccacttctcaccacgtgactggcagcgactcatcaacaacaactggggattccggcctaagcgactcaacttcaagctcttcaacattcaggtcaaagaggttacggacaacaatggagtcaagaccatcgccaataaccttaccagcacggttcaagtcttctcggactcggagtaccagttgccgtacgtcctcggctctgcgcaccagggctgcctccctccgttcccggcggacgtgttcatgattccccagtacggctacctaacactcaacaacggtagtcaggccgtgggacgctcctccttctactgcctggaatactttccttcgcagatgctgagaaccggcaacaacttccagtttacttacaccttcgaggacgtgcctttccacagcagctacgcgcacagccagagcttggaccggctgatgaatcctctgattgaccagtacctgtactacttgtctcggactcaaacaacaggaggcacggcaaatacgcagactctgggcttcagccaaggtgggcctaatacaatggccaatcaggcaaagaactggctgccaggaccctgttaccgccaacaacgcgtctcaacgacaaccgggcaaaacaacaatagcaactttgcctggactgctgggaccaaataccatctgaatggaagaaattcattggctaatcctggcatcgctatggcaacacacaaagacgacaaggagcgtttttttcccagtaacgggatcctgatttttggcaaacaaaatgctgccagagacaatgcggattacagcgatgtcatgctcaccagcgaggaagaaatcaaaaccactaaccctgtggctacagaggaatacggtatcgtggcagataacttgcagcagcaaaacacggctcctcaaattggaactgtcaacagccagggggccttacccggtatggtctggcagaaccgggacgtgtacctgcagggtcccatctgggccaagattcctcacacggacggcaacttccacccgtctccgctgatgggcggctttggcctgaaacatcctccgcctcagatcctgatcaagaacacgcctgtacctgcggatcctccgaccaccttcaaccagtcaaagctgaactctttcatcacgcaatacagcaccggacaggtcagcgtggaaattgaatgggagctgcagaaggaaaacagcaagcgctggaaccccgagatccagtacacctccaactactacaaatctacaagtgtggactttgctgttaatacagaaggcgtgtactctgaaccccaccccattggcacccgttacctcacccgtcccctgtaa

SEQ ID NO: 1002 - DNA, 2244 bp, Artificial Sequence
  source: /note="Description of Artificial Sequence: Synthetic polynucleotide"
  modified_base (2241)..(2241): a, c, g or t
atggctgccgatggttatcttccagattggctcgaggacactctctctgaaggaataagacagtggtggaagctcaaacctggcccaccaccaccaaagcccgcagagcggcataaggacgacagcaggggtcttgtgcttcctgggtacaagtacctcggacccttcaacggactcgacaagggagagccggtcaacgaggcagacgccgcggccctcgagcacgacaaagcctacgaccggcagctcgacagcggagacaacccgtacctcaagtacaaccacgccgacgcggagtttcaggagcgccttaaagaagatacgtcttttgggggcaacctcgggcgagcagtcttccaggccaagaagagggttctcgaaccttttggtctggttgaggaaggtgctaagacggctcctggaaagaaacgtccggtagagcagtcgccacaagagccagactcctcctcgggcattggcaagacaggccagcagcccgctaaaaagagactcaattttggtcagactggcgactcagagtcagtccccgacccacaacctctcggagaacctccagcaacccccgctgctgtgggacctactacaatggcttcaggcggtggcgcaccaatggcagacaataacgaaggcgccgacggagtgggtaatgcctcaggaaattggcattgcgattccacatggctgggcgacagagtcatcaccaccagcacccgaacatgggccttgcccacctataacaaccacctctacaagcaaatctccagtgcttcaacgggggccagcaacgacaaccactacttcggctacagcaccccctgggggtattttgacttcaacagattccactgccacttctcaccacgtgactggcagcgactcatcaacaacaactggggattccggcctaagcgactcaacttcaagctcttcaacattcaggtcaaagaggttacggacaacaatggagtcaagaccatcgccaataaccttaccagcacggtccaggtcttcacggactcagactatcagctcccgtacgtgctcgggtcggctcacgagggctgcctcccgccgttcccagcggacgttttcatgattcctcagtacggctacctaacactcaacaacggtagtcaggccgtgggacgctcctccttctactgcctggaatactttccttcgcagatgctgagaaccggcaacaacttccagtttacttacaccttcgaggacgtgcctttccacagcagctacgcgcacagccagagcttggaccggctgatgaatcctctgattgaccagtacctgtactacttgtctcggactcaaacaacaggaggcacggcaaatacgcagactctgggcttcagccaaggtgggcctaatacaatggccaatcaggcaaagaactggctgccaggaccctgttaccgccaacaacgcgtctcaacgacaaccgggcaaaacaacaatagcaactttgcctggactgctgggaccaaataccatctgaatggaagaaattcattggctaatcctggcatcgctatggcaacacacaaagacgacaaggagcgtttttttcccagtaacgggatcctgatttttggcaaacaaaatgctgccagagacaatgcggattacagcgatgtcatgctcaccagcgaggaagaaatcaaaaccactaaccctgtggctacagaggaatacggtatcgtggcagataacttgcagcagcaaaacacggctcctcaaattggaactgtcaacagccagggggccttacccggtatggtctggcagaaccgggacgtgtacctgcagggtcccatctgggccaagattcctcacacggacggcaacttccacccgtctccgctgatgggcggctttggcctgaaacatcctccgcctcagatcctgatcaagaacacgcctgtacctgcggatcctccgaccaccttcaaccagtcaaagctgaactctttcatcacgcaatacagcaccggacaggtcagcgtggaaattgaatgggagctgcagaaggaaaacagcaagcgctggaaccccgagatccagtacacctccaactactacaaatctacaagtgtggactttgctgttaatacagaaggcgtgtactctgaaccccaccccattggcaccagatacctgactcgtaatctgtaattgcttgttaatcaataaaccgtttaattnttt

SEQ ID NO: 1003 - DNA, 2217 bp, Artificial Sequence
  source: /note="Description of Artificial Sequence: Synthetic polynucleotide"
atggctgccgatggttatcttccagattggctcgaggacaacctctctgagggcattcgcgagtggtgggacttgaaacctggagccccgaaacccaaagccaaccagcaaaagcaggacgacggccggggtctggtgcttcctggctacaagtacctcggacccttcaacggactcgacaagggggagcccgtcaacgcggcggacgcagcggccctcgagcacgacaaggcctacgaccagcagctccaagcgggtgacaatccgtacctgcggtataaccacgccgacgccgagtttcaggagcgtctgcaagaagatacgtcttttgggggcaacctcggacgagcagtcttccaggcgaaaaagagggttctcgaacctctcggtctggttgaggaaggcgctaagacggctcctggaaagaagagaccggtagagccatcaccccagcgttctccagactcctctacgggcatcggcaagaaaggccaacagcccgccagaaaaagactcaattttggtcagactggcgactcagagtcagttccagaccctcaacctctcggagaacctccagcagcgccctctggtgtgggacctaatacaatggctgcaggcggtggcgcaccaatggcagacaataacgaaggcgccgacggagtgggtagttcctcgggaaattggcattgcgattcccaatggctgggggacagagtcatcaccaccagcacccgaacctgggccctgcccacctacaacaatcacctctacaagcaaatctccaacagcacatctggaggatcttcaaatgacaacgcctacttcggctacagcaccccctgggggtattttgacttcaaccgcttccactgccacttctcaccacgtgactggcagcgactcatcaacaacaactggggattccggcccaagagactcagcttcaaactcttcaacatccaggtcaaggaggtcacgcagaatgaaggcaccaagaccatcgccaataacctcaccagcaccatccaggtgtttacggactcggagtaccagctgccgtacgttctcggctctgcccaccagggctgcctgcctccgttcccggcggacgtgttcatgattcctcagtacggctacctaacgctcaacaatggcagccaggcagtgggacggtcatccttttactgcctggaatatttcccatcgcagatgctgagaacgggcaacaactttaccttcagctacacctttgaggacgttcctttccacagcagctacgctcacagccagagtctggaccgtctcatgaatcctctgattgaccagtacctgtactacttgtctcggactcaaacaacaggaggcacggcaaatacgcagactctgggcttcagccaaggtgggcctaatacaatggccaatcaggcaaagaactggctgccaggaccctgttaccgccaacaacgcgtctcaacgacaaccgggcaaaacaacaatagcaactttgcctggactgctgggaccaaataccatctgaatggaagaaattcattggctaatcctggcatcgctatggcaacacacaaagacgacaaggagcgtttttttcccagtaacgggatcctgatttttggcaaacaaaatgctgccagagacaatgcggattacagcgatgtcatgctcaccagcgaggaagaaatcaaaaccactaaccctgtggctacagaggaatacggtatcgtggcagataacttgcagcagcaaaacacggctcctcaaattggaactgtcaacagccagggggccttacccggtatggtctggcagaaccgggacgtgtacctgcagggtcccatctgggccaagattcctcacacggacggcaacttccacccgtctccgctgatgggcggctttggacttaagcacccgcctcctcagatcctcatcaaaaacacgcctgttcctgcggatcctccgaccaccttcaaccagtcaaagctgaactctttcatcacgcaatacagcaccggacaggtcagcgtggaaattgaatgggagctgcagaaggaaaacagcaagcgctggaaccccgagatccagtacacctccaactactacaaatctacaagtgtggactttgctgttaatacagaaggcgtgtactctgaaccccaccccattggcacccgttacctcacccgtcccctgtaa

SEQ ID NO: 1004 - DNA, 2214 bp, Artificial Sequence
  source: /note="Description of Artificial Sequence: Synthetic polynucleotide"
atggctgccgatggttatcttccagattggctcgaggacaacctctctgagggcattcgcgagtggtgggacttgaaacctggagccccgaagcccaaagccaaccagcaaaagcaggacgacggccggggtctggtgcttcctggctacaagtacctcggacccttcaacggactcgacaagggggagcccgtcaacgcggcggatgcagcggccctcgagcacgacaaagcctacgaccagcagctcaaagcgggtgacaatccgtacctgcggtataaccacgccgacgccgagtttcaggagcgtctgcaagaagatacgtcttttgggggcaacctcgggcgagcagtcttccaggccaagaagagggttctcgaaccttttggtctggttgaggaaggtgctaagacggctcctggaaagaaacgtccggtagagcagtcgccacaagagccagactcctcctcgggcattggcaagacaggccagcagcccgctaaaaagagactcaattttggtcagactggcgactcagagtcagtccccgacccacaacctctcggagaacctccagcaacccccgctgctgtgggacctactacaatggcttcaggcggtggcgcacccatgcaagacaataacgaaggcgccgacggagtgggtagttcctcgggaaattggcattgcgattccacatggctgggcgacagagtcatcaccaccagcacccgaacctgggccctgcccacctacaacaaccacctctacaagcaaatctccaacgggacatcgggaggagccaccaacgacaacacctacttcggctacagcaccccctgggggtattttgactttaacagattccactgccacttttcaccacgtgactggcagcgactcatcaacaacaactggggattccggcccaagagactcaacttcaagctcttcaacatccaggtcaaggaggtcacgcagaatgaaggcaccaagaccatcgccaataaccttaccagcacgattcaggtctttacggattcggaataccagctcccgtacgtcctcggctctgcgcaccagggctgcctccctccgttcccggcggacgtgttcatgattccgcagtacggctacctaacgctcaacaatggtagccaggcagtgggacggtcatccttttactgcctggaatatttcccatcgcagatgctgagaacgggcaacaactttaccttcagctacacctttgaggacgttcctttccacagcagctacgctcacagccagagtctggaccgtctcatgaatcctctgattgaccagtacctgtactacttgtctcggactcaaacaacaggaggcacggcaaatacgcagactctgggcttcagccaaggtgggcctaatacaatggccaatcaggcaaagaactggctgccaggaccctgttaccgccaacaacgcgtctcaacgacaaccgggcaaaacaacaatagcaactttgcctggactgctgggaccaaataccatctgaatggaagaaattcattggctaatcctggcatcgctatggcaacacacaaagacgacaaggagcgtttttttcccagtaacgggatcctgatttttggcaaacaaaatgctgccagagacaatgcggattacagcgatgtcatgctcaccagcgaggaagaaatcaaaaccactaaccctgtggctacagaggaatacggtatcgtggcagataacttgcagcagcaaaacacggctcctcaaattggaactgtcaacagccagggggccttacccggtatggtctggcagaaccgggacgtgtacctgcagggtcccatctgggccaagattcctcacacggacggcaacttccacccgtctccgctgatgggcggctttggcctgaaacatcctccgcctcagatcctgatcaagaacacgcctgtacctgcggatcctccgaccaccttcaaccagtcaaagctgaactctttcatcacgcaatacagcaccggacaggtcagcgtggaaattgaatgggagctgcagaaggaaaacagcaagcgctggaaccccgagatccagtacacctccaactactacaaatctacaagtgtggactttgctgttaatacagaaggcgtgtactctgaaccccaccccattggcacccgttacctcacccgtcccctgtaa

SEQ ID NO: 1005 - DNA, 2211 bp, Artificial Sequence
  source: /note="Description of Artificial Sequence: Synthetic polynucleotide"
atggctgccgatggttatcttccagattggctcgaggacaacctctctgagggcattcgcgagtggtgggcgctgaaacctggagccccgaagcccaaagccaaccagcaaaagcaggacgacggccggggtctggtgcttcctggctacaagtacctcggacccttcaacggactcgacaagggggagcccgtcaacgcggcggacgcagcggccctcgagcacgacaaggcctacgaccagcagctcaaagcgggtgacaatccgtacctgcggtataaccacgccgacgccgagtttcaggagcgtctgcaagaagatacgtcttttgggggcaacctcgggcgagcagtcttccaggccaagaagcgggttctcgaacctctcggtctggttgaggaaggcgctaagacggctcctggaaagaaacgtccggtagagcagtcgccacaagagccagactcctcctcgggcatcggcaagacaggccagcagcccgctaaaaagagactcaattttggtcagactggcgactcagagtcagtccccgacccacaacctctcggagaacctccagcaacccccgctgctgtgggacctactacaatggcttcaggcggtggcgcaccaatggcagacaataacgaaggcgccgacggagtgggtagttcctcgggaaattggcattgcgattccacatggctgggcgacagagtcatcaccaccagcacccgcacctgggccttgcccacctacaataaccacctctacaagcaaatctccagtgcttcaacgggggccagcaacgacaaccactacttcggctacagcaccccctgggggtattttgacttcaacagattccactgccacttctcaccacgtgactggcagcgactcatcaacaacaactggggattccggcctaagcgactcaacttcaagctcttcaacattcaggtcaaagaggttacggacaacaatggagtcaagaccatcgccaataaccttaccagcacggtccaggtcttcacggactcagactatcagctcccgtacgtgctcgggtcggctcacgagggctgcctcccgccgttcccagcggacgttttcatgattcctcagtacgggtatctgacgctcaacaatggcagccaggcagtgggacggtcatccttttactgcctggaatatttcccatcgcagatgctgagaacgggcaataactttaccttcagctacaccttcgaggacgtgcctttccacagcagctacgcgcacagccagagcctggaccggctgatgaatcctctgattgaccagtacctgtactacttgtctcggactcaaacaacaggaggcacggcaaatacgcagactctgggcttcagccaaggtgggcctaatacaatggccaatcaggcaaagaactggctgccaggaccctgttaccgccaacaacgcgtctcaacgacaaccgggcaaaacaacaatagcaactttgcctggactgctgggaccaaataccatctgaatggaagaaattcattggctaatcctggcatcgctatggcaacacacaaagacgacaaggagcgtttttttcccagtaacgggatcctgatttttggcaaacaaaatgctgccagagacaatgcggattacagcgatgtcatgctcaccagcgaggaagaaatcaaaaccactaaccctgtggctacagaggaatacggtatcgtggcagataacttgcagcagcaaaacacggctcctcaaattggaactgtcaacagccagggggccttacccggtatggtctggcagaaccgggacgtgtacctgcagggtcccatctgggccaagattcctcacacggacggcaacttccacccgtctccgctgatgggcggctttggcctgaaacatcctccgcctcagatcctgatcaagaacacgcctgtacctgcggatcctccgaccaccttcaaccagtcaaagctgaactctttcatcacgcaatacagcaccggacaggtcagcgtggaaattgaatgggagctgcagaaggaaaacagcaagcgctggaaccccgagatccagtacacctccaactactacaaatctacaagtgtggactttgctgttaatacagaaggcgtgtactctgaaccccaccccattggcacccgttacctcacccgtcccctgtaa

SEQ ID NO: 1006 - DNA, 2214 bp, Artificial Sequence
  source: /note="Description of Artificial Sequence: Synthetic polynucleotide"
atggctgccgatggttatcttccagattggctcgaggacaacctctctgagggcattcgcgagtggtgggacttgaaacctggagccccgaaacccaaagccaaccagcaaaagcaggacgacggccggggtctggtgcttcctggctacaagtacctcggacccttcaacggactcgacaagggggagcccgtcaacgcggcggatgcagcggccctcgagcacgacaaggcctacgaccagcagctcaaagcgggtgacaatccgtacctgcggtataaccacgccgacgccgagtttcaggagcgtctgcaagaagatacgtcttttgggggcaacctcgggcgagcagtcttccaggccaagaagcgggttctcgaacctctcggtctggttgaggaaggcgctaagacggctcctggaaagaagagaccggtagagccatcaccccagcgttctccagactcctctacgggcatcggcaagaaaggccaacagcccgccagaaaaagactcaattttggtcagactggcgactcagagtcagtccccgacccacaacctctcggagaacctccagcaacccccgctgctgtgggacctactacaatggcttcaggcggtggcgcaccaatggcagacaataacgaaggcgccgacggagtgggtaatgcctcaggaaattggcattgcgattccacatggctgggcgacagagtcatcaccaccagcacccgaacatgggccttgcccacctataacaaccacctctacaagcaaatctccagtgcttcaacgggggccagcaacgacaaccactacttcggctacagcaccccctgggggtattttgatttcaacagattccactgccatttctcaccacgtgactggcagcgactcatcaacaacaatttgggatcccggcccaagagactcaacttcaagctcttcatcatccaagtcaaggaggtcacgacgaatgatggcgtcacgaccatcgctaataaccttaccagcacggttcaagtcttctcggactcggagtaccagttgccgtacgtcctcggctctgcgcaccagggctgcctccctccgttcccggcggacgtgttcatgattccgcagtacggctacctaacgctcaacaatggcagccaggcagtgggacggtcatccttttactgcctggaatatttcccatcgcagatgctgagaacgggcaataactttaccttcagctacaccttcgaggacgtgcctttccacagcagctacgcgcacagccagagcctggaccggctgatgaatcctctcatcgaccagtacctgtattacctgaacagaactcagaatcagtccggaagtgcccaaaacaaggacttgctgtttagccgggggtctccagctggcatgtctgttcagcccaaaaactggctacctggaccctgttaccggcagcagcgcgtttctaaaacaaaaacagacaacaacaacagcaactttacctggactggtgcttcaaaatataaccttaatgggcgtgaatctataatcaaccctggcactgctatggcctcacacaaagacgacaaagacaagttctttcccatgagcggtgtcatgatttttggaaaggagagcgccggagcttcaaacactgcattggacaatgtcatgatcacagacgaagaggaaatcaaagccactaaccccgtggccaccgaaagatttgggactgtggcagtcaatctccagagcagcagcacagaccctgcgaccggagatgtgcatgttatgggagccttacctggaatggtgtggcaagacagagacgtatacctgcagggtcctatttgggccaaaattcctcacacggatggacactttcacccgtctcctctcatgggcggctttggacttaagcacccgcctcctcagatcctcatcaaaaacacgcctgttcctgcgaatcctccggcagagttttcggctacaaagtttgcttcattcatcacccagtattccacaggacaagtgagcgtggagattgaatgggagctgcagaaagaaaacagcaaacgctggaatcccgaagtgcagtatacatctaactatgcaaaatctgccaacgttgatttcactgtggacaacaatggactttatactgagcctcgccccattggcacccgttacctcacccgtcccctgtaa

SEQ ID NO: 1007 - DNA, 2211 bp, Artificial Sequence
  source: /note="Description of Artificial Sequence: Synthetic polynucleotide"
atggctgccgatggttatcttccagattggctcgaggacaacctctctgagggcattcgcgagtggtgggcgctgaaacctggagccccgaaacccaaagccaaccagcaaaagcaggacgacggccggggtctggtgcttcctggctacaagtacctcggacccttcaacggactcgacaagggggagcccgtcaacgcggcggacgcagcggccctcgagcacgacaaggcctacgaccagcagctcaaggcgggtgacaatccgtacctgcggtataaccacgccgacgccgagtttcaggagcgtctgcaagaagatacgtcttttgggggcaacctcgggcgagcagtcttccaggccaaaaagaggcttcttgaacctcttggtctggttgaggaagcggctaagacggctcctggaaagaaacgtccggtagagcagtcgccacaagagccagactcctcctcgggcattggcaagacaggccagcagcccgctaaaaagagactcaactttgggcagactggcgactcagagtcagtgcccgaccctcaaccaatcggagaacctccagcaacccccgctgctgtgggacctactacaatggcttcaggcggtggcgcaccaatggcggacaataacgaaggcgccgatggagtgggtaattcctcgggaaattggcattgcgattccacatggctgggcgacagagtcatcaccaccagcacccgaacctgggccctgcccacctacaacaatcacctctacaagcaaatctccagtgcttcaacgggggccagcaacgacaaccactacttcggctacagcaccccctgggggtattttgatttcaacagattccactgccacttttcaccacgtgactggcagcgactcatcaacaacaactggggattccggcccaagagactcaacttcaagctcttcaacatccaggtcaaggaggtcacgcagaatgaaggcaccaagaccatcgccaataacctcaccagcaccatccaggtgtttacggactcggagtaccagctgccgtacgttctcggctccgcccaccagggctgcctgcctccgttcccggcggacgtgttcatgattccgcagtacggctacctaacgctcaacaatggcagccaggcagtgggacggtcatccttttactgcctggaatatttcccatcgcagatgctgagaacgggcaacaactttaccttcagctacacctttgaggacgttcctttccacagcagctacgctcacagccagagtctggaccgtctcatgaatcctctgattgaccagtacctgtactacttgtctcggactcaaacaacaggaggcacggcaaatacgcagactctgggcttcagccaaggtgggcctaatacaatggccaatcaggcaaagaactggctgccaggaccctgttaccgccaacaacgcgtctcaacgacaaccgggcaaaacaacaatagcaactttgcctggactgctgggaccaaataccatctgaatggaagaaattcattggctaatcctggcatcgctatggcaacacacaaagacgacaaggagcgtttttttcccagtaacgggatcctgatttttggcaaacaaaatgctgccagagacaatgcggattacagcgatgtcatgctcaccagcgaggaagaaatcaaaaccactaaccctgtggctacagaggaatacggtatcgtggcagataacttgcagcagcaaaacacggctcctcaaattggaactgtcaacagccagggggccttacccggtatggtctggcagaaccgggacgtgtacctgcagggtcccatctgggccaagattcctcacacggacggcaacttccacccgtctccgctgatgggcggctttggcctgaaacatcctccgcctcagatcctgatcaagaacacgcctgtacctgcggatcctccgaccaccttcaaccagtcaaagctgaactctttcatcacgcaatacagcaccggacaggtcagcgtggaaattgaatgggagctgcagaaggaaaacagcaagcgctggaaccccgagatccagtacacctccaactactacaaatctacaagtgtggactttgctgttaatacagaaggcgtgtactctgatccccaccccattggcacccgttacctcacccgtcccctgtaa

SEQ ID NO: 1008 - DNA, 2211 bp, Artificial Sequence
  source: /note="Description of Artificial Sequence: Synthetic polynucleotide"
atggctgccgatggttatcttccagattggctcgaggacaacctctctgagggcattcgcgagtggtgggcgctgaaacctggagccccgaagcccaaagccaaccagcaagagcaggacgacggccggggtctggtgcttcctggctacaagtacctcggacccttcaacggactcgacaagggagagcccgtcaacgcggcggatgcagcggccctcgagcacgacaaagcctacgaccagcagctcaaagcgggtgacaatccgtacctgcggtataaccacgccgacgccgagtttcaggagcgtctgcaagaagatacgtcttttgggggcaacctcgggcgagcagtcttccaggccaagaagagggttctcgaaccttttggtctggttgaggaaggtgctaagacggctcctggaaagaaacgtccggtagagcagtcgccacaagagccagactcctcctcgggcattggcaagacaggccagcagcccgctaaaaagagactcaattttggtcagactggcgactcagagtcagttccagaccctcaacctctcggagaacctccagcagcgccctctggtgtgggacctaatacaatggctgcaggcggtggcgcaccaatggcagacaataacgaaggcgccgacggagtgggtagttcctcgggaaattggcattgcgattccacatggctgggcgacagagtcatcaccaccagcacccgaacctgggccctgcccacctacaacaaccacctctacaagcaaatctccagtgcttcaacgggggccagcaacgacaaccactacttcggctacagcaccccctgggggtattttgactttaacagattccactgccacttttcaccacgtgactggcagcgactcatcaacaacaactggggattccggcccaagagactcaacttcaagctcttcaacatccaggtcaaggaggtcacgcagaatgaaggcaccaagaccatcgccaataaccttaccagcacgattcaggtctttacggattcggaataccagctcccgtacgtcctcggctctgcgcaccagggctgcctccctccgttcccggcggacgtgttcatgattccgcagtacggctacctaacgctcaacaatggtagccaggcagtgggacggtcatcctttttctgcctggaatatttcccatcgcagatgctgagaacgggcaacaactttaccttcagctacacctttgaggacgttcctttccacagcagctacgctcacagccagagtctggaccgtctcatgaatcctctgattgaccagtacctgtactacttgtctcggactcaaacaacaggaggcacggcaaatacgcagactctgggcttcagccaaggtgggcctaatacaatggccaatcaggcaaagaactggctgccaggaccctgttaccgccaacaacgcgtctcaacgacaaccgggcaaaacaacaatagcaactttgcctggactgctgggaccaaataccatctgaatggaagaaattcattggctaatcctggcatcgctatggcaacacacaaagacgacaaggagcgtttttttcccagtaacgggatcctgatttttggcaaacaaaatgctgccagagacaatgcggattacagcgatgtcatgctcaccagcgaggaagaaatcaaaaccactaaccctgtggctacagaggaatacggtatcgtggcagataacttgcagcagcaaaacacggctcctcaaattggaactgtcaacagccagggggccttacccggtatggtctggcagaaccgagacgtgtacctgcagggtcccatctgggccaagattcctcacacggacggcaacttccacccgtctccgctgatgggcggctttggcctgaaacatcctccgcctcagatcctgatcaagaacacgcctgtacctgcggatcctccgaccaccttcaaccagtcaaagctgaactctttcatcacgcaatacagcaccggacaggtcagcgtggaaattgaatgggagctgcagaaggaaaacagcaagcgctggaaccccgagatccagtacacctccaactactacaaatctacaagtgtggactttgctgttaatacagaaggcgtgtactctgaaccccaccccattggcacccgttacctcacccgtcccctgtaa

SEQ ID NO: 1009 - DNA, 2211 bp, Artificial Sequence
  source: /note="Description of Artificial Sequence: Synthetic polynucleotide"
atggctgccgatggttatcttccagattggctcgaggacaacctctctgagggcattcgcgagtggtgggacttgaaacctggagccccgaagcccaaagccaaccagcaaaagcaggacgacggccggggtctggtgcttcctggctacaagtacctcggacccttcaacggactcgacaagggggagcccgtcaacgcggcggacgcagcggccctcgagcacgacaaggcctacgaccagcagctcaaagcgggtgacaatccgtacctgcggtataaccacgccgacgccgagtttcaggagcgtctgcaagaagatacgtcttttgggggcaacctcgggcgagcagtcttccaggccaagaagcgggttctcgaacctctcggtctggttgaggaaggcgctaagacggctcctggaaagaaacgtccggtagagcagtcaccacaagagccagactcctcctcgggcatcggcaagacaggccagcagcccgctaaaaagagactcaattttggtcagactggcgactcagagtcagtccccgacccacaacctctcggagaacctccagcaacccccgctgctgtgggacctactacaatggcttcaggcggtggcgcaccaatggcggacaataacgaaggcgccgacggagtgggtaatgcctcaggaaattggcattgcgattccacatggctgggcgacagagtcatcaccaccagcacccgaacatgggccttgcccacctataacaaccacctctacaagcaaatctccagtgcttcaacgggggccagcaacgacaaccactacttcggctacagcaccccctgggggtattttgatttcaacagattccactgccatttctcaccacgtgactggcagcgactcatcaacaacaattggggattccggcccaagagactcaacttcaagctcttcaacatccaagtcaaggaggtcacgacgaatgatggcgtcacgaccatcgctaataaccttaccagcacggttcaagtcttctcggactcggagtaccagttgccgtacgtcctcggctctgcgcaccagggctgcctccctccgttcccggcggacgtgttcatgattccgcagtacggctacctaacgctcaacaatggcagccaggcagtgggacggtcatccttttactgcctggaatatttcccatcgcagatgctgagaacgggcaataactttaccttcagctacaccttcgaggacgtgcctttccacagcagctacgcgcacagccagagcctggaccggctgatgaatcctctcatcgaccagtacctgtattacctgaacagaactcagaatcagtccggaagtgcccaaaacaaggacttgctgtttagccgggggtctccagctggcatgtctgttcagcccaaaaactggctacctggaccctgttaccggcagcagcgcgtttctaaaacaaaaacagacaacaacaacagcaactttacctggacaggtgcttcaaaatataaccttaatgggcgtgaatctataatcaaccctggcactgctatggcctcacacaaagacgacaaagacaagttctttcccatgagcggtgtcatgatttttggaaaggagagcgccggagcttcaaacactgcattggacaatgtcatgatcacagacgaagaggaaatcaaagccactaaccccgtggccaccgaaagatttgggactgtggcagtcaatctccagaacagcagcacagaccctgcgaccggagatgtgcatgttatgggagccttacctggaatggtgtggcaagacagagacgtatacctgcagggtcctatttgggccaaaattcctcacacggatggacactttcacccgtctcctctcatgggcggctttggacttaagcacccgcctcctcagatcctcatcaaaaacacgcctgttcctgcgaatcctccggcagagttttcggctacaaagtttgcttcattcatcacccagtattccacaggacaagtgagcgtggagattgaatgggagctgcagaaagaaaacagcaaacgctggaatcccgaagtgcagtatacatctaactatgcaaaatctgccaacgttgatttcactgtagacaacaatggactttatactgtgcctcgccccattggcacccgttacctcacccgtcccctgtaa

SEQ ID NO: 1010 - DNA, 2211 bp, Artificial Sequence
  source: /note="Description of Artificial Sequence: Synthetic polynucleotide"
atggctgccgatggttatcttccagattggctcgaggacaacctctctgagggcattcgcgagtggtgggcgctgaaacctggagccccgaagcccaaagccaaccagcaaaagcaggacgacggccggggtctggtgcttcctggctacaagtacctcggacccttcaacggactcgacaaaggagagccggtcaacgcggcggacgcggcggccctcgaacacgacaaggcttacgaccagcagctcaaggcgggtgacaacccctacctgcggtataaccacgccgacgccgagttccaggagcggctgcaagaagatacgtcttttgggggcaacctcgggcgagcagtcttccaggccaaaaagaggcttcttgaacctcttggtctggttgaggaaggcgctaagacggctcctggaaagaagaggcctgtagagcagtctcctcaagaaccggactcctcctcgggtattggcaaaacaggtgagcagcccgctaaaaagagactcaattttggtcagactggcgactcagagtcagtccccgacccacaacctctcggagaacctccagcaacccccgctgctgtgggacctactacaatggcttcaggcggtggcgcaccaatggcagacaataacgaaggcgccgacggagtgggtagtgcctcaggaaattggcattgcgattccacatggctgggcgacagagtcatcaccaccagcacccgaacctgggccctgcccacctataacaaccatctctacaagcaaatctccagtgcttcaacgggggccagcaacgacaaccactacttcggctacagcaccccctgggggtattttgacttcaacagattccactgccacttctcaccacgtgactggcagcgactcatcaacaacaactggggattccggcctaagcgactcaacttcaagctcttcaacattcaggtcaaagaggttacggacaacaatggagtcaagaccatcgccaataacctcaccagcaccatccaggtgttcacggactcagagtatcagctgccgtacgtgctcgggtcggctcaccagggctgcctccctccgttcccagcggacgtgttcatgattcctcagtacgggtatctgacactcaacaacggcagtcaggcagtgggacggtcatccttctactgcctggaatattttccatcgcagatgctgagaaccggcaacaactttccgttcagttacaccttcgaggacgtgcctttccacagcagctacgcgcacagccagagcctggaccggctgatgaatcctctgattgaccagtacctgtactacttgtctcggactcaaacaacaggaggcacggcaaatacgcagactctgggcttcagccaaggtgggcctaatacaatggccaatcaggcaaagaactggctgccaggaccctgttaccgccaacaacgcgtctcaacgacaaccgggcaaaacaacaatagcaactttgcctggactgctgggaccaaataccatctgaatggaagaaattcattggctaatcctggcatcgctatggcaacacacaaagacgacaaggagcgtttttttcccagtaacgggatcctgatttttggcaaacaaaatgctgccagagacaatgcggattacagcgatgtcatgctcaccagcgaggaagaaatcaaaaccactaaccctgtggctacagaggaatacggtatcgtggcagataacttgcagcagcaaaacacggctcctcaaattggaactgtcaacagccagggggccttacccggtatggtctggcagaaccgggacgtgtacctgcagggtcccatctgggccaagattcctcacacggacggcaacttccacccgtctccgctgatgggcggctttggcctgaaacatcctccgcctcagatcctgatcaagaacacgcctgtacctgcggatcctccgaccaccttcaaccagtcaaagctgaactctttcatcacgcaatacagcaccggacaggtcagcgtggaaattgaatgggagctgcagaaggaaaacagcaagcgctggaaccccgagatccagtacacctccaactactacaaatctacaagtgtggactttgctgttaatacagaaggcgtgtactctgaaccccaccccattggcacccgttacctcacccgtcccctgtaa

SEQ ID NO: 1011 - DNA, 2211 bp, Artificial Sequence
  source: /note="Description of Artificial Sequence: Synthetic polynucleotide"
atggctgccgatggttatcttccagattggctcgaggacaacctctctgagggcattcgcgagtggtgggcgctgaaacctggagccccgaagcccaaagccaaccagcaaaagcaggacgacggccggggtctggtgcttcctggctacaagtacctcggacccttcaacggactcgacaagggggagcccgtcaacgcggcggacgcagcggccctcgagcacgacaaggcctacgaccagcagctcaaagcgggtgacaatccgtacctgcggtataaccacgccgacgccgagtttcaggagcgtctgcaagaagatacgtcttttgggggcaacctcgggcgagcagtcttccaggccaagaagcgggttctcgaacctctcggtctggttgaggaaggcgctaagacggctcctggaaagaaacgtccggtagaacagtcgccacaagagccagactcctcctcgggcatcggcaagacaggccagcagcccgctaaaaagagactcaattttggtcagactggcgactcagagtcagtccccgatccacaacctctcggagaacctccagcaacccccgctgctgtgggacctactacaatggcttcaggcggtggcgcaccaatggcagacaataacgaaggcgccgacggagtgggtagttcctcgggaaattggcattgcgattcccaatggctgggggacagagtcatcaccaccagcacccgaacctgggccctgcccacctacaacaaccacctctacaagcaaatctccagtgcttcaacgggggccagcaacgacaaccactacttcggctacagcaccccctgggggtattttgatttcaacagattccactgccatttctcaccacgtgactggcagcgactcatcaacaacaactggggattccggcctaagcgactcaacttcaagctcttcaacattcaggtcaaagaggttacggacaacaatggagtcaagaccatcgccaataaccttaccagcacggtccaggtcttcacggactcggagtaccagttgccgtacgtcctcggctctgcgcaccaggactgcctccctccgttcccggcggacgtgttcatgattccgcagtacggctacctaacgctcaacaatggcagccaggcagtgggacggtcatccttttactgcctggaatatttcccatcgcagatgctgagaacgggcaacaactttaccttcagctacacctttgaggacgttcctttccacagcagctacgctcacagccagagtctggaccgtctcatgaatcctctgattgaccagtacctgtactacttgtctcggactcaaacaacaggaggcacggcaaatacgcagactctgggcttcagccaaggtgggcctaatacaatggccaatcaggcaaagaactggctgccaggaccctgttaccgccaacaacgcgtctcaacgacaaccggacaaaacaacaatagcaactttgcctggactgctgggaccaaataccatctgaatggaagaaattcattggctaatcctggcatcgctatggcaacacacaaagacgacaaggagcgtttttttcccagtaacgggatcctgatttttggcaaacaaaatgctgccagagacaatgcggattacagcgatgtcatgctcaccagcgaggaagaaatcaaaaccactaaccctgtggctacagaggaatacggtatcgtggcagataacttgcagcagcaaaacacggctcctcaaattggaactgtcaacagccagggggccttacccggtatggtctggcagaaccgggacgtgtacctgcagggtcccatctgggccaagattcctcacacggacggcaacttccacccgtctccgctgatgggcggctttggcctgaaacatcctccgcctcagatcctgatcaagaacacgcctgtacctgcggatcctccgaccaccttcaaccagtcaaagctgaactctttcatcacgcaatacagcaccggacaggtcagcgtggaaattgaatgggagctgcagaaggaaaacagcaagcgctggaaccccgagatccagtacacctccaactactacaaatctacaagtgtggactttgctgttaatacagaaggcgtgtactctgaaccccaccccattggcacccgttacctcacccgtcccctgtaa

SEQ ID NO: 1012 - DNA, 2211 bp, Artificial Sequence
  source: /note="Description of Artificial Sequence: Synthetic polynucleotide"
atggctgccgatggttatcttccagattggctcgaggacaacctctctgagggcattcgcgagtggtgggacttgaaacctggagccccgaagcccaaagccaaccagcaaaagcaggacgacggccggggtctggtgcttcctggctacaagtacctcggacccttcaacggactcgacaagggggagcccgtcaacgcggcggacgcagcggccctcgagcacgacaaggcctacgaccagcagctcaaagcgggtgacaatccgtacctgcggtataaccacgccgacgccgagtttcaggagcgtctgcaagaagatacgtcttttgggggcaacctcgggcgagcagtcttccaggccaagaagcgggttctcgaacctctcggtctggttgaggaaggcgctaagacggctcctggaaagaaacgtccggtagagcagtcaccacaagagccagactcctcctcgggcatcggcaagacaggccagcagcccgctaaaaagagactcaattttggtcagactggcgactcagagtcagtccccgacccacaacctctcggagaacctccagcaacccccgctgctgtgggacctactacaatggcttcaggcggtggcgcaccaatggcagacaataacgaaggtgccgacggagtgggtaatgcctcaggaaattggcattgcgattccacatggctgggcgactgagtcatcaccaccagcacccgcacctgggccttgcccacctacaataaccacctctacaagcaaatctccagtgcttcaacgggggccagcaacgacaaccactacttcggctacagcaccccctgggggtattttgatttcaacagattccactgccacttttcaccacgtgactggcagcgactcatcaacaacaattggggattccggcccaagagactcaacttcaaactcttcaacatccaagtcaaggaggtcacgcagaatgaaggcaccaagaccatcgccaataacctcaccagcaccatccaggtgtttacggactcggagtaccagctgccgtacgttctcggctctgcccaccagggctgcctgcctccgttcccggcggacgtgttcatgattccccagtacggctacctaacgctcaacaatggcagccaggcagtgggacggtcatccttttactgcctggaatactttccttcgcagatgctgagaaccggcaacaacttccagtttacttacaccttcgaggacgtgcctttccacagcagctacgcccacagccagagcttggaccggctgatgaatcctctgattgaccagtacctgtactacttgtctcggactcaaacaacaggaggcacggcaaatacgcagactctgggcttcagccaaggtgggcctaatacaatggccaatcaggcaaagaactggctgccaggaccctgttaccgccaacaacgcgtctcaacgacaaccgggcaaaacaacaatagcaactttgcctggactgctgggaccaaataccatctgaatggaagaaattcattggctaatcctggcatcgctatggcaacacacaaagacgacaaggagcgtttttttcccagtaacgggatcctgatttttggcaaacaaaatgctgccagagacaatgcggattacagcgatgtcatactcaccagcgaggaagaaatcaaaaccactaaccctgtggctacagaggaatacggtatcgtggcagataacttgcagcagcaaaacacggctcctcaaattggaactgtcaacagccagggggccttacccggtatggtctggcagaaccgggacgtgtacctgcagggtcccatctgggccaagattcctcacacggacggcaacttccacccgtctccgctgatgggcggctttggcctgaaacatcctccgcctcagatcctgatcaagaacacgcctgtacctgcggatcctccgaccaccttcaaccagtcaaagctgaactctttcatcacgcaatacagcaccggacaggtcagcgtggaaattgaatgggagctgcagaaggaaaacagcaagcgctggaaccccgagatccagtacacctccaactactacaaatctacaagtgtggactttgctgttaatacagaaggcgtgtactctgaaccccaccccattggcacccgttacctcacccgtcccctgtaa

SEQ ID NO: 1013 - DNA, 2211 bp, Artificial Sequence
  source: /note="Description of Artificial Sequence: Synthetic polynucleotide"
atggctgccgatggttatcttccagattggctcgaggacactctctctgaaggaataagacagtggtggaagctcaaacctggcccaccaccaccaaagcccgcagagcggcataaggacgacagcaggggtcttgtgcttcctgggtacaagtacctcggacccttcaacggactcgacaagggagagccggtcaacgaggcagacgccgcggccctcgagcacgacaaagcctacgaccggcagctcgacagcggagacaacccgtacctcaagtacaaccacgccgacgcggagtttcaggagcgccttaaagaagatacgtcttttgggggcaacctcgggcgagcagtcttccaggccaagaagagggttctcgaaccttttggtctggttgaggaaggtgctaagacggctcctggaaagaaacgtccggtagagcagtcgccacaagagccagactcctcctcgggcattggcaagacaggccagcagcccgctaaaaagagactcaattttggtcagactggcgactcagagtcagtccccgacccacaacctctcggagaacctccagcaacccccgctgctgtgggacctactacaatggcttcaggcggtggcgcaccaatggcagacaataacgaaggcgccgacggagtgggtaatgcctcaggaaattggcattgcgattccacatggctgggcgacagagtcatcaccaccagcacccgaacatgggccttgcccacctataacaaccacctctacaagcaaatctccagtacttcaacgggggccagtaacgacaaccactacttcggctacagcaccccctgggggtattttgacttcaacagattccactgccacttctcaccacgtgactggcagcgactcatcaacaacaactggggattccggcctaagcgactcaacttcaagctcttcaacattcaggtcaaagaggttacggacaacaatggagtcaagaccatcgccaataaccttaccagcacggtccaggtcttcacggactcggagtaccagttgccgtacgtcctcggctctgcgcaccagggctgcctgcctccgttcccggcggacgtgttcatgattccgcagtacggctacctaacgctcaacaatggcagccaggcagtgggacggtcatccttttactgcctggaatatttcccatcgcagatgctgagaacgggcaacaactttaccttcagctacacttttgaggacgttcctttccacagcagctacgctcacagccagagtctggaccgtctcatgaatcctctgattgaccagtacctgtactacttgtctcggactcaaacaacaggaggcacggcaaatacgcagactctgggcttcagccaaggtgggcctaatacaatggccaatcaggcaaagaactggctgccaggaccctgttaccgccaacaacgcgtctcaacgacaaccggacaaaacaacaatagcaactttgcctggactgctgggaccaaataccatctgaatggaagaaattcattggctaatcctggcatcgctatggcaacacacaaagacgacaaggagcgtttttttcccagtaacgggatcctgatttttggcaaacaaaatgctgccagagacaatgcggattacagcgatgtcatgctcaccagcgaggaagaaatcaaaaccactaaccctgtggctacagaggaatacggtatcgtggcagataacttgcagcagcaaaacacggctcctcaaattggaactgtcaacagccagggggccttacccggtatggtctggcagaaccgggacgtgtacctgcagggtcccatctgggccaagattcctcacacggacggcaacttccacccgtctccgctgatgggcggctttggcctgaaacatcctccgcctcagatcctgatcaagaacacgcctgtacctgcggatcctccgaccaccttcaaccagtcaaagctgaactctttcatcacgcaatacagcaccggacaggtcagcgtggaaattgaatgggagctgcagaaggaaaacagcaagcgctggaaccccgagatccagtacacctccaactactacaaatctacaagtgtggactttgctgttaatacagaaggcgtgtactctgaaccccaccccattggcacccgttacctcacccgtcccctgtaa

SEQ ID NO: 1014 - DNA, 2208 bp, Artificial Sequence
  source: /note="Description of Artificial Sequence: Synthetic polynucleotide"
atggctgccgatggttatcttccagattggctcgaggacaacctctctgagggcattcgcgagtggtgggacttgaaacctggagccccgaagcccaaagccaaccagcaaaagcaggacgacggccggggtctggtgcttcctggctacaagtacctcggacccttcaacggactcgacaagggggagcccgtcaacgcggcggatgcagcggccctcgagcacgacaaggcctacgaccggcagctcgacagcggagacaacccgtacctgcggtataaccacgccgacgcggagtttcaggagcgccttaaagaagatacgtcttttgggggcaacctcgggcgagcagtcttccaggccaagaagagggttctcgaaccttttggtctggttgaggaaggtgctaagacggctcctggaaagaaacgtccggtagagcagtcgccacaagagccagactcctcctcgggcattggcaagacaggccagcagcccgctaaaaagagactcaattttggtcagactggcgactcagagtcagtccccgacccacaacctctcggagaacctccagcaacccccgctgctgtgggacctactacaatggcttcaggcggtggcgcaccaatggcagacaataacgaaggcgccgacggagtgggtaatgcctcaggaaattggcattgcgattccacatggctgggcgacagagtcatcaccaccagcacccgcacctgggccttgcccacctacaataaccacctctacaagcaaatctccagtgcttcaacgggggccagcaacgacaaccactacttcggctacagcaccccctgggggtattttgactttaacagattccactgccacttttcaccacgtgactggcaaagactcatcaacaacaactggggattccggcccaagagactcaacttcaagctcttcaacatccaggtcaaggaggtcacgcagaatgaaggcaccaagaccatcgccaataaccttaccagcacgattcaggtctttacggactcggaataccagctcccgtacgtcctcggctctgcgcaccagggctgcctccctccgttcccggcggacgtgttcatgattccgcagtacggctacctaacactcaacaacggtagtcaggccgtgggacgctcctccttctactgcctggaatactttccttcgcagatgctgagaaccggcaacaacttccagtttacttacaccttcgaggacgtgcctttccacagcagctacgcccacagccagagcttggaccggctgatgaatcctctgattgaccagtacctgtactacttgtctcggactcaaacaacaggaggcacggcaaatacgcagactctgggcttcagccaaggtgggcctaatacaatggccaatcaggcaaagaactggctgccaggaccctgttaccgccaacaacgcgtctcaacgacaaccgggcaaaacaacaatagcaactttgcctggactgctgggaccaaataccatctgaatggaagaaattcactggctaatcctggcatcgctatggcaacacacaaagacgacaggagcgtttttttccagtaccgggatcctgattttggcaaacaaaatgctgccagagacaatgcggattacagcgatgtcatgctcaccagcgaggaagaaatcaaaaccactaaccctgtggctacagaggaatacggtatcgtggcagataacttgcagcagcaaaacacggctcctcaaattggaactgtcaacagccagggggccttacccggtatggtctggcagaaccgggacgtgtacctgcagggtcccatctgggccaagattcctcacacggacggcaacttccacccgtctccgctgatgggcggctttggcctgaaacatcctccgcctcagatcctgatcaagaacacgcctgtacctgcggatcctccgaccaccttcaaccagtcaaagctgaactctttcatcacgcaatacagcaccggacaggtcagcgtggaaattgaatgggagctgcagaaggaaaacagcaagcgctggaaccccgagatccagtacacctccaactactacaaatctacaagtgtggactttgctgttaatacagaaggcgtgtactctgaaccccaccccattggcacccgttacctcacccgtcccctgtaa

SEQ ID NO: 1015 - DNA, 2211 bp, Artificial Sequence
  source: /note="Description of Artificial Sequence: Synthetic polynucleotide"
atggctgccgatggttatcttccagattggctcgaggacaacctctctgagggcattcgcgagtggtgggcgctgaaacctggagccccgaagcccaaagccaaccagcaaaagcaggacgacggccggggtctggtgcttcctggctacaagtacctcggacccttcaacggactcgacaagggggagcccgtcaacgcggcggatgcagcagccctcgaacacgacaaagcttacgaccagcagctcaaggccggtgacaacccctacctcaagtataaccacgccgacgccgagtttcaggagcgtcttcaaggagatacgtcttttgggggcaacctcggacgagcagtcttccaggccaagaagcgggttctcgaacctcttggtctggttgaggaagcggctaagacggctcctggaaagaagaggcctgtagagcagtctcctcaggaaccggactcctccgcgggtattggcaaatcgggtgcacagcccgctaaaaagagactcaatttcggtcagactggcgacacagagtcagtcccagaccctcaacctctcggagaacctccagcagcgccctctggtgtgggacctaatacaatggctgcaggcggtggcgcaccaatggcagacaataacgaaggtgccgatggagtgggtagttcctcgggaaattggcattgcgattcccaatggctgggggacagagtcatcaccaccagcacccgaacctgggccctgcccacctacaacaaccacctctacaagcaaatctccagtgcttcaacgggggccagcaacgacaaccactacttcggctacagcaccccttgggggtattttgacttcaacagattccactgccacttttcaccacgtgactggcagcgactcatcaacaacaactggggattccggcctaagcgactcaacttcaagctcttcaacattcaggtcaaagaggttacggacaacaatggagtcaagaccatcgccaataaccttaccagcacggtccaggtcttcacggactcagactatcagctcccgtacgtgctcgggtcggctcacgagggctgcctccctccgttcccggcggacgtgttcatgattccgcagtacggctacctaacgctcaacaatggcagccaggcagtgggacggtcatccttttactgcctggaatactttccttcgcagatgctgagaaccggcaacaacttccagtttacttacaccttcgaggacgtgcctttccacagcagctacgctcacagccagagtctggaccgtctcatgaatcctctgattgaccagtacctgtactacttgtctcggactcaaacaacaggaggcacggcaaatacgcagactctgggcttcagccaaggtgggcctaatacaatggccaatcaggcaaagaactggctgccaggaccctgttaccgccaacaacgcgtctcaacgacaaccgggcaaaacaacaatagcaactttgcctggactgctgggaccaaataccatctgaatggaagaaattcattggctaatcctggcatcgctatggcaacacacaaagacgacaaggagcgtttttttcccagtaacgggatcctgatttttggcaaacaaaatgctgccagagacaatgcggattacagcgatgtcatgctcaccagcgaggaagaaatcaaaaccactaaccctgtggctacagaggaatacggtatcgtagcagataacttgcagcagcaaaacacggctcctcaaattggaactgtcaacagccagggggccttacccggtatggtctggcagaaccgggacgtgtacctgcagggtcccatctgggccaagattcctcacacggacggcaacttccacccgtctccgctgatgggcggctttggcctgaaacatcctccgcctcagatcctgatcaagaacacgcctgtacctgcggatcctccgaccaccttcaaccagtcaaagctgaactctttcatcacgcaatacagcaccggacaggtcagcgtggaaattgaatgggagctgcagaaggaaaacagcaagcgctggaaccccgagatccagtacacctccaactactacaaatctacaagtgtggactttgctgttaatacagaaggcgtgtactctgaaccccaccccattggcacccgttacctcacccgtcccctgtaa

SEQ ID NO: 1016 - DNA, 2211 bp, Artificial Sequence
  source: /note="Description of Artificial Sequence: Synthetic polynucleotide"
atggctgccgatggttatcttccagattggctcgaggacactctctctgaaggaataagacagtggtggaagctcaaacctggcccaccaccaccaaagcccgcagagcggcataaggacgacagcaggggtcttgtgcttcctgggtacaagtacctcggacccttcaacggactcgacaagggagagccggtcaacgaggcagacgccgcggccctcgagcacgacaaagcctacgaccggcagctcgacagcggagacaacccgtacctcaagtacaaccacgccgacgcggagtttcaggagcgccttaaagaagatacgtcttttgggggcaacctcgggcgagcagtcttccaggccaagaagagggttctcgaaccttttggtctggttgaggaagcggctaagacggctcctggaaagaaacgtccggtagagcagtcgccacaagagccagactcctcctcgggcattggcaagacaggccagcagcccgctaaaaagagactcaattttggtcagactggcgactcagagtcagtccccgacccacaacctctcggagaacctccagcaacccccgctgctgtgggacctactacaatggcttcaggcggtggcgcaccaatggcagacaataacgaaggcgccgacggagtgggtaatgcctcaggaaattggcattgcgattccacatggctgggcgacagagtcatcaccaccagcacccgaacatgggccttgcccacctataacaaccacctctacaagcaaatctccagtgcttcaacgggggccagcaacgacaaccactacttcggctacagcaccccctgggggtattttgacttcaacagattccactgccacttctcaccacgtgactggcagcgactcatcaacaacaactggggattccggcctaagcgactcaacttcaagctcttcaacattcaggtcaaagaggttacggacaacaatggagtcaagaccatcgccaataaccttaccagcacggtccaggtcttcacggactcagactatcagctcccgtacgtgctcgggtcggctcacgagggctgcctcccgccgttcccagcggacgttttcatgattcctcagtacggctacctaacactcaacaacggtagtcaggccgtgggacgctcctccttctactgcctggaatactttccttcgcagatgctgagaacgggcaacaactttaccttcagctacacctttgaggacgttcctttccacagcagctacgctcacagccagagtctggaccgtctcatgaatcctctgattgaccagtacctgtactacttgtctcggactcaaacaacaggaggcacggcaaatacgcagactctgggcttcagccaaggtgggcctaatacaatggccaatcaggcaaagaactggctgccaggaccctgttaccgccaacaacgcgtctcaacgacaaccgggcaaaacaacaatagcaactttgcctggactgctgggacaaaataccatctgaatggaagaaattcattggctaatcctggcatcgctatggcaacacacaaagacgacaaggagcgtttttttcccagtaacgggattctgatttttggcaaacaaaatgctgccagagacaatgcggattacagcgatgtcatgctcaccagcgaggaagaaatcaaaaccactaaccctgtggctacagaggaatacggtatcgtggcagataacttgcagcagcaaaacacggctcctcaaattggaactgtcaacagccagggggccttacccggtatggtctggcagaaccgggacgtgtacctgcagggtcccatctgggccaagattcctcacacggacggcaacttccacccgtctccgctgatgggcggctttggacttaagcacccgcctcctcagatcctcatcaaaaacacgcctgttcctgcggatcctccgaccaccttcaaccagtcaaagctgaactctttcatcacgcaatacagcaccggacaggtcagcgtggaaattgaatgggagctgcagaaggaaaacagcaagcgctggaaccccgagatccagtacacctccaactactacaaatctacaagtgtggactttgctgttaatacagaaggcgtgtactctgaaccccaccccattggcacccgttacctcacccgtcccctgtaa

SEQ ID NO: 1017 - DNA, 2211 bp, Artificial Sequence
  source: /note="Description of Artificial Sequence: Synthetic polynucleotide"
atggctgccgatggttatcttccagattggctcgaggacaacctctctgagggcattcgcgagtggtgggcgctgaaacctggagccccgaagcccaaagccaaccagcaaaagcaggacgacggccggggtctggtgcttcctggctacaagtacctcggacccttcaacggactcgacaaaggagagccggtcaacgcggcggacgcagcggccctcgagcacgacaaggcctacgaccagcagctcaaagcgggtgacaatccgtacctgcggtataaccacgccgacgccgagtttcaggagcgtctgcaagaagatacgtcttttgggggcaacctcgggcgagcagtcttccaggccaagaagcgggttctcgaacctctcggtctggttgaggaaggcgctaagacggctcctggaaagaaacgtccggtagagcagtcgccacaagagccagactcctcctcgggcatcggcaagacaggccagcagcccgctaaaaagagactcaattttggtcagactggcgactcagagtcagtccccgacccacaacctctcggagaacctccagcaacccccgctgctgtgggacctactacaatggcttcaggcggtggcgcaccaatggcagacaataacgaaggcgccgacggagtgggtagttcctcgggaaattggcattgcgattccacatggctgggcgacagagtcatcaccaccagcacccgcacctgggccttgcccacctacaataaccacctctacaagcaaatctccagtgcttcaacgggggccagcaacgacaaccactacttcggctacagcaccccctgggggtattttgacttcaacagattccactgccacttctcaccacgtgactggcagcgactcatcaacaacaactggggattccggcctaagcgactcaacttcaagctcttcaacattcaggtcaaagaggttacggacaacaatggagtcaagaccatcgccaataaccttaccagcacggtccaggtcttcacggactcggagtaccagttgccgtacgtcctcggctctgcgcaccagggctgcctccctccgttcccggcggacgtgttcatgattccgcagtacggctacctaacgctcaacaatggcagccaggcagtgggacggtcatccttttactgcctggaatatttcccatcgcagatgctgagaacgggcaacaactttaccttcagctacacctttgaggacgttcctttccacagcagctacgctcacagccagagtctggaccgtctcatgaatcctctgattgaccagtacctgtactacttgtctcggactcaaacaacaggaggcacggcaaatacgcagactctgggcttcagccaaggtgggcctaatacaatggccaatcaggcaaagaactggctgccaggaccctgttaccgccaacaacgcgtctcaacgacaaccgggcaaaacaacaatagcaactttgcctggactgctgggaccaaataccatctgaatggaagaaattcattggctaatcctggcatcgctatggcaacacacaaagacgacaaggagcgtttttttcccagtaacgggatcctgatttttggcaaacaaaatgctgccagagacaatgcggattacagcgatgtcatgctcaccagcgaggaagaaatcaaaaccactaaccctgtggctacagaggaatacggtatcgtggcagataacttgcagcagcaaaacacggctcctcaaattggaactgtcaacagccagggggccttacccggtatggtctggcagaaccgggatgtgtacctgcagggtcccatctgggccaagattcctcacacggacggcaacttccacccgtctccgctgatgggcggctttggcctgaaacatcctccgcctcagatcctgatcaagaacacgcctgtacctgcggatcctccgaccaccttcaaccagtcaaagctgaactctttcatcacgcaatacagcaccggacaggtcagcgtggaaattgaatgggagctgcagaaggaaaacagcaagcgctggaaccccgagatccagtacacctccaactactacaaatctacaagtgtggactttgctgttaatacagaaggcgtgtactctgaaccccaccccattggcacccgttacctcacccgtcccctgtaa

SEQ ID NO: 1018 - DNA, 2214 bp, Artificial Sequence
  source: /note="Description of Artificial Sequence: Synthetic polynucleotide"
atggctgccgatggttatcttccagattggctcgaggacaaccttagtgaaggaattcgcgagtggtgggcgctgaaacctggagccccgaagcccaaagccaaccagcaaaagcaggacgacggccggggtctggtgcttcctggctacaagtacctcggacccttcaacggactcgacaagggggagcccgtcaacgcggcggacgcagcggccctcgagcacgacaaggcctacgaccagcagctcaaagcgggtgacaatccgtacctgcggtataaccacgccgacgccgagtttcaggagcgtctgcaagaagatacgtcttttgggggcaacctcgggcgagcagtcttccaggccaagaagcgggttctcgaacctctcggtctggttgaggaaggcgctaagacggctcctggaaagaaacgtccggtagagcagtcgccacaagagccagactcctcctcgggcatcggcaagacaggccagcagcccgctaaaaagagactcaatttcggtcagactggcgacacagagtcagtcccagaccctcaaccaatcggagaacctcccgcagccccctcaggtgtgggatctcttacaatggcttcaggtggtggcgcaccagtggcagacaataacgaaggtgccgatggagtgggtagttcctcgggaaattggcattgcgattcccaatggctgggggacagagtcatcaccaccagcaccagaacctgggccttgcccacctacaataaccacctctacaagcaaatctccaacagcacatctggaggatcttcaaatgacaacgcctacttcggctacagcaccccctgggggtattttgactttaacagattccactgccacttttcaccacgtgactggcagcgactcatcaacaacaactggggattccgacccaagagactcaacttcaagctcttcaacatccaggtcaaggaggtcacgcagaacgaaggcaccaagaccatcgccaataacctcaccagcaccatccaggtgtttacggactcggagtaccagctgccgtacgttctcggctccgcccaccagggctgcctgcctccgttcccggcggacgtgttcatgattccccagtacggctacctaacgctcaacaacggtagtcaggccgtgggacgctcctccttctactgcctggaatactttccttcgcagatgctgagaaccggcaacaacttccagtttacttacaccttcgaggacgtgcctttccacagcagctacgcgcacagccagagcttggaccggctgatgaatcctctgattgaccagtacctgtactacttgtctcggactcaaacaacaggaggcacggcaaatacgcagactctgggcttcagccaaggtgggcctaatacaatggccaatcaggcaaagaactggctgccaggaccctgttaccgccaacaacgcgtctcaacgacaaccgggcaaaacaacaatagcaactttgcctggactgctgggaccaaataccatctgaatggaagaaattcattggctaatcctggcatcgctatggcaacacacaaagacgacaaggagcgtttttttcccagtaacgggatcctgatttttggcaaacaaaatgctgccagagacaatgcggattacagcgatgtcatgctcaccagcgaggaagaaatcaaaaccactaaccctgtggctacagaggaatacggtatcgtggcagataacttgcagcagcaaaacacggctcctcaaattggaactgtcaacagccagggggccttacccggtatggtctggcagaaccgggacgtgtacctgcagggtcccatctgggccaagattcctcacacggacggcaacttccacccgtctccgctgatgggcggctttggcctgaaacatcctccgcctcagatcctgatcaagaacacgcctgtacctgcggatcctccgaccaccttcaaccagtcaaagctgaactctttcatcacgcaatacagcaccggacaggtcagcgtggaaattgaatgggagctgcagaaggaaaacagcaagcgctggaaccccgagatccagtacacctccaactactacaaatctacaagtgtggactttgctgttaatacagaaggcgtgtactctgaaccccaccccattggcactcgttacctcacccgtcccctgtaa

SEQ ID NO: 1019 - DNA, 2211 bp, Artificial Sequence
  source: /note="Description of Artificial Sequence: Synthetic polynucleotide"
atggctgccgatggttatcttccagattggctcgaggacaacctctctgagggcattcgcgagtggtgggcgctgaaacctggagccccgaagcccaaagccaaccagcaaaagcaggacgacggccggggtctggtgcttcctggctacaagtacctcggacccttcaacggactcgacaagggggagcccgtcaacgcggcggatgcagcagccctcgaacacgacaaagcttacgaccagcagctcaaggccggtgacaacccctacctcaagtataaccacgccgacgccgagtttcaggagcgtcttcaaggagatacgtcttttgggggcaacctcggacgagcagtcttccaggccaagaagcgggttctcgaacctcttggtctggttgaggaagcggctaagacggctcctggaaagaagaggcctgtagagcagtctcctcaggaaccggactcctccgcgggtattggcaaatcgggtgcacagcccgctaaaaagagactcaatttcggtcagactggcgacacagagtcagtcccagaccctcaacctctcggagaacctccagcagcgccctctggtgtgggacctaatacaatggctgcaggcggtggcgcaccaatggcagacaataacgaaggtgccgatggagtgggtagttcctcgggaaattggcattgcgattcccaatggctgggggacagagtcatcaccaccagcacccgaacctgggccctgcccacctacaacaaccacctctacaagcaaatctccagtgcttcaacgggggccagcaacgacaaccactacttcggctacagcaccccttgggggtattttgacttcaacagattccactgccacttctcaccacgtgactggcagcgactcatcaacaacaactggggattccggcctaagcgactcaacttcaagctcttcaacattcaggtcaaagaggttacggacaacaatggagtcaagaccatcgccaataaccttaccagcacggtccaggtcttcacggactcggagtaccagttgccgtacgtcctcggctctgcgcaccagggctgcctccctccgttcccggcggacgtgttcatgattccgcagtacggctacctaacgctcaacaatggcagccaggcagtgggacggtcatccttttactgcctggaatatttcccatcgcagatgctgagaacgggcaacaactttaccttcagctacacctttgaggacgttcctttccacagcagctacgctcacagccagagtctggaccgtctcatgaatcctctgattgaccagtacctgtactacttgtctcggactcaaacaacaggaggcacggcaaatacgcagactctgggcttcagccaaggtgggcctaatacaatggccaatcaggcaaagaactggctgccaggaccctgttaccgccaacaacgcgtctcaacgacaaccgggcaaaacaacaatagcaactttgcctggactgctgggaccaaataccatctgaatggaagaaattcattggctaatcctggcatcgctatggcaacacacaaagacgacaaggagcgtttttttcccagtaacgggatcctgatttttgacaaacaaaatgctgccagagacaatgcggattacagcgatgtcatgctcaccagcgaggaagaaatcaaaaccactaaccctgtggctacagaggaatacggtatcgtggcagataacttgcagcagcaaaacacggctcctcaaattggaactgtcaacagccagggggccttacccggtatggtctggcagaaccgggatgtgtacctgcagggtcccatctgggccaagattcctcacacggacggcaacttccacccgtctccgctgatgggcggctttggcctgaaacatcctccgcctcagatcctgatcaagaacacgcctgtacctgcggatcctccgaccaccttcaaccagtcaaagctgaactctttcatcacgcaatacagcaccggacaggtcagcgtggaaattgaatgggagctgcagaaggaaaacagcaagcgctggaaccccgagatccagtacacctccaactactacaaatctacaagtgtggactttgctgttaatacagaaggcgtgtactctgaaccccaccccattggcacccgttacctcacccgtcccctgtaa

SEQ ID NO: 1020 - DNA, 2211 bp, Artificial Sequence
  source: /note="Description of Artificial Sequence: Synthetic polynucleotide"
atggctgccgatggttatcttccagattggctcgaggacactctctctgaaggaataagacagtggtggaagctcaaacctggcccaccaccaccaaagcccgcagagcggcataaggacgacagcaggggtcttgtgcttcctgggtacaagtacctcggacccttcaacggactcgacaagggagagccggtcaacgaggcagacgccgcggccctcgagcacgacaaagcctacgaccggcagctcgacagcggagacaacccgtacctcaagtacaaccacgccgacgcggagtttcaggagcgccttaaagaagatacgtcttttgggggcaacctcggacgagcagtcttccaggcgaaaaagagggttcttgaacctctgggcctggttgaggaacctgttaagacggctccgggaaaaaagaggccggtagagcactctcctgtggagccagactcctcctcgggaaccggaaaggcgggccagcagcctgcaagaaaaagattgaattttggtcagactggcgactcagagtcagtccccgacccacaacctctcggagaacctccagcaacccccgctgctgtgggacctaatacgatggctacaggcagtggcgcaccaatggcagacaataacgagggcgccgacggagtgggtaattcctcgggaaattggcattgcgattccacatggatgggcgacagagtcatcaccaccagcaccagaacctgggccctgcccacttacaacaaccatctctacaagcaaatctccagtgcttcaacgggggccagcaacgacaaccactacttcggctacagcaccccctgggggtattttgacttcaacagattccactgccacttctcaccacgtgactggcagcgactcatcaacaacaactggggattccggcctaagcgactcaacttcaagctcttcaacattcaggtcaaagaggttacggacaacaatggagtcaagaccatcgccaataaccttaccagcaccatccaggtctttacggactcggaataccagctgccgtacgttctcggctctgcccaccagggctgcctgcctccgttcccggcggacgtgttcatgattccccagtacggctacctaacactcaacaacggtagtcaggccgtgggacgctcctccttctactgcctggaatatttcccatcgcagatgctgagaacgggcaacaactttaccttcagctacacctttgaggacgttcctttccacagcagctacgctcacagccagagtctggaccgtctcatgaatcctctgattgaccagtacctgtactacttgtctcggactcaaacaacaggaggcaaggcaaatacgcagactctgggcttcagccaaggtgggcctaatacaatggccaatcaggcaaagaactggctgccaggaccctgttaccgccaacaacgcgtctcaacgacaaccgggcaaaacaacaatagcaactttgcctggactgctgggaccaaataccatctgaatggaagaaattcattggctaatcctggcatcgctatggcaacacacaaagacgacaaggagcgtttttttcccagtaacgggatcctgatttttggcaaacaaaatgctgccagagacaatgcggattacagcgatgtcatgctcaccagcgaggaagaaatcaaaaccactaaccctgtggctacagaggaatacggtatcgtggcagataacttgcagcagcaaaacacggctcctcaaattggaactgtcaacagccagggggccttacccggtatggtctggcagaaccgggacgtgtacctgcagggtcccatctgggccaagattcctcacacggacggcaacttccacccgtctccgctgatgggcggctttggcctgaaacatcctccgcctcagatcctgatcaagaacacgcctgtacctgcggatcctccgaccaccttcaaccagtcaaagctgaactctttcatcacgcaatacagcaccggacaggtcagcgtggaaattgaatgggagctgcagaaggaaaacagcaagcgctggaaccccgagatccagtacacctccaactactacaaatctacaagtgtggactttgctgttaatacagaaggcgtgtactctgaaccccaccccattggcacccgttacctcacccgtcccctgtaa

SEQ ID NO: 1021 - DNA, 2211 bp, Artificial Sequence
  source: /note="Description of Artificial Sequence: Synthetic polynucleotide"
atggctgccgatggttatcttccagattggctcgaggacaacctctctgagggcattcgcgagtggtgggcgctgaaacctggagccccgaagcccaaagccaaccagcaaaagcaggacgacggccggggtctggtgcttcctggctacaagtacctcggacccttcaacggactcgacaagggggagcccgtcaacgcggcggacgcagcggccctcgagcacgacaaggcctacgaccagcagctcaaagcgggtgacaatccgtacctgcggtataaccacgccgacgccgagtttcaggagcgtctgcaagaagatacgtcttttgggggcaacctcgggcgagcagtcttccaggccaagaagcgggttctcgaaccttttggtctggttgaggaaggtgctaagacggctcctggaaagaaacgtccggtagagcagtcgccacaagagccagactcctcctcgggcatcggcaagacaggccagcagcccgctaaaaagagactcaattttggtcagactggcgactcagagtcagtccccgacccacaacctctcggagaacctccagcaacccccgctgctgtgggacctactacaatggcttcaggcggtggcgcaccaatggcggacaataacgaaggcgccgacggagtgggtaatgcctcaggaaattggcattgcgattccacatggctgggcgacagagtcatcaccaccagcacccgcacctgggccttgcccacctacaataaccacctctacaagcaaatctccagtgcttcaacgggggccagcaacgacaaccactacttcggctacagcaccccctgggggtattttgacttcaacagattccactgccacttttcaccacgtgactggcaaagactcatcaacaacaactggggattccggcctaagcgactcaacttcaagctcttcaacattcaggtcaaagaggttacggacaacaatggagtcaagaccatcgccaataaccttaccagcacggtccaggtcttcacggactcggagtaccagttgccgtacgtcctcggctctgcgcaccagggctgcctccctccgttcccggcggacgtgttcatgattccgcagtacggctacctaacgctcaacaatggcagccaggcagtgggacggtcatccttttactgcctggaatatttcccatcgcagatgctgagaacgggcaacaactttaccttcagctacacctttgaggacgttcctttccacagcagctacgctcacagccagagtctggaccgtctcatgaatcctctgattgaccagtacctgtactacttgtctcggactcaaacaacaggaggcacgggaaatacgcagactctgggcttcagccaaggtgggcctaatacaatggccaatcaggcaaagaactggctgccaggaccctgttaccgccaacaacgcgtctcaacgacaaccgggcaaaacaacaatagcaactttgcctggactgctgggaccaaataccatctgaatggaagaaattcattggctaatcctggcatcgctatggcaacacacaaagacgacaaggagcgtttttttcccagtaacgggatcctgatttttggcaaacaaaatgctgccagagacaatgcggattacagcgatgtcatgctcaccagcgaggaagaaatcaaaaccactaaccctgtggctacagaggaatacggtatcgtggcagataacttgcagcagcaaaacacggctcctcaaattggaactgtcaacagccagggggccttacccggtatggtctggcagaaccgggacgtgtacctgcagggtcccatctgggccaagattcctcacacggacggcaacttccacccgtctccgctgatgggcggctttggcctgaaacatcctccgcctcagatcctgatcaagaacacgcctgtacctgcggatcctccgaccaccttcaaccagtcaaagctgaactctttcatcacgcaatacagcaccggacaggtcagcgtggaaattgaatgggagctgcagaaggaaaacagcaagcgctggaaccccgagatccagtacacctccaactactacaaatctacaagtgtggactttgctgttaatacagaaggcgtgtactctgaaccccaccccattggcacccgttacctcacccgtcccctgtaa

SEQ ID NO: 1022 - DNA, 2211 bp, Artificial Sequence
  source: /note="Description of Artificial Sequence: Synthetic polynucleotide"
atggctgccgatggttatcttccagattggctcgaggacaacctctctgagggcattcgcgagtggtgggacttgaaacctggagccccgaaacccaaagccaaccagcaaaagcaggacgacggccggggtctggtgcttcctggctacaagtacctcggacccttcaacggactcgacaagggggagcccgtcaacgcggcggacgcagcggccctcgagcacgacaaggcctacgaccagcagctcaaagcgggtgacaatccgtacctgcggtataaccacgccgacgccgagtttcaggagcgtctgcaagaagatacgtcttttgggggcaacctcgggcgagcagtcttccaggccaagaagcgggttctcgaacctctcggtctggttgaggaaggcgctaagacggctcctggaaagaagaggcctgtagagcagtcgccacaagagccagactcctcctcgggcatcggcaagacaggccagcagcccgctaaaaagagactcaattttggtcagactggcgactcagagtcagtccccgatccacaacctctcggagaacctccagcaacccccgctgctgtgggacctactacaatggcttcaggcggtggcgcaccaatggcagacaataacgaaggcgccgacggagtgggtagttcctcgggaaattggcattgcgattccacatggctgggcgacagagtcatcaccaccagcacccgaacatgggccttgcccacctataacaaccacctctacaagcaaatctccagtgcttcaacgggggccagcaacgacaaccactacttcggctacagcaccccctgggggtattttgacttcaacagattccactgccacttctcaccacgtgactggcagcgactcatcaacaacaactggggattccggcctaagcgactcaacttcaagctcttcaacatccaggtcaaggaggtcacgcagaatgaaggcaccaagaccatcgccaataacctcaccagcaccatccaggtgtttacggactcggagtaccagcttccgtacgtcctcggctctgcgcaccagggctgcctccctccgttcccggcggacgtgttcatgattccgcagtacggctacctaacgctcaacaatggcagccaggcagtgggacggtcatccttttactgcctggaatatttcccatcgcagatgctgagaacgggcaacaactttaccttcagctacacctttgaggacgttcctttccacagcagctacgcgcacagccagagcttggaccggctgatgaatcctctgattgaccagtacctgtactacttgtctcggactcaaacaacaggaggcacggcaaatacgcagactctgggcttcagccaaggtgggcctaatacaatggccaatcaggcaaagaactggctgccaggaccctgttaccgccaacaacgcgtctcaacgacaaccgggcaaaacaacaatagcaactttgcctggactgctgggaccaaataccatctgaatggaagaaattcattggctaatcctggcatcgctatggcaacacacaaagacgacaaggagcgtttttttcccagtaacgggatcctgatttttggcaaacaaaatgctgccagagacaatgcggattacagcgatgtcatgctcaccagcgaggaagaaatcaaaaccactaaccctgtggctacagaggaatacggtatcgtggcagataacttgcagcagcaaaacacggctcctcaaattggaactgtcaacagccagggggccttacccggtatggtctggcagaaccgggacgtgtacctgcagggtcccatctgggccaagattcctcacacggacggcaacttccacccgtctccgctgatgggcggctttggcctgaaacatcctccgcctcagatcctgatcaagaacacgcctgtacctgcggatcctccgaccaccttcaaccagtcaaagctgaactctttcatcacgcaatacagcaccggacaggtcagcgtggaaattgaatgggagctgcagaaggaaaacagcaagcgctggaaccccgagatccagtacacctccaactactacaaatctacaagtgtggactttgctgttaatacagaaggcgtgtactctgaaccccaccccattggcacccgttacctcacccgtcccctgtaa

SEQ ID NO: 1023 - DNA, 2211 bp, Artificial Sequence
  source: /note="Description of Artificial Sequence: Synthetic polynucleotide"
atggctgccgatggttatcttccagattggctcgaggacaacctctctgagggcattcgcgagtggtgggcgctgaaacctggagccccgaagcccaaagccaaccagcaaaagcaggacgacggccggggtctggtgcttcctggctacaagtacctcggacccttcaacggactcgacaagggggagcccgtcaacgcggcggatgcagcggccctcgagcacgacaaggcctacgaccagcagctcaaagcgggtgacaatccgtacctgcggtataaccacgccgacgccgagtttcaggagcgtctgcaagaagatacgtcttttgggggcaacctcgggcgagcagtcttccaggccaagaagcgggttctcgaacctctcggtctggttgaggaaggcgctaagacggctcctggaaagaaacgtccggtagagcagtcgccacaagagccagactcctcctcgggcatcggcaagacaggccagcagcccgctaaaaagagactcaattttggtcagactggcgactcagagtcagtccccgacccacaacctctcggagaacctccagcaacccccgctgctgtgggacctactacaatggctgcaggcggtggcgcaccaatggcagacaataacgaaggcgccgacggagtgggtagttcctcgggaaattggcattgcgattccacatggatgggcgacagagtcatcaccaccagcacccgaacctgggccttgcccacctataacaaccatctctacaagcaaatctccagtgcttcaacgggggccagcaacgacaaccactacttcggctacagcaccccctgggggtattttgacttcaacagattccactgccacttctcaccacgtgactggcagcgactcatcaacaacaactggggattccggcccaagagactcagcttcaagctcttcaacatccaggtcaaggaggtcacgcagaatgaaggcaccaagaccatcgccaataacctcaccagcaccatccaggtgtttacggactcggagtaccagctgccgtacgtcctcggctctgcgcaccagggctgcctccctccgttcccggcggacgtgttcatgattccgcagtacggctacctaacgctcaacaatggcagccaggcagtgggacggtcatccttttactgcctggaatatttcccatcgcagatgctgagaacgggcaacaactttaccttcagctacacctttgaggacgttcctttccacagcagctacgctcacagccagagcttggaccggctgatgaatcctctgattgaccagtacctgtactacttgtctcggactcaaacaacaggaggcacggcaaatacgcagactctgggtttcagccaaggtgggcctaatacaatggccaatcaggcaaagaactggctgcaaggaccctgttaccgccaacaacgcgtctcaacgacaaccgggcaaaacaacaatagcaactttgcctggactgctgggaccaaataccatctgaatggaagaaattcattggctaatcctggcatcgctatggcaacacacaaagacgacaaggagcgtttttttcccagtaacgggatcctgatttttggcaaacaaaatgctgccagagacaatgcggattacagcgatgtcatgctcaccagcgaggaagaaatcaaaaccactaaccctgtggctacagaggaatacggtatcgtggcagataacttgcagcagcaaaacacggctcctcaaattggaactgtcaacagccagggggccttacccggtatggtctggcagaacctggacgtgtacctgcagggtcccatctgggccaagattcctcacacggacggcaacttccacccgtctccgctgatgggcggctttggcctgaaacatcctccgcctcagatcctgatcaagaacacgcctgtacctgcggatcctccgaccaccttcaaccagtcaaagctgaactctttcatcacgcaatacagcaccggacaggtcagcgtggaaattgaatgggagctgcagaaggaaaacagcaagcgctggaaccccgagatccagtacacctccaactactacaaatctacaagtgtggactttgctgttaatacagaaggcgtgtactctgaaccccaccccattggcacccgttacctcacccgtcccctgtaa

SEQ ID NO: 1024 - DNA, 2214 bp, Artificial Sequence
  source: /note="Description of Artificial Sequence: Synthetic polynucleotide"
atggctgccgatggttatcttccagattggctcgaggacaacctctctgagggcattcgcgagtggtgggcgctgaaacctggagccccgaagcccaaagccaaccagcaaaagcaggacgacggccggggtctggtgcttcctggctacaagtacctcggacccttcaacggactcgacaagggagagcccgtcaacgcggcggacgcagcggccctcgagcacgacaaggcctacgaccagcagctcaaagcgggtgacaatccgtacctgcggtataaccacgccgacgccgagtttcaggagcgtctgcaagaagatacgtcttttgggggcaacctcgggcgagcagtcttccaggccaagaagcgggttctcgaacctctcggtctggttgaggaaggcgctaagacggctcctggaaagaagagaccggtagagccatcaccccagcgttctccagactcctcctcgggcatcggcaagacaggccagcagcccgctaaaaagagactcaattttggtcagactggcgactcagagtcagtccccgacccacaacctctcggagaacctccagcaacccccgctgctgtgggacctactacaatggcttcaggtggtggcgcaccaatggcagacaataacgaaggcgccgacggagtgggtaatgcctcaggaaattggcattgcgattcccaatggctgggcgacagagtcatcaccaccagcacccgaacatgggccttgcccacctataacaaccacctctacaagcaaatctccagtgcttcaacgggggccagcaacgacaaccactacttcggctacagcaccccctgggggtattttgacttcaacagattccactgccacttttcaccacgtgactggcagcgactcatcaacaacaactggggattccggcctaagcgactcaacttcaagctcttcaacattcaggtcaaagaggttacggacaacaatggagtcaagaccatcgccaataaccttaccagcacggtccaggtcttcacggactcagactatcagctcccgtacgtgctcgggtcggctcacgagggctgcctcccgccgttcccagcggacgttttcatgattccccagtacggctacctaacactcaacaacggtagtcaggccgtgggacgctcctccttctactgcctggaatactttccttcgcagatgctgagaaccggcaacaacttccagtttacttacaccttcgaggacgtgcctttccacagcagctacgctcacagccagagcttggaccggctgatgaatcctctgattgaccagtacctgtactacttgtctcggactcaaacaacaggaggcacggcaaatacgcagactttgggcttcagccaaggtgggcctaatacaatggccaatcaggcaaagaactgggtgccaggaccctgttaccgccaacaacgggtttcaacggcaaccgggcaaaacaacaatagcaactttgcctggactgctgggaccaaataccatctgaaaggaagaaattcattggctaatcctggcatcgctatggcaacacacaaagacgacaaggagcgtttttttcccagtaacgggatcctgatttttggcaaacaaaatgctgccagagacaatgcggattacagcgatgtcatgctcaccagcgaggaagaaatcaaaaccactaaccctgtggctacagaggaatacggtatcgtggcagataacttgcagcagcaaaacacggctcctcaaattggaactgtcaacagccagggggccttacccggtatggtctggcagaaccgggacgtgtacctgcagggtcccatctgggccaagattcctcacacggacggcaacttccacccgtctccgctgatgggcggctttggcctgaaacatcctccgcctcagatcctgatcaagaacacgcctgtacctgcggatcctccgaccaccttcaaccagtcaaagctgaactctttcatcacgcaatacagcaccggacaggtcagcgtggaaattgaatgggagctgcagaaggaaaacagcaaacgctggaacccagagattcaatacacttccaactactacaaatctacaagtgtggactttgctgttaatacagaaggcgtgtactctgaaccccaccccattggcacccgttacctcacccgtcccctgtaa

SEQ ID NO: 1025 - DNA, 2214 bp, Artificial Sequence
  source: /note="Description of Artificial Sequence: Synthetic polynucleotide"
  modified_base (676)..(676): a, c, g or t
  modified_base (697)..(697): a, c, g or t
  modified_base (715)..(715): a, c, g or t
  modified_base (748)..(748): a, c, g or t
  modified_base (750)..(750): a, c, g or t
  modified_base (757)..(757): a, c, g or t
  modified_base (763)..(763): a, c, g or t
atggctgccgatggttatcttccagattggctcgaggacactctctctgaaggaataagacagtggtggaagctcaaacctggcccaccaccaccaaagcccgcagagcggcataaggacgacagcaggggtcttgtgcttcctgggtacaagtacctcggacccttcaacggactcgacaagggagagccggtcaacgaggcagacgccgcggccctcgagcacgacaaagcctacgaccggcagctcgacagcggagacaacccgtacctcaagtacaaccacgccgacgcggagtttcaggagcgccttaaagaagatacgtcttttgggggcaacctcggacgagcagtcttccaggcgaaaaagagggttcttgaacctctcggtctggttgaggaaggcgctaagacggctcctggaaagaaacgtccggtagagcagtcgccacaagagccagactcctcctcgggcatcggcaagacaggccagcagcccgctaaaaagagactcaattttggtcagactggcgactcagagtcagtccccgacccacaacctctcggagaacctccagcaacgccctctggtgtgggacctaatacaatggctgcaggcggtggcgctccaatggcagacaataacgaaggcgccgacggagtgggtagttcctcangaaattggcattgcgattccncatggctgggcgacagantcatcaccaccagcacccgaacctgggccctgncnacctacnacaacnacctctacaagcaaatctccaacagcacatctggaggagccaccaacgacaacacctacttcggctacagcaccccctgggggtattttgactttaacagattccactgccacttttcaccacgtgactggcagcgactcatcaacaacaactggggattccggcctaagcgactcaacttcaagctcttcaacatccaggtcaaggaggtcacgcagaatgaaggcaccaagaccatcgccaataacctcaccagcaccatccaggtgtttacggactcggagtaccagctgccgtacgttctcggctctgcccaccagggctgcctgcctccgttcccggcggacgtgttcatgattccccagtacggctacctaacactcaacaacggtagtcaggccgtgggacgctcctccttctactgcctggaatactttccttcgcagatgctgagaaccggcaacaacttccagtttacttacaccttcgaggacgtgcctttccacagcagctacgcccacagccagagcttggaccggctgatgaatcctctgattgaccagtacctgtactacttgtctcggactcaaacaacaggaggcacggcaaatacgcagactctgggcttcagccaaggtgggcctaatacaatggccaatcaggcaaagaactggctgccaggaccctgttaccgccaacaacgcgtctcaacgacaaccgggcaaaacaacaatagcaactttgcctggactgctgggaccaaataccatctgaatggaagaaattcattggctaatcctggcatcgctatggcaacacacaaagacgacaaggagcgtttttttcccagtaacgggatcctgatttttggcaaacaaaatgctgccagagacaatgcggattacagcgatgtcatgctcaccagcgaggaagaaatcaaaaccactaaccctgtggctacagaggaatacggtatcgtggcagataacttgcagcagcaaaacacggctcctcaaattggaactgtcaacagccagggggccttacccggtatggtttggcagaaccgggacgtgtacctgcagggtcctatctgggccaagattcctcacacggacggaaactttcatccctcgccgctgatgggaggctttggactgaaacacccgcctcctcagatcctgattaagaatacacctgttcccgcggatcctccaactaccttcagtcaagctaagctggcgtcgttcatcacgcaatacagcacaggacaagtgagtgtggaaattgaatgggagctgcagaaagaaaacagcaagcgctggaatcccgaagtgcagtacacatccaattatgcaaaatctgccaacgttgattttactgtggacaacaatggactttatactgagcctcgccccattggcacccgttaccttacccgtcccctgtaa

SEQ ID NO: 1026 - DNA, 2214 bp, Artificial Sequence
  source: /note="Description of Artificial Sequence: Synthetic polynucleotide"
atggctgccgatggttatcttccagattggctcgaggacaacctctctgagggcattcgcgagtggtgggacttgaaacctggagccccgaagcccaaagccaaccagcaaaagcaggacgacggccggggtctggtgcttcctggctacaagtacctcggacccttcaacggactcgacaagggggagcccgtcaacgcggcggacgcagcggccctcgagcacgacaaggcctacgaccagcagctcaaagcgggtgacaatccgtacctgcggtataaccacgccgacgccgagtttcaggagcgtctgcaagaagatacgtcttttgggggcaacctcgggcgagcagtcttccaggccaagaagcgggttctcgaacctctcggtctggttgaggaaggcgctaagacggctcctggaaagaagagaccggtagagccatcaccccagcgttctccagactcctctacgggcatcggcaagaaaggccagcagcccgcgaaaaagagactcaactttgggcagactggcgactcagagtcagtgcccgaccctcaaccaatcggagaaccccccgcaggcccctctggtgtgggatctcttacaatggcttcaggtggtggcgcaccagtggcagacaataacgaaggtgccgatggagtgggtagttcctcgggaaattggcattgcgattcccaatggctgggggacagagtcatcaccaccagcacccgaacatgggccttgcccacctataacaaccacctctacaagcaaatctccagtgcttcaacgggggccagcaacgacaaccactacttcggctacagcaccccctgggggtattttgactttaacagattccactgccacttctcaccacgtgactggcagcgactcatcaacaacaactggggattccggcccaagagactcaacttcaagctcttcaacatccaggtcaaggaggtcacggacaatgatggagtcaagaccatcgccaataaccttaccagcacgattcaggtctttacggactcggaataccagttgccgtacgtcctcggctctgcgcaccagggctgcctgcctccgttcccggcggacgtgttcatgattccgcagtacggctacctaacgctcaacaatggcagccaggcagtgggacggtcatccttttactgcctggaatatttcccatcgcagatgctgagaacgggcaacaactttaccttcagctacacttttgaggacgttcctttccacagcagctacgctcacagccagagtctggaccgtctcatgaatcctctgattgaccagtacctgtactacttgtctcggactcaaacaacaggaggcacggcaaatacgcagactctgggcttcagccaaggtgggcctaatacaatggccaatcacgcaaagaactggctgccaggaccctgttaccgccaacaacgcgtctcaacgacaaccggacaaaacaacaatagcaactttgcctggactgctgggaccaaataccatctgaatggaagaaattcattggctaatcctggcatcgctatggcaacacacaaagacgacaaggagcgtttttttcccagtaacgggatcctgatttttggcaaacaaaatgctgccagagacaatgcggattacagcgatgtcatgctcaccagcgaggaagaaatcaaaaccactaaccctgtggctacagaggaatacggtatcgtggcagataacttgcagcagcaaaacacggctcctcaaattggaactgtcaacagccagggggccttacccggtatggtctggcagaaccgggacgtgtacctgcagggtcccatctgggccaagattcctcacacggacggcaacttccacccgtctccgctgatgggcggctttggcctgaaacatcctccgcctcagatcctgatcaagaacacgcctgtacctgcggatcctccgaccaccttcaaccagtcaaagctgaactctttcatcacgcaatacagcaccggacaggtcagcgtggaaattgaatgggagctgcagaaggaaaacagcaagcgctggaaccccgagatccagtacacctccaactactacaaatctacaagtgtggactttgctgttaatacagaaggcgtgtactctgaaccccaccccattggcacccgttacctcacccgtcccctgtaa

SEQ ID NO: 1027 - DNA, 2211 bp, Artificial Sequence
  source: /note="Description of Artificial Sequence: Synthetic polynucleotide"
atggctgccgatggttatcttccagattggctcgaggacactctctctgaaggaataagacagtggtggaagctcaaacctggcccaccaccaccaaagcccgcagagcggcacaaggacgacagcaggggtcttgtgcttcctgggtacaagtacctcggacccttcaacggactcgacaagggagagccggtcaacgaggcagacgccgcggccctcgagcacgacaaagcctacgaccggcagctcgacagcggagacaacccgtacctcaagtacaaccacgccgacgcggagtttcaggagcgccttaaagaagatacgtcttttgggggcaacctcggacgagcagtcttccaggcgaaaaagagggttcttgaacctctgggcctggttgaggaacctgttaagacggctccgggaaaaaagaggccggtagagcactctcctgtggagccagactcctcctcgggaaccggaaaggcgggccagcagcctgctaaaaagagactcaattttggtcagactggcgactcagagtcagtccccgacccacaacctctcggagaacctccagcaacccccgctgctgtgggacctactacaatggcttcaggtggtggcgcaccaatggcagacaataacgaaggcgccgacggagtgggtaatgcctcaggaaattggcattgcgattccacatggctgggcgacagagtcatcaccaccagcacccgcacctgggccttgcccacctacaataaccacctctacaagcaaatctccagtgcttcaacgggggccagcaacgacaaccactacttcggctacagcaccccctgggggtattttgacttcaacagattccactgccacttctcaccacgtgactggcagcgactcatcaacaacaactggggattccggcccaagagactcaacttcaaactcttcaacatccaagtcaaggaggtcacgcagaatgaaggcaccaagaccatcgccaataacctcaccagcaccatccaggtgtttacggactcggagtaccagctgccgtacgttctcggctctgcccaccagggctgcctgcctccgttcccggcggacgtgttcatgattccccagtacggctacctaacactcaacaacggtagtcaggccgtgggacgctcctccttctactgcctggaatactttccttcgcagatgctgagaaccggcaacaacttccagtttacttacaccttcgaggacgtgcctttccacagcagctacgcgcacagccagagcttggaccggctgatgaatcctctgattgaccagtacctgtactacttgtctcggactcaaacaacaggaggcacggcaaatacgcagactctgggcttcagccaaggtgggcctaatacaatggccaatcaggcaaagaactggctgccaggaccctgttaccgccaacaacgcgtctcaacgacaaccgggcaaaacaacaatagcaactttgcctggactgctgggaccaaataccatctgaatggaagaaattcattggctaatcctggcatcgctatggcaacacacaaagacgacaaggagcgtttttttcccagtaacgggatcctgatttttggcaaacaaaatgctgccagagacaatgcggattacagcgatgtcatgctcaccagcgaggaagaaatcaaaaccactaaccctgtggctacagaggaatacggtatcgtggcagataacttgcagcagcaaaacacggctcctcaaattggaactgtcaacagccagggggccttacccggtatggtctggcagaaccgggacgtgtacctgcagggtcccatctgggccaagattcctcacacggacggcaacttccacccgtctccgctgatgggcggctttggcctgaaacatcctccgcctcagatcctgatcaagaacacgcctgtacctgcggatcctccgaccaccttcaaccagtcaaagctgaactctttcatcacgcaatacagcaccggacaggtcagcgtggaaattgaatgggagctgcagaaggaaaacagcaagcgctggaaccccgagatccagtacacctccaactactacaaatctacaagtgtggactttgctgttaatacagaaggcgtgtactctgaaccccaccccattggcacccgttacctcacccgtcccctgtaa

SEQ ID NO: 1028 - DNA, 2211 bp, Artificial Sequence
  source: /note="Description of Artificial Sequence: Synthetic polynucleotide"
atggctgccgatggttatcttccagattggctcgaggacaacctctctgagggcattcgcgagtggtgggcgctgaaacctggagccccgaagcccaaagccaaccagcaaaagcaggacgacggccggggtctggtgcttcctggctacaagtacctcggacccttcaacggactcgacaagggggagcccgtcaacgcggcggatgcagcggccctcgagcacgacaaggcctacgaccagcagctccaagcgggtgacaatccgtacctgcggtataaccacgccgacgccgagtttcaggagcgtcttcaaggagatacgtcttttgggggcaacctcggacgagcagtcttccaggccaagaagcgggttctcgaacctctcggtctggttgaggaaggcgctaagacggctcctggaaagaaacgtccggtagagcagtcgccacaagagccagactcctcctcgggcatcggcaagacaggccagcagcccgctaaaaagagactcaattttggtcagactggcgactcagagtcagtccccgacccacaacctctcggagaacctccagcaacccccgctgctgtgggacctactacaatggcttcaggcggtggcgcaccaatggcggacaataacgaaggcgccgatggagtgggtaatgcctcaggaaattggcattgcgattccacatggctgggcgacagagtcatcaccaccagcacccgcacctgggccttgcccacctacaataaccacctctacaagcaaatctccagtgcttcaacgggggccagcaacgacaaccactacttcggctacagcaccccctgggggtattttgacttcaacagattccactgccacttctcaccacgtgactggcagcgactcatcaacaacaactggggattccggcctaagcgactcaacttcaagctcttcaacattcaggtcaaagaggttacggacaacaatggagtcaagaccatcgccaataacctcaccagcaccatccaggtgtttacggactcggagtaccagctgccgtacgttctcggctctgcccaccagggctgcctgcctccgttcccggcggacgtgttcatgattccccagtacggctacctaacactcaacaacggtagtcaggccgtgggacgctcctccttctactgcctggaatactttccttcgcagatgctgagaaccggcaacaacttccagtttacttacaccttcgaggacgtgcctttccacagcagctacgcccacagccagagcttggaccggctgatgaatcctctgattgaccagtacctgtactacttgtctcggactcaaacaacaggaggcacggcaaatacgcagactctgggcttcagccaaggtgggcctaatacaatggccaatcaggcaaagaactggctgccaggaccctgttaccgccaacaacgcgtctcaacgacaaccgggcaaaacaacaatagcaactttgcctggactgctgggaccaaataccatctgaatggaagaaattcattggctaatcctggcatcgctatggcaacacacaaagacgacaaggagcgtttttttcccagtaacgggatcctgatttttggcaaacaaaatgctgccagagacaatgcggattacagcgatgtcatgctcaccagcgaggaagaaatcaaaaccactaaccctgtggctacagaggaatacggtatcgtggcagataacttgcagcagcaaaacacggctcctcaaattggaactgtcaacagccagggggccttacccggtatggtctggcagaaccgggacgtgtacctgcagggtcccatctgggccaagattcctcacacggacggcaacttccacccgtctccgctgatgggcggctttggcctgaaacatcctccgcctcagatcctgatcaagaacacgcctgtacctgcggatcctccgaccaccttcaaccagtcaaagctgaactctttcatcacgcaatacagcaccggacaggtcagcgtggaaattgaatgggagctgcagaaggaaaacagcaagcgctggaaccccgagatccagtacacctccaactactacaaatctacaagtgtggactttgctgttaatacagaaggcgtgtactctgaaccccaccccattggcacccgttacctcacccgtcccctgtaa

SEQ ID NO: 1029 - DNA, 2217 bp, Artificial Sequence
  source: /note="Description of Artificial Sequence: Synthetic polynucleotide"
atggctgccgatggttatcttccagattggctcgaggacactctctctgaaggaataagacagtggtggaagctcaaacctggcccaccaccaccaaagcccgcagagcggcataaggacgacagcaggggtcttgtgcttcctgggtacaagtacctcggacccttcaacggactcgacaagggggagcccgtcaacgcggcggatgcagcggccctcgagcacgacaaggcctacgaccagcagctcaaagcgggtgacaatccgtacctgcggtataaccacgccgacgcggagtttcaggagcgccttaaagaagatacgtcttttgggggcaacctcggacgagcagtcttccaggcgaaaaagagggttcttgaacctctcggtctggttgaggaaggcgctaagacggctcctggaaagaagagaccggtagagccatcaccccagcgttctccagactcctctacgggcatcggcaagaaaggccaacagcccgccagaaaaagactcaattttggtcagactggcgactcagagtcagttccagaccctcaacctctcggagaacctccagcagcgccctctggtgtgggacctaatacaatggctgcaggcggtggcgcaccaatggcagacaataacgaaggcgccgacggagtgggtagttcctcgggaaattggcattgcgattcccaatggctgggggacagagtcatcaccaccagcaccagaacctgggccctgcccacctacaacaatcacctctacaagcaaatctccaacagcacatctggaggatcttcaaatgacaacgcctacttcggctacagcaccccctgggggtattttgacttcaaccgcttccactgccacttctcaccacgtgactggcagcgactcatcaacaacaactggggattccggcccaagagactcaacttcaagctcttcaacattcaggtcaaagaggttacggacaacaatggagtcaagaccatcgccaataaccttaccagcacggtccaggtctttacggactcggagtaccagttgccgtacgtcctcggctctgcgcaccagggctgcctccctccgttcccggcggacgtgttcatgattccccagtacggctacctaacactcaacaacggtagtcaggccgtgggacgctcctccttctactgcctggaatatttcccttctcagatgctgagaacgggcaacaactttaccttcagctacacctttgaggacgttcctttccacagcagctacgctcacagccagagtctggaccgtctcatgaatcctctgattgaccagtacctgtactacttgtctcggactcaaacaacaggaggcacggcaaatacgcagactctgggcttcagccaaggtgggcctaatacaatggccaatcaggcaaagaactggctgccaggaccctgttaccgccaacaacgcgtctcaacgacaaccgggcaaaacaacaatagcaactttgcctggactgctgggaccaaataccatctgaatggaagaaattcattggctaatcctggcatcgctatggcaacacacaaagacgacaaggagcgtttttttcccagtaacgggatcctgatttttggcaaacaaaatgctgccagagacaatgcggattacagcgatgtcatgctcaccagcgaggaagaaatcaaaaccactaaccctgtggctacagaggaatacggtatcgtggcagataacttgcagcagcaaaacacggctcctcaaattggaactgtcaacagccagggggccttacccggtatggtctggcagaaccgggacgtgtacctgcagggtcccatctgggcaaagattccacacacggacggacattttcacccctctcccctcatgggtggattcggacttaaacaccctcctccacagattctcatcaagaacaccccggtacctgcgaatcctccgaccaccttcaaccagtcaaagctgaactctttcatcacgcaatacagcacaggacaagtgagtgtggaaattgaatgggagctgcagaaagaaaacagcaagcgctggaatcccgaagtgcagtacacatccaattatgcaaaatctgccaacgttgattttactgtggacaacaatggactttatactgagcctcgccccattggcacccgttaccttacccgtcccctgtaa

SEQ ID NO: 1030 - DNA, 2211 bp, Artificial Sequence
  source: /note="Description of Artificial Sequence: Synthetic polynucleotide"
atggctgccgatggttatcttccagattggctcgaggacaacctctctgagggcattcgcgagtggtgggcgctgaaacctggagccccgaaacccaaagccaaccagcaaaagcaggacgacggccggggtctggtgcttcctggctacaagtacctcggacccttcaacggactcgacaagggggagcccgtcaacgcggcggacgcagcggccctcgagcacgacaaggcctacgaccagcagctcaaggcgggtgacaatccgtacctgcggtataaccacgccgacgccgagtttcaggagcgtctgcaagaagatacgtcttttgggggcaacctcgggcgagcagtcttccaggccaaaaagaggcttcttgaacctcttggtctggttgaggaaggggctaagacggctcctggaaagaaacgtccggtagagcagtcgccacaagagccagactcctcctcgggcattggcaagacaggccagcagcccgctaaaaagagactcaactttgggcagactggcgactcagagtcagtgcccgatcctcaacctctcggagaacctccagcaacccccgctgctgtgggacctactacaatggcttcaggcggtggcgcaccaatggcggacaataacgaaggcgccgatggagtgggtaattcctcgggaaattggcattgcgattccacatggatgggcgacagagtcatcaccaccagcacccgaacctgggccctgcccacctacaacaatcacctctacaagcaaatctccagtgcttcaacgggggccagcaacgacaaccactacttcggctacagcaccccctgggggtattttgatttcaacagattccactgccatttttcaccacgtgactggcagcgactcatcaacaacaactggggattccggcccaagagactcaacttcaagctcttcaacatccaggtcaaggaggtcacgcagaatgaaggcaccaagaccatcgccaataaccttaccagcacgattcaggtctttacggattcggaataccagctcccgtacgtcctcggctctgcgcaccagggctgcctccctccgttcccggcggacgtgttcattattccgcagtacggctacctaacgctcaacaatggtagccaggcagtgggacggtcatccttttactgcctggaatatttcccatcgcagatgctgagaacgggcaacaactttaccttcagctacacctttgaggacgttcctttccacagcagctacgctcacagccagagtctggaccgtctcatgaatcctctgattgaccagtacctgtactacttgtctcggactcaaacaacaggaggcacggcaaatacgcagactctgggcttcagccaaggtgggcctaatacaatggccaatcaggcaaagaactggctgccaggaccctgttaccgccaacaacgcgtctcaacgacaaccgggcaaaacaacaatagcaactttgcctggactgctgggaccaaataccatctgaatggaagaaattcattggctaatcctggcatcgctatggcaacacacaaagacgacaaggagcgtttttttcccagtaacgggatcctgatttttggcaaacaaaatgctgccagagacaatgcggattacagcgatgtcatgctcaccagcgaggaagaaatcaaaaccactaaccctgtggctacagaggaatacggtatcgtggcagataacttgcagcagcaaaacacggctcctcaaattggaactgtcaacagccagggggccttacccggtatggtctggcagaaccgggacgtgtacctgcagggtcccatctgggccaagattcctcacacggacggcaacttccacccgtctccgctgatgggcggctttggcctgaaacatcctccgcctcagatcctgatcaagaacacgccagtacctgcggatcctccgaccaccttcaaccagtcaaagctgaactctttcatcacgcaatacagcaccggacaggtcagcgtggaaattgaatgggagctgcagaaggaaaacagcaagcgctggaaccccgagatccagtacacctccaactactacaaatctacaagtgtggactttgctgttaatacagaaggcgtgtactctgaaccccaccccattggcacccgttacctcacccgtcccctgtaa

SEQ ID NO: 1031 - DNA, 2211 bp, Artificial Sequence
  source: /note="Description of Artificial Sequence: Synthetic polynucleotide"
atggctgccgatggttatcttccagattggctcgaggacaacctctctgagggcattcgcgagtggtgggcgctgaaacctggagccccgaaacccaaagccaaccagcaaaagcaggacgacggccggggtctggtgcttcctggctacaagtacctcggacccttcaacggactcgacaagggggagcccgtcaacgcggcggatgcagcggccctcgagcacgacaaggcctacgaccagcagctcaaggcgggtgacaatccgtacctgcggtataaccacgccgacgccgagtttcaggagcgtctgcaagaagatacgtcttttgggggcaacctcgggcgagcagtcttccaggccaaaaagagggttcttgaaccttttggtctggttgaggaagctgctaagacggctcctggaaagaaacgtccggtagagcagtcgccacaagagccagactcctcctcgggcattggcaagacaggccagcagcccgctaaaaagagactcaattttggtcagactggcgactcagagtcagtgcccgaccctcaacctctcggagaacctccagcaacccccgctgctgtgggacctactacaatggcttcaggcggtggcgcaccaatggcagacaataacgaaggcgccgatggagtgggtaatgcctcaggaaattggcattgcgattccacatggctgggcgacagagtcatcaccaccagcacccgaacctgggccctgcccacctacaacaatcacctctacaagcaaatctccagtgcttcaacgggggccagcaacgacaaccactacttcggctacagcaccccctgggggtattttgactttaacagattccactgccacttttcaccacgtgactggcagcgactcatcaacaacaactggggattccggcccaagagactcaacttcaagctcttcaacatccaggtcaaggaggtcacgcagaatgaaggcaccaagaccatcgccaataacctcaccagcaccattcaggtctttacggattcggaataccagctcccgtacgtcctcggctctgcccaccagggctgcctccctccgttcccggcggacgtgttcatgattccgcagtacggctacctaacgctcaacaatggtagccaggcagtgggacggtcatccttttactgcctggaatatttcccatcgcagatgctgagaacgggcaacaactttaccttcagctacacctttgaggacgttcctttccacagcagctacgctcacagccagagtctggaccgtctcatgaatcctctgattgaccagtacctgtactacttgtctcggactcaaacaacaggaggcacggcaaatacgcagactctgggcttcagccaaggtgggcctaatacaatggccaatcacgcaaagaactggctgccaggaccctgttaccgccaacaacgcgtctcaacgacaaccgggcaaaacaacaatagcaactttgcctggactgctgggaccaaataccatctgaatggaagaaattcattggctaatcctggcatcgctatggcaacacacaaagacgacaaggagcgtttttttcccagtaacgggatcctgatttttggcaaacaaaatgctgccagagacaatgcggattacagcgatgtcatgctcaccagcgaggaagaaatcaaaaccactaaccctgtggctacagaggaatacggtatcgtggcagataacttgcagcagcaaaacacggctcctcaaattggaactgtcaacagccagggggccttacccggtatggtctggcagaaccgggacgtgtacctgcagggtcccatctgggccaagattcctcacacggacggcaacttccacccgtctccgctgatgggcggctttggcctgaaacatcctccgcctcagatcctgatcaagaacacgcctgtacctgcggatcctccgaccaccttcaaccagtcaaagctgaactctttcatcacgcaatacagcaccggacaggtcagcgtggaaattgaatgggagctgcagaaggaaaacagcaagcgctggaaccccgagatccagtacacctccaactactacaaatctacaagtgtggactttgctgttaatacagaaggcgtgtactctgaaccccaccccattggcacccgttacctcacccgtcccctgtaa

SEQ ID NO: 1032 - DNA, 2211 bp, Artificial Sequence
  source: /note="Description of Artificial Sequence: Synthetic polynucleotide"
atggctgccgatggttatcttccagattggctcgaggacaacctctctgagggcattcgcgagtggtgggcgctgaaacctggagccccgaagcccaaagccaaccagcaaaagcaggacgacggccggggtctggtgcttcctggctacaagtacctcggacccttcaacggactcgacaaaggagagcccgtcaacgaggcggacgcggcggccctcgaacacgacaaggcttacgaccagcagctcaaggccggtgacaacccctacctgcggtacaaccacgccgacgccgagttccaggagcggctgcaagaagatacgtcttttgggggcaacctcgggcgagcagtcttccaggccaagaagaggcttcttgaacctcttggtctggttgaggaagcggctaagacggctcctggaaagaagaggcctgtagagcagtctcctcaggaaccggactcctccgcgggtattggcaaatcaggtgcacagcccgctaaaaagagactcaattttggtcagactggcgactcagagtcagtccccgacccacaacctctcggagaacctccagcaacccccgctgctgtgggacctactacaatggcttcaggcggtggcgcaccaatggcagacaataacgaaggcgccgatggagtgggtaatgcctcaggaaattggcattgcgattccacatggctgggcgacagagtcatcaccaccagcacccgaacctgggccctgcccacctataacaaccatctctacaagcaaatctccagtgcttcaacgggggccagtaacgacaaccactacttcggctacagcaccccctgggggtattttgactttaacagattccactgccacttctcaccacgtgactggcagcgactcatcaacaacaactggggattccggcccaagcgactcaacttcaagctcttcaacattcaggtcaaagaggttacggacaacgatggagtcaagaccatcgccaataaccttaccagcaccattcaggtgtttacggactcggaataccagctgccgtacgttctcggctccgcccaccagggctgcctgcctccgttcccggcggacgtgttcatgattccccagtacggctacctaacactcaacaacggtagtcaggccgtgggacgctcctccttctactgcctggaatactttccttcgcagatgctgagaactggcaacaacttccagtttacttacaccttcgaggacgtgcctttccacagcagctacgcccacagccagagcttggaccggctgatgaatcctctgattgaccagtacctgtactacttgtctcggactcaaacaacaggaggcacggcaaatacgcagactctgggcttcagccaaggtgggcctaatacaatggccaatcaggcaaagaactggctgccaggaccctgttaccgccaacaacgcgtctcaacgacaaccgggcaaaacaacaatagcaactttgcctggactgctgggaccaaataccatctgaatggaagaaattcattggctaatcctggcatcgctatggcaacacacaaagacgacaaggagcgtttttttcccagtaacgggatcctgatttttggcaaacaaaatgctgccagagacaatgcggattacagcgatgtcatgctcaccagcgaggaagaaatcaaaaccactaaccctgtggctacagaggaatacggtatcgtggcagataacttgcagcagcaaaacacggctcctcaaattggaactgtcaacagccagggggccttacccggtatggtctggcagaaccgggacgtgtacctgcagggtcccatctgggccaagattcctcacacggacggcaacttccacccgtctccgctgatgggcggctttggcctgaaacatcctccgcctcagatcctgatcaagaacacgcctgtacctgcggatcctccgaccaccttcaaccagtcaaagctgaactctttcatcacgcaatacagcaccggacaggtcagcgtggaaattgaatgggagctgcagaaggaaaacagcaagcgctggaaccccgagatccagtacacctccaactactacaaatctacaagtgtggactttgctgttaatacagaaggcgtgtactctgaaccccaccccattggcacccgttacctcacccgtcccctgtaa

SEQ ID NO: 1033 - DNA, 2211 bp, Artificial Sequence
  source: /note="Description of Artificial Sequence: Synthetic polynucleotide"
atggctgccgatggttatcttccagattggctcgaggacaacctctctgagggcattcgcgagtggtgggcgctgaaacctggagccccgaagcccaaagccaaccagcaaaagcaggacgacggccggggtctggtgcttcctggctacaagtacctcggacccttcaacggactcgacaagggggagcccgtcaacgcggcggatgcagcggccctcgagcacgacaaagcctacgaccagcagctcaaagcgggtgacaatccgtacctgcggtataaccacgccgacgccgagtttcaggagcgtctgcaagaagatacgtcttttgggggcaacctcgggcgagcagtcttccaggccaagaagagggttctcgaacctttgggtctggttgaggaaggggctaagacggctcctggaaagaaaaggccggtagagcagtctcctcaggaaccggactcctccgcgggtattggcaagacaggtgcacagcccgctaaaaagagactcaattttggtcagactggcgactcagagtcagtccccgacccacaacctctcggagaacctccagcaacccccgctgctgtgggacctactacaatggcttcaggcggtggcgcaccaatggcagacaataacgaaggcgccgacggagtgggtagtgcctcgggaaattggcattgcgattccacatggctgggcgacagagtcatcaccaccagcacccgaacctgggccctgcccacctataacaaccatctctacaagcaaatctccagtgcttcaacgggggccagtaacgacaaccactacttcggctacagcaccccctgggggtattttgacttcaacagattccactgccacttctcaccacgtgactggcagcgactcatcaacaacaactggggattccggcccaagcgactcaacttcaagctcttcaacattcaggtcaaagaggttacggacaacaatggagtcaagaccatcgccaataaccttaccagcacgatccaggtctttacggactcggagtaccagctgccgtacgtcctcggctctgcgcaccagggctgcctgcctccgttcccggcggacgtgttcatgattccgcagtacggctacctaacgctcaacaatggtagccaggcagtgggacggtcatccttttactgcctggaatatttcccatcgcagatgctgagaacgggcaacaactttaccttcagctacacctttgaggacgttcctttccacagcagctacgctcacagccagagtctggaccgtctcatgaatcctctgattgaccagtacctgtactacttgtctcggactcaaacaacaggaggcacggcaaatacgcagactctgggcttcagccaaggtgggcctaatacaatggccaatcaggcaaagaactggctgccaggaccctgttaccgccaacaacgcgtctcaacgacaaccgggcaaaacaacaatagcaactttgcctggactgctgggaccaaataccatctgaatggaagaaattcattggctaatcctggcatcgctatggcaacacacaaagacgacaaggagcgtttttttcccagtaacgggatcctgatttttggcaaacaaaatgctgccagagacaatgcggattacagcgatgtcatgctcaccagcgaggaagaaatcaaaaccactaaccctgtggctacagaggaatacggtatcgtggcagataacttgcagcagcaaaacacggctcctcaaattggaactgtcaacagccagggggccttacccggtatggtctggcagaaccgggacgtgtacctgcagggtcccatctgggccaagattcctcacacggacggcaacttccacccgtctccgctgatgggcggctttggcctgaaacatcctccgcctcagatcctgatcaagaacacgcctgtacctgcggatcctccgaccaccttcaaccagtcaaagctgaactctttcatcacgcaatacagcaccggacaggtcagcgtggaaattgaatgggagctgcagaaggaaaacagcaagcgctggaaccccgagatccagtacacctccaactactacaaatctacaagtgtggactttgctgttaatacagaaggcgtgtactctgaaccccaccccattggcacccgttacctcacccgtcccctgtaa

SEQ ID NO: 1034 - DNA, 2211 bp, Artificial Sequence
  source: /note="Description of Artificial Sequence: Synthetic polynucleotide"
atggctgccgatggttatcttccagattggctcgaggacaacctctctgagggcattcgcgagtggtgggacttgaaacctggagccccgaagcccaaagccaaccagcaaaagcaggacgacggccggggtctggtgcttcctggctacaagtacctcggacccttcaacggactcgacaagggggagcccgtcaacgcggcggacgcagcggccctcgagcacgacaaggcctacgaccagcagctcaaagcgggtgacaatccgtacctgcggtataaccacgccgacgccgagtttcaggagcgtctgcaagaagatacgtcttttgggggcaacctcggacgagcagtcttccaggccaaaaagaggcttcttgaacctcttggtctggttgaggaagcggctaagacggctcctggaaagaagaggcctgtagagcagtctcctcaggaaccggactcctccgcgggtattggcaaatcgggtgcacagcccgctaaaaagagactcaatttcggtcagactggcgacacagagtcagtcccagaccctcaaccaatcggagaacctccagcagcgccctctggtgtgggacctaatacaatggctgcaggcggtggcgcaccaatggcagacaataacgaaggtgccgatggagtgggtagttcctcgggaaattggcattgcgattcccaatggctgggggacagagtcatcaccaccagcacccgaacctgggccctgcccacctataacaaccacctctacaagcaaatctccagtgcttcaacgggggccagcaacgacaaccactactttggctacagcaccccttgggggtattttgacttcaacagattccactgccacttttcaccacgtgactggcaaagactcatcaacaacaactggggattccgacccaagagactcaacttcaagctcttcaacatccaggtcaaggaggtcacgcagaatgaaggcaccaagaccatcgccaataacctcaccagcaccatccaggtgtttacggactcggagtaccagctgccgtacgttctcggctctgcccaccagggctgcctgcctccgttcccggcggacgtgttcatgattccccagtacggctacctaacactcaacaacggtagtcaggccgtgggacgctcctccttctactgcctggaatactttccttcgcagatgctgagaaccggcaacaacttccagtttacttacaccttcgaggacgtgcctttccacagcagctacgcgcacagccagagcttggaccggctgatgaatcctctgattgaccagtacctgtactacttgtctcggactcaaacaacaggaggcacggcaaatacgcagactctgggcttcagccaaggtgggcctaatacaatggccaatcacgcaaagaactggctgccaggaccctgttaccgccaacaacgcgtctcaacgacaaccgggcaaaacaacaatagcaactttgcctggactgctgggaccaaataccatctgaatggaagaaattcattggctaatcctggcatcgctatggcaacacacaaagacgacaaggagcgtttttttcccagtaacgggatcctgatttttggcaaacaaaatgctgccagagacaatgcggattacagcgatgtcatgctcaccagcgaggaagaaatcaaaaccactaaccctgtggctacagaggaatacggtatcgtggcagataacttgcagcagcaaaacacggctcctcaaattggaactgtcaacagccagggggccttacccggtatggtctggcagaaccgggacgtgtacctgcagggtcccatctgggccaagattcctcacacggacggcaacttccacccgtctccgctgatgggcggctttggcctgaaacatcctccgcctcagatcctgatcaagaacacgcctgtacctgcggatcctccgaccaccttcaaccagtcaaagctgaactctttcatcacgcaatacagcaccggacaggtcagcgtggaaattgaatgggagctgcagaaggaaaacagcaagcgctggaaccccgagatccagtacacctccaactactacaaatctacaagtgtggactttgctgttaatacagaaggcgtgtactctgaaccccaccccattggcacccgttacctcacccgtcccctgtaa

SEQ ID NO: 1035 - DNA, 2214 bp, Artificial Sequence
  source: /note="Description of Artificial Sequence: Synthetic polynucleotide"
atggctgccgatggttatcttccagattggctcgaggacaaccttagtgaaggaattcgcgagtggtgggcgctgaaacctggagccccgaagcccaaagccaaccagcaaaagcaggacgacggccggggtctggtgcttcctggctacaagtacctcggacccttcaacggactcgacaagggggagcccgtcaacgcggcggacgcagcggccctcgagcacgacaaggcctacgaccagcagctcaaagcgggtgacaatccgtacctgcggtataaccacgccgacgccgagtttcaggagcgtctgcaagaagatacgtcttttgggggcaacctcgggcgagcagtcttccaggccaagaagcgggttctcgaacctctcggtctggttgaggaaggcgctaagacggctcctggaaagaaacgtccggtagagcagtcgccacaagagccagactcctcctcgggcatcggcaagacaggccagcagcccgctaaaaagagactcaatttcggtcagactggcgacacagagtcagtcccagaccctcaaccaatcggagaacctcccgcagccccctcaggtgtgggatctcttacaatggcttcaggtggtggcgcaccagtggcagacaataacgaaggtgccgatggagtgggtagttcctcgggaaattggcattgcgattcccaatggctgggggacagagtcatcaccaccagcaccagaacctgggccttgcccacctacaataaccacctctacaagcaaatctccaacagcacatctggaggatcttcaaatgacaacgcctacttcggctacagcaccccctgggggtattttgactttaacagattccactgccacttttcaccacgtgactggcagcgactcatcaacaacaactggggattccgacccaagagactcaacttcaagctcttcaacatccaggtcaaggaggtcacgcagaacgaaggcaccaagaccatcgccaataacctcaccagcaccatccaggtgtttacggactcggagtaccagctgccgtacgttctcggctccgcccaccagggctgcctgcctccgttcccggcggacgtgttcatgattccccagtacggctacctaacgctcaacaacggtagtcaggccgtgggacgctcctccttctactgcctggaatactttccttcgcagatgctgagaaccggcaacaacttccagtttacttacaccttcgaggacgtgcctttccacagcagctacgcgcacagccagagcttggaccggctgatgaatcctctgattgaccagtacctgtactacttgtctcggactcaaacaacaggaggcacggcaaatacgcagactctgggcttcagccaaggtgggcctaatacaatggccaatcaggcaaagaactggctgccaggaccctgttaccgccaacaacgcgtctcaacgacaaccgggcaaaacaacaatagcaactttgcctggactgctgggaccaaataccatctgaatggaagaaattcattggctaatcctggcatcgctatggcaacacacaaagacgacaaggagcgtttttttcccagtaacgggatcctgatttttggcaaacaaaatgctgccagagacaatgcggattacagcgatgtcatgctcaccagcgaggaagaaatcaaaaccactaaccctgtggctacagaggaatacggtatcgtggcagataacttgcagcagcaaaacacggctcctcaaattggaactgtcaacagccagggggccttacccggtatggtctggcagaaccgggacgtgtacctgcagggtcccatctgggccaagattcctcacacggacggcaacttccacccgtctccgctgatgggcggctttggcctgaaacatcctccgcctcagatcctgatcaagaacacgcctgtacctgcggatcctccgaccaccttcaaccagtcaaagctgaactctttcatcacgcaatacagcaccggacaggtcagcgtggaaattgaatgggagctgcagaaggaaaacagcaagcgctggaaccccgagatccagtacacctccaactactacaaatctacaagtgtggactttgctgttaatacagaaggcgtgtactctgaaccccaccccattggcacccgttacctcacccgtcccctgtaa

SEQ ID NO: 1036 - DNA, 2214 bp, Artificial Sequence
  source: /note="Description of Artificial Sequence: Synthetic polynucleotide"
atggctgccgatggttatcttccagattggctcgaggacaaccttagtgaaggaattcgcgagtggtgggcgctgaaacctggagccccgaagcccaaagccaaccagcaaaagcaggacgacggccggggtctggtgcttcctggctacaagtacctcggacccttcaacggactcgacaagggggagcccgtcaacgcggcggacgcagcggccctcgagcacgacaaggcctacgaccagcagctcaaagcgggtgacaatccgtacctgcggtataaccacgccgacgcggagtttcaggagcgccttaaagaagatacgtcttttgggggcaacctcgggcgagcagtcttccaggccaagaagagggttctcgaaccttttggtctggttgaggaaggtgctaagacggctcctggaaagaaacgtccggtagagcagtcgccacaagagccagactcctcctcgggcatcggcaagacaggccagcagcccgctaaaaagagactcaattttggtcagactggcgactcagagtcagttccagaccctcaacctctcggagaacctccagcagcgccctctggtgtgggacctaatacaatggctgcaggcggtggcgcaccaatggcagacaataacgaaggtgccgatggagtgggtagttcctcgggaaattggcattgcgattcccaatggctggggaacagagtcatcaccaccagcacccgaacctgggccctgcccacctacaacaatcacctctacaagcaaatctccaacagcacatctggaggatcttcaaatgacaacgcctacttcggctacagcaccccctgggggtattttgacttcaacagattccactgccacttctcaccacgtgactggcagcgactcatcaacaacaactggggattccggcccaagagactcaacttcaagctcttcaacattcaggtcaaagaggttacggacaacaatggagtcaagaccatcgccaataaccttaccagcacggtccaggtcttcacggactcggagtaccagttgccgtacgtcctcggctctgcgcaccagggctgcctccctccgttcccggcggacgtgttcatgattccgcaatacggctacctgacgctcaacaacggtagccaagccgtgggacgttcatccttttactgcctggaatatttcccttctcagatgctgagaaccggcaacaacttccagtttacttacaccttcgaggacgtgcctttccacagcagctacgcgcacagccagagcttggaccggctgatgaatcctctgattgaccagtacctgtactacttgtctcggactcaaacaacaggaggcacggcaaatacgcagactctgggcttcagccaaggtgggcctaatacaatggccaatcaggcaaagaactggctgccaggaccctgttaccgccaacaacgcgtctcaacgacaaccgggcaaaacaacaatagcaactttgcctggactgctgggaccaaataccatctgaatggaagaaattcattggctaatcctggcatcgctatggcaacacacaaagacgacaaggagcgtttttttcccagtaacgggatcctgatttttggcaaacaaaatgctgccagagacaatgcggattacagcgatgtcatgctcaccagcgaggaagaaatcaaaaccactaaccctgtggctacagaggaatacggtatcgtggcagataacttgcagcagcaaaacacggctcctcaaattggaactgtcaacagccagggggccttacccggtatggtctggcagaaccgggacgtgtacctgcagggtcccatctgggccaagattcctcacacggacggcaacttccacccgtctccgctgatgggcggctttggcctgaaacatcctccgcctcagatcctgatcaagaacacgcctgtacctgcggatcctccgaccaccttcaaccagtcaaagctgaactctttcatcacgcaatacagcaccggacaggtcagcgtggaaattgaatgggagctgcagaaggaaaacagcaagcgctggaaccccgagatccagtacacctccaactactacaaatctacaagtgtggactttgctgttaatacagaaggcgtgtactctgaaccccaccccattggcacccgttacctcacccgtcccctgtaa

SEQ ID NO: 1037 - DNA, 2211 bp, Artificial Sequence
  source: /note="Description of Artificial Sequence: Synthetic polynucleotide"
atggctgccgatggttatcttccagattggctcgaggacaacctctctgagggcattcgcgagtggtgggacttgaaacctggagccccgaagcccaaagccaaccagcaaaagcaggacgacggccggggtctggtgcttcctggctacaagtacctcggacccttcaacggactcgacaggggggagcccgtcaacgcggcggacgcagcggccctcgagcacgacaaggcctacgaccagcagctcaaagcgggtgacaatccgtacctgcggtataaccacgccgacgccgagtttcaggagcgtctgcaagaagatacgtcttttgggggcaacctcgggcgagcagtcttccaggccaagaagcgggttctcgaacctctcggtctggttgaggaaggcgctaagacggctcctggaaagaaacgtccggtagagcagtcgccacaagagccagactcctcctcgggcatcggcaagacaggccagcagcccgctaaaaagagactcaattttggtcagactggcgactcagagtcagtccccgacccacaacctctcggagaacctccagcaacccccgctgctgtgggacctactacaatggcttcaggcggtggcgcaccaatggcagacaataacgaaggcgccgacggagtgggtaatgcctcaggaaattggcattgcgattccacatggctgggcgacagagtcatcaccaccagcacccgaacctgggccttgcccacctataacaaccacctctacaagcaaatctccagtgcttcaacgggggccagcaacgacaaccactacttcggctacagcaccccctgggggtattttgacttcaacagattccactgccacttctcaccacgtgactggcagcgactcatcaacaacaactggggattccggcctaagcgactcaacttcaagctcttcaacattcaggtcaaagaggttacggacaacaatggagtcaagaccatcgccaataacctcaccagcaccatccaggtgtttacggactcggagtaccagctgccgtacgttctcggctctgcccaccagggctgcctgcctccgttcccggcggacgtgttcatgattccccagtacggctacctaacactcaacaacggtagtcaggccgtgggacgctcctccttctactgcctggaatactttccttcgcagatgctgagaaccggcaacaacttccagtttacttacaccttcgaggacgtgcctttccacagcagctacgcccacagccagagcttggaccggctgatgaatcctctgattgaccagtacctgtactacttgtctcggactcaaacaacaggaggcacggcaaatacgcagactctgggcttcagccaaggtgggcctaatacaatggccaatcaggcaaagaactggctgccaggaccctgttaccgccaacaacgcgtctcaacgacaaccgggcaaaacaacaatagcaactttgcctggactgctgggaccaaataccatctgaatggaagaaattcattggctaatcctggcatcgctatggcaacacacaaagacgacaaggagcgtttttttcccagtaacgggatcctgatttttggcaaacaaaatgctgccagagacaatgcggattacagcgatgtcatgctcaccagcgaggaagaaatcaaaaccactaaccctgtggctacagaggaatacggtatcgtggcagataacttgcagcagcaaaacacggctcctcaaattggaactgtcaacagccagggggccttacccggtatggtctggcagaaccgggacgtgtacctgcagggtcccatctgggccaagattcctcacacggacggcaacttccacccgtctccgctgatgggcggctttggcctgaaacatcctccgcctcagatcctgatcaagaacacgcctgtacctgcggatcctccgaccaccttcaaccagtcaaagctgaactctttcatcacgcaatacagcaccggacaggtcagcgtggaaattgaatgggagctgcagaaggaaaacagcaagcgctggaaccccgagatccagtacacctccaactactacaaatctacaagtgtggactttgctgttaatacagaaggcgtgtactctgaaccccaccccattggcacccgttacctcacccgtcccctgtaa

SEQ ID NO: 1038 - DNA, 2211 bp, Artificial Sequence
  source: /note="Description of Artificial Sequence: Synthetic polynucleotide"
atggctgccgatggttatcttccagattggctcgaggacaacctctctgagggcattcgcgagtggtgggacttgaaacctggagccccgaagcccaaagccaaccagcaaaagcaggacgacggccggggtctggtgcttcctggctacaagtacctcggacccttcaacggactcgacaagggggagcccgtcaacgcggcggacgcagcggccctcgagcacgacaaggcctacgaccagcagctcaaagcgggtgacaatccgtacctgcggtataaccacgccgacgccgagtttcaggagcgtctgcaagaagatacgtcttttgggggcaacctcgggcgagcagtcttccaggccaagaagcgggttctcgaacctctcggtctggttgaggaaggcgctaagacggctcctggaaagaaacgtccggtagagcagtcgccacaagagccagactcctcctcgggcatcggcaagaaaggccaacagcccgccagaaaaagactcaattttggtcagactggcgactcagagtcagttccagaccctcaacctctcggagaacctcccgcagccccctcaggtgtgggatctcttacaatggcttcaggcggtggcgcaccaatggcagacaataacgaaggcgccgacggagtgggtaatgcctcaggaaattggcattgcgattccacatggctgggcgacagagtcatcaccaccagcacccgaacatgggccttgcccacttacaacaaccatctctacaagcaaatctccagtgcttcaacgggggccagcaacgacaaccactacttcggctacagcaccccctgggggtattttgatttcaacagattccactgccacttttcaccacgtgactggcaaagactcatcaacaacaactggggattccgacccaagagactcaacttcaagctctttaacattcaagtcaaagaggtcacgcagaatgaaggcaccaagaccatcgccaataaccttaccagcacggtccaggtcttcacggactcagactatcagctcccgtacgttctcggctccgcccaccagggctgcctgcctccgttcccggcggacgtgttcatgattccccagtacggctacctaacactcaacaacggtagtcaggccgtgggacgctcctccttctactgcctggaatactttccttcgcagatgctgagaaccggcaacaacttccagtttacttacacctttgaggacgttcctttccacagcagctacgctcacagccagagtctggaccgtctcatgaatcctctgattgaccagtacctgtactacttgtctcggactcaaacaacaggaggcacggcaaatacgcagactctgggcttcagccaaggtgggcctaatacaatggccaatcaggcaaagaactggctgccaggaccctgttaccgccaacaacgcgtctcaacgacaaccgggcaaaacaacaatagcaactttgcctggactgctggaaccaaataccatctgaatggaagaaattcattgtctaatcctggcatcgctatggcgacacacaaagacgacaaggagcgtttttttcccagtaacgggatcctgatttttggcaaacaaaatgctgccagagacaatgcggattacagcgatgtcatgctcaccagcgaggaagaaatcaaaaccactaaccctgtggctacagaggaatacggtatcgtggcagataacttgcagcagcaaaacacggctcctcaaattggaactgtcaacagccagggggccttacccggtatggtctggcagaaccgggacatgtacctgcagggtcccatctgggccaagattcctcacacggacggcaacttccacccgtctccgctgatgggcggctttggcctgaaacatcctccgcctcagatcctgatcaagaacacgcctgtacctgcggatcctccgaccaccttcaaccagtcaaagctgaactctttcatcacgcaatacagcaccggacaggtcagcgtggaaattgaatgggagctgcagaaggaaaacagcaagcgctggaaccccgagatccagtacacctccaactactacaaatctacaagtgtggactttgctgttaatacagaaggcgtgtactctgaaccccaccccattggcacccgttacctcacccgtcccctgtaa

SEQ ID NO: 1039 - DNA, 2211 bp, Artificial Sequence
  source: /note="Description of Artificial Sequence: Synthetic polynucleotide"
atggctgccgatggttatcttccagattggctcgaggacaacctctctgagggcattcgcgagtggtgggcgctgaaacctggagccccgaagcccaaagccaaccagcaaaagcaggacgacggccggggtctggtgcttcctggctacaagtacctcggacccttcaacggactcgacaagggggagcccgtcaacgcggcggatgcagcggccctcgagcacgacaaggcctacgaccagcagctcaaagcgggtgacaatccgtacctgcggtataaccacgccgacgccgagtttcaggagcgtctgcaggaagatacgtcttttgggggcaacctcgggcgagcagtcttccaggccaagaagagggttctcgaaccttttggtctggttgaggaaggcgctaagacggctcctggaaagaaacgtccggtagagcagtcgccacaagagccagactcctcctcgggcatcggcaagacaggccagcagcccgctaaaaagagactcaattttggtcagactggcggctcagagtcagtccccgacccacaacctctcggagaacctccagcaacccccgctgctgtgggacctactacaatggctgcaggcggtggcgcaccaatggcagacaataacgaaggcgccgacggagtgggtagttcctcgggaaattggcattgcgattccacatggctgggcgacagagtcatcaccaccagcaccagaacctgggccttgcccacctataacaaccacctctacaagcaaatctccagtgcttcaacgggggccagcaacgacaaccactacttcggctacagcaccccctgggggtattttgatttcaacagattccactgccatttctcaccacgtgactggcagcgactcatcaacaacaactggggattccggcccaagagactcaacttcaaactcttcaacattcaggtcaaagaggttacggacaacaatggagtcaagaccatcgccaataaccttaccagcacggtccaggtgtttacggactcggagtaccagctgccgtacgttctcggctctgcccaccagggctgcctccctccgttcccggcggacgtgttcatgattccgcagtacggctacctaacgctcaacaatggcagccaggcagtgggacggtcatccttttactgcctggaatatttcccttctcagatgctgagaacgggcaacaactttaccttcagctacacctttgaggaagtgcctttccacagcagctacgcgcacagccagagcctggaccggctgatgaatcctctgattgaccagtacctgtactacttgtctcggactcaaacaacaggaggcacggcaaatacgcagactctgggcttcagccaaggtgggcctaatacaatggccaatcaggcaaagaactggctgccaggaccctgttaccgccaacaacgcgtctcaacgacaaccgggcaaaacaacaatagcaactttgcctggactgctgggaccaaataccatctgaatggaagaaattcattggctaatcctggcatcgctatggcctcacacaaagacgacaaggagcgtttttttcccagtaacgggatcctgatttttggcaaacaaaatgctgccagagacaatgcggattacagcgatgtcatgctcaccagcgaggaagaaatcaaaaccactaaccctgtggctacagaggaatacggtatcgtggcagataacttgcagcagcaaaacacggctcctcaaattggaactgtcaacagccagggggccttacccggtatggtctggcagaaccgggacgtgtacctgcagggtcccatctgggccaagattcctcacacggacggcaacttccacccgtctccgctgatgggcggctttggcctgaaacatcctccgcctcagatcctgatcaagaacacgcctgtacctgcggatcctccgaccaccttcaaccagtcaaagctgaactctttcatcacgcaatacagcaccggacaggtcagcgtggaaattgaatgggagctgcagaaggaaaacagcaagcgctggaaccccgagatccagtacacctccaactactacaaatctacaagtgtggactttgctgttaatacagaaggcgtgtactctgaaccccaccccattggcacccgttacctcacccgtcccctgtaa

SEQ ID NO: 1040 - protein, 736 aa, Artificial Sequence
  source: /note="Description of Artificial Sequence: Synthetic polypeptide"
MAADGYLPDWLEDTLSEGIRQWWKLKPGPPPPKPAERHKDDSRGLVLPGYKYLGPFNGLDKGEPVNEADAAALEHDKAYDQQLKAGDNPYLKYNHADAEFQERLKEDTSFGGNLGRAVFQAKKRVLEPLGLVEEGAKTAPGKKRPVEQSPQEPDSSSGIGKTGQQPAKKRLNFGQTGDSESVPDPQPLGEPPATPAAVGPTTMASGGGAPMADNNEGADGVGSSSGNWHCDSQWLGDRVITTSTRTWALPTYNNHLYKQISSASTGASNDNHYFGYSTPWGYFDFNRFHCHFSPRDWQRLINNNWGFRPKRLNFKLFNIQVKEVTQNEGTKTIANNLTSTIQVFTDSEYQLPYVLGSAHQGCLPPFPADVFMIPQYGYLTLNNGSQAVGRSSFYCLEYFPSQMLRTGNNFQFTYTFEDVPFHSSYAHSQSLDRLMNPLIDQYLYYLSRTQTTGGTANTQTLGFSQGGPNTMANQAKNWLPGPCYRQQRVSTTTGQNNNSNFAWTAGTKYHLNGRNSLANPGIAMATHKDDKERFFPSNGILIFGKQNAARDNADYSDVMLTSEEEIKTTNPVATEEYGIVADNLQQQNTAPQIGTVNSQGALPGMVWQNRDVYLQGPIWAKIPHTDGNFHPSPLMGGFGLKHPPPQILIKNTPVPADPPTTFNQSKLNSFITQYSTGQVSVEIEWELQKENSKRWNPEIQYTSNYYKSTSVDFAVNTEGVYSEPHPIGTRYLTRPL

SEQ ID NO: 1041 - protein, 736 aa, Artificial Sequence
  source: /note="Description of Artificial Sequence: Synthetic polypeptide"
MAADGYLPDWLEDNLSEGIREWWALKPGAPKPKANQQKQDDGRGLVLPGYKYLGPFNGLDKGEPVNAADAAALEHDKAYDQQLKAGDNPYLKYNHADAEFQERLKEDTSFGGNLGRAVFQAKKRLLEPLGLVEEAAKTAPGKKRPVEQSPQEPDSSAGIGKSGAQPAKKRLNFGQTGDSESVPDPQPLGEPPATPAAVGPTTMASGGGAPMADNNEGADGVGNASGNWHCDSTWLGDRVITTSTRTWALPTYNNHLYKQISSASTGASNDNHYFGYSTPWGYFDFNRFHCHFSPRDWQRLINNNWGFRPKRLNFKLFNIQVKEVTQNEGTKTIANNLTSTIQVFTDSEYQLPYVLGSAHQGCLPPFPADVFMIPQYGYLTLNNGSQAVGRSSFYCLEYFPSQMLRTGNNFQFTYTFEDVPFHSSYAHSQSLDRLMNPLIDQYLYYLSRTQTTGGTANTQTLGFSQGGPNTMANQAKNWLPGPCYRQQRVSTTTGQNNNSNFAWTAGTKYHLNGRNSLANPGIAMATHKDDKERFFPSNGILIFGKQNAARDNADYSDVMLTSEEEIKATNPVATEEYGIVADNLQQQNTAPQIGTVNSQGALPGMVWQNRDVYLQGPIWAKIPHTDGNFHPSPLMGGFGLKHPPPQILIKNTPVPADPPTTFNQSKLNSFITQYSTGQVSVEIEWELQKENSKRWNPEIQYTSNYYKSTSVDFAVNTEGVYSEPHPIGTRYLTRPL

SEQ ID NO: 1042 - protein, 737 aa, Artificial Sequence
  source: /note="Description of Artificial Sequence: Synthetic polypeptide"
MAADGYLPDWLEDNLSEGIREWWDLKPGAPKPKANQQKQDDGRGLVLPGYKYLGPFNGLDKGEPVNAADAAALEHDKAYDQQLKAGDNPYLRYNHADAEFQERLQEDTSFGGNLGRAVFQAKKRVLEPLGLVEEGANTAPGKKRPVEQSPQEPDSSAGIGKSGAQPAKKRLNFGQTGDTESVPDPQPIGEPPAAPSGVGSLTMASGGGAPVADNNEGADGVGSSSGNWHCDSQWLGDRVITTSTRTWALPTYNNHLYKQISNSTSGGSSNDNAYFGYSTPWGYFDFNRFHCHFSPRDWQRLINNNWGFRPKRLNFKLFNIQVKEVTDNNGVKTIANNLTSTIQVFTDSEYQLPYVLGSAHQGCLPPFPADVFMIPQYGYLTLNNGSQAVGRSSFYCLEYFPSQMLRTGNNFQFTYTFEDVPFHSSYAHSQSLDRLMNPLIDQYLYYLSRTQTTGGTANTQTLGFSQGGPNTMANQAKNWLPGPCYRQQRVSTTTGQNNNSNFAWTAGTKYHLNGRNSLANPGIAMASHKDDKERFFPSNGILIFGKQNAARDNADYSDVMLTSEEEIKTTNPVATEEYGIVADNLQQQNTAPQIGTVNSQGALPGMVWQNRDVYLQGPIWAKIPHTDGNFHPSPLMGGFGLKHPPPQILIKNTPVPADPPTTFNQSKLNSFITQYSTGQVSVEIEWELQKENSKRWNPEIQYTTNYYKSTSVDFAVNTEGVYSEPHPIGTRYLTRPL

SEQ ID NO: 1043 - protein, 736 aa, Artificial Sequence
  source: /note="Description of Artificial Sequence: Synthetic polypeptide"
MAADGYLPDWLEDNLSEGIREWWALKPGAPKPKANQQKQDDGRGLVLPGYKYLGPFNGLDKGEPVNEADAAALEHDKAYDQQLKAGDNPYLRYNHADAEFQERLQEDTSFGGNLGRAVFQAKKRVLEPLGLVEEGAKTAPGKKRPVEQSPQEPDSSSGIGKTGQQPAKKRLNFGQTGDSESVPDPQPLGEPPATPAAVGPTTMASGGGAPMADNNEGADGVGNASGNWHCDSTWLGDRVITTSTRTWALPTYNNHLYKQISSASTGASNDNHYFGYSTPWGYFDFNRFHCHFSPRDWQRLINNNWGFRPKRLNFKLFNIQVKEVTQNEGTKTIANNLTSTIQVFTDSEYQLPYVLGSAHQGCLPPFPADVFMIPQYGYLTLNNGSQAVGRSSFYCLEYFPSQMLRTGNNFQFTYTFEDVPFHSSYAHSQSLDRLMNPLIDQYLYYLSRTQTTGGTANTQTLGFSQGGPNTMANQAKNWLPGPCYRQQRVSTTTGQNNNSNFAWTAGTKYHLNGRNSLANPGIAMATHKDDKERFFPSNGILIFGKQNAARDNADYSDVMLTSEEEIKTTNPVATEEYGIVADNLQQQNTAPQIGTVNSQGALPGMVWQNRDVYLQGPIWAKIPHTDGNFHPSPLMGGFGLKHPPPQILIKNTPVPADPPTTFNQSKLNSFITQYSTGQVSVEIEWELQKENSKRWNPEIQYTSNYYKSTSVDFAVNTEGVYSEPHPIGTRYLTRPL

SEQ ID NO: 1044 - protein, 736 aa, Artificial Sequence
  source: /note="Description of Artificial Sequence: Synthetic polypeptide"
MAADGYLPDWLEDNLSEGIREWWALKPGAPKPKANQQKQDDGRGLVLPGYKYLGPFNGLDKGEPVNEADAAALEHDKAYDQQLKAGDNPYLRYNHADAEFQERLQEDTSFGGNLGRAVFQAKKRVLEPFGLVEEGAKTAPGKKRPVEQSPQEPDSSSGIGKTGQQPAKKRLNFGQTGDSESVPDPQPLGEPPATPAAVGPTTMASGGGAPMADNNEGADGVGNASGNWHCDSQWLGDRVITTSTRTWALPTYNNHLYKQISSASTGASNDNHYFGYSTPWGYFDFNRFHCHFSPRDWQRLINNNWGFRPKRLNFKLFNIQVKEVTDNNGVKTIANNLTSTVQVFSDSEYQLPYVLGSAHQGCLPPFPADVFMIPQYGYLTLNNGSQAVGRSSFYCLEYFPSQMLRTGNNFQFTYTFEDVPFHSSYAHSQSLDRLMNPLIDQYLYYLSRTQTTGGTANTQTLGFSQGGPNTMANQAKNWLPGPCYRQQRVSTTTGQNNNSNFAWTAGTKYHLNGRNSLANPGIAMATHKDDKERFFPSNGILIFGKQNAARDNADYSDVMLTSEEEIKTTNPVATEEYGIVADNLQQQNTAPQIGTVNSQGALPGMVWQNRDVYLQGPIWAKIPHTDGNFHPSPLMGGFGLKHPPPQILIKNTPVPADPPTTFNQSKLNSFITQYSTGQVSVEIEWELQKENSKRWNPEIQYTSNYYKSTSVDFAVNTEGVYSEPHPIGTRYLTRPL

SEQ ID NO: 1045 - protein, 736 aa, Artificial Sequence
  source: /note="Description of Artificial Sequence: Synthetic polypeptide"
MAADGYLPDWLEDTLSEGIRQWWKLKPGPPPPKPAERHKDDSRGLVLPGYKYLGPFNGLDKGEPVNEADAAALEHDKAYDRQLDSGDNPYLKYNHADAEFQERLKEDTSFGGNLGRAVFQAKKRVLEPFGLVEEGAKTAPGKKRPVEQSPQEPDSSSGIGKTGQQPAKKRLNFGQTGDSESVPDPQPLGEPPATPAAVGPTTMASGGGAPMADNNEGADGVGNASGNWHCDSTWLGDRVITTSTRTWALPTYNNHLYKQISSASTGASNDNHYFGYSTPWGYFDFNRFHCHFSPRDWQRLINNNWGFRPKRLNFKLFNIQVKEVTDNNGVKTIANNLTSTVQVFTDSDYQLPYVLGSAHEGCLPPFPADVFMIPQYGYLTLNNGSQAVGRSSFYCLEYFPSQMLRTGNNFQFTYTFEDVPFHSSYAHSQSLDRLMNPLIDQYLYYLSRTQTTGGTANTQTLGFSQGGPNTMANQAKNWLPGPCYRQQRVSTTTGQNNNSNFAWTAGTKYHLNGRNSLANPGIAMATHKDDKERFFPSNGILIFGKQNAARDNADYSDVMLTSEEEIKTTNPVATEEYGIVADNLQQQNTAPQIGTVNSQGALPGMVWQNRDVYLQGPIWAKIPHTDGNFHPSPLMGGFGLKHPPPQILIKNTPVPADPPTTFNQSKLNSFITQYSTGQVSVEIEWELQKENSKRWNPEIQYTSNYYKSTSVDFAVNTEGVYSEPHPIGTRYLTRNL

SEQ ID NO: 1046 - protein, 738 aa, Artificial Sequence
  source: /note="Description of Artificial Sequence: Synthetic polypeptide"
MAADGYLPDWLEDNLSEGIREWWDLKPGAPKPKANQQKQDDGRGLVLPGYKYLGPFNGLDKGEPVNAADAAALEHDKAYDQQLQAGDNPYLRYNHADAEFQERLQEDTSFGGNLGRAVFQAKKRVLEPLGLVEEGAKTAPGKKRPVEPSPQRSPDSSTGIGKKGQQPARKRLNFGQTGDSESVPDPQPLGEPPAAPSGVGPNTMAAGGGAPMADNNEGADGVGSSSGNWHCDSQWLGDRVITTSTRTWALPTYNNHLYKQISNSTSGGSSNDNAYFGYSTPWGYFDFNRFHCHFSPRDWQRLINNNWGFRPKRLSFKLFNIQVKEVTQNEGTKTIANNLTSTIQVFTDSEYQLPYVLGSAHQGCLPPFPADVFMIPQYGYLTLNNGSQAVGRSSFYCLEYFPSQMLRTGNNFTFSYTFEDVPFHSSYAHSQSLDRLMNPLIDQYLYYLSRTQTTGGTANTQTLGFSQGGPNTMANQAKNWLPGPCYRQQRVSTTTGQNNNSNFAWTAGTKYHLNGRNSLANPGIAMATHKDDKERFFPSNGILIFGKQNAARDNADYSDVMLTSEEEIKTTNPVATEEYGIVADNLQQQNTAPQIGTVNSQGALPGMVWQNRDVYLQGPIWAKIPHTDGNFHPSPLMGGFGLKHPPPQILIKNTPVPADPPTTFNQSKLNSFITQYSTGQVSVEIEWELQKENSKRWNPEIQYTSNYYKSTSVDFAVNTEGVYSEPHPIGTRYLTRPL

SEQ ID NO: 1047 - protein, 737 aa, Artificial Sequence
  source: /note="Description of Artificial Sequence: Synthetic polypeptide"
MAADGYLPDWLEDNLSEGIREWWDLKPGAPKPKANQQKQDDGRGLVLPGYKYLGPFNGLDKGEPVNAADAAALEHDKAYDQQLKAGDNPYLRYNHADAEFQERLQEDTSFGGNLGRAVFQAKKRVLEPFGLVEEGAKTAPGKKRPVEQSPQEPDSSSGIGKTGQQPAKKRLNFGQTGDSESVPDPQPLGEPPATPAAVGPTTMASGGGAPMQDNNEGADGVGSSSGNWHCDSTWLGDRVITTSTRTWALPTYNNHLYKQISNGTSGGATNDNTYFGYSTPWGYFDFNRFHCHFSPRDWQRLINNNWGFRPKRLNFKLFNIQVKEVTQNEGTKTIANNLTSTIQVFTDSEYQLPYVLGSAHQGCLPPFPADVFMIPQYGYLTLNNGSQAVGRSSFYCLEYFPSQMLRTGNNFTFSYTFEDVPFHSSYAHSQSLDRLMNPLIDQYLYYLSRTQTTGGTANTQTLGFSQGGPNTMANQAKNWLPGPCYRQQRVSTTTGQNNNSNFAWTAGTKYHLNGRNSLANPGIAMATHKDDKERFFPSNGILIFGKQNAARDNADYSDVMLTSEEEIKTTNPVATEEYGIVADNLQQQNTAPQIGTVNSQGALPGMVWQNRDVYLQGPIWAKIPHTDGNFHPSPLMGGFGLKHPPPQILIKNTPVPADPPTTFNQSKLNSFITQYSTGQVSVEIEWELQKENSKRWNPEIQYTSNYYKSTSVDFAVNTEGVYSEPHPIGTRYLTRPL

SEQ ID NO: 1048 - protein, 736 aa, Artificial Sequence
  source: /note="Description of Artificial Sequence: Synthetic polypeptide"
MAADGYLPDWLEDNLSEGIREWWALKPGAPKPKANQQKQDDGRGLVLPGYKYLGPFNGLDKGEPVNAADAAALEHDKAYDQQLKAGDNPYLRYNHADAEFQERLQEDTSFGGNLGRAVFQAKKRVLEPLGLVEEGAKTAPGKKRPVEQSPQEPDSSSGIGKTGQQPAKKRLNFGQTGDSESVPDPQPLGEPPATPAAVGPTTMASGGGAPMADNNEGADGVGSSSGNWHCDSTWLGDRVITTSTRTWALPTYNNHLYKQISSASTGASNDNHYFGYSTPWGYFDFNRFHCHFSPRDWQRLINNNWGFRPKRLNFKLFNIQVKEVTDNNGVKTIANNLTSTVQVFTDSDYQLPYVLGSAHEGCLPPFPADVFMIPQYGYLTLNNGSQAVGRSSFYCLEYFPSQMLRTGNNFTFSYTFEDVPFHSSYAHSQSLDRLMNPLIDQYLYYLSRTQTTGGTANTQTLGFSQGGPNTMANQAKNWLPGPCYRQQRVSTTTGQNNNSNFAWTAGTKYHLNGRNSLANPGIAMATHKDDKERFFPSNGILIFGKQNAARDNADYSDVMLTSEEEIKTTNPVATEEYGIVADNLQQQNTAPQIGTVNSQGALPGMVWQNRDVYLQGPIWAKIPHTDGNFHPSPLMGGFGLKHPPPQILIKNTPVPADPPTTFNQSKLNSFITQYSTGQVSVEIEWELQKENSKRWNPEIQYTSNYYKSTSVDFAVNTEGVYSEPHPIGTRYLTRPL

SEQ ID NO: 1049 - protein, 737 aa, Artificial Sequence
  source: /note="Description of Artificial Sequence: Synthetic polypeptide"
MAADGYLPDWLEDNLSEGIREWWDLKPGAPKPKANQQKQDDGRGLVLPGYKYLGPFNGLDKGEPVNAADAAALEHDKAYDQQLKAGDNPYLRYNHADAEFQERLQEDTSFGGNLGRAVFQAKKRVLEPLGLVEEGAKTAPGKKRPVEPSPQRSPDSSTGIGKKGQQPARKRLNFGQTGDSESVPDPQPLGEPPATPAAVGPTTMASGGGAPMADNNEGADGVGNASGNWHCDSTWLGDRVITTSTRTWALPTYNNHLYKQISSASTGASNDNHYFGYSTPWGYFDFNRFHCHFSPRDWQRLINNNLGSRPKRLNFKLFIIQVKEVTTNDGVTTIANNLTSTVQVFSDSEYQLPYVLGSAHQGCLPPFPADVFMIPQYGYLTLNNGSQAVGRSSFYCLEYFPSQMLRTGNNFTFSYTFEDVPFHSSYAHSQSLDRLMNPLIDQYLYYLNRTQNQSGSAQNKDLLFSRGSPAGMSVQPKNWLPGPCYRQQRVSKTKTDNNNSNFTWTGASKYNLNGRESIINPGTAMASHKDDKDKFFPMSGVMIFGKESAGASNTALDNVMITDEEEIKATNPVATERFGTVAVNLQSSSTDPATGDVHVMGALPGMVWQDRDVYLQGPIWAKIPHTDGHFHPSPLMGGFGLKHPPPQILIKNTPVPANPPAEFSATKFASFITQYSTGQVSVEIEWELQKENSKRWNPEVQYTSNYAKSANVDFTVDNNGLYTEPRPIGTRYLTRPL

SEQ ID NO: 1050 - protein, 736 aa, Artificial Sequence
  source: /note="Description of Artificial Sequence: Synthetic polypeptide"
MAADGYLPDWLEDNLSEGIREWWALKPGAPKPKANQQKQDDGRGLVLPGYKYLGPFNGLDKGEPVNAADAAALEHDKAYDQQLKAGDNPYLRYNHADAEFQERLQEDTSFGGNLGRAVFQAKKRLLEPLGLVEEAAKTAPGKKRPVEQSPQEPDSSSGIGKTGQQPAKKRLNFGQTGDSESVPDPQPIGEPPATPAAVGPTTMASGGGAPMADNNEGADGVGNSSGNWHCDSTWLGDRVITTSTRTWALPTYNNHLYKQISSASTGASNDNHYFGYSTPWGYFDFNRFHCHFSPRDWQRLINNNWGFRPKRLNFKLFNIQVKEVTQNEGTKTIANNLTSTIQVFTDSEYQLPYVLGSAHQGCLPPFPADVFMIPQYGYLTLNNGSQAVGRSSFYCLEYFPSQMLRTGNNFTFSYTFEDVPFHSSYAHSQSLDRLMNPLIDQYLYYLSRTQTTGGTANTQTLGFSQGGPNTMANQAKNWLPGPCYRQQRVSTTTGQNNNSNFAWTAGTKYHLNGRNSLANPGIAMATHKDDKERFFPSNGILIFGKQNAARDNADYSDVMLTSEEEIKTTNPVATEEYGIVADNLQQQNTAPQIGTVNSQGALPGMVWQNRDVYLQGPIWAKIPHTDGNFHPSPLMGGFGLKHPPPQILIKNTPVPADPPTTFNQSKLNSFITQYSTGQVSVEIEWELQKENSKRWNPEIQYTSNYYKSTSVDFAVNTEGVYSDPHPIGTRYLTRPL

SEQ ID NO: 1051 - protein, 736 aa, Artificial Sequence
  source: /note="Description of Artificial Sequence: Synthetic polypeptide"
MAADGYLPDWLEDNLSEGIREWWALKPGAPKPKANQQEQDDGRGLVLPGYKYLGPFNGLDKGEPVNAADAAALEHDKAYDQQLKAGDNPYLRYNHADAEFQERLQEDTSFGGNLGRAVFQAKKRVLEPFGLVEEGAKTAPGKKRPVEQSPQEPDSSSGIGKTGQQPAKKRLNFGQTGDSESVPDPQPLGEPPAAPSGVGPNTMAAGGGAPMADNNEGADGVGSSSGNWHCDSTWLGDRVITTSTRTWALPTYNNHLYKQISSASTGASNDNHYFGYSTPWGYFDFNRFHCHFSPRDWQRLINNNWGFRPKRLNFKLFNIQVKEVTQNEGTKTIANNLTSTIQVFTDSEYQLPYVLGSAHQGCLPPFPADVFMIPQYGYLTLNNGSQAVGRSSFFCLEYFPSQMLRTGNNFTFSYTFEDVPFHSSYAHSQSLDRLMNPLIDQYLYYLSRTQTTGGTANTQTLGFSQGGPNTMANQAKNWLPGPCYRQQRVSTTTGQNNNSNFAWTAGTKYHLNGRNSLANPGIAMATHKDDKERFFPSNGILIFGKQNAARDNADYSDVMLTSEEEIKTTNPVATEEYGIVADNLQQQNTAPQIGTVNSQGALPGMVWQNRDVYLQGPIWAKIPHTDGNFHPSPLMGGFGLKHPPPQILIKNTPVPADPPTTFNQSKLNSFITQYSTGQVSVEIEWELQKENSKRWNPEIQYTSNYYKSTSVDFAVNTEGVYSEPHPIGTRYLTRPL

SEQ ID NO: 1052 - protein, 736 aa, Artificial Sequence
  source: /note="Description of Artificial Sequence: Synthetic polypeptide"
MAADGYLPDWLEDNLSEGIREWWDLKPGAPKPKANQQKQDDGRGLVLPGYKYLGPFNGLDKGEPVNAADAAALEHDKAYDQQLKAGDNPYLRYNHADAEFQERLQEDTSFGGNLGRAVFQAKKRVLEPLGLVEEGAKTAPGKKRPVEQSPQEPDSSSGIGKTGQQPAKKRLNFGQTGDSESVPDPQPLGEPPATPAAVGPTTMASGGGAPMADNNEGADGVGNASGNWHCDSTWLGDRVITTSTRTWALPTYNNHLYKQISSASTGASNDNHYFGYSTPWGYFDFNRFHCHFSPRDWQRLINNNWGFRPKRLNFKLFNIQVKEVTTNDGVTTIANNLTSTVQVFSDSEYQLPYVLGSAHQGCLPPFPADVFMIPQYGYLTLNNGSQAVGRSSFYCLEYFPSQMLRTGNNFTFSYTFEDVPFHSSYAHSQSLDRLMNPLIDQYLYYLNRTQNQSGSAQNKDLLFSRGSPAGMSVQPKNWLPGPCYRQQRVSKTKTDNNNSNFTWTGASKYNLNGRESIINPGTAMASHKDDKDKFFPMSGVMIFGKESAGASNTALDNVMITDEEEIKATNPVATERFGTVAVNLQNSSTDPATGDVHVMGALPGMVWQDRDVYLQGPIWAKIPHTDGHFHPSPLMGGFGLKHPPPQILIKNTPVPANPPAEFSATKFASFITQYSTGQVSVEIEWELQKENSKRWNPEVQYTSNYAKSANVDFTVDNNGLYTVPRPIGTRYLTRPL

SEQ ID NO: 1053 - protein, 736 aa, Artificial Sequence
  source: /note="Description of Artificial Sequence: Synthetic polypeptide"
MAADGYLPDWLEDNLSEGIREWWALKPGAPKPKANQQKQDDGRGLVLPGYKYLGPFNGLDKGEPVNAADAAALEHDKAYDQQLKAGDNPYLRYNHADAEFQERLQEDTSFGGNLGRAVFQAKKRLLEPLGLVEEGAKTAPGKKRPVEQSPQEPDSSSGIGKTGEQPAKKRLNFGQTGDSESVPDPQPLGEPPATPAAVGPTTMASGGGAPMADNNEGADGVGSASGNWHCDSTWLGDRVITTSTRTWALPTYNNHLYKQISSASTGASNDNHYFGYSTPWGYFDFNRFHCHFSPRDWQRLINNNWGFRPKRLNFKLFNIQVKEVTDNNGVKTIANNLTSTIQVFTDSEYQLPYVLGSAHQGCLPPFPADVFMIPQYGYLTLNNGSQAVGRSSFYCLEYFPSQMLRTGNNFPFSYTFEDVPFHSSYAHSQSLDRLMNPLIDQYLYYLSRTQTTGGTANTQTLGFSQGGPNTMANQAKNWLPGPCYRQQRVSTTTGQNNNSNFAWTAGTKYHLNGRNSLANPGIAMATHKDDKERFFPSNGILIFGKQNAARDNADYSDVMLTSEEEIKTTNPVATEEYGIVADNLQQQNTAPQIGTVNSQGALPGMVWQNRDVYLQGPIWAKIPHTDGNFHPSPLMGGFGLKHPPPQILIKNTPVPADPPTTFNQSKLNSFITQYSTGQVSVEIEWELQKENSKRWNPEIQYTSNYYKSTSVDFAVNTEGVYSEPHPIGTRYLTRPL

SEQ ID NO: 1054 - protein, 736 aa, Artificial Sequence
  source: /note="Description of Artificial Sequence: Synthetic polypeptide"
MAADGYLPDWLEDNLSEGIREWWALKPGAPKPKANQQKQDDGRGLVLPGYKYLGPFNGLDKGEPVNAADAAALEHDKAYDQQLKAGDNPYLRYNHADAEFQERLQEDTSFGGNLGRAVFQAKKRVLEPLGLVEEGAKTAPGKKRPVEQSPQEPDSSSGIGKTGQQPAKKRLNFGQTGDSESVPDPQPLGEPPATPAAVGPTTMASGGGAPMADNNEGADGVGSSSGNWHCDSQWLGDRVITTSTRTWALPTYNNHLYKQISSASTGASNDNHYFGYSTPWGYFDFNRFHCHFSPRDWQRLINNNWGFRPKRLNFKLFNIQVKEVTDNNGVKTIANNLTSTVQVFTDSEYQLPYVLGSAHQDCLPPFPADVFMIPQYGYLTLNNGSQAVGRSSFYCLEYFPSQMLRTGNNFTFSYTFEDVPFHSSYAHSQSLDRLMNPLIDQYLYYLSRTQTTGGTANTQTLGFSQGGPNTMANQAKNWLPGPCYRQQRVSTTTGQNNNSNFAWTAGTKYHLNGRNSLANPGIAMATHKDDKERFFPSNGILIFGKQNAARDNADYSDVMLTSEEEIKTTNPVATEEYGIVADNLQQQNTAPQIGTVNSQGALPGMVWQNRDVYLQGPIWAKIPHTDGNFHPSPLMGGFGLKHPPPQILIKNTPVPADPPTTFNQSKLNSFITQYSTGQVSVEIEWELQKENSKRWNPEIQYTSNYYKSTSVDFAVNTEGVYSEPHPIGTRYLTRPL

SEQ ID NO: 1055 - protein, 735 aa, Artificial Sequence
  source: /note="Description of Artificial Sequence: Synthetic polypeptide"
MAADGYLPDWLEDNLSEGIREWWDLKPGAPKPKANQQKQDDGRGLVLPGYKYLGPFNGLDKGEPVNAADAAALEHDKAYDQQLKAGDNPYLRYNHADAEFQERLQEDTSFGGNLGRAVFQAKKRVLEPLGLVEEGAKTAPGKKRPVEQSPQEPDSSSGIGKTGQQPAKKRLNFGQTGDSESVPDPQPLGEPPATPAAVGPTTMASGGGAPMADNNEGADGVGNASGNWHCDSTWLGDVITTSTRTWALPTYNNHLYKQISSASTGASNDNHYFGYSTPWGYFDFNRFHCHFSPRDWQRLINNNWGFRPKRLNFKLFNIQVKEVTQNEGTKTIANNLTSTIQVFTDSEYQLPYVLGSAHQGCLPPFPADVFMIPQYGYLTLNNGSQAVGRSSFYCLEYFPSQMLRTGNNFQFTYTFEDVPFHSSYAHSQSLDRLMNPLIDQYLYYLSRTQTTGGTANTQTLGFSQGGPNTMANQAKNWLPGPCYRQQRVSTTTGQNNNSNFAWTAGTKYHLNGRNSLANPGIAMATHKDDKERFFPSNGILIFGKQNAARDNADYSDVILTSEEEIKTTNPVATEEYGIVADNLQQQNTAPQIGTVNSQGALPGMVWQNRDVYLQGPIWAKIPHTDGNFHPSPLMGGFGLKHPPPQILIKNTPVPADPPTTFNQSKLNSFITQYSTGQVSVEIEWELQKENSKRWNPEIQYTSNYYKSTSVDFAVNTEGVYSEPHPIGTRYLTRPL

SEQ ID NO: 1056 - protein, 736 aa, Artificial Sequence
  source: /note="Description of Artificial Sequence: Synthetic polypeptide"
MAADGYLPDWLEDTLSEGIRQWWKLKPGPPPPKPAERHKDDSRGLVLPGYKYLGPFNGLDKGEPVNEADAAALEHDKAYDRQLDSGDNPYLKYNHADAEFQERLKEDTSFGGNLGRAVFQAKKRVLEPFGLVEEGAKTAPGKKRPVEQSPQEPDSSSGIGKTGQQPAKKRLNFGQTGDSESVPDPQPLGEPPATPAAVGPTTMASGGGAPMADNNEGADGVGNASGNWHCDSTWLGDRVITTSTRTWALPTYNNHLYKQISSTSTGASNDNHYFGYSTPWGYFDFNRFHCHFSPRDWQRLINNNWGFRPKRLNFKLFNIQVKEVTDNNGVKTIANNLTSTVQVFTDSEYQLPYVLGSAHQGCLPPFPADVFMIPQYGYLTLNNGSQAVGRSSFYCLEYFPSQMLRTGNNFTFSYTFEDVPFHSSYAHSQSLDRLMNPLIDQYLYYLSRTQTTGGTANTQTLGFSQGGPNTMANQAKNWLPGPCYRQQRVSTTTGQNNNSNFAWTAGTKYHLNGRNSLANPGIAMATHKDDKERFFPSNGILIFGKQNAARDNADYSDVMLTSEEEIKTTNPVATEEYGIVADNLQQQNTAPQIGTVNSQGALPGMVWQNRDVYLQGPIWAKIPHTDGNFHPSPLMGGFGLKHPPPQILIKNTPVPADPPTTFNQSKLNSFITQYSTGQVSVEIEWELQKENSKRWNPEIQYTSNYYKSTSVDFAVNTEGVYSEPHPIGTRYLTRPL

SEQ ID NO: 1057 - protein, 735 aa, Artificial Sequence
  source: /note="Description of Artificial Sequence: Synthetic polypeptide"
MAADGYLPDWLEDNLSEGIREWWDLKPGAPKPKANQQKQDDGRGLVLPGYKYLGPFNGLDKGEPVNAADAAALEHDKAYDRQLDSGDNPYLRYNHADAEFQERLKEDTSFGGNLGRAVFQAKKRVLEPFGLVEEGAKTAPGKKRPVEQSPQEPDSSSGIGKTGQQPAKKRLNFGQTGDSESVPDPQPLGEPPATPAAVGPTTMASGGGAPMADNNEGADGVGNASGNWHCDSTWLGDRVITTSTRTWALPTYNNHLYKQISSASTGASNDNHYFGYSTPWGYFDFNRFHCHFSPRDWQRLINNNWGFRPKRLNFKLFNIQVKEVTQNEGTKTIANNLTSTIQVFTDSEYQLPYVLGSAHQGCLPPFPADVFMIPQYGYLTLNNGSQAVGRSSFYCLEYFPSQMLRTGNNFQFTYTFEDVPFHSSYAHSQSLDRLMNPLIDQYLYYLSRTQTTGGTANTQTLGFSQGGPNTMANQAKNWLPGPCYRQQRVSTTTGQNNNSNFAWTAGTKYHLNGRNSLANPGIAMATHKDDRSVFFQYRDPDFGKQNAARDNADYSDVMLTSEEEIKTTNPVATEEYGIVADNLQQQNTAPQIGTVNSQGALPGMVWQNRDVYLQGPIWAKIPHTDGNFHPSPLMGGFGLKHPPPQILIKNTPVPADPPTTFNQSKLNSFITQYSTGQVSVEIEWELQKENSKRWNPEIQYTSNYYKSTSVDFAVNTEGVYSEPHPIGTRYLTRPL

SEQ ID NO: 1058 - protein, 736 aa, Artificial Sequence
  source: /note="Description of Artificial Sequence: Synthetic polypeptide"
MAADGYLPDWLEDNLSEGIREWWALKPGAPKPKANQQKQDDGRGLVLPGYKYLGPFNGLDKGEPVNAADAAALEHDKAYDQQLKAGDNPYLKYNHADAEFQERLQGDTSFGGNLGRAVFQAKKRVLEPLGLVEEAAKTAPGKKRPVEQSPQEPDSSAGIGKSGAQPAKKRLNFGQTGDTESVPDPQPLGEPPAAPSGVGPNTMAAGGGAPMADNNEGADGVGSSSGNWHCDSQWLGDRVITTSTRTWALPTYNNHLYKQISSASTGASNDNHYFGYSTPWGYFDFNRFHCHFSPRDWQRLINNNWGFRPKRLNFKLFNIQVKEVTDNNGVKTIANNLTSTVQVFTDSDYQLPYVLGSAHEGCLPPFPADVFMIPQYGYLTLNNGSQAVGRSSFYCLEYFPSQMLRTGNNFQFTYTFEDVPFHSSYAHSQSLDRLMNPLIDQYLYYLSRTQTTGGTANTQTLGFSQGGPNTMANQAKNWLPGPCYRQQRVSTTTGQNNNSNFAWTAGTKYHLNGRNSLANPGIAMATHKDDKERFFPSNGILIFGKQNAARDNADYSDVMLTSEEEIKTTNPVATEEYGIVADNLQQQNTAPQIGTVNSQGALPGMVWQNRDVYLQGPIWAKIPHTDGNFHPSPLMGGFGLKHPPPQILIKNTPVPADPPTTFNQSKLNSFITQYSTGQVSVEIEWELQKENSKRWNPEIQYTSNYYKSTSVDFAVNTEGVYSEPHPIGTRYLTRPL

SEQ ID NO: 1059 - protein, 736 aa, Artificial Sequence
  source: /note="Description of Artificial Sequence: Synthetic polypeptide"
MAADGYLPDWLEDTLSEGIRQWWKLKPGPPPPKPAERHKDDSRGLVLPGYKYLGPFNGLDKGEPVNEADAAALEHDKAYDRQLDSGDNPYLKYNHADAEFQERLKEDTSFGGNLGRAVFQAKKRVLEPFGLVEEAAKTAPGKKRPVEQSPQEPDSSSGIGKTGQQPAKKRLNFGQTGDSESVPDPQPLGEPPATPAAVGPTTMASGGGAPMADNNEGADGVGNASGNWHCDSTWLGDRVITTSTRTWALPTYNNHLYKQISSASTGASNDNHYFGYSTPWGYFDFNRFHCHFSPRDWQRLINNNWGFRPKRLNFKLFNIQVKEVTDNNGVKTIANNLTSTVQVFTDSDYQLPYVLGSAHEGCLPPFPADVFMIPQYGYLTLNNGSQAVGRSSFYCLEYFPSQMLRTGNNFTFSYTFEDVPFHSSYAHSQSLDRLMNPLIDQYLYYLSRTQTTGGTANTQTLGFSQGGPNTMANQAKNWLPGPCYRQQRVSTTTGQNNNSNFAWTAGTKYHLNGRNSLANPGIAMATHKDDKERFFPSNGILIFGKQNAARDNADYSDVMLTSEEEIKTTNPVATEEYGIVADNLQQQNTAPQIGTVNSQGALPGMVWQNRDVYLQGPIWAKIPHTDGNFHPSPLMGGFGLKHPPPQILIKNTPVPADPPTTFNQSKLNSFITQYSTGQVSVEIEWELQKENSKRWNPEIQYTSNYYKSTSVDFAVNTEGVYSEPHPIGTRYLTRPL

SEQ ID NO: 1060 - protein, 736 aa, Artificial Sequence
  source: /note="Description of Artificial Sequence: Synthetic polypeptide"
MAADGYLPDWLEDNLSEGIREWWALKPGAPKPKANQQKQDDGRGLVLPGYKYLGPFNGLDKGEPVNAADAAALEHDKAYDQQLKAGDNPYLRYNHADAEFQERLQEDTSFGGNLGRAVFQAKKRVLEPLGLVEEGAKTAPGKKRPVEQSPQEPDSSSGIGKTGQQPAKKRLNFGQTGDSESVPDPQPLGEPPATPAAVGPTTMASGGGAPMADNNEGADGVGSSSGNWHCDSTWLGDRVITTSTRTWALPTYNNHLYKQISSASTGASNDNHYFGYSTPWGYFDFNRFHCHFSPRDWQRLINNNWGFRPKRLNFKLFNIQVKEVTDNNGVKTIANNLTSTVQVFTDSEYQLPYVLGSAHQGCLPPFPADVFMIPQYGYLTLNNGSQAVGRSSFYCLEYFPSQMLRTGNNFTFSYTFEDVPFHSSYAHSQSLDRLMNPLIDQYLYYLSRTQTTGGTANTQTLGFSQGGPNTMANQAKNWLPGPCYRQQRVSTTTGQNNNSNFAWTAGTKYHLNGRNSLANPGIAMATHKDDKERFFPSNGILIFGKQNAARDNADYSDVMLTSEEEIKTTNPVATEEYGIVADNLQQQNTAPQIGTVNSQGALPGMVWQNRDVYLQGPIWAKIPHTDGNFHPSPLMGGFGLKHPPPQILIKNTPVPADPPTTFNQSKLNSFITQYSTGQVSVEIEWELQKENSKRWNPEIQYTSNYYKSTSVDFAVNTEGVYSEPHPIGTRYLTRPL

SEQ ID NO: 1061 - protein, 737 aa, Artificial Sequence
  source: /note="Description of Artificial Sequence: Synthetic polypeptide"
MAADGYLPDWLEDNLSEGIREWWALKPGAPKPKANQQKQDDGRGLVLPGYKYLGPFNGLDKGEPVNAADAAALEHDKAYDQQLKAGDNPYLRYNHADAEFQERLQEDTSFGGNLGRAVFQAKKRVLEPLGLVEEGAKTAPGKKRPVEQSPQEPDSSSGIGKTGQQPAKKRLNFGQTGDTESVPDPQPIGEPPAAPSGVGSLTMASGGGAPVADNNEGADGVGSSSGNWHCDSQWLGDRVITTSTRTWALPTYNNHLYKQISNSTSGGSSNDNAYFGYSTPWGYFDFNRFHCHFSPRDWQRLINNNWGFRPKRLNFKLFNIQVKEVTQNEGTKTIANNLTSTIQVFTDSEYQLPYVLGSAHQGCLPPFPADVFMIPQYGYLTLNNGSQAVGRSSFYCLEYFPSQMLRTGNNFQFTYTFEDVPFHSSYAHSQSLDRLMNPLIDQYLYYLSRTQTTGGTANTQTLGFSQGGPNTMANQAKNWLPGPCYRQQRVSTTTGQNNNSNFAWTAGTKYHLNGRNSLANPGIAMATHKDDKERFFPSNGILIFGKQNAARDNADYSDVMLTSEEEIKTTNPVATEEYGIVADNLQQQNTAPQIGTVNSQGALPGMVWQNRDVYLQGPIWAKIPHTDGNFHPSPLMGGFGLKHPPPQILIKNTPVPADPPTTFNQSKLNSFITQYSTGQVSVEIEWELQKENSKRWNPEIQYTSNYYKSTSVDFAVNTEGVYSEPHPIGTRYLTRPL

SEQ ID NO: 1062 - protein, 736 aa, Artificial Sequence
  source: /note="Description of Artificial Sequence: Synthetic polypeptide"
MAADGYLPDWLEDNLSEGIREWWALKPGAPKPKANQQKQDDGRGLVLPGYKYLGPFNGLDKGEPVNAADAAALEHDKAYDQQLKAGDNPYLKYNHADAEFQERLQGDTSFGGNLGRAVFQAKKRVLEPLGLVEEAAKTAPGKKRPVEQSPQEPDSSAGIGKSGAQPAKKRLNFGQTGDTESVPDPQPLGEPPAAPSGVGPNTMAAGGGAPMADNNEGADGVGSSSGNWHCDSQWLGDRVITTSTRTWALPTYNNHLYKQISSASTGASNDNHYFGYSTPWGYFDFNRFHCHFSPRDWQRLINNNWGFRPKRLNFKLFNIQVKEVTDNNGVKTIANNLTSTVQVFTDSEYQLPYVLGSAHQGCLPPFPADVFMIPQYGYLTLNNGSQAVGRSSFYCLEYFPSQMLRTGNNFTFSYTFEDVPFHSSYAHSQSLDRLMNPLIDQYLYYLSRTQTTGGTANTQTLGFSQGGPNTMANQAKNWLPGPCYRQQRVSTTTGQNNNSNFAWTAGTKYHLNGRNSLANPGIAMATHKDDKERFFPSNGILIFDKQNAARDNADYSDVMLTSEEEIKTTNPVATEEYGIVADNLQQQNTAPQIGTVNSQGALPGMVWQNRDVYLQGPIWAKIPHTDGNFHPSPLMGGFGLKHPPPQILIKNTPVPADPPTTFNQSKLNSFITQYSTGQVSVEIEWELQKENSKRWNPEIQYTSNYYKSTSVDFAVNTEGVYSEPHPIGTRYLTRPL

SEQ ID NO: 1063 - protein, 736 aa, Artificial Sequence
  source: /note="Description of Artificial Sequence: Synthetic polypeptide"
MAADGYLPDWLEDTLSEGIRQWWKLKPGPPPPKPAERHKDDSRGLVLPGYKYLGPFNGLDKGEPVNEADAAALEHDKAYDRQLDSGDNPYLKYNHADAEFQERLKEDTSFGGNLGRAVFQAKKRVLEPLGLVEEPVKTAPGKKRPVEHSPVEPDSSSGTGKAGQQPARKRLNFGQTGDSESVPDPQPLGEPPATPAAVGPNTMATGSGAPMADNNEGADGVGNSSGNWHCDSTWMGDRVITTSTRTWALPTYNNHLYKQISSASTGASNDNHYFGYSTPWGYFDFNRFHCHFSPRDWQRLINNNWGFRPKRLNFKLFNIQVKEVTDNNGVKTIANNLTSTIQVFTDSEYQLPYVLGSAHQGCLPPFPADVFMIPQYGYLTLNNGSQAVGRSSFYCLEYFPSQMLRTGNNFTFSYTFEDVPFHSSYAHSQSLDRLMNPLIDQYLYYLSRTQTTGGKANTQTLGFSQGGPNTMANQAKNWLPGPCYRQQRVSTTTGQNNNSNFAWTAGTKYHLNGRNSLANPGIAMATHKDDKERFFPSNGILIFGKQNAARDNADYSDVMLTSEEEIKTTNPVATEEYGIVADNLQQQNTAPQIGTVNSQGALPGMVWQNRDVYLQGPIWAKIPHTDGNFHPSPLMGGFGLKHPPPQILIKNTPVPADPPTTFNQSKLNSFITQYSTGQVSVEIEWELQKENSKRWNPEIQYTSNYYKSTSVDFAVNTEGVYSEPHPIGTRYLTRPL

SEQ ID NO: 1064 - protein, 736 aa, Artificial Sequence
  source: /note="Description of Artificial Sequence: Synthetic polypeptide"
MAADGYLPDWLEDNLSEGIREWWALKPGAPKPKANQQKQDDGRGLVLPGYKYLGPFNGLDKGEPVNAADAAALEHDKAYDQQLKAGDNPYLRYNHADAEFQERLQEDTSFGGNLGRAVFQAKKRVLEPFGLVEEGAKTAPGKKRPVEQSPQEPDSSSGIGKTGQQPAKKRLNFGQTGDSESVPDPQPLGEPPATPAAVGPTTMASGGGAPMADNNEGADGVGNASGNWHCDSTWLGDRVITTSTRTWALPTYNNHLYKQISSASTGASNDNHYFGYSTPWGYFDFNRFHCHFSPRDWQRLINNNWGFRPKRLNFKLFNIQVKEVTDNNGVKTIANNLTSTVQVFTDSEYQLPYVLGSAHQGCLPPFPADVFMIPQYGYLTLNNGSQAVGRSSFYCLEYFPSQMLRTGNNFTFSYTFEDVPFHSSYAHSQSLDRLMNPLIDQYLYYLSRTQTTGGTGNTQTLGFSQGGPNTMANQAKNWLPGPCYRQQRVSTTTGQNNNSNFAWTAGTKYHLNGRNSLANPGIAMATHKDDKERFFPSNGILIFGKQNAARDNADYSDVMLTSEEEIKTTNPVATEEYGIVADNLQQQNTAPQIGTVNSQGALPGMVWQNRDVYLQGPIWAKIPHTDGNFHPSPLMGGFGLKHPPPQILIKNTPVPADPPTTFNQSKLNSFITQYSTGQVSVEIEWELQKENSKRWNPEIQYTSNYYKSTSVDFAVNTEGVYSEPHPIGTRYLTRPL

SEQ ID NO: 1065 - protein, 736 aa, Artificial Sequence
  source: /note="Description of Artificial Sequence: Synthetic polypeptide"
MAADGYLPDWLEDNLSEGIREWWDLKPGAPKPKANQQKQDDGRGLVLPGYKYLGPFNGLDKGEPVNAADAAALEHDKAYDQQLKAGDNPYLRYNHADAEFQERLQEDTSFGGNLGRAVFQAKKRVLEPLGLVEEGAKTAPGKKRPVEQSPQEPDSSSGIGKTGQQPAKKRLNFGQTGDSESVPDPQPLGEPPATPAAVGPTTMASGGGAPMADNNEGADGVGSSSGNWHCDSTWLGDRVITTSTRTWALPTYNNHLYKQISSASTGASNDNHYFGYSTPWGYFDFNRFHCHFSPRDWQRLINNNWGFRPKRLNFKLFNIQVKEVTQNEGTKTIANNLTSTIQVFTDSEYQLPYVLGSAHQGCLPPFPADVFMIPQYGYLTLNNGSQAVGRSSFYCLEYFPSQMLRTGNNFTFSYTFEDVPFHSSYAHSQSLDRLMNPLIDQYLYYLSRTQTTGGTANTQTLGFSQGGPNTMANQAKNWLPGPCYRQQRVSTTTGQNNNSNFAWTAGTKYHLNGRNSLANPGIAMATHKDDKERFFPSNGILIFGKQNAARDNADYSDVMLTSEEEIKTTNPVATEEYGIVADNLQQQNTAPQIGTVNSQGALPGMVWQNRDVYLQGPIWAKIPHTDGNFHPSPLMGGFGLKHPPPQILIKNTPVPADPPTTFNQSKLNSFITQYSTGQVSVEIEWELQKENSKRWNPEIQYTSNYYKSTSVDFAVNTEGVYSEPHPIGTRYLTRPL

SEQ ID NO: 1066 - protein, 736 aa, Artificial Sequence
  source: /note="Description of Artificial Sequence: Synthetic polypeptide"
MAADGYLPDWLEDNLSEGIREWWALKPGAPKPKANQQKQDDGRGLVLPGYKYLGPFNGLDKGEPVNAADAAALEHDKAYDQQLKAGDNPYLRYNHADAEFQERLQEDTSFGGNLGRAVFQAKKRVLEPLGLVEEGAKTAPGKKRPVEQSPQEPDSSSGIGKTGQQPAKKRLNFGQTGDSESVPDPQPLGEPPATPAAVGPTTMAAGGGAPMADNNEGADGVGSSSGNWHCDSTWMGDRVITTSTRTWALPTYNNHLYKQISSASTGASNDNHYFGYSTPWGYFDFNRFHCHFSPRDWQRLINNNWGFRPKRLSFKLFNIQVKEVTQNEGTKTIANNLTSTIQVFTDSEYQLPYVLGSAHQGCLPPFPADVFMIPQYGYLTLNNGSQAVGRSSFYCLEYFPSQMLRTGNNFTFSYTFEDVPFHSSYAHSQSLDRLMNPLIDQYLYYLSRTQTTGGTANTQTLGFSQGGPNTMANQAKNWLQGPCYRQQRVSTTTGQNNNSNFAWTAGTKYHLNGRNSLANPGIAMATHKDDKERFFPSNGILIFGKQNAARDNADYSDVMLTSEEEIKTTNPVATEEYGIVADNLQQQNTAPQIGTVNSQGALPGMVWQNLDVYLQGPIWAKIPHTDGNFHPSPLMGGFGLKHPPPQILIKNTPVPADPPTTFNQSKLNSFITQYSTGQVSVEIEWELQKENSKRWNPEIQYTSNYYKSTSVDFAVNTEGVYSEPHPIGTRYLTRPL

SEQ ID NO: 1067 - protein, 737 aa, Artificial Sequence
  source: /note="Description of Artificial Sequence: Synthetic polypeptide"
MAADGYLPDWLEDNLSEGIREWWALKPGAPKPKANQQKQDDGRGLVLPGYKYLGPFNGLDKGEPVNAADAAALEHDKAYDQQLKAGDNPYLRYNHADAEFQERLQEDTSFGGNLGRAVFQAKKRVLEPLGLVEEGAKTAPGKKRPVEPSPQRSPDSSSGIGKTGQQPAKKRLNFGQTGDSESVPDPQPLGEPPATPAAVGPTTMASGGGAPMADNNEGADGVGNASGNWHCDSQWLGDRVITTSTRTWALPTYNNHLYKQISSASTGASNDNHYFGYSTPWGYFDFNRFHCHFSPRDWQRLINNNWGFRPKRLNFKLFNIQVKEVTDNNGVKTIANNLTSTVQVFTDSDYQLPYVLGSAHEGCLPPFPADVFMIPQYGYLTLNNGSQAVGRSSFYCLEYFPSQMLRTGNNFQFTYTFEDVPFHSSYAHSQSLDRLMNPLIDQYLYYLSRTQTTGGTANTQTLGFSQGGPNTMANQAKNWVPGPCYRQQRVSTATGQNNNSNFAWTAGTKYHLKGRNSLANPGIAMATHKDDKERFFPSNGILIFGKQNAARDNADYSDVMLTSEEEIKTTNPVATEEYGIVADNLQQQNTAPQIGTVNSQGALPGMVWQNRDVYLQGPIWAKIPHTDGNFHPSPLMGGFGLKHPPPQILIKNTPVPADPPTTFNQSKLNSFITQYSTGQVSVEIEWELQKENSKRWNPEIQYTSNYYKSTSVDFAVNTEGVYSEPHPIGTRYLTRPL

SEQ ID NO: 1068 - protein, 737 aa, Artificial Sequence
  source: /note="Description of Artificial Sequence: Synthetic polypeptide"
  MOD_RES (226)..(226): Any naturally occurring amino acid
  MOD_RES (233)..(233): Any naturally occurring amino acid
  MOD_RES (239)..(239): Any naturally occurring amino acid
  MOD_RES (250)..(250): Any naturally occurring amino acid
  MOD_RES (253)..(253): Any naturally occurring amino acid
  MOD_RES (255)..(255): Any naturally occurring amino acid
MAADGYLPDWLEDTLSEGIRQWWKLKPGPPPPKPAERHKDDSRGLVLPGYKYLGPFNGLDKGEPVNEADAAALEHDKAYDRQLDSGDNPYLKYNHADAEFQERLKEDTSFGGNLGRAVFQAKKRVLEPLGLVEEGAKTAPGKKRPVEQSPQEPDSSSGIGKTGQQPAKKRLNFGQTGDSESVPDPQPLGEPPATPSGVGPNTMAAGGGAPMADNNEGADGVGSSSXNWHCDSXWLGDRXITTSTRTWALXTYXNXLYKQISNSTSGGATNDNTYFGYSTPWGYFDFNRFHCHFSPRDWQRLINNNWGFRPKRLNFKLFNIQVKEVTQNEGTKTIANNLTSTIQVFTDSEYQLPYVLGSAHQGCLPPFPADVFMIPQYGYLTLNNGSQAVGRSSFYCLEYFPSQMLRTGNNFQFTYTFEDVPFHSSYAHSQSLDRLMNPLIDQYLYYLSRTQTTGGTANTQTLGFSQGGPNTMANQAKNWLPGPCYRQQRVSTTTGQNNNSNFAWTAGTKYHLNGRNSLANPGIAMATHKDDKERFFPSNGILIFGKQNAARDNADYSDVMLTSEEEIKTTNPVATEEYGIVADNLQQQNTAPQIGTVNSQGALPGMVWQNRDVYLQGPIWAKIPHTDGNFHPSPLMGGFGLKHPPPQILIKNTPVPADPPTTFSQAKLASFITQYSTGQVSVEIEWELQKENSKRWNPEVQYTSNYAKSANVDFTVDNNGLYTEPRPIGTRYLTRPL

SEQ ID NO: 1069 - protein, 737 aa, Artificial Sequence
  source: /note="Description of Artificial Sequence: Synthetic polypeptide"
MAADGYLPDWLEDNLSEGIREWWDLKPGAPKPKANQQKQDDGRGLVLPGYKYLGPFNGLDKGEPVNAADAAALEHDKAYDQQLKAGDNPYLRYNHADAEFQERLQEDTSFGGNLGRAVFQAKKRVLEPLGLVEEGAKTAPGKKRPVEPSPQRSPDSSTGIGKKGQQPAKKRLNFGQTGDSESVPDPQPIGEPPAGPSGVGSLTMASGGGAPVADNNEGADGVGSSSGNWHCDSQWLGDRVITTSTRTWALPTYNNHLYKQISSASTGASNDNHYFGYSTPWGYFDFNRFHCHFSPRDWQRLINNNWGFRPKRLNFKLFNIQVKEVTDNDGVKTIANNLTSTIQVFTDSEYQLPYVLGSAHQGCLPPFPADVFMIPQYGYLTLNNGSQAVGRSSFYCLEYFPSQMLRTGNNFTFSYTFEDVPFHSSYAHSQSLDRLMNPLIDQYLYYLSRTQTTGGTANTQTLGFSQGGPNTMANHAKNWLPGPCYRQQRVSTTTGQNNNSNFAWTAGTKYHLNGRNSLANPGIAMATHKDDKERFFPSNGILIFGKQNAARDNADYSDVMLTSEEEIKTTNPVATEEYGIVADNLQQQNTAPQIGTVNSQGALPGMVWQNRDVYLQGPIWAKIPHTDGNFHPSPLMGGFGLKHPPPQILIKNTPVPADPPTTFNQSKLNSFITQYSTGQVSVEIEWELQKENSKRWNPEIQYTSNYYKSTSVDFAVNTEGVYSEPHPIGTRYLTRPL

SEQ ID NO: 1070 - protein, 736 aa, Artificial Sequence
  source: /note="Description of Artificial Sequence: Synthetic polypeptide"
MAADGYLPDWLEDTLSEGIRQWWKLKPGPPPPKPAERHKDDSRGLVLPGYKYLGPFNGLDKGEPVNEADAAALEHDKAYDRQLDSGDNPYLKYNHADAEFQERLKEDTSFGGNLGRAVFQAKKRVLEPLGLVEEPVKTAPGKKRPVEHSPVEPDSSSGTGKAGQQPAKKRLNFGQTGDSESVPDPQPLGEPPATPAAVGPTTMASGGGAPMADNNEGADGVGNASGNWHCDSTWLGDRVITTSTRTWALPTYNNHLYKQISSASTGASNDNHYFGYSTPWGYFDFNRFHCHFSPRDWQRLINNNWGFRPKRLNFKLFNIQVKEVTQNEGTKTIANNLTSTIQVFTDSEYQLPYVLGSAHQGCLPPFPADVFMIPQYGYLTLNNGSQAVGRSSFYCLEYFPSQMLRTGNNFQFTYTFEDVPFHSSYAHSQSLDRLMNPLIDQYLYYLSRTQTTGGTANTQTLGFSQGGPNTMANQAKNWLPGPCYRQQRVSTTTGQNNNSNFAWTAGTKYHLNGRNSLANPGIAMATHKDDKERFFPSNGILIFGKQNAARDNADYSDVMLTSEEEIKTTNPVATEEYGIVADNLQQQNTAPQIGTVNSQGALPGMVWQNRDVYLQGPIWAKIPHTDGNFHPSPLMGGFGLKHPPPQILIKNTPVPADPPTTFNQSKLNSFITQYSTGQVSVEIEWELQKENSKRWNPEIQYTSNYYKSTSVDFAVNTEGVYSEPHPIGTRYLTRPL

SEQ ID NO: 1071 - protein, 736 aa, Artificial Sequence
  source: /note="Description of Artificial Sequence: Synthetic polypeptide"
MAADGYLPDWLEDNLSEGIREWWALKPGAPKPKANQQKQDDGRGLVLPGYKYLGPFNGLDKGEPVNAADAAALEHDKAYDQQLQAGDNPYLRYNHADAEFQERLQGDTSFGGNLGRAVFQAKKRVLEPLGLVEEGAKTAPGKKRPVEQSPQEPDSSSGIGKTGQQPAKKRLNFGQTGDSESVPDPQPLGEPPATPAAVGPTTMASGGGAPMADNNEGADGVGNASGNWHCDSTWLGDRVITTSTRTWALPTYNNHLYKQISSASTGASNDNHYFGYSTPWGYFDFNRFHCHFSPRDWQRLINNNWGFRPKRLNFKLFNIQVKEVTDNNGVKTIANNLTSTIQVFTDSEYQLPYVLGSAHQGCLPPFPADVFMIPQYGYLTLNNGSQAVGRSSFYCLEYFPSQMLRTGNNFQFTYTFEDVPFHSSYAHSQSLDRLMNPLIDQYLYYLSRTQTTGGTANTQTLGFSQGGPNTMANQAKNWLPGPCYRQQRVSTTTGQNNNSNFAWTAGTKYHLNGRNSLANPGIAMATHKDDKERFFPSNGILIFGKQNAARDNADYSDVMLTSEEEIKTTNPVATEEYGIVADNLQQQNTAPQIGTVNSQGALPGMVWQNRDVYLQGPIWAKIPHTDGNFHPSPLMGGFGLKHPPPQILIKNTPVPADPPTTFNQSKLNSFITQYSTGQVSVEIEWELQKENSKRWNPEIQYTSNYYKSTSVDFAVNTEGVYSEPHPIGTRYLTRPL

SEQ ID NO: 1072 - protein, 738 aa, Artificial Sequence
  source: /note="Description of Artificial Sequence: Synthetic polypeptide"
MAADGYLPDWLEDTLSEGIRQWWKLKPGPPPPKPAERHKDDSRGLVLPGYKYLGPFNGLDKGEPVNAADAAALEHDKAYDQQLKAGDNPYLRYNHADAEFQERLKEDTSFGGNLGRAVFQAKKRVLEPLGLVEEGAKTAPGKKRPVEPSPQRSPDSSTGIGKKGQQPARKRLNFGQTGDSESVPDPQPLGEPPAAPSGVGPNTMAAGGGAPMADNNEGADGVGSSSGNWHCDSQWLGDRVITTSTRTWALPTYNNHLYKQISNSTSGGSSNDNAYFGYSTPWGYFDFNRFHCHFSPRDWQRLINNNWGFRPKRLNFKLFNIQVKEVTDNNGVKTIANNLTSTVQVFTDSEYQLPYVLGSAHQGCLPPFPADVFMIPQYGYLTLNNGSQAVGRSSFYCLEYFPSQMLRTGNNFTFSYTFEDVPFHSSYAHSQSLDRLMNPLIDQYLYYLSRTQTTGGTANTQTLGFSQGGPNTMANQAKNWLPGPCYRQQRVSTTTGQNNNSNFAWTAGTKYHLNGRNSLANPGIAMATHKDDKERFFPSNGILIFGKQNAARDNADYSDVMLTSEEEIKTTNPVATEEYGIVADNLQQQNTAPQIGTVNSQGALPGMVWQNRDVYLQGPIWAKIPHTDGHFHPSPLMGGFGLKHPPPQILIKNTPVPANPPTTFNQSKLNSFITQYSTGQVSVEIEWELQKENSKRWNPEVQYTSNYAKSANVDFTVDNNGLYTEPRPIGTRYLTRPL

SEQ ID NO: 1073 - protein, 738 aa, Artificial Sequence; identical to SEQ ID NO: 1072
  source: /note="Description of Artificial Sequence: Synthetic polypeptide"

SEQ ID NO: 1074 - protein, 736 aa, Artificial Sequence
  source: /note="Description of Artificial Sequence: Synthetic polypeptide"
MAADGYLPDWLEDNLSEGIREWWALKPGAPKPKANQQKQDDGRGLVLPGYKYLGPFNGLDKGEPVNAADAAALEHDKAYDQQLKAGDNPYLRYNHADAEFQERLQEDTSFGGNLGRAVFQAKKRLLEPLGLVEEGAKTAPGKKRPVEQSPQEPDSSSGIGKTGQQPAKKRLNFGQTGDSESVPDPQPLGEPPATPAAVGPTTMASGGGAPMADNNEGADGVGNSSGNWHCDSTWMGDRVITTSTRTWALPTYNNHLYKQISSASTGASNDNHYFGYSTPWGYFDFNRFHCHFSPRDWQRLINNNWGFRPKRLNFKLFNIQVKEVTQNEGTKTIANNLTSTIQVFTDSEYQLPYVLGSAHQGCLPPFPADVFIIPQYGYLTLNNGSQAVGRSSFYCLEYFPSQMLRTGNNFTFSYTFEDVPFHSSYAHSQSLDRLMNPLIDQYLYYLSRTQTTGGTANTQTLGFSQGGPNTMANQAKNWLPGPCYRQQRVSTTTGQNNNSNFAWTAGTKYHLNGRNSLANPGIAMATHKDDKERFFPSNGILIFGKQNAARDNADYSDVMLTSEEEIKTTNPVATEEYGIVADNLQQQNTAPQIGTVNSQGALPGMVWQNRDVYLQGPIWAKIPHTDGNFHPSPLMGGFGLKHPPPQILIKNTPVPADPPTTFNQSKLNSFITQYSTGQVSVEIEWELQKENSKRWNPEIQYTSNYYKSTSVDFAVNTEGVYSEPHPIGTRYLTRPL

SEQ ID NO: 1075 - protein, 736 aa, Artificial Sequence
  source: /note="Description of Artificial Sequence: Synthetic polypeptide"
MAADGYLPDWLEDNLSEGIREWWALKPGAPKPKANQQKQDDGRGLVLPGYKYLGPFNGLDKGEPVNAADAAALEHDKAYDQQLKAGDNPYLRYNHADAEFQERLQEDTSFGGNLGRAVFQAKKRVLEPFGLVEEAAKTAPGKKRPVEQSPQEPDSSSGIGKTGQQPAKKRLNFGQTGDSESVPDPQPLGEPPATPAAVGPTTMASGGGAPMADNNEGADGVGNASGNWHCDSTWLGDRVITTSTRTWALPTYNNHLYKQISSASTGASNDNHYFGYSTPWGYFDFNRFHCHFSPRDWQRLINNNWGFRPKRLNFKLFNIQVKEVTQNEGTKTIANNLTSTIQVFTDSEYQLPYVLGSAHQGCLPPFPADVFMIPQYGYLTLNNGSQAVGRSSFYCLEYFPSQMLRTGNNFTFSYTFEDVPFHSSYAHSQSLDRLMNPLIDQYLYYLSRTQTTGGTANTQTLGFSQGGPNTMANHAKNWLPGPCYRQQRVSTTTGQNNNSNFAWTAGTKYHLNGRNSLANPGIAMATHKDDKERFFPSNGILIFGKQNAARDNADYSDVMLTSEEEIKTTNPVATEEYGIVADNLQQQNTAPQIGTVNSQGALPGMVWQNRDVYLQGPIWAKIPHTDGNFHPSPLMGGFGLKHPPPQILIKNTPVPADPPTTFNQSKLNSFITQYSTGQVSVEIEWELQKENSKRWNPEIQYTSNYYKSTSVDFAVNTEGVYSEPHPIGTRYLTRPL

SEQ ID NO: 1076 - protein, 736 aa, Artificial Sequence
  source: /note="Description of Artificial Sequence: Synthetic polypeptide"
MAADGYLPDWLEDNLSEGIREWWALKPGAPKPKANQQKQDDGRGLVLPGYKYLGPFNGLDKGEPVNEADAAALEHDKAYDQQLKAGDNPYLRYNHADAEFQERLQEDTSFGGNLGRAVFQAKKRLLEPLGLVEEAAKTAPGKKRPVEQSPQEPDSSAGIGKSGAQPAKKRLNFGQTGDSESVPDPQPLGEPPATPAAVGPTTMASGGGAPMADNNEGADGVGNASGNWHCDSTWLGDRVITTSTRTWALPTYNNHLYKQISSASTGASNDNHYFGYSTPWGYFDFNRFHCHFSPRDWQRLINNNWGFRPKRLNFKLFNIQVKEVTDNDGVKTIANNLTSTIQVFTDSEYQLPYVLGSAHQGCLPPFPADVFMIPQYGYLTLNNGSQAVGRSSFYCLEYFPSQMLRTGNNFQFTYTFEDVPFHSSYAHSQSLDRLMNPLIDQYLYYLSRTQTTGGTANTQTLGFSQGGPNTMANQAKNWLPGPCYRQQRVSTTTGQNNNSNFAWTAGTKYHLNGRNSLANPGIAMATHKDDKERFFPSNGILIFGKQNAARDNADYSDVMLTSEEEIKTTNPVATEEYGIVADNLQQQNTAPQIGTVNSQGALPGMVWQNRDVYLQGPIWAKIPHTDGNFHPSPLMGGFGLKHPPPQILIKNTPVPADPPTTFNQSKLNSFITQYSTGQVSVEIEWELQKENSKRWNPEIQYTSNYYKSTSVDFAVNTEGVYSEPHPIGTRYLTRPL

SEQ ID NO: 1077 - protein, 736 aa, Artificial Sequence
  source: /note="Description of Artificial Sequence: Synthetic polypeptide"
MAADGYLPDWLEDNLSEGIREWWALKPGAPKPKANQQKQDDGRGLVLPGYKYLGPFNGLDKGEPVNAADAAALEHDKAYDQQLKAGDNPYLRYNHADAEFQERLQEDTSFGGNLGRAVFQAKKRVLEPLGLVEEGAKTAPGKKRPVEQSPQEPDSSAGIGKTGAQPAKKRLNFGQTGDSESVPDPQPLGEPPATPAAVGPTTMASGGGAPMADNNEGADGVGSASGNWHCDSTWLGDRVITTSTRTWALPTYNNHLYKQISSASTGASNDNHYFGYSTPWGYFDFNRFHCHFSPRDWQRLINNNWGFRPKRLNFKLFNIQVKEVTDNNGVKTIANNLTSTIQVFTDSEYQLPYVLGSAHQGCLPPFPADVFMIPQYGYLTLNNGSQAVGRSSFYCLEYFPSQMLRTGNNFTFSYTFEDVPFHSSYAHSQSLDRLMNPLIDQYLYYLSRTQTTGGTANTQTLGFSQGGPNTMANQAKNWLPGPCYRQQRVSTTTGQNNNSNFAWTAGTKYHLNGRNSLANPGIAMATHKDDKERFFPSNGILIFGKQNAARDNADYSDVMLTSEEEIKTTNPVATEEYGIVADNLQQQNTAPQIGTVNSQGALPGMVWQNRDVYLQGPIWAKIPHTDGNFHPSPLMGGFGLKHPPPQILIKNTPVPADPPTTFNQSKLNSFITQYSTGQVSVEIEWELQKENSKRWNPEIQYTSNYYKSTSVDFAVNTEGVYSEPHPIGTRYLTRPL

SEQ ID NO: 1078 - protein, 736 aa, Artificial Sequence
  source: /note="Description of Artificial Sequence: Synthetic polypeptide"
MAADGYLPDWLEDNLSEGIREWWDLKPGAPKPKANQQKQDDGRGLVLPGYKYLGPFNGLDKGEPVNAADAAALEHDKAYDQQLKAGDNPYLRYNHADAEFQERLQEDTSFGGNLGRAVFQAKKRLLEPLGLVEEAAKTAPGKKRPVEQSPQEPDSSAGIGKSGAQPAKKRLNFGQTGDTESVPDPQPIGEPPAAPSGVGPNTMAAGGGAPMADNNEGADGVGSSSGNWHCDSQWLGDRVITTSTRTWALPTYNNHLYKQISSASTGASNDNHYFGYSTPWGYFDFNRFHCHFSPRDWQRLINNNWGFRPKRLNFKLFNIQVKEVTQNEGTKTIANNLTSTIQVFTDSEYQLPYVLGSAHQGCLPPFPADVFMIPQYGYLTLNNGSQAVGRSSFYCLEYFPSQMLRTGNNFQFTYTFEDVPFHSSYAHSQSLDRLMNPLIDQYLYYLSRTQTTGGTANTQTLGFSQGGPNTMANHAKNWLPGPCYRQQRVSTTTGQNNNSNFAWTAGTKYHLNGRNSLANPGIAMATHKDDKERFFPSNGILIFGKQNAARDNADYSDVMLTSEEEIKTTNPVATEEYGIVADNLQQQNTAPQIGTVNSQGALPGMVWQNRDVYLQGPIWAKIPHTDGNFHPSPLMGGFGLKHPPPQILIKNTPVPADPPTTFNQSKLNSFITQYSTGQVSVEIEWELQKENSKRWNPEIQYTSNYYKSTSVDFAVNTEGVYSEPHPIGTRYLTRPL

SEQ ID NO: 1079 - protein, 737 aa, Artificial Sequence; identical to SEQ ID NO: 1061
  source: /note="Description of Artificial Sequence: Synthetic polypeptide"

SEQ ID NO: 1080 - protein, 737 aa, Artificial Sequence
  source: /note="Description of Artificial Sequence: Synthetic polypeptide"
MAADGYLPDWLEDNLSEGIREWWALKPGAPKPKANQQKQDDGRGLVLPGYKYLGPFNGLDKGEPVNAADAAALEHDKAYDQQLKAGDNPYLRYNHADAEFQERLKEDTSFGGNLGRAVFQAKKRVLEPFGLVEEGAKTAPGKKRPVEQSPQEPDSSSGIGKTGQQPAKKRLNFGQTGDSESVPDPQPLGEPPAAPSGVGPNTMAAGGGAPMADNNEGADGVGSSSGNWHCDSQWLGNRVITTSTRTWALPTYNNHLYKQISNSTSGGSSNDNAYFGYSTPWGYFDFNRFHCHFSPRDWQRLINNNWGFRPKRLNFKLFNIQVKEVTDNNGVKTIANNLTSTVQVFTDSEYQLPYVLGSAHQGCLPPFPADVFMIPQYGYLTLNNGSQAVGRSSFYCLEYFPSQMLRTGNNFQFTYTFEDVPFHSSYAHSQSLDRLMNPLIDQYLYYLSRTQTTGGTANTQTLGFSQGGPNTMANQAKNWLPGPCYRQQRVSTTTGQNNNSNFAWTAGTKYHLNGRNSLANPGIAMATHKDDKERFFPSNGILIFGKQNAARDNADYSDVMLTSEEEIKTTNPVATEEYGIVADNLQQQNTAPQIGTVNSQGALPGMVWQNRDVYLQGPIWAKIPHTDGNFHPSPLMGGFGLKHPPPQILIKNTPVPADPPTTFNQSKLNSFITQYSTGQVSVEIEWELQKENSKRWNPEIQYTSNYYKSTSVDFAVNTEGVYSEPHPIGTRYLTRPL

SEQ ID NO: 1081 - protein, 736 aa, Artificial Sequence
  source: /note="Description of Artificial Sequence: Synthetic polypeptide"
MAADGYLPDWLEDNLSEGIREWWDLKPGAPKPKANQQKQDDGRGLVLPGYKYLGPFNGLDRGEPVNAADAAALEHDKAYDQQLKAGDNPYLRYNHADAEFQERLQEDTSFGGNLGRAVFQAKKRVLEPLGLVEEGAKTAPGKKRPVEQSPQEPDSSSGIGKTGQQPAKKRLNFGQTGDSESVPDPQPLGEPPATPAAVGPTTMASGGGAPMADNNEGADGVGNASGNWHCDSTWLGDRVITTSTRTWALPTYNNHLYKQISSASTGASNDNHYFGYSTPWGYFDFNRFHCHFSPRDWQRLINNNWGFRPKRLNFKLFNIQVKEVTDNNGVKTIANNLTSTIQVFTDSEYQLPYVLGSAHQGCLPPFPADVFMIPQYGYLTLNNGSQAVGRSSFYCLEYFPSQMLRTGNNFQFTYTFEDVPFHSSYAHSQSLDRLMNPLIDQYLYYLSRTQTTGGTANTQTLGFSQGGPNTMANQAKNWLPGPCYRQQRVSTTTGQNNNSNFAWTAGTKYHLNGRNSLANPGIAMATHKDDKERFFPSNGILIFGKQNAARDNADYSDVMLTSEEEIKTTNPVATEEYGIVADNLQQQNTAPQIGTVNSQGALPGMVWQNRDVYLQGPIWAKIPHTDGNFHPSPLMGGFGLKHPPPQILIKNTPVPADPPTTFNQSKLNSFITQYSTGQVSVEIEWELQKENSKRWNPEIQYTSNYYKSTSVDFAVNTEGVYSEPHPIGTRYLTRPL

SEQ ID NO: 1082 - protein, 736 aa, Artificial Sequence
  source: /note="Description of Artificial Sequence: Synthetic polypeptide"
MAADGYLPDWLEDNLSEGIREWWDLKPGAPKPKANQQKQDDGRGLVLPGYKYLGPFNGLDKGEPVNAADAAALEHDKAYDQQLKAGDNPYLRYNHADAEFQERLQEDTSFGGNLGRAVFQAKKRVLEPLGLVEEGAKTAPGKKRPVEQSPQEPDSSSGIGKKGQQPARKRLNFGQTGDSESVPDPQPLGEPPAAPSGVGSLTMASGGGAPMADNNEGADGVGNASGNWHCDSTWLGDRVITTSTRTWALPTYNNHLYKQISSASTGASNDNHYFGYSTPWGYFDFNRFHCHFSPRDWQRLINNNWGFRPKRLNFKLFNIQVKEVTQNEGTKTIANNLTSTVQVFTDSDYQLPYVLGSAHQGCLPPFPADVFMIPQYGYLTLNNGSQAVGRSSFYCLEYFPSQMLRTGNNFQFTYTFEDVPFHSSYAHSQSLDRLMNPLIDQYLYYLSRTQTTGGTANTQTLGFSQGGPNTMANQAKNWLPGPCYRQQRVSTTTGQNNNSNFAWTAGTKYHLNGRNSLSNPGIAMATHKDDKERFFPSNGILIFGKQNAARDNADYSDVMLTSEEEIKTTNPVATEEYGIVADNLQQQNTAPQIGTVNSQGALPGMVWQNRDMYLQGPIWAKIPHTDGNFHPSPLMGGFGLKHPPPQILIKNTPVPADPPTTFNQSKLNSFITQYSTGQVSVEIEWELQKENSKRWNPEIQYTSNYYKSTSVDFAVNTEGVYSEPHPIGTRYLTRPL

SEQ ID NO: 1083 - protein, 736 aa, Artificial Sequence
  source: /note="Description of Artificial Sequence: Synthetic polypeptide"
MAADGYLPDWLEDNLSEGIREWWALKPGAPKPKANQQKQDDGRGLVLPGYKYLGPFNGLDKGEPVNAADAAALEHDKAYDQQLKAGDNPYLRYNHADAEFQERLQEDTSFGGNLGRAVFQAKKRVLEPFGLVEEGAKTAPGKKRPVEQSPQEPDSSSGIGKTGQQPAKKRLNFGQTGGSESVPDPQPLGEPPATPAAVGPTTMAAGGGAPMADNNEGADGVGSSSGNWHCDSTWLGDRVITTSTRTWALPTYNNHLYKQISSASTGASNDNHYFGYSTPWGYFDFNRFHCHFSPRDWQRLINNNWGFRPKRLNFKLFNIQVKEVTDNNGVKTIANNLTSTVQVFTDSEYQLPYVLGSAHQGCLPPFPADVFMIPQYGYLTLNNGSQAVGRSSFYCLEYFPSQMLRTGNNFTFSYTFEEVPFHSSYAHSQSLDRLMNPLIDQYLYYLSRTQTTGGTANTQTLGFSQGGPNTMANQAKNWLPGPCYRQQRVSTTTGQNNNSNFAWTAGTKYHLNGRNSLANPGIAMASHKDDKERFFPSNGILIFGKQNAARDNADYSDVMLTSEEEIKTTNPVATEEYGIVADNLQQQNTAPQIGTVNSQGALPGMVWQNRDVYLQGPIWAKIPHTDGNFHPSPLMGGFGLKHPPPQILIKNTPVPADPPTTFNQSKLNSFITQYSTGQVSVEIEWELQKENSKRWNPEIQYTSNYYKSTSVDFAVNTEGVYSEPHPIGTRYLTRPL

SEQ ID NO: 1084 - DNA, 2211 bp, Artificial Sequence
  source: /note="Description of Artificial Sequence: Synthetic polynucleotide"
atggctgccgatggttatcttccagattggctcgaggacaacctctctgagggcattcgcgagtggtgggacttgaaacctgcatccccgaaacccaaagccaaccagcaaaagcaggacgacggccggggtctggtgcttcctggctacaagtacctcggacccttcaacggactcgacaagggggagcccgtcaacgcggcggacgcagcggccctcgagcacgacaaggcctacgaccagcagctcaaagcgggtgacaatccgtacctgcggtataaccacgccgacgccgagtttcaggagcgtctgcaagaagatacgtcttttgggggcaacctcgggcgagcagtcttccaggccaaaaagaggcttcttgaacctcttggtctggttgaggaagcggctaagacggctcctggaaagaagaggcctgtagagcagtctcctcaggaaccggactcctccgcgggtattggcaaatcgggtgcacagcccgccaaaaagagactcaatttcggtcagactggcggcacagagtcagttccagaccctcaacctctcggagaacctccagcagcgccctctggtgtgggacctaatacaatggctgcaggcggtggcgcaccaatggcagacaataacgaaggcgccgacggagtgggtagttcctcgggaaattggcattgcgattccacatggctgggcgacagagtcatcaccaccagcaccagaacctgggccctgcccacttacaacaaccatctctacaagcaaatctccagtgcttcaacgggggccagcaacgacaaccactacttcggctacagcaccccctgggggtattttgatttcaacagattccactgccacttctcaccacgtgactggcagcgactcatcaacaacaactggggattccggcccaagagactcagcttcaagctcttcaacatccaggtcaaggaggtcacgcagaatgaaggcaccaagaccatcgccaataacctcaccagcaccatccaggtgtttacggactcggagtaccagctgccgtacgttctcggctctgcccaccagggctgcctgcctccgttcccggcggacgtgttcatgattccccagtacggatacctaacactcaacaacggtagtcaggccgtgggacgctcctccttctactgcctggaatactttccttcgcagatgctgagaaccggcaacaacttccagtttacttacaccttcgaggacgtgcctttccacagcagctacgcccacagccagagcttggaccggctgatgaatcctctgattgaccagtacctgtactacttgtctcggactcaaacaacaggaggcacggcaaatacgcagactctgggcttcagccaaggtgggcctaatacaatggccaatcaggcaaagaactggctgccaggaccctgttaccgccaacaacgcgtctcaacgacaaccgggcaaaacaacaatagcaactttgcctggactgctgggaccaaataccatctgaatggaagaaattcattggctaatcctggcatcgctatggcaacacacaaagacgacaaggagcgtttttttcccagtaacgggatcctgatttttggcaaacaaaatgctgccagagacaatgcggattacagcgatgtcatgctcaccagcgaggaagaaatcaaaaccactaaccctgtggctacagaggaatacggtatcgtggcagataacttgcagcagcaaaacacggctcctcaaattggaactgtcaacagccagggggccttacccggtatggtctggcagaaccgggacgtgtacctgcagggtcccatctgggccaagattcctcacacggacggcaacttccacccgtctccgctgatgggcggctttggcctgaaacatcctccgcctcagatcctgatcaagaacacgcctgtacctgcggatcctccgaccaccttcaaccagtcaaagctgaactctttcatcacgcaatacagcaccggacaggtcagcgtggaaattgaatgggagctgcagaaggaaaacagcaagcgctggaaccccgagatccagtacacctccaactactacaaatctacaagtgtggactttgctgttaatacagaaggcgtgtactctgaaccccaccccattggcacccgttacctcacccgtcccctgtaa

SEQ ID NO: 1085 - DNA, 2211 bp, Artificial Sequence
  source: /note="Description of Artificial Sequence: Synthetic polynucleotide"
atggctgccgatggttatcttccagattggctcgaggacaacctctctgagggcattcgcgagtggtgggacttgaaacctggagccccgaaacccaaagccaaccagcaaaagcaggacgacggccggggtctggtgcttcctggctacaagtacctcggacccttcaacggactcgacaagggggagcccgtcaacgcggcggacgcagcggccctcgagcacgacaaggcctacgaccagcagctcaaagcgggtgacaatccgtacctgcggtataaccacgccgacgccgagtttcaggagcgtctgcaagaagatacgtcttttgggggcaacctcgggcgagcagtcttccaggccaagaagagggttctcgaaccttttggtctggttgaggaaggcgctaagacggctcctggaaagaaacgtccggtagagcagtcgccacaagagccagactcctcctcgggcattggcaagacaggccagcagcccgctaaaaagagactcaattttggtcagactggcgactcagagtcagtccccgacccacaacctctcggagaacctccagcaacccccgctgctgtgggacctactacaatggcttcaggtggtggcgcaccaatggcagacaataacgaaggcgccgacggagtgggtaatgcctcaggaaattggcattgcgattcccaatggctgggggacagagtcatcaccaccagcacccgaacctgggccctgcccacctacaacaatcacctctacaagcaaatctccagtgcttcaacgggggccagcaacgacaaccactacttcggctacagcaccccctgggggtattttgatttcaacagattccactgccatttctcaccacgtgactggcagcgactcatcaacaacaattggggattccggcccaagagactcaacttcaaactcttcaacatccaagtcaaggaggtcacgcagaatgaaggcaccaagaccatcgccaataacctcaccagcaccatccaggtgtttacggactcggagtaccagctgccgtacgttctcggctccgcccaccagggctgcctgcctccgttcccggcggacgtgttcatgattccccagtacggctacctaacactcaacaacggtagtcaggccgtgggacgctcctccttctactgcctggaatactttccttcgcagatgctgagaaccggcaacaacttccagtttacttacaccttcgaggacgtgcctttccacagcagctacgcccacagccagagcttggaccggctgatgaatcctctgattgaccagtacctgtactacttgtctcggactcaaacaacaggaggcacggcaaatacgcagactctgggcttcagccaaggtgggcctaatacaatggccaatcaggcaaagaactggctgccaggaccctgttaccgccaacaacgcgtctcaacgacaaccgggcaaaacaacaatagcaactttgcctggactgctgggaccaaataccatctgaatggaagaaattcattggctaatcctggcatcgctatggcaacacacaaagacgacaaggagcgtttttttcccagtaacgggatcctgatttttggcaaacaaaatgctgccagagacaatgcggattacagcgatgtcatgctcaccagcgaggaagaaatcaaaaccactaaccctgtggctacagaggaatacggtatcgtggcagataacttgcagcagcaaaacacggctcctcaaattggaactgtcaacagccagggggccttacccggtatggtctggcagaaccgggacgtgtacctgcagggtcccatctgggccaagattcctcacacggacggcaacttccacccgtctccgctgatgggcggctttggcctgaaacatcctccgcctcagatcctgatcaagaacacgcctgtacctgcggatcctccgaccaccttcaaccagtcaaagctgaactctttcatcacgcaatacagcaccggacaggtcagcgtggaaattgaatgggagctgcagaaggaaaacagcaagcgctggaaccccgagatccagtacacctccaactactacaaatctacaagtgtggactttgctgttaatacagaaggcgtgtactctgaaccccaccccattggcacccgttacctcacccgtcccctgtaa

SEQ ID NO: 1086 - DNA, 2211 bp, Artificial Sequence
  source: /note="Description of Artificial Sequence: Synthetic polynucleotide"
atggctgccgatggttatcttccagattggctcgaggacaacctctctgagggcattcgcgagtggtgggacttggaacctggagccccgaagcccaaagccaaccagcaaaagcaggacgacggccggggtctggtgcttcctggctacaagtacctcggacccttcaacggactcgacaagggggagcccgtcaacgcggcggacgcagcggccctcgagcacgacaaggcctacgaccagcagctcaaagcgggtgacaatccgtacctgcggtataaccacgccgacgccgagtttcaggagcgtctgcaagaagatacgtcttttgggggcaacctcgggcgagcagtcttccaggccaagaagcgggttctcgaacctctcggtctggttgaggaaggcgctaagacggctcctggaaagaaacgtccggtagagcagtcgccacaagagccagactcctcctcgggcatcggcaagacaggccagcagcccgctaaaaagagactcaattttggtcagactggcgactcagagtcagtccccgatccacaacctctcggagaacctccagcaacccccgctgctgtgggacctactacaatggcttcaggcggtggcgcaccaatggcagacaataacgaaggcgccgacggagtgggtaatgcctcaggaaattggcattgcgattccacatggctgggcgacagagtcatcaccaccagcacccgcacctgggccttgcccacctacaataaccacctctacaagcaaatctccagtgcttcaacaggggccagcaacgacaaccactacttcggctacagcaccccctgggggtattttgacttcaacagattccactgccacttctcaccacgtgactggcagcgactcatcaacaacaactggggattccggcctaagcgactcaacttcaagctcttcaacattcaggtcaaagaggttacggacaacaatggagtcaagaccatcgccaataaccttaccagcacggtccaggtcttcacggactcggagtaccagttgccgtacgtcctcggctctgcgcaccagggctgcctccctccgttcccggcggacgtgttcatgattccgcagtacggctacctaacgctcaacaacggtagtcaggccgtgggacgctcctccttctactgcctggaatactttccttcgcagatgctgagaaccggcaacaacttccagtttacttacaccttcgaggacgtgcctttccacagcagctacgcccacagccagagcttggaccggctgatgaatcctctgattgaccagtacctgtactacttgtctcggactcaaacaacaggaggcacggcaaatacgcagactctgggcttcagccaaggtgggcctaatacaatggccaatcaggcaaagaactggctgccaggaccctgttaccgccaacaacgcgtctcaacgacaaccgggcaaaacaacaatagcaactttgcctggactgctgggaccaaataccatctgaatggaagaaattcattggctaatcctggcatcgctatggcaacacacaaagacgacaaggagcgtttttttcccagtaacgggatcctgatttttggcaaacaaaatgctgccagagacaatgcggattacagcgatgtcatgctcaccagcgaggaagaaatcaaaaccactaaccctgtggctacagaggaatacggtatcgtggcagataacttgcagcagcaaaacacggctcctcaaattggaactgtcaacagccagggggccttacccggtatggtctggcagaaccgggacgtgtacctgcagggtcccatctgggccaagattcctcacacggacggcaacttccacccgtctccgctgatgggcggctttggcctgaaacatcctccgcctcagatcctgatcaagaacacgcctgtacctgcggatcctccgaccaccttcaaccagtcaaagctgaactctttcatcacgcaatacagcaccggacaggtcagcgtggaaattgaatgggagctgcagaaggaaaacagcaagcgctggaaccccgagatccagtacacctccaactactacaaatctacaagtgtggactttgctgttaatacagaaggcgtgtactctgaaccccaccccattggcacccgttacctcacccgtcccctgtaa

SEQ ID NO: 1087 - DNA, 2211 bp, Artificial Sequence
  source: /note="Description of Artificial Sequence: Synthetic polynucleotide"
atggctgccgatggttatcttccagattggctcgaggacactctctctgaaggaataagacagtggtggaagctcaaacctggcccaccaccaccaaagcccgcagagcggcataaggacgacagcaggggtcttgtgcttcctgggtacaagtacctcggacccttcaacggactcgacaagggagagccggtcaacgaggcagacgccgcggccctcgagcacgacaaagcctacgaccggcagctcgacagcggagacaacccgtacctcaagtacaaccacgccgacgcggagtttcaggagcgccttaaagaagatacgtcttttgggggcaacctcgggcgagcagtcttccaggccaagaagagggttctcgaaccttttggtctggttgaggaaggtgctaagacggctcctggaaagaaacgtccggtagagcagtcgccacaagagccagactcctcctcgggcattggcaagacaggccagcagcccgctaaaaagagactcaattttggtcagactggcgactcagagtcagtccccgacccacaacctctcggagaacctccagcaacccccgctgctgtgggacctactacaatggcttcaggcggtggcgcaccaatggcagacaataacgaaggcgccgacggagtgggtaatgcctcaggaaattggcattgcgattccacatggctgggcgacagagtcatcaccaccagcacccgaacatgggccttgcccacctataacaaccacctctacaagcaaatctccagtgcttcaacgggggccagcaacgacaaccactacttcggctacagcaccccctgggggtattttgacttcaacagattccactgccacttctcaccacgtgactggcagcgactcatcaacaacaactggggattccggcctaagcgactcaacttcaagctcttcaacattcaggtcaaagaggttacggacaacaatggagtcaagaccatcgccaataaccttaccagcacggtccaggtcttcacggactcagactatcagctcccgtacgtgctcgggtcggctcacgagggctgcctcccgccgttcccagcggacgttttcatgattcctcagtacggctacctaacactcaacaacggtagtcaggccgtgggacgctcctccttctactgcctggaatactttccttcgcagatgctgagaaccggcaacaacttccagtttacttacaccttcgaggacgtgcctttccacagcagctacgcgcacagccagagtctggaccggctgatgaatcctctgattgaccagtacctgtactacttgtctcggactcaaacaacaggaggcacggcaaatacgcagactctgggcttcagccaaggtgggcctaatacaatggccaatcaggcaaagaactggctgccaggaccctgttaccgccaacaacgcgtctcaacgacaaccgggcaaaacaacaatagcaactttgcctggactgctgggaccaaataccatctgaatggaagaaattcattggctaatcctggcatcgctatggcaacacacaaagacgacaaggagcgtttttttcccagtaacgggatcctgattttcggcaaacaaaatgctgccagagacaatgcggattacagcgatgtcatgctcaccagcgaggaagaaatcaaaaccactaaccctgtggctacagaggaatacggtatcgtggcagataacttgcagcagcaaaacacggctcctcaaattggaactgtcaacagccagggggccttacccggtatggtctggcagaaccgggacgtgtacctgcagggtcccatctgggccaagattcctcacacggacggcaacttccacccgtctccgctgatgggcggctttggcctgaaacatcctccgcctcagatcctgatcaagaacacgcctgtacctgcggatcctccgaccaccttcaaccagtcaaagctgaactctttcatcacgcaatacagcaccggacaggtcagcgtggaaattgaatgggagctgcagaaggaaaacagcaagcgctggaaccccgagatccagtacacctccaactactacaaatctacaagtgtggactttgctgttaatacagaaggcgtgtactctgaaccccaccccattggcaccagatacctgactcgtaatctgtaa

SEQ ID NO: 1088 - DNA, 2208 bp, Artificial Sequence
  source: /note="Description of Artificial Sequence: Synthetic polynucleotide"
atggctgccgatggttatcttccagattggctcgaggacactctctctgaaggaataagacagtggtggaagctcaaacctggcccaccaccaccaaagcccgcagagcggcataaggacgacagcaggggtcttgtgcttcctgggtacaagtacctcggacccttcaacggactcgacaagggagagccggtcaacgaggcagacgccgcggccctcgagcacgacaaagcctacgaccggcagctcgacagcggagacaacccgtacctcaagtacaaccacgccgacgcggagtttcaggagcgccttaaagaagatacgtcttttgggggcaacctcggacgagcagtcttccaggcgaaaaagagggttcttgaacctctgggcctggttgaggaacctgttaagacggctccgggaaaaaagaggccggtagagcagtcgccacaagagccagactcctcctcgggcatcggcaagaaaggccagcagcccgctaaaaagagactcaattttggtcagactggcgactcagagtcagtccccgacccacaacctctcggagaacctccagcaacccccgctgctgtgggacctactacaatggcttcaggcggtggcgcaccaatggcggacaataacgaaggcgccgatggagtgggtaatgcctcaggaaattggcattgcgattccacatggctgggcgacagagtcatcaccaccagcacccgaacatgggccttgcccacctataacaaccacctctacaagcaaatctccagtgcttcaacgggggccagcaacgacaaccactacttcggctacagcaccccctgggggtattttgacttcaacagattccactgccacttctcaccacgtgactggcagcgactcatcaacaacaactggggattccggcctaagcgactcaacttcaagctcttcaacattcaggtcaaagaggttacggacaacaatggagtcaagaccatcgccaataaccttaccagcacggtccaggtcttcacggactcagactatcagctcccgtacgttctcggctctgcccaccagggctgcctgcctccgttcccggcggacgtgttcatgattccccagtacggctacctaacactcaacaacggtagtcaggccgtgggacgctcctccttctactgcctggaatactttccttcgcagatgctgagaaccggcaacaacttccagtttacttacaccttcgaggacgtgcctttccacagcagctacgcccacagccagagcttggaccggctgatgaatcctctgattgaccagtacctgtactacttgtctcggactcaaacaacaggaggcacggcaaatacgcagactctgggcttcagccaaggtgggcctaatacaatggccaatcaggcaaagaactggctgccaggaccctgttaccgccaacaacgcgtctcaacgacaaccgggcaaaacaacaatagcaactttgcctggactgctgggaccaaataccatctgaatggaagaaattcattggctaatcctggcatcgctatggcaacacacaaagacgacaaggagcgtttttttcccagtaacgggatcctgatttttggcaaacaaaatgctgccagagacaatgcggattacagcgatgtcatgctcaccagcgaggaagaaatcaaaaccactaaccctgtggctacagaggaatacggtatcgtggcagataacttgcagcagcaaaacacggctcctcaaattggaactgtcaacagccagggggccttacccggtatggtctggcagaaccgggacgtgtacctgcagggtcccatctgggccaagattcctcacacggacggcaacttccacccgtctccgctgatgggcggctttggcctgaaacatcctccgcctcagatcctgatcaagaacacgcctgtacctgcggatcctccgaccaccttcaaccagtcaaagctgaactctttcatcacgcaatacagcaccggacaggtcagcgtggaaattgaatgggagctgcagaaggaaaacagcaagcgctggaaccccgagatccagtacacctccaactactacaaatctacaagtgtggactttgctgttaatacagaaggcgtgtactctgaaccccaccccattggcacccgttacctcacccgtcccctg

SEQ ID NO: 1089 - DNA, 2211 bp, Artificial Sequence
  source: /note="Description of Artificial Sequence: Synthetic polynucleotide"
atggctgccgatggttatcttccagattggctcgaggacactctctctgaaggaataagacagtggtggaagctcaaacctggcccaccaccaccaaagcccgcagagcggcataaggacgacagcaggggtcttgtgcttcctgggtacaagtacctcggacccttcaacggactcgacaagggagagccggtcaacgaggcagacgccgcggccctcgagcacgacaaagcctacgaccagcagctccaagcgggtgacaatccgtacctgcggtataaccacgccgacgccgagtttcaggagcgtcttcaaggagatacgtcttttgggggcaacctcggacgagcagtcttccaggccaaaaagaggcttcttgaacctcttggtctggttgaggaagcggctaagacggctcctggaaagaagaggcctgtagagcagtctcctcaggaaccggactcctccgcgggtattggcaaatcgggtgcacagcccgctaaaaagagactcaatttcggtcagactggcgacacagagtcagtcccagaccctcaaccaatcggagaacctcccgcagccccctcaggtgtgggatctcttacaatggcttcaggtggtggcgcaccagtggcagacaataacgaaggtgccgatggagtgggtagttcctcgggaaattggcattgcgattcccaatggctgggggacagagtcatcaccaccagcacccgaacatgggccttgcccacctataacaaccacctctacaagcaaatctccagtgcttcaacgggggccagcaacgacaaccactacttcggctacagcaccccctgggggtattttgacttcaaccgcttccactgccacttctcaccacgtgactggcagcgactcatcaacaacaactggggattccggcccaagagactcagcttcaagctcttcaaccatccaggtcaaggaggtcacgcagaatgaaggcaccaagaccatcgccaataacctcaccagcacatccaggtgtttacggactcggagtaccagctgccgtacgttctcggctctgcccaccagggctgcctgcctccgttcccggcggacgtgttcatgattccccagtacggctacctaacactcaacaacggtagtcaggccgtgggacgctcctccttctactgcctggaatactttccttcgcagatgctgagaaccggcaacaacttccagttcacttacaccttcgaggacgtgcctttccacagcagctacgcgcacagccagagcttggaccggctgatgaatcctctgattgaccagtacctgtactacttgtctcggactcaaacaacaggaggcacggcaaatacgcagactctgggcttcagccaaggtgggcctaatacaatggccaatcaggcaaagaactggctgccaggaccctgttaccgccaacaacgcgtctcaacgacaaccgggcaaaacaacaatagcaactttgcctggactgctgggaccaaataccatctgaatggaagaaattcattgggtaatcctggcatcgctatggcaacacacaaagacgacaaggagcgtttttttcccagtaacgggatcctgatttttggcaaacaaaatgctgccagagacaatgcggattacagcgatgtcatgctcaccagcgaggaagaaatcaaaaccactaaccctgtggctacagaggaatacggtatcgtggcagataacttgcagcagcaaaacacggctcctcaaattggaactgtcaacagccagggggccttacccggtatggtctggcagaaccgggacgtgtacctgcagggtcccatctgggccaagattcctcacacggacggcaacttccacccgtctccgctgatgggcggctttggcctgaaacatcctccgcctcagatcctcatcaaaaacacacctgtacctgcggatcctccaacggccttcaaccagtcaaagctgaactctttcatcacgcaatacagcaccggacaggtcagcgtggaaattgaatgggagctgcagaaggaaaacagcaagcgctggaaccccgagatccagtacacctccaactactacaaatctacaagtgtggactttgctgttaatacagaaggcgtgtactctgaaccccaccccattggcacccgttacctcacccgtcccctgtaa

SEQ ID NO: 1090 - DNA, 2214 bp, Artificial Sequence
  source: /note="Description of Artificial Sequence: Synthetic polynucleotide"
atggctgccgatggttatcttccagattggctcgaggacaacctctctgagggcattcgcgagtggtgggacttgaaacatggagccccgaaacccaaagccaaccagcaaaagcaggacgacggccggggtctggtgcttcctggctacaagtacctcggacccttcaacggactcgacaagggggagcccgtcaacgcggcggatgcagcggccctcgagcacgacaaggcctacgaccagcagctcaaagcgggtgacaatccgtacctgcggtataaccacgccgacgccgagtttcaggagcgtctgcaagaagatacgtcttttgggggcaacctcgggcgagcagtcttccaggccaagaagagggttctcgaaccttttggtctggttgaggaaggtgctaagacggctcctggaaagaaacgtccggtagagcagtcgccacaagagccagactcctcctcgggcattggcaagacaggccagcagcccgctaaaaagagactcaattttggtcagactggcgactcagagtcagtccccgacccacaacctctcggagaacctccagcaacccccgctgctgtgggacctactacaatggcttcaggcggtggcgcaccaatggcagacaataacgaaggcgccgacggagtgggtaatgcctcaggaaattggcattgcgattccacatggctgggcgacagagtcatcaccaccagcacccgaacatgggccttgcccacctataacaaccacctctacaagcaaatctccaacgggacttcgggaggaagcaccaacgacaacacctacttcggctacagcaccccctgggggtattttgactttaacagattccactgccacttctcaccacgtgactggcagcgactcatcaacaacaactggggattccggcccaagagactcaacttcaaactcttcaacatccaagtcaaggaggtcacgcagaatgaaggcaccaagaccatcgccaataacctcaccagcaccatccaggtgtttacggactcggagtaccagctgccgtacgttctcggctccgcccaccagggctgcctgcctccgttcccggcggacgtgttcatgattccccagtacggctacctaacactcaacaacggtagtcaggccgtgggacgctcctccttctactgcctggaatactttccttcgcagatgctgagaacgggcaacaactttaccttcagctacacctttgaggacgttcctttccacagcagctacgctcacagccagagtctggaccgtctcatgaatcctctgattgaccagtacctgtactacttgtctcggactcaaacaacaggaggcacggcaaatacgcagactctgggcttcagccaaggtgggcctaatacaatggccaatcaggcaaagaactggctgccaggaccctgttaccgccaacaacgcgtctcaacgacaaccgggcaaaacaacaatagcaactttgcctggactgctgggaccaaataccatctgaatggaagaaattcattggctaatcctggcatcgctatggcaacacacaaagacgacaaggagcgtttttttcccagtaacgggatcctgatttttggcaaacaaaatgctgccagagacaatgcggattacagcgatgtcatgctcaccagcgaggaagaaatcaaaaccactaaccctgtggctacagaggaatacggtatcgtggcagataacttgcagcagcaaaacacggctcctcaaattggaactgtcaacagccagggggccttacccggtatggtctggcagaaccgggacgtgtacctgcagggtcccatctgggccaagattcctcacacggacggcaacttccacccgtctccgctgatgggcggctttggcctgaaacatcctccgcctcagatcctgatcaagaacacgcctgtacctgcggatcctccgaccaccttcaaccagtcaaagctgaactctttcatcacgcaatacagcaccggacaggtcagcgtggaaattgaatgggagctgcagaaggaaaacagcaagcgctggaaccccgagatccagtacacctccaactactacaaatctacaagtgtggactttgctgttaatacagaaggcgtgtactctgatccccaccccattggcacccgttacctcacccgtcccctgtaa

SEQ ID NO: 1091 - DNA, 2214 bp, Artificial Sequence
  source: /note="Description of Artificial Sequence: Synthetic polynucleotide"
atggctgccgatggttatcttccagattggctcgaggacaacctctctgagggcattcgcgagtggtgggcgctgaaacctggagccccgaagcccaaagccaaccagcaaaagcaggacgacggccggggtctggtgcttcctggctacaagtacctcggacccttcaacggactcgacaaaggagagccggtcaacgaggcggacgcggcagccctcgaacacgacaaggcctacgaccagcagctcaaagcgggtgacaatccgtacctgcggtataaccacgccgacgccgagtttcaggagcgtctgcaagaagatacgtcttttgggggcaacctcgggcgagcagtcttccaggccaagaagcgggttctcgaacctctcggtctggttgaggaaggcgctaagacggctcctggaaagaagagaccggtagagccatcaccccagcgttctccagactcctctacgggcatcggcaagaaaggccagcagcccgccagaaaaagactcaattttggtcagactggcgactcagagtcagttccagaccctcaacctctcggagaacctccagcagcgccctctggtgtgggacctaatacaatggcttcaggcggtggcgcaccaatggcagacaataacgagggcgccgacggagtgggtaattcctcgggaaattggcattgcgattccacatggatgggcgacagagtcatcaccaccagcacccgaacctgggccctgcccacctacaacaaccacctctacaagcaaatctccagtgcttcaacgggggccagcaacgacaaccactacttcggctacagcaccccctgggggtattttgactttaacagattccactgccacttttcaccacgtgactggcagcgactcatcaacaacaactggggattccggcccaagagactcaacttcaagctcttcaacatccaagtcaaggaggtcacgcagaatgaaggcaccaagaccatcgccaataacctcaccagcaccatccaggtgtttacggactcggagtaccagctgccgtacgttctcggctctgcccaccagggctgcctgcctccgttcccggcggacgtgttcatgattccccagtacggctacctaacactcaacaacggtagtcaggccgtgggacgctcctccttctactgcctggaatactttccttcgcagatgctgagaaccggcaacaacttccagtttacttacaccttcgaggacgtgcctttccacagcagctacgcgcacagccagagcttggaccggctgatgaatcctctgattgaccagtacctgtactacttgtctcggactcaaacaacaggaggcacggcaaatacgcagactctgggcttcagccaaggtgggcctaatacaatggccaatcaggcaaagaactggctgccaggaccctgttaccgccaacaacgcgtctcaacgacaaccgggcaaaacaacaatagcaactttgcctggactgctgggaccaaataccatctgaatggaagaaattcattggctaatcctggcatcgctatggcaacacacaaagacgacaaggagcgtttttttcccagtaacgggatcctgatttttggcaaacaaaatgctgccagagacaatgcggattacagcgatgtcatgctcaccagcgaggaagaaatcaaaaccactaaccctgtggctacagaggaatacggtatcgtggcagataacttgcagcagcaaaacacggctcctcaaattggaactgtcaacagccagggggccttacccggtatggtctggcagaaccgggacgtgtacctgcagggtcccatctgggccaagattcctcacacggacggcaacttccacccgtctccgctgatgggcggctttggcctgaaacatcctccgcctcagatcctgatcaagaacacgcctgtacctgcggatcctccgaccaccttcaaccagtcaaagctgaactctttcatcacacaatacagcaccggacaggtcagcgtggaaattgaatgggagctgcagaaggaaaacagcaagcgctggaaccccgagatccagtacacctccaactactacaaatctacaagtgtggactttgctgttaatacagaaggcgtgtactctgaaccccaccccattggcacccgttacctcacccgtcccctgtaa

SEQ ID NO: 1092 - DNA, 2211 bp, Artificial Sequence
  source: /note="Description of Artificial Sequence: Synthetic polynucleotide"
  modified_base (676)..(676): a, c, g or t
atggctgccgatggttatcttccagattggctcgaggacactctctctgaaggaataagacagtggtggaagctcaaacctggcccaccaccaccaaagcccgcagagcggcataaggacgacagcaggggtcttgtgcttcctgggtacaagtacctcggacccttcaacggactcgacaagggagagccggtcaacgaggcagacgccgcggccctcgagcacgacaaagcctacgaccggcagctcgacagcggagacaacccgtacctcaagtacaaccacgccgacgcggagtttcaggagcgccttaaagaagatacgtcttttgggggcaacctcggacgagcagtcttccaggcgaaaaagagggttcttgaacctctgggcctggttgaggaacctgttaagacggctccgggaaaaaagaggccggtagagcagtcgccacaagagccagactcctcctcgggcatcggcaagaaaggccagcagcccgctaaaaagagactcaattttggtcagactggcgactcagagtcagtccccgacccacaacctctcggagaacctccagcaacccccgctgctgtgggacctactacaatggcttcaggcggtggcgcaccaatggcggacaataacgaaggcgccgatggagtgggtaatgcctcangaaattggcattgcgattccacatggctgggcgacagagtcatcaccaccagcacccgaacatgggccttgccacctataacaaccacctctacaagcaaatctccagtgcttcaacgggggcgcagcaacgacaaccactacttcggctacagcaccccctgggggtattttgacttcaacagattccactgccacttctcaccacgtgactggcagcgactcatcaacaacaactggggattccggcctaagcgactcaacttcaagctcttcaacattcaggtcaaagaggttacggacaacaatggagtcaagaccatcgccaataaccttaccagcacggtccaggtcttcacggactcagactatcagctcccgtacgttctcggctctgcccaccagggctgcctgcctccgttcccggcggacgtgttcatgattccccagtacggctacctaacactcaacaacggtagtcaggccgtgggacgctcctccttctactgcctggaatactttccttcgcagatgctgagaaccggcaacaacttccagtttacttacaccttcgaggacgtgcctttccacagcagctacgcccacagccagagcttggaccggctgatgaatcctctgattgaccagtacctgtactacttgtctcggactcaaacaacaggaggcacggcaaatacgcagactctgggcttcagccaaggtgggcctaatacaatggccaatcaggcaaagaactggctgccaggaccctgttaccgccaacaacgcgtctcaacgacaaccgggcaaaacaacaatagcaactttgcctggactgctgggaccaaataccatctgaatggaagaaattcattggctaatcctggcatcgctatggcaacacacaaagacgacaaggagcgtttttttcccagtaacgggatcctgatttttggcaaacaaaatgctgccagagacaatgcggattacagcgatgtcatgctcaccagcgaggaagaaatcaaaaccactaaccctgtggctacagaggaatacggtatcgtggcagataacttgcagcagcaaaacacggctcctcaaattggaactgtcaacagccagggggccttacccggtatggtttggcagaaccgggacgtgtacctgcagggtcccatctgggccaagattcctcacacggacggcaacttccacccgtctccgctgatgggcggctttggcctgaaacatcctccgcctcagatcctgatcaagaacacgcctgtacctgcggatcctccgaccaccttcaaccagtcaaagctgaactctttcatcacacagtactccacgggacaggtcagcgtggaaattgaatgggagctgcagaaggaaaacagcaagcgctggaacccggagatccagtacacttccaactactacaaatctacaaatgtggactttgctgttaacacagaaggcgtgtactctgaaccccaccccattggcacccgttacctcacccgtcccctgtaa

SEQ ID NO: 1093 - DNA, 2211 bp, Artificial Sequence
  source: /note="Description of Artificial Sequence: Synthetic polynucleotide"
  modified_base (715)..(715): a, c, g or t
atggctgccgatggttatcttccagattggctcgaggacaacctctctgagggcattcgcgagtggtgggacttgaaacctggagccccgaaacccaaagccaaccagcaaaagcaggacgacggccggggtctggtgcttcctggctacaagtacctcggacccttcaacggactcgacaagggggagcccgtcaacgcggcggatgcagcggccctcgagcacgacaaggcctacgaccagcagctccaagcgggtgacaatccgtacctgcggtataaccacgccgacgccgagtttcaggagcgtcttcaaggagatacgtcttttgggggcaacctcggacgagcagtcttccaggccaagaagcgggttctcgaacctctcggtctggttgaggaagcggctaagacggctcctggaaagaagaggcctgtagagcagtctcctcaggaaccggactcctccgcgggtattggcaaatcgggtgcacagcccgctaaaaagagactcaatttcggtcagactggcgacacagagtcagtcccagaccctcaaccaatcggagaacctcccgcagccccctctggtgtgggacctaatacaatggctgcaggcggtggcgcaccaatggcagacaataacgaaggcgccgatggagtgggtagttcctcgggaaattggcattgcgattccacatggctgggcgacagantcatcaccaccagcacccgaacctgggccctgcccacctataacaaccatctctacaagcaaatctccagtgcttcaacgggggccagcaacgacaaccactacttcggctacagcaccccctgggggtattttgacttcaacagattccactgccacttctcaccacgtgactggcagcgactcatcaacaacaactggggattccggcctaagcgactcaacttcaagctcttcaacattcaggtcaaagaggttacggacaacaatggagtcaagaccatcgccaataaccttaccagcacggtccaggtcttcacggactcggagtaccagttgccgtacgtcctcggctctgcgcaccagggctgcctgcctccgttcccggcggacgtgttcatgattccgcagtacggctacctaacgctcaacaatggcagccaggcagtgggacggtcatccttttactgcctggaatatttcccatcgcagatgctgagaacgggcaacaactttaccttcagctacacttttgaggacgttcctttccacagcagctacgctcacagccagagtctggaccgtctcatgaatcctctgattgaccagtacctgtactacttgtctcggactcaaacaacaggaggcacggcaaatacgcagactctgggcttcagccaaggtgggcctaatacaatggccaatcaggcaaagaactggctgccaggaccctgttaccgccaacaacgcgtctcaacgacaaccggacaaaacaacaatagcaactttgcctggactgctgggaccaaataccatctgaatggaagaaattcattggctaatcctggcatcgctatggcaacacacaaagacgacaaggagcgtttttttcccagtaacgggatcctgatttttggcaaacaaaatgctgccagagacaatgcggattacagcgatgtcatgctcaccagcgaggaagaaatcaaaaccactaaccctgtggctacagaggaatacggtatcgtggcagataactttcagcagcaaaacacggctcctcaaattggaactgtcaacagccagggggccttacccggtatggtctggcagaaccgggacgtgtacctgcagggtcccatctgggccaagattcctcacacggacggcaacttccacccgtctccgctgatgggcggctttggcctgaaacatcctccgcctcagatcctgatcaagaacacgcctgtacctgcggatcctccgaccaccttcaaccagtcaaagctgaactctttcatcacgcaatacagcaccggacaggtcagcgtggaaattgaatgggagctgcagaaggaaaacagcaagcgctggaaccccgagatccagtacacctccaactactacaaatctacaagtgtggactttgctgttaatacagaaggcgtgtactctgaaccccaccccattggcacccgttacctcacccgtcccctgtaa

SEQ ID NO: 1094 - DNA, 2211 bp, Artificial Sequence
  source: /note="Description of Artificial Sequence: Synthetic polynucleotide"
atggctgccgatggttatcttccagattggctcgaggacaacctctctgagggcattcgcgagtggtgggcgctgaaacctggagccccgaagcccaaagccaaccagcaaaagcaggacgacggccggggtctggtgcttcctggctacaagtacctcggacccttcaacggactcgacaaaggagagccggtcaacgaggcggacgcggcagccctcgaacacgacaaagcttacgaccagcagctcaaggccggtgacaacccctacctcaagtataaccacgccgacgccgagtttcaggagcgtctgcaagaagatacgtcttttgggggcaacctcgggcgagcagtcttccaggccaaaaagaggcttcttgaacctcttggtctggttgaggaagcggctaagacggctcctggaaagaagaggcctgtagagcagtctcctcaggaaccggactcctccgcgggtattggcaaatcgggtgcacagcccgctaaaaagagactcaatttcggtcagactggcgacacagagtcagtcccagacccacaacctctcggagaacctccagcaacccccgctgctgtgggacctactacaatggcttcaggcggtggcgcaccaatggcggacaataacgaaggcgccgatggagtgggtaatgcctcaggaaattggcattgcgattccacatggctgggcgacagagtcatcaccaccagcacccgaacatgggccttgcccacctataacaaccacctctacaagcaaatctccagtgcttcaacgggggccagcaacgacaaccactacttcggctacagcaccccctgggggtattttgacttcaacagattccactgccacttctcaccacgtgactggcagcgactcatcaacaacaactggggattccggcccaagagactcagcttcaagctcttcaacatccaggtcaaggaggtcacgcagaatgaaggcaccaagaccatcgccaataacctcaccagcaccatccaggtgtttacggactcggagtaccagctgccgtacgttctcggctccgcccaccagggctgcctgcctccgttcccggcggacgtgttcatgattccccagtacggctacctaacactcaacaacggtagtcaggccgtgggacgctcctccttctactgcctggaatactttccttcgcagatgctgagaaccggcaacaacttccagtttacttacaccttcgaggacgtgcctttccacagcagctacgcccacagccagagcttggaccggctgatgaatcctctgattgaccagtacctgtactacttgtctcggactcaaacaacaggaggcacggcaaatacgcagactctgggcttcagccaaggtgggcctaatacaatggccaatcaggcaaagaactggctgccaggaccctgttaccgccaacaacgcgtctcaacgacaaccgggcaaaacaacaatagcaactttgcctggactgctgggaccaaataccatctgaatggaagaaattcattggctaatcctggcatcgctatggcaacacacaaagacgacaaggagcgtttttttcccagtaacgggatcctgatttttggcaaacaaaatgctgccagagacaatgcggattacagcgatgtcatgctcaccagcgaggaagaaatcaaaaccactaaccctgtggctacagaggaatacggtatcgtggcagataacttgcagcagcaaaacacggctcctcaaattggaactgtcaacagccagggggccttacccggtatggtctggcagaaccgggacgtgtacctgcagggtcccatctgggccaagattcctcacacggacggcaacttccacccgtctccgctgatgggcggctttggcctgaaacatcctccgcctcagatcctgatcaagaacacgcctgtacctgcggatcctccgaccaccttcaaccagtcaaagctgaactctttcatcacgcaatacagcaccggacaggtcagcgtggaaattgaatgggagctgcagaaggaaaacagcaagcgctggaaccccgagatccagtacacctccaactactacaaatctacaagtgtggactttgctgttaatacagaaggcgtgtactctgaaccccaccccattggcacccgttacctcacccgtcccctgtaa

SEQ ID NO: 1095 - DNA, 2211 bp, Artificial Sequence
  source: /note="Description of Artificial Sequence: Synthetic polynucleotide"
atggctgccgatggttatcttccagattggctcgaggacactctctctgaaggaataagacagtggtggaagctcaaacctggcccaccaccaccaaagcccgcagagcggcataaggacgacagcaggggtcttgtgcttcctgggtacaagtacctcggacccttcaacggactcgacaagggagagccggtcaacgaggcagacgccgcggccctcgagcacgacaaagcctacgaccagcagctccaagcgggtgacaatccgtacctgcggtataaccacgccgacgccgagtttcaggagcgtcttcaaggagatacgtcttttgggggcaacctcggacgagcagtcttccaggccaaaaagaggcttcttgaacctcttggtctggttgaggaagcggctaagacggctcctggaaagaagaggcctgtagagcagtctcctcaggaaccggactcctccgcgggtattggcaaatcgggtgcacagcccgctaaaaagagactcaatttcggtcagactggcgacacagagtcagtcccagaccctcaaccaatcggagaacctcccgcagccccctcaggtgtgggatctcttacaatggcttcaggtggtggcgcaccagtggcagacaataacgaaggtgccgatggagtgggtagttcctcgggaaattggcattgcgattcccaatggctgggggacagagtcatcaccaccagcacccgaacatgggccttgcccacctataacaaccacctctacaagcaaatctccagtgcttcaacgggggccagcaacgacaaccactacttcggctacagcaccccctgggggtattttgacttcaaccgcttccactgccacttctcaccacgtgactggcagcgactcatcaacaacaactggggattccggcccaagagactcagcttcaagctcttcaacatccaggtcaaggaggtcacgcagaatgaaggcaccaagaccatcgccaataacctcaccagcaccatccaggtgtttacggactcggagtaccagctgccgtacgttctcggctctgcccaccagggctgcctgcctccgttcccggcggacgtgttcatgattccccagtacggctacctaacactcaacaacggtagtcaggccgtgggacgctcctccttctactgcctggaatactttccttcgcagatgctgagaaccggcaacaacttccagtttacttacaccttcgaggacgtgcctttccacagcagctacgcccacagccagagcttggaccggctgatgaatcctctgattgaccagtacctgtactacttgtctcggactcaaacaacaggaggcacggcaaatacgcagactctgggcttcagccaaggtgggcctaatacaatggccaatcaggcaaagaactggctgccaggaccctgttaccgccaacaacgcgtctcaacgacaaccgggcaaaacaacaatagcaactttgcctggactgctgggaccaaataccatctgaatggaagaaattcattggctaatcctggcatcgctatggcaacacacaaagacgacaaggagcgtttttttcccagtaacgggatcctgatttttggcaaacaaaatgctgccagagacaatgcggattacagcgatgtcatgctcaccagcgaggaagaaatcaaaaccactaaccctgtggctacagaggaatacggtatcgtggcagataacttgcagcagcaaaacacggctcctcaaattggaactgtcaacagccagggggccttacccggtatggtctggcagaaccgggacgtgtacctgcagggtcccatctgggccaagattcctcacacggacggcaacttccacccgtctccgctgatgggcggctttggcctgaaacatcctccgcctcagatcctgatcaagaacacgcctgtacctgcggatcctccgaccaccttcaaccagtcaaagctgaactctttcatcacgcaatacagcaccggacaggtcagcgtggaaattgaatgggagctgcagaaggaaaacagcaagcgctggaaccccgagatccagtacacctccaactactacaaatctacaagtgtggactttgctgttaatacagaaggcgtgtactctgaaccccaccccattggcacccgttacctcacccgtcccctgtaa

SEQ ID NO: 1096 - DNA, 2217 bp, Artificial Sequence
  source: /note="Description of Artificial Sequence: Synthetic polynucleotide"
atggctgccgatggttatcttccagattggctcgaggacaacctctctgagggaataagacagtggtggaagctcaaacctggcccaccaccaccaaagcccgcagagcggcataaggacgacagcaggggtcttgtgcttcctgggtacaagtacctcggacccttcaacggactcgacaagggagagccggtcaacgcggcggacgcagcggccctcgagcacgacaaggcctacgaccagcagctcaaagcgggtgacaatccgtacctgcggtataaccacgccgacgccgagtttcaggagcgtctgcaagaagatacgtcttttgggggcaacctcgggcgagcagtcttccaggccaagaagcgggttctcgaacctctcggtctggttgaggaaggcgctaagacggctcctggaaagaagagaccggtagagccatcaccccagcgttctccagactcctctacgggcatcggcaagaaaggccagcagcccgctaaaaagagactcaattttggtcagactggcgactcagagtcagtccccgacccacaacctctcggagaacctccagcaacccccgctgctgtgggacctactacaatggcttcaggcggtggcgcaccaatggcagacaataacgaaggcgccgacggagtgggtaatgcctcaggaaattggcattgcgattccacatggctgggggacagagtcatcaccaccagcacccgaacctgggccctgcccacctacaacaaccacctctacaagcaaatctccaacgggacttcgggaggaagcaccaacgacaacacctacttcggctgcgtcacgccctgggggtattttgactttaacaaattccactgccacttttcaccggatgactggcaacgactcatcaacaacggctggggattccggactaagcgactcaacttcaagctcttcagcatgaaagtcaaaaagggtacggacaacactggaatcaagaccatcgcgaataaccttaccaacacggtccatgtcttcgcggactcggagtaccagttgccgtacgtcctcggctctgcgcaccagggctgcctccctccgttcccggcggacgtgttcatgattccgcagtacggctacctaacgctcaacaatggcagccaggcagtgggacggtcatccttttactgcctggaatatttcccatcgcagatgctgagaacgggcaacaactttaccttcagctacacctttgaggacgttcctttccacagcagctacgctcacagccagagtctggaccgtctcatgaatcctctgattgaccagtacctgtactacttgtctcggactcaaacaacaggaggcacggcaaatacgcagactctgggcttcagccaaggtgggcctaatacaatggccaatcaggcaaagaactggctgccaggaccctgttaccgccaacaacgcgtctcaacgacaaccgggcaaaacaacaatagcaactttgcctggactgctgggaccaaataccatctgaatggaagaaattcattggctaatcctggcatcgctatggcaacacacaaagacgacaaggagcgtttttttcccagtaacgggatcctgatttttggcaaacaaaatgctgccagagacaatgcggattacagcgatgtcatgctcaccagcgaggaagaaatcaaaaccactaaccctgtggctacagaggaatacggtatcgtggcagataacttgcagcagcaaaacacggctcctcaaattggaactgtcaacagccagggggccttacccggtatggtctggcagaaccgggacgtgtacctgcagggtcccatctgggccaagattcctcacacggacggcaacttccacccgtctccgctgatgggcggctttggcctgaaacatcctccgcctcagatcctgatcaagaacacgcctgtacctgcggatcctccgaccaccttcaaccagtcaaagctgaactctttcatcacgcaatacagcaccggacaggtcagcgtggagatcgagtgggagctgcagaaggaaaacagcaagcgctggaacccggagatccagtacacctccaactactacaaatctacaagtgtggactttgctgttaatacagaaggcgtgtactctgaaccccaccccattggcacccgttacctcacccgtcccctgtaa

SEQ ID NO: 1097 - DNA, 2214 bp, Artificial Sequence
  source: /note="Description of Artificial Sequence: Synthetic polynucleotide"
atggctgccgatggttatcttccagattggctcgaggacactctctctgaaggaataagacagtggtggaagctcaaacctggcccaccaccaccaaagcccgcagagcggcataaggacgacagcaggggtcttgtgcttcctgggtacaagtacctcggacccttcaacggactcgacaagggggagcccgtcaacgcggcggacgcagcggccctcgagcacgacaaggcctacgaccagcagctcaaagcgggtgacaatccgtacctgcggtataaccacgccgacgccgagtttcaggagcgtctgcaagaagatacgtcttttgggggcaacctcgggcgagcagtcttccaggccaagaagcgggttctcgaacctctcggtctggttgaggaaggcgctaagacggctcctggaaagaagagaccggtagagccatcaccccagcgttctccagactcctctacgggcatcggcaagaaaggccagcagcccgcgaaaaagagactcaactttgggcagactggcgactcagagtcagtgcccgaccctcaaccaatcggagaaccccccgcaggcccctctggtctgggatctggtacaatggctgcaggcggtggcgctccaatggcagacaataacgaaggcgccgatggagtgggtagttcctcgggaaattggcattgcgattccacatggctgggggacagagtcatcaccaccagcacccgaacctgggccctgcccacctacaacaaccacctctacaaacaaatttccagcgcttcaacgggagcctcgaacgacaatcactactttggctacagcaccccctgggggtattttgacttcaacagattccactgccacttctcaccacgtgactggcagcgactcatcaacaacaactggggattccggcctaagcgactcaacttcaagctcttcaacattcaggtcaaagaggttacggacaacaatggagtcaagaccatcgccaataaccttaccagcacggtccaggtcttcacggactcggagtaccagttgccgtacgtcctcggctctgcgcaccagggctgcctccctccgttcccggcggacgtgttcatgattccgcagtacggctacctaacgctcaacaatggcagccaggcagtgggacggtcatccttttactgcctggaatatttcccatcgcagatgctgagaacgggcaacaactttaccttcagctacacctttgaggacgttcctttccacagcagctacgctcacagccagagtctggaccgtctcatgaatcctctgattgaccagtacctgtactacttgtctcggactcaaacaacaggaggcacggcaaatacgcagactctgggcttcagccaaggtgggcctaatacaatggccaatcaggcaaagaactggctgccaggaccctgttaccgccaacaacgcgtctcaacgacaaccgggcaaaacaacaatagcaactttgcctggactgctgggaccaaataccatctgaatggaagaaattcattggctaatcctggcatcgctatggcaacacacaaagacgacaaggagcgtttttttcccagtaacgggatcctgatttttggcaaacaaaatgctgccagagacaatgcggattacagcgatgtcatgctcaccagcgaggaagaaatcaaaaccactaaccctgtggctacagaggaatacggtatcgtggcagataacctgcagcagcaaaacacggctcctcaaattggaactgtcaacagccagggggccttacccggtatggtctggcagaaccgggacgtgtacctgcagggtcccatctgggccaagattcttcacacggacggcaactttcacccttctccgctgatgggagggtttggaatgaagcacccgcctcctccgatcctgatcaagaacacgcctgtacctgcggatcctccgaccaccttcaaccagtcaaagctgaactctttcatcacgcaatacagcaccggacaggtcagcgtggaaattgaatgggagctgccgaaggaaaacagcaagcgctggaaccccgagatccagtacacctccaactactacaaatctacaagtgtggactttgctgttaatacagaaggtgtgtactatgaaccccaccccattggcacccgttacctcacccctcccctgtaa

SEQ ID NO: 1098 - DNA, 2214 bp, Artificial Sequence
  source: /note="Description of Artificial Sequence: Synthetic polynucleotide"
atggctgccgatggttatcttccagattggctcgaggacaacctctctgagggcattcgcgagtggtgggcgctgaaacctggagccccgaagcccaaagccaaccagcaaaagcaggacgacggccggggtctggtgcttcctggctacaagtacctcggacccttcaacggactcgacaagggggagcccgtcaacgcggcggacgcagcggccctcgagcacgacaaggcctacgaccagcagctcaaagcgggtgacaatccgtacctgcggtataaccacgccgacgccgagtttcaggagcgtctgcaagaagatacgtcttttgggggcaacctcgggcgagcagtcttccaggccaagaagcgggttctcgaacctctcggtctggttgaggaaggcgctaagacggctcctggaaagaagagaccggtagagccatcaccccagcgctctccagactcctctacgggcatcggcaagaaaggccaacagcccgccagaaaaagactcaattttggtcagactggcgactcagagtcagttccagaccctcaacctctcggagaacctccagcagcgccctctggtgtggcacctaatacaatggctgcaggcggtggcgcaccaatggcagacaataacgaaggcgccgacggagtgggtaatgcctcaggaaattggcattgcgattccacatggctgggcgacagagtcatcaccaccagcacccgaacatgggccttgcccacctataacaaccacctctacaagcaaatctccagtgcttcaacgggggccagcaacgacaaccactacttcggctacagcaccccctgggggtattttgatttcaacagattccactgccacttttcaccacgtgactggcagcgactcatcacaacaattgggggattccggcctaagcgactcaacttcaagctcttcaacattcaggtcaaagaggttacggacaacaatggagtcaagaccatcgccaataaccttaccagcacggtccaggtcttcacggactcggagtaccagttgccgtacgtcctcggctctgcgcaccagggctgcctccctccgttcccggcggacgtgttcatgattccgcagtacggctacctaacgctcaacaatggcagccaggcagtgggacggtcatccttttactgcctggaatatttcccatcgcagatgctgagaacgggcaacaactttaccttcagctacacctttgaggacgttcctttccacagcagctacgctcacagccagagtctggaccggctgatgaatcctctgattgaccagtacctgtactacttgtctcggactcaaacaacaggaggcacggcaaatacgcagactctgggcttcagccaaggtgggcctaatacaatggccaatcaggcaaagaactggctgccaggaccctgttaccgccaacaacgcgtctcaacgacaaccgggcaaaacaacaatagcaactttgcctggactgctgggaccaaataccatctgaatggaagaaattcattggctaatcctggcatcgctatggcaacacacaaagacgacaaggagcgtttttttcccagtaacgggatcctgatttttggcaaacaaaatgctgccagagacaatgcggattacagcgatgtcatgctcaccagcgaggaagaaatcaaaaccactaaccctgtggctacagaggaatacggtatcgtggcagataacttgcagcagcaaaacacggctcctcaaattggaactgtcaacagccagggggccttacccggtatggtctggcagaaccgggacgtgtacctgcagggtcccatctgggccaagattcctcacacggacggcaacttccacccgtctccgctgatgggcggctttggcctgaaacatcctccgcctcagatcctgatcaagaacacgcctgtacctgcggatcctccgaccaccttcaaccagtcaaagctgaactctttcatcacgcaatacagcaccggacaggtcagcgtggaaattgaatgggagctgcagaaggaaaacagcaagcgctggaaccccgagatccagtacacctccaactactacaaatctacaagtgtggactttgctgttaatacagaaggcgtgtactctgaaccccaccccattggcacccgttacctcacccgtcccctgtaa

SEQ ID NO: 1099 - DNA, 2211 bp, Artificial Sequence
  source: /note="Description of Artificial Sequence: Synthetic polynucleotide"
atggctgccgatggttatcttccagattggctcgaggacactctctctgaaggaataagacagtggtggaagctcaaacctggcccaccaccaccaaagcccgcagagcggcataaggacgacggccggggtctggtgcttcctggctacaagtacctcggacccttcaacggactcgacaagggggagcccgtcaacgcggcggacgcagcggccctcgagcacgacaaggcctacgaccagcagctcaaagcgggtgacaatccgtacctgcggtataaccacgccgacgccgagtttcaggagcgtctgcaagaagatacgtcttttgggggcaacctcggacgagcagtcttccaggcgaaaaagagggttcttgaacctctgggcctggttgaggaacctgttaagacggctccgggaaaaaagaggccggtagagcagtcgccacaagagccagactcctcctcgggcatcggcaagaaaggccagcagcccgctaaaaagagactcaattttggtcagactggcgactcagagtcagtccccgacccacaacctctcggagaacctccagcaacccccgctgctgtgggacctactacaatggcttcaggcggtggcgcaccaatggcagacaataacgaaggcgccgacggagtgggtaatgcctcaggaaattggcattgcgattccacatggatgggcgacagagtcatcaccaccagcacccgaacatgggccttgcccacctataacaaccacctctacaagcaaatctccagtgcttcaacgggggccagcaacgacaaccactacttcggctacagcaccccctgggggtattttgactttaacagattccactgccacttttcaccacgtgactggcagcgactcatcaacaacaactggggattccggcctaagcgactcaacttcaagctcttcaacattcaggtcaaggaggtcacgcagaatgaaggcaccaagaccatcgccaataacctcaccagcaccatccaggtgtttacggactcggagtaccagctgccgtacgttctcggctccgcccaccagggctgcctgcctccgttcccggcggacgtgttcatgatcccccagtacggctacctaacactcaacaacggtagtcaggccgtgggacgctcctccttctactgcctggaatactttccttcgcagatgctgagaaccggcaacaacttccagtttacttacaccttcgaggacgtgcctttccacagcagctacgcgcacagccagagcttggaccggctgatgaatcctctgattgaccagtacctgtactacttgtctcggactcaaacaacaggaggcacggcaaatacgcagactctgggcttcagccaaggtgggcctaatacaatggccaatcacgcaaagaactggctgccaggaccctgttaccgccaacaacgcgtctcaacgacaaccgggcaaaacaacaatagcaactttgcctggactgctgggaccaaataccatctgaatggaagaaattcattggctaatcctggcatcgctatggcaacacacaaagacgacaaggagcgtttttttcccagtaacgggatcctgatttttggcaaacaaaatgctgccagagacaatgcggattacagcgatgtcatgctcaccagcgaggaagaaatcaaaaccactaaccctgtggctacagaggaatacggtatcgtggcagataacttgcagcagcaaaacacggctcctcaaattggaactgtcaacagccagggggccttacccggtatggtctggcagaaccgggacgtgtacctgcagggtcccatctgggccaagattcctcacacggacggcaacttccacccgtctccgctgatgggcggcttcggcctgaaacatcctccgcctcagatcctgatcaagaacacgcctgtacctgcggatcctccgaccaccttcaaccagtcaaagctgaactctttcatcacgcaatacagcaccggacaggtcagcgtggaaattgaatgggagctgcagaaggaaaacagcaagcgctggaaccccgagatccagtacacctccaactactacaaatctacaagtgtggactttgctgttaatacagaaggcgtgtactctgaaccccaccccattggcacccgttacctcacccgtcccctgtaa

SEQ ID NO: 1100 - DNA, 2214 bp, Artificial Sequence
  source: /note="Description of Artificial Sequence: Synthetic polynucleotide"
atggctgccgatggttatcttccagattggctcgaggacaacctctctcagggcattcgcgagtggtgggacttgaaacctggagccccgaaacccaaagccaaccagcaaaagcaggacgacggccggggtctggtgcttcctggctacaagtacctcggacccttcaacggactcgacaagggggagcccgtcaacgcggcggacgcagcggccctcgagcacgacaaggcctacgaccagcagctcaaagcgggtgacaatccgtacctgcggtataaccacgccgacgccgagtttcaggagcgtctgcaagaagatacgtcttttgggggcaacctcggacgagcagtcttccaggccaagaagcgggttctcgaacctctcggtctggttgaggaaggcgctaagacggctcctggaaagaagagaccggtagagccatcaccccagcgttctccagactcctctacgggcatcggcaagaaaggccaacagcccgccagaaaaagactcaattttggtcagactggcgactcagagtcagttccagaccctcaacctctcggagaacctccagcagcgcccgctgctgtgggacctactacaatggcttcaggcggtggcgcaccaatggcagacaataacgaaggcgccgacggagtgggtagttcctcgggaaattggcattgcgattcccaatggctgggggacagagtcatcaccaccagcacccgaacctgggccctgcccacctacaacaaccacctctacaagcaaatctccagtgcttcaacgggggccagcaacgacaaccactacttcggctacagcaccccctgggggtattttgacttcaacagattccactgccacttttcaccacgtgactggcaaagactcatcaacaacaactggggattccggcccaagagactcagcttcaagctcttcaacatccaggtcaaggaggtcacgcagaatgaaggcaccaagaccatcgccaataacctcaccagcaccatccaggtgtttacggactcggagtaccagctgccgtacgttctcggctctgcccaccagggctgcctgcctccgttcccggcggacgtgttcatgattccccagtacgggtacctgactctgaacaatggcagtcaggccgtgggccgttcctccttctactgcctggagtactttccttctcaaatgctgagaaccggcaacaacttccagtttacttacaccttcgaggacgtgcctttccacagcagctacgcccacagccagagcttggaccggctgatgaatcctctgattgaccagtacctgtactacttgtctcggactcaaacaacaggaggcacgacaaatgcgcagactctgggcttcagccaaggtgggcctaatacaatggccaatcaggcaaagaactggctgccaggaccctgttaccgccaacaacgcgtctcaacgacaaccgggcaaaacaacaatagcaactttgcctggactgctgggaccaaataccatctgaatggaagaaattcattggctaatcctggcatcgctatggcaacacacaaagacgacaaggagcgtttttttcccagtaacgggatcctgatttttggcaaacaaaatgctgccagagacaatgcggattacagcgatgtcatgctcaccagcgaggaagaaatcaaaaccactaaccctgtggctacagaggaatacggtatcgtggcagataacttgcagcagcaaaacacggctcctcaaattggaactgtcaacagccagggggccttacccggtatggtctggcagaaccgggacgtgtacctgcagggtcccatctgggccaagattcctcacacggacggcaacttccacccgtctccgctgatgggcggctttggcctgaaacatcctccgcctcagatcctgatcaagaacacgcctgtacctgcggatcctccgaccaccttcaaccagtcaaagctgaactctttcatcacacagtactccacgggacaggtcagcgtggaaattgaatgggagctgcagaaggaaaacagcaagcgctggaacccggagatccagtacacttccaactactacaaatctacaaatgtggactttgctgttaacacagaaggcgtgtactctgaaccccaccccattggcacccgttacctcacccgtcccctgtaa

SEQ ID NO: 1101 - DNA, 2211 bp, Artificial Sequence
  source: /note="Description of Artificial Sequence: Synthetic polynucleotide"
atggctgccgatggttatcttccagattggctcgaggacaacctctctgagggcattcgcgagtggtgggacttgaaacctggagccccgaaacccaaagccaaccagcaaaagcaggacgacggccggggtctggtgcttcctggctacaagtacctcggacccttcaacggactcgacaagggggagcccgtcaacgcggcggacgcagcggccctcgagcacgacaaggcctacgaccagcagctcaaagcgggtgacaatccgtacctgcggtataaccacgccgacgccgagtttcaggagcgtctgcaagaagatacgtcttttgggggcaacctcgggcgagcagtcttccaggccaagaagagggttctcgaaccttttggtctggttgaggaaggcgctaagacggctcctggaaagaaacgtccggtagagcagtcgccacaagagccagactcctcctcgggcatcggcaagacaggccagcagcccgctaaaaagagactcaatttcggtcagactggcgacacagagtcagtcccagaccctcaaccaatcggagaacctcccgcagccccctcaggtgtgggacctaatacaatggctgcaggcggtggcgcaccaatggcagacaataacgaaggcgccgacggagtgggtagttcctcgggaaattggcattgcgattccacatggatgggtgacagagtcatcaccaccagcacccgaacctgggccctgcccacctacaataaccacctctacaagcaaatctccagtgcttcaacgggggccagcaacgacaaccactacttcggctacagcaccccctgggggtattttgacttcaacagattccactgccacttctcaccacgtgactggcagcgactcatcaacaacaactggggattccggcctaagcgactcaacttcaagctcttcaacattcaggtcaaggaggtcacgcagaatgaaggcaccaagaccatcgccaataacctcaccagcaccatccaggtgtttacggactcggagtaccagctgccgtacgttctcggctctgcccaccagggctgcctgcctccgttcccggcggacgtgttcatgattccccagtacggctacctaacactcaacaacggtagtcaggccgtgggacgctcctccttctactgcctggaatactttccttcgcagatgctgagaaccggcaacaacttccagtttacttacaccttcgaggacgtgcctttccacagcagctacgcccacagccagagcttggaccggctgatgaatcctctgattgaccagtacctgtactacttgtctcggactcaaacaacaggaggcacggcaaatacgcagactctgggcttcagccaaggtgggcctaatacaatggccaatcaggcaaagaactggctgccaggaccctgttaccgccaacaacgcgtctcaacgacaaccgggcaaaacaacaatagcaactttgcctggactgctgggaccaaataccatctgaatggaagaaattcattggctaatcctggcatcgctatggcaacacacaaagacgacaaggagcgtttttttcccagtaacgggatcctgatttttggcaaacaaaatgctgccagagacaatgcggattacagcgatgtcatgctcaccagcgaggaagaaatcaaaaccactaaccctgtggctacagaggaatacggtatcgtggcagataacttgcagcagcaaaacacggctcctcaaattggaactgtcaacagccagggggccttacccggtatggtctggcagaaccgggacgtgtacctgcagggtcccatctgggccaagattcctcacacggacggcaacttccacccgtctccgctgatgggcggctttggcctgaaacatcctccgcctcagatcctgatcaagaacacgcctgtacctgcggatcctccgaccaccttcaaccagtcaaagctgaactctttcatcacacagtactccacgggacaggtcagcgtggaaattgaatgggagctgcagaaggaaaacagcaagcgctggaacccggagatccagtacacttccaactactacaaatctacaaatgtggactttgctgttaacacagaaggcgtgtactctgaaccccaccccattggcacccgttacttcacccgtcccctgtaa

SEQ ID NO: 1102 - DNA, 2211 bp, Artificial Sequence
  source: /note="Description of Artificial Sequence: Synthetic polynucleotide"
atggctgccgatggttatcttccagattggctcgaggacaacctctctgagggcattcgcgagtggtgggacttgaaacctggagccccgaaacccaaagccaaccagcaaaagcaggacgacggccggggtctggtgcttcctggctacaagtacctcggacccttcaacggactcgacaagggggagcccgtcaacgcggcggacgcagcggccctcgagcacgacaaggcctacgaccagcagctcaaagcgggtgacaatccgtacctgcggtataaccacgccgacgccgagtttcaggagcgtctgcaagaagatacgtcttttgggggcaacctcgggcgagcagtcttccaggccaagaagcgggttctcgaacctctcggtctggttgaggaaggcgctaagacggctcctggaaagaaacgtccggtagagcagtcgccacaagagccagactcctcctcgggcatcggcaagacaggccagcagcccgctaaaaaaagactcaattttggtcagactggcgactcagagtcagttccagaccctcaacctctcggagaacctccagcaacccccgctgctgtgggacctactacaatggcttcaggtggtggcgcaccaatggcagacaataacgagggcgccgacggagtgggtaattcctcgggaaattggcattgcgattccacatggatgggcgacagagtcatcaccaccagcacccgaacctgggccctgcccacctacaacaatcacctctacaagcaaatctccagtgcttcaacgggggccagcaacgacaaccactacttcggctacagcaccccctgggggtattttgacttcaacagattccactgccacttctcaccacgtgactggcagcgactcatcaacaacaactggggattccggcctaagcgactcaacttcaagctcttcaacattcaggtcaaagaggttacggacaacaatggagtcaagaccatcgccaataaccttaccagcacggtccaggtcttcacggactcggagtaccagttgccgtacgtcctcggctctgcgcaccagggctgcctccctccgttcccggcggacgtgttcatgattccgcagtacggctacctaacgctcaacaacggtagtcaggccgtgggacgctcctccttctactgcctggaatactttccttcgcagatgctgagaaccggcaacaacttccagtttacttacaccttcgaggacgtgcctttccacagcagctacgcccacagccagagcttggaccggctgatgaatcctctgattgaccagtacctgtactacttgtctcggactcaaacaacaggaggcacggcaaatacgcagactctgggcttcagccaaggtgggcctaatacaatggccaatcaggcaaagaactggctgccaggaccctgttaccgccaacaacgcgtctcgacgacaaccgggcaaaacaacaatagcaactttgcctggactgctgggaccaaataccatctgaatggaagaaattcattggctaatcctggcatcgctatggcaacacacaaagacgacaaggagcgtttttttcccagtaacgggatcctgatttttggcaaacaaaatgctgccagagacaatgcggattacagcgatgtcatgctcaccagcgaggaagaaatcaaaaccactaaccctgtggctacagaggaatacggtatcgtggcagataacttgcagcagcaaaacacggctcctcaaattggaactgtcaacagccagggggccttacccggtatggtttggcagaaccgggacgtgtacctgcagggtcccatctgggccaagattcctcacacggacggcaacttccacccgtctccgctgatgggcggctttggcctgaaacatcctccgcctcagatcctgatcaagaacacgcctgtacctgcggatcctccgaccaccttcaaccagtcaaagctgaactctttcatcacacagtactccacgggacaggtcagcgtggaaattgaatgggagctgcagaaggaaaacagcaagcgctggaacccggagatccagtacacttccaactactacaaatctacaaatgtggactttgctgttaacacagaaggcgtgtactctgaaccccaccccattggcacccgttacctcacccgtcccctgtaa

SEQ ID NO: 1103 - DNA, 2211 bp, Artificial Sequence
  source: /note="Description of Artificial Sequence: Synthetic polynucleotide"
atggctgccgatggttatcttccagattggctcgaggacaacctctctgagggcattcgcgagtggtgggacttgaaacctggagccccgaagcccaaagccaaccagcaaaagcaggacgacggccggggtctggtgcttcctggctacaagtacctcggacccttcaacggactcgacaagggggagcccgtcaacgcggcggacgcagcggccctcgagcacgacaaggcctacgaccagcagctcaaagcgggtgacaatccgtacctgcggtataaccacgccgacgccgagtttcaggagcgtctgcaagaagatacgtcttttgggggcaacctcgggcgagcagtcttccaggccaagaagcgggttctcgaacctctcggtctggttgaggaaggcgctaagacggctcctggaaagaaacgtccggtagagcagtcaccacaagagccagactcctcctcgggcatcggcaagacaggccagcagcccgctaaaaagagactcaattttggtcagactggcgactcagagtcagtccccgacccacaacctctcggagaacctccagcaacccccgctgctgtgggacctactacaatggcttcaggcggtggcgcaccaatggcggacaataacgaaggcgccgatggagtgggtaatgcctcaggaaattggcattgcgattccacatggctgggcgacagagtcatcaccaccagcacccgaacatgggccttgcccacctataacaaccacctctacaagcaaatctccagtgcttcaacgggggccagcaacgacaaccactacttcggctacagcaccccctgggggtattttgactttaacagattccactgccacttctcaccacgtgactggcagcgactcatcaacaacaactggggattccggcccaagagactcaacttcaagctcttcaacatccaggtcaaggaggtcacgcagaatgaaggcaccaagaccatcgccaataacctcaccagcaccatccaggtgtttacggactcggagtaccagctgccgtacgttctcggctctgcccaccagggctgcctgcctccgttcccggcggacgtgttcatgattccccagtacggctacctgactctgaacaatggcagtcaggccgtgggccgttcctccttctactgcctagagtactttccttctcaaatgctgagaacgggcaacaactttgagttcagctaccagtttgaggacgtgccttttcacagcagctacgcgcacagccaaagcctggaccggctgatgaatcctctgattgaccagtacctgtactacttgtctcggactcaaacaacaggaggcacggcaaatacgcagactctgggcttcagccaaggtgggcctaatacaatggccaatcaggcaaagaactggctgccaggaccctgttaccgccaacaacgcgtctcaacgacaaccgggcaaaacaacaatagcaactttgcctggactgctgggaccaaataccatatgaatggaagaaattcattggttaatcctggcatcgctatggcaacacacaaagacgacaaggagcgtttttttcccagtaacgggatcctgatttttggcaaacaaaatgttgccagagacaatgcggattacagcgatgtcatgctcaccagcgaggaagaaatcaaaaccactaaccctgtggctacagaggaatacggtattgtggcagataacttgcagcagcaaaacacggctcctcaaattggaactgtcaacagccagggggccttacccggtatggtctggcagaaccgggacgtgtacctgcagggtcccatctgggccaagattcctcacacggacggcaacttccacccgtcgccgctgatgggcggctttggcctgaaacatcctccgcctcagatcctgatcaagaacacgcctgtacctgcggatcctccgaccaccttcaaccagtcaaagctgaactctttcatcacgcaatacagcaccggacaggtcagcgtggaaattgaatgggagctgcagaaggaaaacagcaagcgctggaaccccgagatccagtacacctccaactactacaaatctacaagtgtggactttgctgttaatacagaaggcgtgtactctgaaccccaccccattggcacccgttacctcacccgtcccctgtaa

SEQ ID NO: 1104 - protein, 736 aa, Artificial Sequence
  source: /note="Description of Artificial Sequence: Synthetic polypeptide"
MAADGYLPDWLEDTLSEGIRQWWKLKPGPPPPKPAERHKDDSRGLVLPGYKYLGPFNGLDKGEPVNEADAAALEHDKAYDRQLDSGDNPYLKYNHADAEFQERLKEDTSFGGNLGRAVFQAKKRVLEPLGLVEEPVKTAPGKKRPVEQSPQEPDSSSGIGKKGQQPAKKRLNFGQTGDSESVPDPQPLGEPPATPAAVGPTTMASGGGAPMADNNEGADGVGNASGNWHCDSTWMGDRVITTSTRTWALPTYNNHLYKQISSASTGASNDNHYFGYSTPWGYFDFNRFHCHFSPRDWQRLINNNWGFRPKRLNFRLFNIQVKEVTDNNGVKTIANNLTSTVQVFTDSEYQLPYVLGSAHQGCLPPFPADVFMIPQYGYLTLNNGSQAVGRSSFYCLEYFPSQMLRTGNNFTFSYTFEEVPFHSSYAHSQSLDRLMNPLIDQYLYYLSRTQTTGGTANTQTLGFSQGGPNTMANQAKNWLPGPCYRQQRVSTTTGQNNNSNFAWTAGTKYHLNGRNSLANPGIAMATHKDDKERFFPSNGILIFGKQNAARDNADYSDVMLTSEEEIKTTNPVATEEYGIVADNLQQQNTAPQIGTVNSQGALPGMVWQNRDVYLQGPIWAKIPHTDGNFHPSPLMGGFGLKHPPPQILIKNTPVPADPPTTFNQSKLNSFITQYSTGQVSVEIEWELQKENSKRWNPEIQYTSNYYKSTSVDFAVNTEGVYSEPHPIGTRYLTRPL

SEQ ID NO: 1105 - protein, 736 aa, Artificial Sequence
  source: /note="Description of Artificial Sequence: Synthetic polypeptide"
MAADGYLPDWLEDNLSEGIREWWDLKPASPKPKANQQKQDDGRGLVLPGYKYLGPFNGLDKGEPVNAADAAALEHDKAYDQQLKAGDNPYLRYNHADAEFQERLQEDTSFGGNLGRAVFQAKKRLLEPLGLVEEAAKTAPGKKRPVEQSPQEPDSSAGIGKSGAQPAKKRLNFGQTGGTESVPDPQPLGEPPAAPSGVGPNTMAAGGGAPMADNNEGADGVGSSSGNWHCDSTWLGDRVITTSTRTWALPTYNNHLYKQISSASTGASNDNHYFGYSTPWGYFDFNRFHCHFSPRDWQRLINNNWGFRPKRLSFKLFNIQVKEVTQNEGTKTIANNLTSTIQVFTDSEYQLPYVLGSAHQGCLPPFPADVFMIPQYGYLTLNNGSQAVGRSSFYCLEYFPSQMLRTGNNFQFTYTFEDVPFHSSYAHSQSLDRLMNPLIDQYLYYLSRTQTTGGTANTQTLGFSQGGPNTMANQAKNWLPGPCYRQQRVSTTTGQNNNSNFAWTAGTKYHLNGRNSLANPGIAMATHKDDKERFFPSNGILIFGKQNAARDNADYSDVMLTSEEEIKTTNPVATEEYGIVADNLQQQNTAPQIGTVNSQGALPGMVWQNRDVYLQGPIWAKIPHTDGNFHPSPLMGGFGLKHPPPQILIKNTPVPADPPTTFNQSKLNSFITQYSTGQVSVEIEWELQKENSKRWNPEIQYTSNYYKSTSVDFAVNTEGVYSEPHPIGTRYLTRPL

SEQ ID NO: 1106 - protein, 736 aa, Artificial Sequence; identical to SEQ ID NO: 1045
  source: /note="Description of Artificial Sequence: Synthetic polypeptide"

SEQ ID NO: 1107 - protein, 736 aa, Artificial Sequence
  source: /note="Description of Artificial Sequence: Synthetic polypeptide"
MAADGYLPDWLEDNLSEGIREWWDLEPGAPKPKANQQKQDDGRGLVLPGYKYLGPFNGLDKGEPVNAADAAALEHDKAYDQQLKAGDNPYLRYNHADAEFQERLQEDTSFGGNLGRAVFQAKKRVLEPLGLVEEGAKTAPGKKRPVEQSPQEPDSSSGIGKTGQQPAKKRLNFGQTGDSESVPDPQPLGEPPATPAAVGPTTMASGGGAPMADNNEGADGVGNASGNWHCDSTWLGDRVITTSTRTWALPTYNNHLYKQISSASTGASNDNHYFGYSTPWGYFDFNRFHCHFSPRDWQRLINNNWGFRPKRLNFKLFNIQVKEVTDNNGVKTIANNLTSTVQVFTDSEYQLPYVLGSAHQGCLPPFPADVFMIPQYGYLTLNNGSQAVGRSSFYCLEYFPSQMLRTGNNFQFTYTFEDVPFHSSYAHSQSLDRLMNPLIDQYLYYLSRTQTTGGTANTQTLGFSQGGPNTMANQAKNWLPGPCYRQQRVSTTTGQNNNSNFAWTAGTKYHLNGRNSLANPGIAMATHKDDKERFFPSNGILIFGKQNAARDNADYSDVMLTSEEEIKTTNPVATEEYGIVADNLQQQNTAPQIGTVNSQGALPGMVWQNRDVYLQGPIWAKIPHTDGNFHPSPLMGGFGLKHPPPQILIKNTPVPADPPTTFNQSKLNSFITQYSTGQVSVEIEWELQKENSKRWNPEIQYTSNYYKSTSVDFAVNTEGVYSEPHPIGTRYLTRPL

SEQ ID NO: 1108 - protein, 736 aa, Artificial Sequence; identical to SEQ ID NO: 1045
  source: /note="Description of Artificial Sequence: Synthetic polypeptide"

SEQ ID NO: 1109 - protein, 736 aa, Artificial Sequence
  source: /note="Description of Artificial Sequence: Synthetic polypeptide"
MAADGYLPDWLEDTLSEGIRQWWKLKPGPPPPKPAERHKDDSRGLVLPGYKYLGPFNGLDKGEPVNEADAAALEHDKAYDRQLDSGDNPYLKYNHADAEFQERLKEDTSFGGNLGRAVFQAKKRVLEPLGLVEEPVKTAPGKKRPVEQSPQEPDSSSGIGKKGQQPAKKRLNFGQTGDSESVPDPQPLGEPPATPAAVGPTTMASGGGAPMADNNEGADGVGNASGNWHCDSTWLGDRVITTSTRTWALPTYNNHLYKQISSASTGASNDNHYFGYSTPWGYFDFNRFHCHFSPRDWQRLINNNWGFRPKRLNFKLFNIQVKEVTDNNGVKTIANNLTSTVQVFTDSDYQLPYVLGSAHQGCLPPFPADVFMIPQYGYLTLNNGSQAVGRSSFYCLEYFPSQMLRTGNNFQFTYTFEDVPFHSSYAHSQSLDRLMNPLIDQYLYYLSRTQTTGGTANTQTLGFSQGGPNTMANQAKNWLPGPCYRQQRVSTTTGQNNNSNFAWTAGTKYHLNGRNSLANPGIAMATHKDDKERFFPSNGILIFGKQNAARDNADYSDVMLTSEEEIKTTNPVATEEYGIVADNLQQQNTAPQIGTVNSQGALPGMVWQNRDVYLQGPIWAKIPHTDGNFHPSPLMGGFGLKHPPPQILIKNTPVPADPPTTFNQSKLNSFITQYSTGQVSVEIEWELQKENSKRWNPEIQYTSNYYKSTSVDFAVNTEGVYSEPHPIGTRYLTRPL

SEQ ID NO: 1110 - protein, 734 aa, Artificial Sequence
  source: /note="Description of Artificial Sequence: Synthetic polypeptide"
MAADGYLPDWLEDTLSEGIRQWWKLKPGPPPPKPAERHKDDSRGLVLPGYKYLGPFNGLDKGEPVNEADAAALEHDKAYDQQLQAGDNPYLRYNHADAEFQERLQGDTSFGGNLGRAVFQAKKRLLEPLGLVEEAAKTAPGKKRPVEQSPQEPDSSAGIGKSGAQPAKKRLNFGQTGDTESVPDPQPIGEPPAAPSGVGSLTMASGGGAPVADNNEGADGVGSSSGNWHCDSQWLGDRVITTSTRTWALPTYNNHLYKQISSASTGASNDNHYFGYSTPWGYFDFNRFHCHFSPRDWQRLINNNWGFRPKRLSFKLFNHPGQGGHAERHQDHRQPHQHIQVFTDSEYQLPYVLGSAHQGCLPPFPADVFMIPQYGYLTLNNGSQAVGRSSFYCLEYFPSQMLRTGNNFQFTYTFEDVPFHSSYAHSQSLDRLMNPLIDQYLYYLSRTQTTGGTANTQTLGFSQGGPNTMANQAKNWLPGPCYRQQRVSTTTGQNNNSNFAWTAGTKYHLNGRNSLGNPGIAMATHKDDKERFFPSNGILIFGKQNAARDNADYSDVMLTSEEEIKTTNPVATEEYGIVADNLQQQNTAPQIGTVNSQGALPGMVWQNRDVYLQGPIWAKIPHTDGNFHPSPLMGGFGLKHPPPQILIKNTPVPADPPTAFNQSKLNSFITQYSTGQVSVEIEWELQKENSKRWNPEIQYTSNYYKSTSVDFAVNTEGVYSEPHPIGTRYLTRPL

SEQ ID NO: 1111 - protein, 737 aa, Artificial Sequence
  source: /note="Description of Artificial Sequence: Synthetic polypeptide"
MAADGYLPDWLEDNLSEGIREWWDLKHGAPKPKANQQKQDDGRGLVLPGYKYLGPFNGLDKGEPVNAADAAALEHDKAYDQQLKAGDNPYLRYNHADAEFQERLQEDTSFGGNLGRAVFQAKKRVLEPFGLVEEGAKTAPGKKRPVEQSPQEPDSSSGIGKTGQQPAKKRLNFGQTGDSESVPDPQPLGEPPATPAAVGPTTMASGGGAPMADNNEGADGVGNASGNWHCDSTWLGDRVITTSTRTWALPTYNNHLYKQISNGTSGGSTNDNTYFGYSTPWGYFDFNRFHCHFSPRDWQRLINNNWGFRPKRLNFKLFNIQVKEVTQNEGTKTIANNLTSTIQVFTDSEYQLPYVLGSAHQGCLPPFPADVFMIPQYGYLTLNNGSQAVGRSSFYCLEYFPSQMLRTGNNFTFSYTFEDVPFHSSYAHSQSLDRLMNPLIDQYLYYLSRTQTTGGTANTQTLGFSQGGPNTMANQAKNWLPGPCYRQQRVSTTTGQNNNSNFAWTAGTKYHLNGRNSLANPGIAMATHKDDKERFFPSNGILIFGKQNAARDNADYSDVMLTSEEEIKTTNPVATEEYGIVADNLQQQNTAPQIGTVNSQGALPGMVWQNRDVYLQGPIWAKIPHTDGNFHPSPLMGGFGLKHPPPQILIKNTPVPADPPTTFNQSKLNSFITQYSTGQVSVEIEWELQKENSKRWNPEIQYTSNYYKSTSVDFAVNTEGVYSDPHPIGTRYLTRPL

SEQ ID NO: 1112 - protein, 737 aa, Artificial Sequence
  source: /note="Description of Artificial Sequence: Synthetic polypeptide"
MAADGYLPDWLEDNLSEGIREWWALKPGAPKPKANQQKQDDGRGLVLPGYKYLGPFNGLDKGEPVNEADAAALEHDKAYDQQLKAGDNPYLRYNHADAEFQERLQEDTSFGGNLGRAVFQAKKRVLEPLGLVEEGAKTAPGKKRPVEPSPQRSPDSSTGIGKKGQQPARKRLNFGQTGDSESVPDPQPLGEPPAAPSGVGPNTMASGGGAPMADNNEGADGVGNSSGNWHCDSTWMGDRVITTSTRTWALPTYNNHLYKQISSASTGASNDNHYFGYSTPWGYFDFNRFHCHFSPRDWQRLINNNWGFRPKRLNFKLFNIQVKEVTQNEGTKTIANNLTSTIQVFTDSEYQLPYVLGSAHQGCLPPFPADVFMIPQYGYLTLNNGSQAVGRSSFYCLEYFPSQMLRTGNNFQFTYTFEDVPFHSSYAHSQSLDRLMNPLIDQYLYYLSRTQTTGGTANTQTLGFSQGGPNTMANQAKNWLPGPCYRQQRVSTTTGQNNNSNFAWTAGTKYHLNGRNSLANPGIAMATHKDDKERFFPSNGILIFGKQNAARDNADYSDVMLTSEEEIKTTNPVATEEYGIVADNLQQQNTAPQIGTVNSQGALPGMVWQNRDVYLQGPIWAKIPHTDGNFHPSPLMGGFGLKHPPPQILIKNTPVPADPPTTFNQSKLNSFITQYSTGQVSVEIEWELQKENSKRWNPEIQYTSNYYKSTSVDFAVNTEGVYSEPHPIGTRYLTRPL

SEQ ID NO: 1113 - protein, 736 aa, Artificial Sequence
  source: /note="Description of Artificial Sequence: Synthetic polypeptide"
  MOD_RES (226)..(226): Any naturally occurring amino acid
MAADGYLPDWLEDTLSEGIRQWWKLKPGPPPPKPAERHKDDSRGLVLPGYKYLGPFNGLDKGEPVNEADAAALEHDKAYDRQLDSGDNPYLKYNHADAEFQERLKEDTSFGGNLGRAVFQAKKRVLEPLGLVEEPVKTAPGKKRPVEQSPQEPDSSSGIGKKGQQPAKKRLNFGQTGDSESVPDPQPLGEPPATPAAVGPTTMASGGGAPMADNNEGADGVGNASXNWHCDSTWLGDRVITTSTRTWALPPITTTSTSKSPVLQRGRSNDNHYFGYSTPWGYFDFNRFHCHFSPRDWQRLINNNWGFRPKRLNFKLFNIQVKEVTDNNGVKTIANNLTSTVQVFTDSDYQLPYVLGSAHQGCLPPFPADVFMIPQYGYLTLNNGSQAVGRSSFYCLEYFPSQMLRTGNNFQFTYTFEDVPFHSSYAHSQSLDRLMNPLIDQYLYYLSRTQTTGGTANTQTLGFSQGGPNTMANQAKNWLPGPCYRQQRVSTTTGQNNNSNFAWTAGTKYHLNGRNSLANPGIAMATHKDDKERFFPSNGILIFGKQNAARDNADYSDVMLTSEEEIKTTNPVATEEYGIVADNLQQQNTAPQIGTVNSQGALPGMVWQNRDVYLQGPIWAKIPHTDGNFHPSPLMGGFGLKHPPPQILIKNTPVPADPPTTFNQSKLNSFITQYSTGQVSVEIEWELQKENSKRWNPEIQYTSNYYKSTNVDFAVNTEGVYSEPHPIGTRYLTRPL

SEQ ID NO: 1114 - protein, 736 aa, Artificial Sequence
  source: /note="Description of Artificial Sequence: Synthetic polypeptide"
  MOD_RES (239)..(239): Any naturally occurring amino acid
MAADGYLPDWLEDNLSEGIREWWDLKPGAPKPKANQQKQDDGRGLVLPGYKYLGPFNGLDKGEPVNAADAAALEHDKAYDQQLQAGDNPYLRYNHADAEFQERLQGDTSFGGNLGRAVFQAKKRVLEPLGLVEEAAKTAPGKKRPVEQSPQEPDSSAGIGKSGAQPAKKRLNFGQTGDTESVPDPQPIGEPPAAPSGVGPNTMAAGGGAPMADNNEGADGVGSSSGNWHCDSTWLGDRXITTSTRTWALPTYNNHLYKQISSASTGASNDNHYFGYSTPWGYFDFNRFHCHFSPRDWQRLINNNWGFRPKRLNFKLFNIQVKEVTDNNGVKTIANNLTSTVQVFTDSEYQLPYVLGSAHQGCLPPFPADVFMIPQYGYLTLNNGSQAVGRSSFYCLEYFPSQMLRTGNNFTFSYTFEDVPFHSSYAHSQSLDRLMNPLIDQYLYYLSRTQTTGGTANTQTLGFSQGGPNTMANQAKNWLPGPCYRQQRVSTTTGQNNNSNFAWTAGTKYHLNGRNSLANPGIAMATHKDDKERFFPSNGILIFGKQNAARDNADYSDVMLTSEEEIKTTNPVATEEYGIVADNFQQQNTAPQIGTVNSQGALPGMVWQNRDVYLQGPIWAKIPHTDGNFHPSPLMGGFGLKHPPPQILIKNTPVPADPPTTFNQSKLNSFITQYSTGQVSVEIEWELQKENSKRWNPEIQYTSNYYKSTSVDFAVNTEGVYSEPHPIGTRYLTRPL

SEQ ID NO: 1115 - protein, 736 aa, Artificial Sequence
  source: /note="Description of Artificial Sequence: Synthetic polypeptide"
MAADGYLPDWLEDNLSEGIREWWALKPGAPKPKANQQKQDDGRGLVLPGYKYLGPFNGLDKGEPVNEADAAALEHDKAYDQQLKAGDNPYLKYNHADAEFQERLQEDTSFGGNLGRAVFQAKKRLLEPLGLVEEAAKTAPGKKRPVEQSPQEPDSSAGIGKSGAQPAKKRLNFGQTGDTESVPDPQPLGEPPATPAAVGPTTMASGGGAPMADNNEGADGVGNASGNWHCDSTWLGDRVITTSTRTWALPTYNNHLYKQISSASTGASNDNHYFGYSTPWGYFDFNRFHCHFSPRDWQRLINNNWGFRPKRLSFKLFNIQVKEVTQNEGTKTIANNLTSTIQVFTDSEYQLPYVLGSAHQGCLPPFPADVFMIPQYGYLTLNNGSQAVGRSSFYCLEYFPSQMLRTGNNFQFTYTFEDVPFHSSYAHSQSLDRLMNPLIDQYLYYLSRTQTTGGTANTQTLGFSQGGPNTMANQAKNWLPGPCYRQQRVSTTTGQNNNSNFAWTAGTKYHLNGRNSLANPGIAMATHKDDKERFFPSNGILIFGKQNAARDNADYSDVMLTSEEEIKTTNPVATEEYGIVADNLQQQNTAPQIGTVNSQGALPGMVWQNRDVYLQGPIWAKIPHTDGNFHPSPLMGGFGLKHPPPQILIKNTPVPADPPTTFNQSKLNSFITQYSTGQVSVEIEWELQKENSKRWNPEIQYTSNYYKSTSVDFAVNTEGVYSEPHPIGTRYLTRPL

SEQ ID NO: 1116 - protein, 736 aa, Artificial Sequence
  source: /note="Description of Artificial Sequence: Synthetic polypeptide"
MAADGYLPDWLEDTLSEGIRQWWKLKPGPPPPKPAERHKDDSRGLVLPGYKYLGPFNGLDKGEPVNEADAAALEHDKAYDQQLQAGDNPYLRYNHADAEFQERLQGDTSFGGNLGRAVFQAKKRLLEPLGLVEEAAKTAPGKKRPVEQSPQEPDSSAGIGKSGAQPAKKRLNFGQTGDTESVPDPQPIGEPPAAPSGVGSLTMASGGGAPVADNNEGADGVGSSSGNWHCDSQWLGDRVITTSTRTWALPTYNNHLYKQISSASTGASNDNHYFGYSTPWGYFDFNRFHCHFSPRDWQRLINNNWGFRPKRLSFKLFNIQVKEVTQNEGTKTIANNLTSTIQVFTDSEYQLPYVLGSAHQGCLPPFPADVFMIPQYGYLTLNNGSQAVGRSSFYCLEYFPSQMLRTGNNFQFTYTFEDVPFHSSYAHSQSLDRLMNPLIDQYLYYLSRTQTTGGTANTQTLGFSQGGPNTMANQAKNWLPGPCYRQQRVSTTTGQNNNSNFAWTAGTKYHLNGRNSLANPGIAMATHKDDKERFFPSNGILIFGKQNAARDNADYSDVMLTSEEEIKTTNPVATEEYGIVADNLQQQNTAPQIGTVNSQGALPGMVWQNRDVYLQGPIWAKIPHTDGNFHPSPLMGGFGLKHPPPQILIKNTPVPADPPTTFNQSKLNSFITQYSTGQVSVEIEWELQKENSKRWNPEIQYTSNYYKSTSVDFAVNTEGVYSEPHPIGTRYLTRPL

SEQ ID NO: 1117 - protein, 738 aa, Artificial Sequence
  source: /note="Description of Artificial Sequence: Synthetic polypeptide"
MAADGYLPDWLEDNLSEGIRQWWKLKPGPPPPKPAERHKDDSRGLVLPGYKYLGPFNGLDKGEPVNAADAAALEHDKAYDQQLKAGDNPYLRYNHADAEFQERLQEDTSFGGNLGRAVFQAKKRVLEPLGLVEEGAKTAPGKKRPVEPSPQRSPDSSTGIGKKGQQPAKKRLNFGQTGDSESVPDPQPLGEPPATPAAVGPTTMASGGGAPMADNNEGADGVGNASGNWHCDSTWLGDRVITTSTRTWALPTYNNHLYKQISNGTSGGSTNDNTYFGCVTPWGYFDFNKFHCHFSPDDWQRLINNGWGFRTKRLNFKLFSMKVKKGTDNTGIKTIANNLTNTVHVFADSEYQLPYVLGSAHQGCLPPFPADVFMIPQYGYLTLNNGSQAVGRSSFYCLEYFPSQMLRTGNNFTFSYTFEDVPFHSSYAHSQSLDRLMNPLIDQYLYYLSRTQTTGGTANTQTLGFSQGGPNTMANQAKNWLPGPCYRQQRVSTTTGQNNNSNFAWTAGTKYHLNGRNSLANPGIAMATHKDDKERFFPSNGILIFGKQNAARDNADYSDVMLTSEEEIKTTNPVATEEYGIVADNLQQQNTAPQIGTVNSQGALPGMVWQNRDVYLQGPIWAKIPHTDGNFHPSPLMGGFGLKHPPPQILIKNTPVPADPPTTFNQSKLNSFITQYSTGQVSVEIEWELQKENSKRWNPEIQYTSNYYKSTSVDFAVNTEGVYSEPHPIGTRYLTRPL

SEQ ID NO: 1118 - protein, 737 aa, Artificial Sequence
  source: /note="Description of Artificial Sequence: Synthetic polypeptide"
MAADGYLPDWLEDTLSEGIRQWWKLKPGPPPPKPAERHKDDSRGLVLPGYKYLGPFNGLDKGEPVNAADAAALEHDKAYDQQLKAGDNPYLRYNHADAEFQERLQEDTSFGGNLGRAVFQAKKRVLEPLGLVEEGAKTAPGKKRPVEPSPQRSPDSSTGIGKKGQQPAKKRLNFGQTGDSESVPDPQPIGEPPAGPSGLGSGTMAAGGGAPMADNNEGADGVGSSSGNWHCDSTWLGDRVITTSTRTWALPTYNNHLYKQISSASTGASNDNHYFGYSTPWGYFDFNRFHCHFSPRDWQRLINNNWGFRPKRLNFKLFNIQVKEVTDNNGVKTIANNLTSTVQVFTDSEYQLPYVLGSAHQGCLPPFPADVFMIPQYGYLTLNNGSQAVGRSSFYCLEYFPSQMLRTGNNFTFSYTFEDVPFHSSYAHSQSLDRLMNPLIDQYLYYLSRTQTTGGTANTQTLGFSQGGPNTMANQAKNWLPGPCYRQQRVSTTTGQNNNSNFAWTAGTKYHLNGRNSLANPGIAMATHKDDKERFFPSNGILIFGKQNAARDNADYSDVMLTSEEEIKTTNPVATEEYGIVADNLQQQNTAPQIGTVNSQGALPGMVWQNRDVYLQGPIWAKILHTDGNFHPSPLMGGFGMKHPPPPILIKNTPVPADPPTTFNQSKLNSFITQYSTGQVSVEIEWELPKENSKRWNPEIQYTSNYYKSTSVDFAVNTEGVYYEPHPIGTRYLTPPL

SEQ ID NO: 1119 - protein, 737 aa, Artificial Sequence
  source: /note="Description of Artificial Sequence: Synthetic polypeptide"
MAADGYLPDWLEDNLSEGIREWWALKPGAPKPKANQQKQDDGRGLVLPGYKYLGPFNGLDKGEPVNAADAAALEHDKAYDQQLKAGDNPYLRYNHADAEFQERLQEDTSFGGNLGRAVFQAKKRVLEPLGLVEEGAKTAPGKKRPVEPSPQRSPDSSTGIGKKGQQPARKRLNFGQTGDSESVPDPQPLGEPPAAPSGVAPNTMAAGGGAPMADNNEGADGVGNASGNWHCDSTWLGDRVITTSTRTWALPTYNNHLYKQISSASTGASNDNHYFGYSTPWGYFDFNRFHCHFSPRDWQRLITTIGGFRPKRLNFKLFNIQVKEVTDNNGVKTIANNLTSTVQVFTDSEYQLPYVLGSAHQGCLPPFPADVFMIPQYGYLTLNNGSQAVGRSSFYCLEYFPSQMLRTGNNFTFSYTFEDVPFHSSYAHSQSLDRLMNPLIDQYLYYLSRTQTTGGTANTQTLGFSQGGPNTMANQAKNWLPGPCYRQQRVSTTTGQNNNSNFAWTAGTKYHLNGRNSLANPGIAMATHKDDKERFFPSNGILIFGKQNAARDNADYSDVMLTSEEEIKTTNPVATEEYGIVADNLQQQNTAPQIGTVNSQGALPGMVWQNRDVYLQGPIWAKIPHTDGNFHPSPLMGGFGLKHPPPQILIKNTPVPADPPTTFNQSKLNSFITQYSTGQVSVEIEWELQKENSKRWNPEIQYTSNYYKSTSVDFAVNTEGVYSEPHPIGTRYLTRPL

SEQ ID NO: 1120 - protein, 736 aa, Artificial Sequence
  source: /note="Description of Artificial Sequence: Synthetic polypeptide"
MAADGYLPDWLEDTLSEGIRQWWKLKPGPPPPKPAERHKDDGRGLVLPGYKYLGPFNGLDKGEPVNAADAAALEHDKAYDQQLKAGDNPYLRYNHADAEFQERLQEDTSFGGNLGRAVFQAKKRVLEPLGLVEEPVKTAPGKKRPVEQSPQEPDSSSGIGKKGQQPAKKRLNFGQTGDSESVPDPQPLGEPPATPAAVGPTTMASGGGAPMADNNEGADGVGNASGNWHCDSTWMGDRVITTSTRTWALPTYNNHLYKQISSASTGASNDNHYFGYSTPWGYFDFNRFHCHFSPRDWQRLINNNWGFRPKRLNFKLFNIQVKEVTQNEGTKTIANNLTSTIQVFTDSEYQLPYVLGSAHQGCLPPFPADVFMIPQYGYLTLNNGSQAVGRSSFYCLEYFPSQMLRTGNNFQFTYTFEDVPFHSSYAHSQSLDRLMNPLIDQYLYYLSRTQTTGGTANTQTLGFSQGGPNTMANHAKNWLPGPCYRQQRVSTTTGQNNNSNFAWTAGTKYHLNGRNSLANPGIAMATHKDDKERFFPSNGILIFGKQNAARDNADYSDVMLTSEEEIKTTNPVATEEYGIVADNLQQQNTAPQIGTVNSQGALPGMVWQNRDVYLQGPIWAKIPHTDGNFHPSPLMGGFGLKHPPPQILIKNTPVPADPPTTFNQSKLNSFITQYSTGQVSVEIEWELQKENSKRWNPEIQYTSNYYKSTSVDFAVNTEGVYSEPHPIGTRYLTRPL

SEQ ID NO: 1121 - protein, 737 aa, Artificial Sequence
  source: /note="Description of Artificial Sequence: Synthetic polypeptide"
MAADGYLPDWLEDNLSQGIREWWDLKPGAPKPKANQQKQDDGRGLVLPGYKYLGPFNGLDKGEPVNAADAAALEHDKAYDQQLKAGDNPYLRYNHADAEFQERLQEDTSFGGNLGRAVFQAKKRVLEPLGLVEEGAKTAPGKKRPVEPSPQRSPDSSTGIGKKGQQPARKRLNFGQTGDSESVPDPQPLGEPPAAPAAVGPTTMASGGGAPMADNNEGADGVGSSSGNWHCDSQWLGDRVITTSTRTWALPTYNNHLYKQISSASTGASNDNHYFGYSTPWGYFDFNRFHCHFSPRDWQRLINNNWGFRPKRLSFKLFNIQVKEVTQNEGTKTIANNLTSTIQVFTDSEYQLPYVLGSAHQGCLPPFPADVFMIPQYGYLTLNNGSQAVGRSSFYCLEYFPSQMLRTGNNFQFTYTFEDVPFHSSYAHSQSLDRLMNPLIDQYLYYLSRTQTTGGTTNAQTLGFSQGGPNTMANQAKNWLPGPCYRQQRVSTTTGQNNNSNFAWTAGTKYHLNGRNSLANPGIAMATHKDDKERFFPSNGILIFGKQNAARDNADYSDVMLTSEEEIKTTNPVATEEYGIVADNLQQQNTAPQIGTVNSQGALPGMVWQNRDVYLQGPIWAKIPHTDGNFHPSPLMGGFGLKHPPPQILIKNTPVPADPPTTFNQSKLNSFITQYSTGQVSVEIEWELQKENSKRWNPEIQYTSNYYKSTNVDFAVNTEGVYSEPHPIGTRYLTRPL

SEQ ID NO: 1122 - protein, 736 aa, Artificial Sequence
  source: /note="Description of Artificial Sequence: Synthetic polypeptide"
MAADGYLPDWLEDNLSEGIREWWDLKPGAPKPKANQQKQDDGRGLVLPGYKYLGPFNGLDKGEPVNAADAAALEHDKAYDQQLKAGDNPYLRYNHADAEFQERLQEDTSFGGNLGRAVFQAKKRVLEPFGLVEEGAKTAPGKKRPVEQSPQEPDSSSGIGKTGQQPAKKRLNFGQTGDTESVPDPQPIGEPPAAPSGVGPNTMAAGGGAPMADNNEGADGVGSSSGNWHCDSTWMGDRVITTSTRTWALPTYNNHLYKQISSASTGASNDNHYFGYSTPWGYFDFNRFHCHFSPRDWQRLINNNWGFRPKRLNFKLFNIQVKEVTQNEGTKTIANNLTSTIQVFTDSEYQLPYVLGSAHQGCLPPFPADVFMIPQYGYLTLNNGSQAVGRSSFYCLEYFPSQMLRTGNNFQFTYTFEDVPFHSSYAHSQSLDRLMNPLIDQYLYYLSRTQTTGGTANTQTLGFSQGGPNTMANQAKNWLPGPCYRQQRVSTTTGQNNNSNFAWTAGTKYHLNGRNSLANPGIAMATHKDDKERFFPSNGILIFGKQNAARDNADYSDVMLTSEEEIKTTNPVATEEYGIVADNLQQQNTAPQIGTVNSQGALPGMVWQNRDVYLQGPIWAKIPHTDGNFHPSPLMGGFGLKHPPPQILIKNTPVPADPPTTFNQSKLNSFITQYSTGQVSVEIEWELQKENSKRWNPEIQYTSNYYKSTNVDFAVNTEGVYSEPHPIGTRYFTRPL

SEQ ID NO: 1123 - protein, 736 aa, Artificial Sequence
  source: /note="Description of Artificial Sequence: Synthetic polypeptide"
MAADGYLPDWLEDNLSEGIREWWDLKPGAPKPKANQQKQDDGRGLVLPGYKYLGPFNGLDKGEPVNAADAAALEHDKAYDQQLKAGDNPYLRYNHADAEFQERLQEDTSFGGNLGRAVFQAKKRVLEPLGLVEEGAKTAPGKKRPVEQSPQEPDSSSGIGKTGQQPAKKRLNFGQTGDSESVPDPQPLGEPPATPAAVGPTTMASGGGAPMADNNEGADGVGNSSGNWHCDSTWMGDRVITTSTRTWALPTYNNHLYKQISSASTGASNDNHYFGYSTPWGYFDFNRFHCHFSPRDWQRLINNNWGFRPKRLNFKLFNIQVKEVTDNNGVKTIANNLTSTVQVFTDSEYQLPYVLGSAHQGCLPPFPADVFMIPQYGYLTLNNGSQAVGRSSFYCLEYFPSQMLRTGNNFQFTYTFEDVPFHSSYAHSQSLDRLMNPLIDQYLYYLSRTQTTGGTANTQTLGFSQGGPNTMANQAKNWLPGPCYRQQRVSTTTGQNNNSNFAWTAGTKYHLNGRNSLANPGIAMATHKDDKERFFPSNGILIFGKQNAARDNADYSDVMLTSEEEIKTTNPVATEEYGIVADNLQQQNTAPQIGTVNSQGALPGMVWQNRDVYLQGPIWAKIPHTDGNFHPSPLMGGFGLKHPPPQILIKNTPVPADPPTTFNQSKLNSFITQYSTGQVSVEIEWELQKENSKRWNPEIQYTSNYYKSTNVDFAVNTEGVYSEPHPIGTRYLTRPL

SEQ ID NO: 1124 - protein, 736 aa, Artificial Sequence
  source: /note="Description of Artificial Sequence: Synthetic polypeptide"
MAADGYLPDWLEDNLSEGIREWWDLKPGAPKPKANQQKQDDGRGLVLPGYKYLGPFNGLDKGEPVNAADAAALEHDKAYDQQLKAGDNPYLRYNHADAEFQERLQEDTSFGGNLGRAVFQAKKRVLEPLGLVEEGAKTAPGKKRPVEQSPQEPDSSSGIGKTGQQPAKKRLNFGQTGDSESVPDPQPLGEPPATPAAVGPTTMASGGGAPMADNNEGADGVGNASGNWHCDSTWLGDRVITTSTRTWALPTYNNHLYKQISSASTGASNDNHYFGYSTPWGYFDFNRFHCHFSPRDWQRLINNNWGFRPKRLNFKLFNIQVKEVTQNEGTKTIANNLTSTIQVFTDSEYQLPYVLGSAHQGCLPPFPADVFMIPQYGYLTLNNGSQAVGRSSFYCLEYFPSQMLRTGNNFEFSYQFEDVPFHSSYAHSQSLDRLMNPLIDQYLYYLSRTQTTGGTANTQTLGFSQGGPNTMANQAKNWLPGPCYRQQRVSTTTGQNNNSNFAWTAGTKYHMNGRNSLVNPGIAMATHKDDKERFFPSNGILIFGKQNVARDNADYSDVMLTSEEEIKTTNPVATEEYGIVADNLQQQNTAPQIGTVNSQGALPGMVWQNRDVYLQGPIWAKIPHTDGNFHPSPLMGGFGLKHPPPQILIKNTPVPADPPTTFNQSKLNSFITQYSTGQVSVEIEWELQKENSKRWNPEIQYTSNYYKSTSVDFAVNTEGVYSEPHPIGTRYLTRPL

SEQ ID NO: 1125 - DNA, 2217 bp, Artificial Sequence
  source: /note="Description of Artificial Sequence: Synthetic polynucleotide"
atggctgccgatggttatcttccagattggctcgaggacaacctctctgagggcattcgcgagtggtgggcgctgaaacctggagccccgaagcccaaagccaaccagcaaaagcaggacgacggccggggtctggtgcttcctggctacaagtacctcggacccttcaacggactcgacaagggggagcccgtcaacgcggcggacgcagcggccctcgagcacgacaaggcctacgaccagcagctgcaggcgggtgacaatccgtacctgcggtataaccacgccgacgccgagtttcaggagcgtctgcaagaagatacgtcttttgggggcaacctcgggcgagcagtcttccaggccaagaagcgggttctcgaacctctcggtctggttgaggaaggcgctaagacggctcctggaaagaagagaccggtagagccatcaccccagcgttctccagactcctctacgggcatcggcaagaaaggccaacagcccgccagaaaaagactcaattttggtcagactggcgactcagagtcagttccagaccctcaacctctcggagaacctccagcagcgccctctggtgtgggacctaatacaatggctgcaggcggtggcgcaccaatggcagacaataacgaaggcgccgacggagtgggtagttcctcgggaaattggcattgcgattccacatggctgggcgacagagtcatcaccaccagcacccgaacctgggccctgcccacctacaacaaccacctctacaagcaaatctccaacgggacatcgggaggagccaccaacgacaacacctacttcggctacagcaccccctgggggtattttgactttaacagattccactgccacttttcaccacgtgactggcagcgactcatcaacaacaactggggattccggcccaagagactcagcttcaagctcttcaacatccaggtcaaggaggtcacgcagaatgaaggcaccaagaccatcgccaataacctcaccagcaccatccaggtgtttacggactcggagtaccagctgccgtacgttctcggctctgcccaccagggctgcctgcctccgttcccggcggacgtgttcatgattccccagtacggctacctaacactcaacaacggtagtcaggccgtgggacgctcctccttctactgcctggaatactttccttcgcagatgctgagaaccggcaacaacttccagtttacttacaccttcgaggacgtgcctttccacagcagctacgcccacagccagagcttggaccggctgatgaatcctctgattgaccagtacctgtactacttgtctcggactcaaacaacaggaggcacggcaaatacgcagactctgggcttcagccaaggtgggcctaatacaatggccaatcaggcaaagaactggctgccaggaccctgttaccgccaacaacgcgtctcaacgacaaccgggcaaaacaacaatagcaactttgcctggactgctgggaccaaataccatctgaatggaagaaattcattggctaatcctggcatcgctatggcaacacacaaagacgacgaggagcgtttttttcccagtaacgggatcctgatttttggcaaacaaaatgctgccagagacaatgcggattacagcgatgtcatgctcaccagcgaggaagaaatcaaaaccactaaccctgtggctacagaggaatacggtatcgtggcagataacttgcagcagcaaaacacggctcctcaaattggaactgtcaacagccagggggccttacccggtatggtttggcagaaccgggacgtgtacctgcagggtcccatctgggccaagattcctcacacggacggcaacttccacccgtctccgctgatgggcggctttggcctgaaacatcctccgcctcagatcctgatcaagaacacgcctgtacctgcggatcctccgaccaccttcaaccagtcaaagctgaactctttcatcacgcaatacagcaccggacaggtcagcgtggaaattgaatgggagctgcagaaggaaaacagcaagcgctggaaccccgagatccagtacacctccaactactacaaatctacaagtgtggactttgctgttaatacagaaggcgtgtactctgaaccccgccccattggcacccgttacctcacccgtaatctgtaa

SEQ ID NO: 1126 - protein, 738 aa, Artificial Sequence; identical to SEQ ID NO: 116
  source: /note="Description of Artificial Sequence: Synthetic polypeptide"

SEQ ID NO: 1127 - protein, 735 aa, Artificial Sequence
  source: /note="Description of Artificial Sequence: Synthetic polypeptide"
MAADGYLPDWLEDNLSEGVREWWALQPGAPKPKANQQHQDNARGLVLPGYKYLGPGNGLDKGEPVNAADAAALEHDKAYDQQLKAGDNPYLKYNHADAEFQQRLQGDTSFGGNLGRAVFQAKKRVLEPLGLVEQAGETAPGKKRPLIESPQQPDSSTGIGKKGKQPAKKKLVFEDETGAGDGPPEGSTSGAMSDDSEMRAAAGGAAVEGGQGADGVGNASGDWHCDSTWSEGHVTTTSTRTWVLPTYNNHLYKRLGESLQSNTYNGFSTPWGYFDFNRFHCHFSPRDWQRLINNNWGMRPKAMRVKIFNIQVKEVTTSNGETTVANNLTSTVQIFADSSYELPYVMDAGQEGSLPPFPNDVFMVPQYGYCGLVTGNTSQQQTDRNAFYCLEYFPSQMLRTGNNFEITYSFEKVPFHSMYAHSQSLDRLMNPLIDQYLWGLQSTTTGTTLNAGTATTNFTKLRPTNFSNFKKNWLPGPSIKQQGFSKTANQNYKIPATGSDSLIKYETHSTLDGRWSALTPGPPMATAGPADSKFSNSQLIFAGPKQNGNTATVPGTLIFTSEEELAATNATDTDMWGNLPGGDQSNSNLPTVDRLTALGAVPGMVWQNRDIYYQGPIWAKIPHTDGHFHPSPLIGGFGLKHPPPQIFIKNTPVPANPATTFSSTPVNSFITQYSTGQVSVQIDWEIQKERSKRWNPEVQFTSNYGQQNSLLWAPDAAGKYTEPRAIGTRYLTHHL

SEQ ID NO: 1128 - protein, 735 aa, Artificial Sequence
  source: /note="Description of Artificial Sequence: Synthetic polypeptide"
MAADGYLPDWLEDNLSEGVREWWALQPGAPKPKANQQHQDNARGLVLPGYKYLGPGNGLDKGEPVNAADAAALEHDKAYDQQLKAGDNPYLKYNHADAEFQQRLQGDTSFGGNLGRAVFQAKKRVLEPLGLVEQAGETAPGKKRPLIESPQQPDSSTGIGKKGKQPAKKKLVFEDETGAGDGPPEGSTSGAMSDDSEMRAAAGGAAVEGGQGADGVGNASGDWHCDSTWSEGHVTTTSTRTWVLPTYNNHLYKRLGESLQSNTYNGFSTPWGYFDFNRFHCHFSPRDWQRLINNNWGMRPKAMRVKIFNIQVKEVTTSNGETTVANNLTSTVQIFADSSYELPYVMDAGQEGSLPPFPNDVFMVPQYGYCGLVTGNTSQQQTDRNAFYCLEYFPSQMLRTGNNFEITYSFEKVPFHSMYAHSQSLDRLMNPLIDQYLWGLQSTTTGTTLNAGTATTNFTKLRPTNFSNFKKNWLPGPSIKQQGFSKTANQNYLIPATGSDSLIRYETHSTLDGRWSALTPGPPMATAGPADSKFSNSQLIFAGPKQNGNTATVPGTLIFTSEEELAATNATDTDMWGNLPFRDLSSSNLPTVDRSTPLGAVPGMVWQNRDIYYQGPIWAKIPHTDGHFHPSPLIGGFGLKHPPPQIFIKNTPVPANPATTFSSTPVNSFITQYSTGQVSVQIDWEIQKERSKRWNPEVQFTSNYGQQNSLLWAPDAAGKYTEPRAIGTRYLTHHL

SEQ ID NO: 1129 - protein, 735 aa, Artificial Sequence
  source: /note="Description of Artificial Sequence: Synthetic polypeptide"
MAADGYLPDWLEDNLSEGVREWWALQPGAPKPKANQQHQDNARGLVLPGYKYLGPGNGLDKGEPVNAADAAALEHDKAYDQQLKAGDNPYLKYNHADAEFQQRLQGDTSFGGNLGRAVFQAKKRVLEPLGLVEQAGETAPGKKRPLIESPQQPDSSTGIGKKGKQPAKKKLVFEDETGAGDGPPEGSTSGAMSDDSEMRAAAGGAAVEGGQGADGVGNASGDWHCDSTWSEGHVTTTSTRTWVLPTYNNHLYKRLGESLQSNTYNGFSTPWGYFDFNRFHCHFSPRDWQRLINNNWGMRPKAMRVKIFNIQVKEVTTSNGETTVANNLTSTVQIFADSSYELPYVMDAGQEGSLPPFPNDVFMVPQYGYCGLVTGNTSQQQTDRNAFYCLEYFPSQMLRTGNNFEITYSFEKVPFHSMYAHSQSLDRLMNPLIDQYLWGLQSTTTGTTLNAGTATTNFTKLRPTNFSNFKKNWLPGPSIKQQGFSKTANQNYYIPATGSDSLILYETHSTLDGRWSALTPGPPMATAGPADSKFSNSQLIFAGPKQNGNTATVPGTLIFTSEEELAATNATDTDMWGNLPGGDQSNSNLPTVDRLTALGAVPGMVWQNRDIYYQGPIWAKIPHTDGHFHPSPLIGGFGLKHPPPQIFIKNTPVPANPATTFSSTPVNSFITQYSTGQVSVQIDWEIQKERSKRWNPEVQFTSNYGQQNSLLWAPDAAGKYTEPRAIGTRYLTHHL

SEQ ID NO: 1130 - protein, 735 aa, Artificial Sequence
  source: /note="Description of Artificial Sequence: Synthetic polypeptide"
MAADGYLPDWLEDNLSEGVREWWALQPGAPKPKANQQHQDNARGLVLPGYKYLGPGNGLDKGEPVNAADAAALEHDKAYDQQLKAGDNPYLKYNHADAEFQQRLQGDTSFGGNLGRAVFQAKKRVLEPLGLVEQAGETAPGKKRPLIESPQQPDSSTGIGKKGKQPAKKKLVFEDETGAGDGPPEGSTSGAMSDDSEMRAAAGGAAVEGGQGADGVGNASGDWHCDSTWSEGHVTTTSTRTWVLPTYNNHLYKRLGESLQSNTYNGFSTPWGYFDFNRFHCHFSPRDWQRLINNNWGMRPKAMRVKIFNIQVKEVTTSNGETTVANNLTSTVQIFADSSYELPYVMDAGQEGSLPPFPNDVFMVPQYGYCGLVTGNTSQQQTDRNAFYCLEYFPSQMLRTGNNFEITYSFEKVPFHSMYAHSQSLDRLMNPLIDQYLWGLQSTTTGTTLNAGTATTNFTKLRPTNFSNFKKNWLPGPSIKQQGFSKTANQNYGIPATGSDSLIKYETHSTLDGRWSALTPGPPIATAGPADSKFSNSQLIFAGPKQNGNTATVPGTLIFTSEEELAATNATDTDMWGNLPLYDASSSNLPTVDRLTLLGAVPGMVWQNRDIYYQGPIWAKIPHTDGHFHPSPLIGGFGLKHPPPQIFIKNTPVPANPATTFSSTPVNSFITQYSTGQVSVQIDWEIQKERSKRWNPEVQFTSNYGQQNSLLWAPDAAGKYTEPRAIGTRYLTHHL

SEQ ID NO: 1131 - protein, 735 aa, Artificial Sequence
  source: /note="Description of Artificial Sequence: Synthetic polypeptide"
MAADGYLPDWLEDNLSEGVREWWALQPGAPKPKANQQHQDNARGLVLPGYKYLGPGNGLDKGEPVNAADAAALEHDKAYDQQLKAGDNPYLKYNHADAEFQQRLQGDTSFGGNLGRAVFQAKKRVLEPLGLVEQAGETAPGKKRPLIESPQQPDSSTGIGKKGKQPAKKKLVFEDETGAGDGPPEGSTSGAMSDDSEMRAAAGGAAVEGGQGADGVGNASGDWHCDSTWSEGHVTTTSTRTWVLPTYNNHLYKRLGESLQSNTYNGFSTPWGYFDFNRFHCHFSPRDWQRLINNNWGMRPKAMRVKIFNIQVKEVTTSNGETTVANNLTSTVQIFADSSYELPYVMDAGQEGSLPPFPNDVFMVPQYGYCGLVTGNTSQQQTDRNAFYCLEYFPSQMLRTGNNFEITYSFEKVPFHSMYAHSQSLDRLMNPLIDQYLWGLQSTTTGTTLNAGTATTNFTKLRPTNFSNFKKNWLPGPSIKQQGFSKTANQNYTIPATGSDSLITYETHSTLDGRWSALTPGPPGATAGPADSKFSNSQLIFAGPKQNGNTATVPGTLIFTSEEELAATNATDTDMWGNLPRVDTSASNLPTVDRYTNLGAVPGMVWQNRDIYYQGPIWAKIPHTDGHFHPSPLIGGFGLKHPPPQIFIKNTPVPANPATTFSSTPVNSFITQYSTGQVSVQIDWEIQKERSKRWNPEVQFTSNYGQQNSLLWAPDAAGKYTEPRAIGTRYLTHHL

SEQ ID NO: 1132 - protein, 735 aa, Artificial Sequence
  source: /note="Description of Artificial Sequence: Synthetic polypeptide"
MAADGYLPDWLEDNLSEGVREWWALQPGAPKPKANQQHQDNARGLVLPGYKYLGPGNGLDKGEPVNAADAAALEHDKAYDQQLKAGDNPYLKYNHADAEFQQRLQGDTSFGGNLGRAVFQAKKRVLEPLGLVEQAGETAPGKKRPLIESPQQPDSSTGIGKKGKQPAKKKLVFEDETGAGDGPPEGSTSGAMSDDSEMRAAAGGAAVEGGQGADGVGNASGDWHCDSTWSEGHVTTTSTRTWVLPTYNNHLYKRLGESLQSNTYNGFSTPWGYFDFNRFHCHFSPRDWQRLINNNWGMRPKAMRVKIFNIQVKEVTTSNGETTVANNLTSTVQIFADSSYELPYVMDAGQEGSLPPFPNDVFMVPQYGYCGLVTGNTSQQQTDRNAFYCLEYFPSQMLRTGNNFEITYSFEKVPFHSMYAHSQSLDRLMNPLIDQYLWGLQSTTTGTTLNAGTATTNFTKLRPTNFSNFKKNWLPGPSIKQQGFSKTANQNYSIPATGSDSLIKYETHSTLDGRWSALTPGPPFATAGPADSKFSNSQLIFAGPKQNGNTATVPGTLIFTSEEELAATNATDTDMWGNLPDYDSSLSNLPTVDRDTTLGAVPGMVWQNRDIYYQGPIWAKIPHTDGHFHPSPLIGGFGLKHPPPQIFIKNTPVPANPATTFSSTPVNSFITQYSTGQVSVQIDWEIQKERSKRWNPEVQFTSNYGQQNSLLWAPDAAGKYTEPRAIGTRYLTHHL

SEQ ID NO: 1133 - protein, 735 aa, Artificial Sequence
  source: /note="Description of Artificial Sequence: Synthetic polypeptide"
MAADGYLPDWLEDNLSEGVREWWALQPGAPKPKANQQHQDNARGLVLPGYKYLGPGNGLDKGEPVNAADAAALEHDKAYDQQLKAGDNPYLKYNHADAEFQQRLQGDTSFGGNLGRAVFQAKKRVLEPLGLVEQAGETAPGKKRPLIESPQQPDSSTGIGKKGKQPAKKKLVFEDETGAGDGPPEGSTSGAMSDDSEMRAAAGGAAVEGGQGADGVGNASGDWHCDSTWSEGHVTTTSTRTWVLPTYNNHLYKRLGESLQSNTYNGFSTPWGYFDFNRFHCHFSPRDWQRLINNNWGMRPKAMRVKIFNIQVKEVTTSNGETTVANNLTSTVQIFADSSYELPYVMDAGQEGSLPPFPNDVFMVPQYGYCGLVTGNTSQQQTDRNAFYCLEYFPSQMLRTGNNFEITYSFEKVPFHSMYAHSQSLDRLMNPLIDQYLWGLQSTTTGTTLNAGTATTNFTKLRPTNFSNFKKNWLPGPSIKQQGFSKTANQNYSIPATGSDSLIWYETHSTLDGRWSALTPGPPCATAGPADSKFSNSQLIFAGPKQNGNTATVPGTLIFTSEEELAATNATDTDMWGNLPQGDSSLSNLPTVDRMTVLGAVPGMVWQNRDIYYQGPIWAKIPHTDGHFHPSPLIGGFGLKHPPPQIFIKNTPVPANPATTFSSTPVNSFITQYSTGQVSVQIDWEIQKERSKRWNPEVQFTSNYGQQNSLLWAPDAAGKYTEPRAIGTRYLTHHL

SEQ ID NO: 1134 - protein, 735 aa, Artificial Sequence
  source: /note="Description of Artificial Sequence: Synthetic polypeptide"
MAADGYLPDWLEDNLSEGVREWWALQPGAPKPKANQQHQDNARGLVLPGYKYLGPGNGLDKGEPVNAADAAALEHDKAYDQQLKAGDNPYLKYNHADAEFQQRLQGDTSFGGNLGRAVFQAKKRVLEPLGLVEQAGETAPGKKRPLIESPQQPDSSTGIGKKGKQPAKKKLVFEDETGAGDGPPEGSTSGAMSDDSEMRAAAGGAAVEGGQGADGVGNASGDWHCDSTWSEGHVTTTSTRTWVLPTYNNHLYKRLGESLQSNTYNGFSTPWGYFDFNRFHCHFSPRDWQRLINNNWGMRPKAMRVKIFNIQVKEVTTSNGETTVANNLTSTVQIFADSSYELPYVMDAGQEGSLPPFPNDVFMVPQYGYCGLVTGNTSQQQTDRNAFYCLEYFPSQMLRTGNNFEITYSFEKVPFHSMYAHSQSLDRLMNPLIDQYLWGLQSTTTGTTLNAGTATTNFTKLRPTNFSNFKKNWLPGPSIKQQGFSKTANQNYCIPATGSDSLIRYETHSTLDGRWSALTPGPPLATAGPADSKFSNSQLIFAGPKQNGNTATVPGTLIFTSEEELAATNATDTDMWGNLPYKDSSRSNLPTVDRETSLGAVPGMVWQNRDIYYQGPIWAKIPHTDGHFHPSPLIGGFGLKHPPPQIFIKNTPVPANPATTFSSTPVNSFITQYSTGQVSVQIDWEIQKERSKRWNPEVQFTSNYGQQNSLLWAPDAAGKYTEPRAIGTRYLTHHL

SEQ ID NO: 1135 - protein, 735 aa, Artificial Sequence
  source: /note="Description of Artificial Sequence: Synthetic polypeptide"
MAADGYLPDWLEDNLSEGVREWWALQPGAPKPKANQQHQDNARGLVLPGYKYLGPGNGLDKGEPVNAADAAALEHDKAYDQQLKAGDNPYLKYNHADAEFQQRLQGDTSFGGNLGRAVFQAKKRVLEPLGLVEQAGETAPGKKRPLIESPQQPDSSTGIGKKGKQPAKKKLVFEDETGAGDGPPEGSTSGAMSDDSEMRAAAGGAAVEGGQGADGVGNASGDWHCDSTWSEGHVTTTSTRTWVLPTYNNHLYKRLGESLQSNTYNGFSTPWGYFDFNRFHCHFSPRDWQRLINNNWGMRPKAMRVKIFNIQVKEVTTSNGETTVANNLTSTVQIFADSSYELPYVMDAGQEGSLPPFPNDVFMVPQYGYCGLVTGNTSQQQTDRNAFYCLEYFPSQMLRTGNNFEITYSFEKVPFHSMYAHSQSLDRLMNPLIDQYLWGLQSTTTGTTLNAGTATTNFTKLRPTNFSNFKKNWLPGPSIKQQGFSKTANQNYIIPATGSDSLIYYETHSTLDGRWSALTPGPPRATAGPADSKFSNSQLIFAGPKQNGNTATVPGTLIFTSEEELAATNATDTDMWGNLPWIDNSRSNLPTVDRPTSLGAVPGMVWQNKNIYYQGPIWAKIPHTDGHFHPSPLIGGFGLKHPPPQIFIKNTPVPANPATTFTSTPVNSFITQYSTGQVSVQIDWEIQKERSKRWNPEVQFTSNYGQQNSLLWAPDAAGKYTEPRAIGTRYLTHHL

SEQ ID NO: 1136 - protein, 735 aa, Artificial Sequence
  source: /note="Description of Artificial Sequence: Synthetic polypeptide"
MAADGYLPDWLEDNLSEGVREWWALQPGAPKPKANQQHQDNARGLVLPGYKYLGPGNGLDKGEPVNAADAAALEHDKAYDQQLKAGDNPYLKYNHADAEFQQRLQGDTSFGGNLGRAVFQAKKRVLEPLGLVEQAGETAPGKKRPLIESPQQPDSSTGIGKKGKQPAKKKLVFEDETGAGDGPPEGSTSGAMSDDSEMRAAAGGAAVEGGQGADGVGNASGDWHCDSTWSEGHVTTTSTRTWVLPTYNNHLYKRLGESLQSNTYNGFSTPWGYFDFNRFHCHFSPRDWQRLINNNWGMRPKAMRVKIFNIQVKEVTTSNGETTVANNLTSTVQIFADSSYELPYVMDAGQEGSLPPFPNDVFMVPQYGYCGLVTGNTSQQQTDRNAFYCLEYFPSQMLRTGNNFEITYSFEKVPFHSMYAHSQSLDRLMNPLIDQYLWGLQSTTTGTTLNAGTATTNFTKLRPTNFSNFKKNWLPGPSIKQQGFSKTANQNYGIPATGSDSLIIYETHSTLDGRWSALTPGPPRATAGPADSKFSNSQLIFAGPKQNGNTATVPGTLIFTSEEELAATNATDTDMWGNLPGGDQSNSNLPTVDRLTALGAVPGMVWQNRDIYYQGPIWAKIPHTDGHFHPSPLIGGFGLKHPPPQIFIKNTPVPANPATTFSSTPVNSFITQYSTGQVSVQIDWEIQKERSKRWNPEVQFTSNYGQQNSLLWAPDAAGKYTEPRAIGTRYLTHHL

SEQ ID NO: 1137 - protein, 735 aa, Artificial Sequence
  source: /note="Description of Artificial Sequence: Synthetic polypeptide"
MAADGYLPDWLEDNLSEGVREWWALQPGAPKPKANQQHQDNARGLVLPGYKYLGPGNGLDKGEPVNAADAAALEHDKAYDQQLKAGDNPYLKYNHADAEFQQRLQGDTSFGGNLGRAVFQAKKRVLEPLGLVEQAGETAPGKKRPLIESPQQPDSSTGIGKKGKQPAKKKLVFEDETGAGDGPPEGSTSGAMSDDSEMRAAAGGAAVEGGQGADGVGNASGDWHCDSTWSEGHVTTTSTRTWVLPTYNNHLYKRLGESLQSNTYNGFSTPWGYFDFNRFHCHFSPRDWQRLINNNWGMRPKAMRVKIFNIQVKEVTTSNGETTVANNLTSTVQIFADSSYELPYVMDAGQEGSLPPFPNDVFMVPQYGYCGLVTGNTSQQQTDRNAFYCLEYFPSQMLRTGNNFEITYSFEKVPFHSMYAHSQSLDRLMNPLIDQYLWGLQSTTTGTTLNAGTATTNFTKLRPTNFSNFKKNWLPGPSIKQQGFSKTANQNYVIPATESDSLIYYETHSTLDGRWSALTPGPPYATAGPADSKFSNSQLIFAGPKQNGNTATVPGTLIFTSEEELAATNATDTDMWGNLPPRDDSTSNLPTVDRKTYLGAVPGMVWQNRDIYYQGPIWAKIPHTDGHFHPSPLIGGFGLKHPPPQIFIKNTPVPANPATTFSSTPVNSFITQYSTGQVSVQIDWEIQKERSKRWNPEVQFTSNYGQQNSLLWAPDAAGKYTEPRAIGTRYLTHHL

SEQ ID NO: 1138 - protein, 735 aa, Artificial Sequence
  source: /note="Description of Artificial Sequence: Synthetic polypeptide"
MAADGYLPDWLEDNLSEGVREWWALQPGAPKPKANQQHQDNARGLVLPGYKYLGPGNGLDKGEPVNAADAAALEHDKAYDQQLKAGDNPYLKYNHADAEFQQRLQGDTSFGGNLGRAVFQAKKRVLEPLGLVEQAGETAPGKKRPLIESPQQPDSSTGIGKKGKQPAKKKLVFEDETGAGDGPPEGSTSGAMSDDSEMRAAAGGAAVEGGQGADGVGNASGDWHCDSTWSEGHVTTTSTRTWVLPTYNNHLYKRLGESLQSNTYNGFSTPWGYFDFNRFHCHFSPRDWQRLINNNWGMRPKAMRVKIFNIQVKEVTTSNGETTVANNLTSTVQIFADSSYELPYVMDAGQEGSLPPFPNDVFMVPQYGYCGLVTGNTSQQQTDRNAFYCLEYFPSQMLRTGNNFEITYSFEKVPFHSMYAHSQSLDRLMNPLIDQYLWGLQSTTTGTTLNAGTATTNFTKLRPTNFSNFKKNWLPGPSIKQQGFSKTANQNYYIPATGSDSLIIYETHSTLDGRWSALTPGPPIATAGPADSKFSNSQLIFAGPKQNGNTATVPGTLIFTSEEELAATNSTDTDMWGNLPTDDDSRSNLPTVDRMTLLGAVPGMVWQNRDIYYQGPIWAKIPHTDGHFHPSPLIGGFGLKHPPPQIFIKNTPVPANPATTFSSTPVNSFITQYSTGQVSVQIDWEIQKERSKRWNPEVQFTSNYGQQNSLLWAPDAAGKYTEPRAIGTRYLTHHL

SEQ ID NO: 1139 - protein, 735 aa, Artificial Sequence
  source: /note="Description of Artificial Sequence: Synthetic polypeptide"
MAADGYLPDWLEDNLSEGVREWWALQPGAPKPKANQQHQDNARGLVLPGYKYLGPGNGLDKGEPVNAADAAALEHDKAYDQQLKAGDNPYLKYNHADAEFQQRLQGDTSFGGNLGRAVFQAKKRVLEPLGLVEQAGETAPGKKRPLIESPQQPDSSTGIGKKGKQPAKKKLVFEDETGAGDGPPEGSTSGAMSDDSEMRAAAGGAAVEGGQGADGVGNASGDWHCDSTWSEGHVTTTSTRTWVLPTYNNHLYKRLGESLQSNTYNGFSTPWGYFDFNRFHCHFSPRDWQRLINNNWGMRPKAMRVKIFNIQVKEVTTSNGETTVANNLTSTVQIFADSSYELPYVMDAGQEGSLPPFPNDVFMVPQYGYCGLVTGNTSQQQTDRNAFYCLEYFPSQMLRTGNNFEITYSFEKVPFHSMYAHSQSLDRLMNPLIDQYLWGLQSTTTGTTLNAGTATTNFTKLRPTNFSNFKKNWLPGPSIKQQGFSKTANQNYHIPATGSDSLIYYETHSTLDGRWSALTPGPPSATAGPADSKFSNSQLIFAGPKQNGNTATVPGTLIFTSEEELAATNATDTDMWGNLPRRDSSVSNLPTVDRYTDLGAVPGMVWQNRDIYYQGPIWAKIPHTDGHFHPSPLIGGFGLKHPPPQIFIKNTPVPANPATTFSSTPVNSFITQYSTGQVSVQIDWEIQKERSKRWNPEVQFTSNYGQQNSLLWAPDAAGKYTEPRAIGTRYLTHHL

SEQ ID NO: 1140 - protein, 735 aa, Artificial Sequence
  source: /note="Description of Artificial Sequence: Synthetic polypeptide"
MAADGYLPDWLEDNLSEGVREWWALQPGAPKPKANQQHQDNARGLVLPGYKYLGPGNGLDKGEPVNAADAAALEHDKAYDQQLKAGDNPYLKYNHADAEFQQRLQGDTSFGGNLGRAVFQAKKRVLEPLGLVEQAGETAPGKKRPLIESPQQPDSSTGIGKKGKQPAKKKLVFEDETGAGDGPPEGSTSGAMSDDSEMRAAAGGAAVEGGQGADGVGNASGDWHCDSTWSEGHVTTTSTRTWVLPTYNNHLYKRLGESLQSNTYNGFSTPWGYFDFNRFHCHFSPRDWQRLINNNWGMRPKAMRVKIFNIQVKEVTTSNGETTVANNLTSTVQIFADSSYELPYVMDAGQEGSLPPFPNDVFMVPQYGYCGLVTGNTSQQQTDRNAFYCLEYFPSQMLRTGNNFEITYSFEKVPFHSMYAHSQSLDRLMNPLIDQYLWGLQSTTTGTTLNAGTATTNFTKLRPTNFSNFKKNWLPGPSIKQQGFSKTANQNYSIPATGSDSLISYETHSTLDGRWSALTPGPPRATAGPADSKFSNSQLIFAGPKQNGNTATVPGTLIFTSEEELAATNATDTDMWGNLPRHDSSLSNLPTVDRNTGLGAVPGMVWQNRDIYYQGPIWAKIPHTDGHFHPSPLIGGFGLKHPPPQIFIKNTPVPANPATTFSSTPVNSFITQYSTGQVSVQIDWEIQKERSKRWNPEVQFTSNYGQQNSLLWAPDAAGKYTEPRAIGTRYLTHHL

SEQ ID NO: 1141 - protein, 735 aa, Artificial Sequence
  source: /note="Description of Artificial Sequence: Synthetic polypeptide"
MAADGYLPDWLEDNLSEGVREWWALQPGAPKPKANQQHQDNARGLVLPGYKYLGPGNGLDKGEPVNAADAAALEHDKAYDQQLKAGDNPYLKYNHADAEFQQRLQGDTSFGGNLGRAVFQAKKRVLEPLGLVEQAGETAPGKKRPLIESPQQPDSSTGIGKKGKQPAKKKLVFEDETGAGDGPPEGSTSGAMSDDSEMRAAAGGAAVEGGQGADGVGNASGDWHCDSTWSEGHVTTTSTRTWVLPTYNNHLYKRLGESLQSNTYNGFSTPWGYFDFNRFHCHFSPRDWQRLINNNWGMRPKAMRVKIFNIQVKEVTTSNGETTVANNLTSTVQIFADSSYELPYVMDAGQEGSLPPFPNDVFMVPQYGYCGLVTGNTSQQQTDRNAFYCLEYFPSQMLRTGNNFEITYSFEKVPFHSMYAHSQSLDRLMNPLIDQYLWGLQSTTTGTTLNAGTATTNFTKLRPTNFSNFKKNWLPGPSIKQQGFSKTANQNYFIPATGSDSLIRYETHSTLDGRWSALTPGPPLATAGPADSKFSNSQLIFAGPKQNGNTATVPGTLIFTSEEELAATNATDTDMWGNLPVIDFSKSNLPTVDRLTHLGAVPGMVWQNRDIYYQGPIWAKIPHTDGHFHPSPLIGGFGLKHPPPQIFIKNTPVPANPATTFSSTPVNSFITQYSTGQVSVQIDWEIQKERSKRWNPEVQFTSNYGQQNSLLWAPDAAGKYTEPRAIGTRYLTHHL

SEQ ID NO: 1142 - protein, 735 aa, Artificial Sequence
  source: /note="Description of Artificial Sequence: Synthetic polypeptide"
MAADGYLPDWLEDNLSEGVREWWALQPGAPKPKANQQHQDNARGLVLPGYKYLGPGNGLDKGEPVNAADAAALEHDKAYDQQLKAGDNPYLKYNHADAEFQQRLQGDTSFGGNLGRAVFQAKKRVLEPLGLVEQAGETAPGKKRPLIESPQQPDSSTGIGKKGKQPAKKKLVFEDETGAGDGPPEGSTSGAMSDDSEMRAAAGGAAVEGGQGADGVGNASGDWHCDSTWSEGHVTTTSTRTWVLPTYNNHLYKRLGESLQSNTYNGFSTPWGYFDFNRFHCHFSPRDWQRLINNNWGMRPKAMRVKIFNIQVKEVTTSNGETTVANNLTSTVQIFADSSYELPYVMDAGQEGSLPPFPNDVFMVPQYGYCGLVTGNTSQQQTDRNAFYCLEYFPSQMLRTGNNFEITYSFEKVPFHSMYAHSQSLDRLMNPLIDQYLWGLQSTTTGTTLNAGTATTNFTKLRPTNFSNFKKNWLPGPSIKQQGFSKTANQNYKIPATGSDSLIKYETHSTLDGRWSALTPGPPMATAGPADSKFSNSQLIFAGPKQNGNTATVPGTLIFTSEEELAATNATDTDMWGNLPVRDFSLSNLPTVDRTTKLGAVPGMVWQNRDIYYQGPIWAKIPHTDGHFHPSPLIGGFGLKHPPPQIFIKNTPVPANPATTFSSTPVNSFITQYSTGQVSVQIDWEIQKERSKRWNPEVQFTSNYGQQNSLLWAPDAAGKYTEPRAIGTRYLTHHL

SEQ ID NO: 1143 - protein, 735 aa, Artificial Sequence
  source: /note="Description of Artificial Sequence: Synthetic polypeptide"
MAADGYLPDWLEDNLSEGVREWWALQPGAPKPKANQQHQDNARGLVLPGYKYLGPGNGLDKGEPVNAADAAALEHDKAYDQQLKAGDNPYLKYNHADAEFQQRLQGDTSFGGNLGRAVFQAKKRVLEPLGLVEQAGETAPGKKRPLIESPQQPDSSTGIGKKGKQPAKKKLVFEDETGAGDGPPEGSTSGAMSDDSEMRAAAGGAAVEGGQGADGVGNASGDWHCDSTWSEGHVTTTSTRTWVLPTYNNHLYKRLGESLQSNTYNGFSTPWGYFDFNRFHCHFSPRDWQRLINNNWGMRPKAMRVKIFNIQVKEVTTSNGETTVANNLTSTVQIFADSSYELPYVMDAGQEGSLPPFPNDVFMVPQYGYCGLVTGNTSQQQTDRNAFYCLEYFPSQMLRTGNNFEITYSFEKVPFHSMYAHSQSLDRLMNPLIDQYLWGLQSTTTGTTLNAGTATTNFTKLRPTNFSNFKKNWLPGPSIKQQGFSKTANQNYFIPATGSDSLIQYETHSTLDGRWSALTPGPPMATAGPADSKFSNSQLIFAGPKQNGNTATVPGTLIFTSEEELAATNATDTDMWGNLPGGDQSNSNLPTVDRLTALGAVPGMVWQNRDIYYQGPIWAKIPHTDGHFHPSPLIGGFGLKHPPPQIFIKNTPVPANPATTFSSTPVNSFITQYSTGQVSVQIDWEIQKERSKRWNPEVQFTSNYGQQNSLLWAPDAAGKYTEPRAIGTRYLTHHL

SEQ ID NO: 1144 - protein, 735 aa, Artificial Sequence
  source: /note="Description of Artificial Sequence: Synthetic polypeptide"
MAADGYLPDWLEDNLSEGVREWWALQPGAPKPKANQQHQDNARGLVLPGYKYLGPGNGLDKGEPVNAADAAALEHDKAYDQQLKAGDNPYLKYNHADAEFQQRLQGDTSFGGNLGRAVFQAKKRVLEPLGLVEQAGETAPGKKRPLIESPQQPDSSTGIGKKGKQPAKKKLVFEDETGAGDGPPEGSTSGAMSDDSEMRAAAGGAAVEGGQGADGVGNASGDWHCDSTWSEGHVTTTSTRTWVLPTYNNHLYKRLGESLQSNTYNGFSTPWGYFDFNRFHCHFSPRDWQRLINNNWGMRPKAMRVKIFNIQVKEVTTSNGETTVANNLTSTVQIFADSSYELPYVMDAGQEGSLPPFPNDVFMVPQYGYCGLVTGNTSQQQTDRNAFYCLEYFPSQMLRTGNNFEITYSFEKVPFHSMYAHSQSLDRLMNPLIDQYLWGLQSTTTGTTLNAGTATTNFTKLRPTNFSNFKKNWLPGPSIKQQGFSKTANQNYEMPATGSDSLIIYETHSTLDGRWSALTPGPPFATAGPADSKFSNSQLIFAGPKQNGNTATVPGTLIFTSEEELAATNATDTDVWGNLPSGDHSQSNLPTVDRPTMLGAVPGMVWQNRDIYYQGPIWAKIPHTDGHFHPSPLIGGFGLKHPPPQIFIKNTPVPANPATTFISTPVNSFITQYSTGQVSVHIDWEIQKERSKRWNPEVQFTSDYGQHSSLLWAPDAAGKYTEPTAIGTRYLTHHL

SEQ ID NO: 1145 - protein, 734 aa, Artificial Sequence
  source: /note="Description of Artificial Sequence: Synthetic polypeptide"
MAADGYLPDWLEDNLSEGVREWWALQPGAPKPKANQQHQDNARGLVLPGYKYLGPGNGLDKGEPVNAADAAALEHDKAYDQQLKAGDNPYLKYNHADAEFQQRLQGDTSFGGNLGRAVFQAKKRVLEPLGLVEQAGETAPGKKRPLIESPQQPDSSTGIGKKGKQPAKKKLVFEDETGAGDGPPEGSTSGAMSDDSEMRAAAGGAAVEGGQGADGVGNASGDWHCDSTWSEGHVTTTSTRTWVLPTYNNHLYKRLGESLQSNTYNGFSTPWGYFDFNRFHCHFSPRDWQRLINNNWGMRPKAMRVKIFNIQVKEVTTSNGETTVANNLTSTVQIFADSSYELPYVMDAGQEGSLPPFPNDVFMVPQYGYCGLVTGNTSQQQTDRNAFYCLEYFPSQMLRTGNNFEITYSFEKVPFHSMYAHSQSLDRLMNPLIDQYLWGLQSTTTGTTLNAGTATTNFTKLRPTNFSNFKKNWLPGPSIKQQGFSKTANQNDIPATGSDSLIKYETHSTLDGRWSALTPGPPMATAGPADSKFSNSQLIFAGPKQNGNTATVPGTLIFTSEEELAATNATDTDMWGNLPGGDQSNSNLPTVDRLTALGAVPGMVWQNRDIYYQGPIWAKIPHTDGHFHPSPLIGGFGLKHPPPQIFIKNTPVPANPATTFSSTPVNSFITQYSTGQVSVQIDWEIQKERSKRWNPEVQFTSNYGQQNSLLWAPDAAGKYTEPRAIGTRYLTHHL

SEQ ID NO: 1146 - protein, 735 aa, Artificial Sequence
  source: /note="Description of Artificial Sequence: Synthetic polypeptide"
MAADGYLPDWLEDNLSEGVREWWALQPGAPKPKANQQHQDNARGLVLPGYKYLGPGNGLDKGEPVNAADAAALEHDKAYDQQLKAGDNPYLKYNHADAEFQQRLQGDTSFGGNLGRAVFQAKKRVLEPLGLVEQAGETAPGKKRPLIESPQQPDSSTGIGKKGKQPAKKKLVFEDETGAGDGPPEGSTSGAMSDDSEMRAAAGGAAVEGGQGADGVGNASGDWHCDSTWSEGHVTTTSTRTWVLPTYNNHLYKRLGESLQSNTYNGFSTPWGYFDFNRFHCHFSPRDWQRLINNNWGMRPKAMRVKIFNIQVKEVTTSNGETTVANNLTSTVQIFADSSYELPYVMDAGQEGSLPPFPNDVFMVPQYGYCGLVTGNTSQQQTDRNAFYCLEYFPSQMLRTGNNFEITYSFEKVPFHSMYAHSQSLDRLMNPLIDQYLWGLQSTTTGTTLNAGTATTNFTKLRPTNFSNFKKNWLPGPSIKQQGFSKTANQNYIIPATGSDSLITYETHSTLDGRWSALTPGPPVATAGPADSKFSNSQLIFAGPKQNGNTATVPGTLIFTSEEELAATNATDTDMWGNLPFNDDSSSNLPTVDRSTFLGAVPGMVWQNRDIYYQGPIWAKIPHTDGHFHPSPLIGGFGLKHPPPQIFIKNTPVPANPATTFSSTPVNSFITQYSTGQVSVQIDWEIQKERSKRWNPEVQFTSNYGQQNSLLWAPDAAGKYTEPRAIGTRYLTHHL

SEQ ID NO: 1147 - protein, 733 aa, Artificial Sequence
  source: /note="Description of Artificial Sequence: Synthetic polypeptide"
MAADGYLPDWLEDNLSEGIREWWDLKPGAPKPKANQQKQDDGRGLVLPGYKYLGPFNGLDKGEPVNAADAAALEHDKAYDQQLKAGDNPYLRYNHADAEFQERLQEDTSFGGNLGRAVFQAKKRVLEPLGLVEEGAKTAPGKKRPLESPQEPDSSSGIGKKGKQPARKRLNFEEDTGAGDGPPEGSDTSAMSSDIEMRAAPGGNAVDAGQGSDGVGNASGDWHCDSTWSEGKVTTTSTRTWVLPTYNNHLYLRLGTTSSSNTYNGFSTPWGYFDFNRFHCHFSPRDWQRLINNNWGLRPKAMRVKIFNIQVKEVTTSNGETTVANNLTSTVQIFADSSYELPYVMDAGQEGSLPPFPNDVFMVPQYGYCGIVTGENQNQTDRNAFYCLEYFPSQMLRTGNNFEMAYNFEKVPFHSMYAHSQSLDRLMNPLLDQYLWHLQSTTSGETLNQGNAATTFGKIRSGDFAFYRKNWLPGPCVKQQRFSKTASQNYKIPASGGNALLKYDTHYTLNNRWSNIAPGPPMATAGPSDGDFSNAQLIFPGPSVTGNTTTSANNLLFTSEEEIAATNPRDTDMFGQIADNNQNATTAPITGNVTAMGVLPGMVWQNRDIYYQGPIWAKIPHADGHFHPSPLIGGFGLKHPPPQIFIKNTPVPANPATTFTAARVDSFITQYSTGQVAVQIEWEIEKERSKRWNPEVQFTSNYGNQSSMLWAPDTTGKYTEPRVIGSRYLTNHL

SEQ ID NO: 1148 - protein, 742 aa, Artificial Sequence; identical to SEQ ID NO: 959
  source: /note="Description of Artificial Sequence: Synthetic polypeptide"

SEQ ID NO: 1149 - protein, 733 aa, Artificial Sequence; identical to SEQ ID NO: 432
  source: /note="Description of Artificial Sequence: Synthetic polypeptide"

SEQ ID NO: 1150 - protein, 733 aa, Artificial Sequence; identical to SEQ ID NO: 149
  source: /note="Description of Artificial Sequence: Synthetic polypeptide"

SEQ ID NO: 1151 - protein, 733 aa, Artificial Sequence; identical to SEQ ID NO: 436
  source: /note="Description of Artificial Sequence: Synthetic polypeptide"

SEQ ID NO: 1152 - protein, 735 aa, Artificial Sequence
  source: /note="Description of Artificial Sequence: Synthetic polypeptide"
MAADGYLPDWLEDNLSEGVREWWALQPGAPKPKANQQHQDNARGLVLPGYKYLGPGNGLDKGEPVNAADAAALEHDKAYDQQLKAGDNPYLKYNHADAEFQQRLQGDTSFGGNLGRAVFQAKKRVLEPLGLVEQAGETAPGKKRPLIESPQQPDSSTGIGKKGKQPAKKKLVFEDETGAGDGPPEGSTSGAMSDDSEMRAAAGGAAVEGGQGADGVGNASGDWHCDSTWSEGHVTTTSTRTWVLPTYNNHLYKRLGESLQSNTYNGFSTPWGYFDFNRFHCHFSPRDWQRLINNNWGMRPKAMRVKIFNIQVKEVTTSNGETTVANNLTSTVQIFADSSYELPYVMDAGQEGSLPPFPNDVFMVPQYGYCGLVTGNTSQQQTDRNAFYCLEYFPSQMLRTGNNFEITYSFEKVPFHSMYAHSQSLDRLMNPLIDQYLWGLQSTTTGTTLNAGTATTNFTKLRPTNFSNFKKNWLPGPSIKQQGFSKTANQNYEIPATGSDSLIEYETHSTLDGRWSALTPGPPMATAGPADSKFSNSQLIFAGPKQNGNTATVPGTLIFTSEEELAATNATDTDMWGNLPGGDQSSSNLPTVDRLTALGAVPGMVWQNRDIYYQGPIWAKIPHTDGHFHPSPLIGGFGLKHPPPQIFIKNTPVPANPATTFSSTPVNSFITQYSTGQVSVQIDWEIQKERSKRWNPEVQFTSNYGQQNSLLWAPDAAGKYTEPRAIGTRYLTHHL

SEQ ID NO: 1153 - protein, 735 aa, Artificial Sequence
  source: /note="Description of Artificial Sequence: Synthetic polypeptide"
MAADGYLPDWLEDNLSEGVREWWALQPGAPKPKANQQHQDNARGLVLPGYKYLGPGNGLDKGEPVNAADAAALEHDKAYDQQLKAGDNPYLKYNHADAEFQQRLQGDTSFGGNLGRAVFQAKKRVLEPLGLVEQAGETAPGKKRPLIESPQQPDSSTGIGKKGKQPAKKKLVFEDETGAGDGPPEGSTSGAMSDDSEMRAAAGGAAVEGGQGADGVGNASGDWHCDSTWSEGHVTTTSTRTWVLPTYNNHLYKRLGESLQSNTYNGFSTPWGYFDFNRFHCHFSPRDWQRLINNNWGMRPKAMRVKIFNIQVKEVTTSNGETTVANNLTSTVQIFADSSYELPYVMDAGQEGSLPPFPNDVFMVPQYGYCGLVTGNTSQQQTDRNAFYCLEYFPSQMLRTGNNFEITYSFEKVPFHSMYAHSQSLDRLMNPLIDQYLWGLQSTTTGTTLNAGTATTNFTKLRPTNFSNFKKNWLPGPSIKQQGFSKTANQNYEIPATGSDSLIEYETHSTLDGRWSALTPGPPMATAGPADSKFSNSQLIFAGPKQNGNTATVPGTLIFTSEEELAATNATDTDMWGNLPGGDQSSSNLPVVRGLRALGAVPGMVWQNRDIYYQGPIWAKIPHTDGHFHPSPLIGGFGLKHPPPQIFIKNTPVPANPATTFSSTPVNSFITQYSTGQVSVQIDWEIQKERSKRWNPEVQFTSNYGQQNSLLWAPDAAGKYTEPRAIGTRYLTHHL

SEQ ID NO: 1154 - protein, 735 aa, Artificial Sequence
  source: /note="Description of Artificial Sequence: Synthetic polypeptide"
MAADGYLPDWLEDNLSEGVREWWALQPGAPKPKANQQHQDNARGLVLPGYKYLGPGNGLDKGEPVNAADAAALEHDKAYDQQLKAGDNPYLKYNHADAEFQQRLQGDTSFGGNLGRAVFQAKKRVLEPLGLVEQAGETAPGKKRPLIESPQQPDSSTGIGKKGKQPAKKKLVFEDETGAGDGPPEGSTSGAMSDDSEMRAAAGGAAVEGGQGADGVGNASGDWHCDSTWSEGHVTTTSTRTWVLPTYNNHLYKRLGESLQSNTYNGFSTPWGYFDFNRFHCHFSPRDWQRLINNNWGMRPKAMRVKIFNIQVKEVTTSNGETTVANNLTSTVQIFADSSYELPYVMDAGQEGSLPPFPNDVFMVPQYGYCGLVTGNTSQQQTDRNAFYCLEYFPSQMLRTGNNFEITYSFEKVPFHSMYAHSQSLDRLMNPLIDQYLWGLQSTTTGTTLNAGTATTNFTKLRPTNFSNFKKNWLPGPSIKQQGFSKTANQNYEIPATGSDSLIEYETHSTLDGRWSALTPGPPMATAGPADSKFSNSQLIFAGPKQNGNTATVPGTLIFTSEEELAATNATDTDMWGNLPGGDQSSSNLPVVNRLSALGAVPGMVWQNRDIYYQGPIWAKIPHTDGHFHPSPLIGGFGLKHPPPQIFIKNTPVPANPATTFSSTPVNSFITQYSTGQVSVQIDWEIQKERSKRWNPEVQFTSNYGQQNSLLWAPDAAGKYTEPRAIGTRYLTHHL

SEQ ID NO: 1155 - protein, 735 aa, Artificial Sequence
  source: /note="Description of Artificial Sequence: Synthetic polypeptide"
MAADGYLPDWLEDNLSEGVREWWALQPGAPKPKANQQHQDNARGLVLPGYKYLGPGNGLDKGEPVNAADAAALEHDKAYDQQLKAGDNPYLKYNHADAEFQQRLQGDTSFGGNLGRAVFQAKKRVLEPLGLVEQAGETAPGKKRPLIESPQQPDSSTGIGKKGKQPAKKKLVFEDETGAGDGPPEGSTSGAMSDDSEMRAAAGGAAVEGGQGADGVGNASGDWHCDSTWSEGHVTTTSTRTWVLPTYNNHLYKRLGESLQSNTYNGFSTPWGYFDFNRFHCHFSPRDWQRLINNNWGMRPKAMRVKIFNIQVKEVTTSNGETTVANNLTSTVQIFADSSYELPYVMDAGQEGSLPPFPNDVFMVPQYGYCGLVTGNTSQQQTDRNAFYCLEYFPSQMLRTGNNFEITYSFEKVPFHSMYAHSQSLDRLMNPLIDQYLWGLQSTTTGTTLNAGTATTNFTKLRPTNFSNFKKNWLPGPSIKQQGFSKTANQNYEIPATGSDSLIEYETHSTLDGRWSALTPGPPMATAGPADSKFSNSQLIFAGPKQNGNTATVPGTLIFTSEEELAATNATDTDMWGNLPGGDQSSSNLPPVMGLGALGAVPGMVWQNRDIYYQGPIWAKIPHTDGHFHPSPLIGGFGLKHPPPQIFIKNTPVPANPATTFSSTPVNSFITQYSTGQVSVQIDWEIQKERSKRWNPEVQFTSNYGQQNSLLWAPDAAGKYTEPRAIGTRYLTHHL

SEQ ID NO: 1156 - protein, 736 aa, Artificial Sequence
  source: /note="Description of Artificial Sequence: Synthetic polypeptide"
MAADGYLPDWLEDNLSEGVREWWALQPGAPKPKANQQHQDNARGLVLPGYKYLGPGNGLDKGEPVNAADAAALEHDKAYDQQLKAGDNPYLKYNHADAEFQQRLQGDTSFGGNLGRAVFQAKKRVLEPLGLVEQAGETAPGKKRPLIESPQQPDSSTGIGKKGKQPAKKKLVFEDETGAGDGPPEGSTSGAMSDDSEMRAAAGGAAVEGGQGADGVGNASGDWHCDSTWSEGHVTTTSTRTWVLPTYNNHLYKRLGESLQSNTYNGFSTPWGYFDFNRFHCHFSPRDWQRLINNNWGMRPKAMRVKIFNIQVKEVTTSNGETTVANNLTSTVQIFADSSYELPYVMDAGQEGSLPPFPNDVFMVPQYGYCGLVTGNTSQQQTDRNAFYCLEYFPSQMLRTGNNFEITYSFEKVPFHSMYAHSQSLDRLMNPLIDQYLWGLQSTTTGTTLNAGTATTNFTKLRPTNFSNFKKNWLPGPSIKQQGFSKTANQNYEIPATGSDSLIEYETHSTLDGRWSALTPGPPMATAGPADSKFSNSQLIFAGPKQNGNTATVPGTLIFTSEEELAATNATDTDMWGNLPGGDQSRVDRLPTVDRLTALGAVPGMVWQNRDIYYQGPIWAKIPHTDGHFHPSPLIGGFGLKHPPPQIFIKNTPVPANPATTFSSTPVNSFITQYSTGQVSVQIDWEIQKERSKRWNPEVQFTSNYGQQNSLLWAPDAAGKYTEPRAIGTRYLTHHL

SEQ ID NO: 1157 - protein, 736 aa, Artificial Sequence
  source: /note="Description of Artificial Sequence: Synthetic polypeptide"
MAADGYLPDWLEDNLSEGVREWWALQPGAPKPKANQQHQDNARGLVLPGYKYLGPGNGLDKGEPVNAADAAALEHDKAYDQQLKAGDNPYLKYNHADAEFQQRLQGDTSFGGNLGRAVFQAKKRVLEPLGLVEQAGETAPGKKRPLIESPQQPDSSTGIGKKGKQPAKKKLVFEDETGAGDGPPEGSTSGAMSDDSEMRAAAGGAAVEGGQGADGVGNASGDWHCDSTWSEGHVTTTSTRTWVLPTYNNHLYKRLGESLQSNTYNGFSTPWGYFDFNRFHCHFSPRDWQRLINNNWGMRPKAMRVKIFNIQVKEVTTSNGETTVANNLTSTVQIFADSSYELPYVMDAGQEGSLPPFPNDVFMVPQYGYCGLVTGNTSQQQTDRNAFYCLEYFPSQMLRTGNNFEITYSFEKVPFHSMYAHSQSLDRLMNPLIDQYLWGLQSTTTGTTLNAGTATTNFTKLRPTNFSNFKKNWLPGPSIKQQGFSKTANQNYEIPATGSDSLIEYETHSTLDGRWSALTPGPPMATAGPADSKFSNSQLIFAGPKQNGNTATVPGTLIFTSEEELAATNATDTDMWGNLPGGDQSRALRLPTVDRLTALGAVPGMVWQNRDIYYQGPIWAKIPHTDGHFHPSPLIGGFGLKHPPPQIFIKNTPVPANPATTFSSTPVNSFITQYSTGQVSVQIDWEIQKERSKRWNPEVQFTSNYGQQNSLLWAPDAAGKYTEPRAIGTRYLTHHL

SEQ ID NO: 1158 - DNA, 1172 bp, Artificial Sequence
  source: /note="Description of Artificial Sequence: Synthetic polynucleotide"
cttaattaggctgcgcgctcgctcgctcactgaggccgcccgggcaaagcccgggcgtcgggcgacctttggtcgcccggcctcagtgagcgagcgagcgcgcagagagggagtggccaactccatcactaggggttccttgtagttaatgattaacccgccatgctacttatctaccagggtaatggggatcctctagaactatagctagtcgacattgattattgactagttattaatagtaatcaattacggggtcattagttcatagcccatatatggagttccgcgttacataacttacggtaaatggcccgcctggctgaccgcccaacgacccccgcccattgacgtcaataatgacgtatgttcccatagtaacgccaatagggactttccattgacgtcaatgggtggactatttacggtaaactgcccacttggcagtacatcaagtgtatcatatgccaagtacgccccctattgacgtcaatgacggtaaatggcccgcctggcattatgcccagtacatgaccttatgggactttcctacttggcagtacatctacgtattagtcatcgctattaccatgtcgaggccacgttctgcttcactctccccatctcccccccctccccacccccaattttgtatttatttattttttaattattttgtgcagcgatgggggcggggggggggggcgcgcgccaggcggggcggggcggggcgaggggcggggcggggcgaggcggagaggtgcggcggcagccaatcagagcggcgcgctccgaaagtttccttttatggcgaggcggcggcggcggcggccctataaaaagcgaagcgcgcggcgggcgggagcaagctttattgcggtagtttatcacagttaaattgctaacgcagtcagtgcttctgacacaacagtctcgaacttaagctgcagaagttggtcgtgaggcactgggcaggtaagtatcaaggttacaagacaggtttaaggagaccaatagaaactgggcttgtcgagacagagaagactcttgcgtttctgataggcacctattggtcttactgacatccactttgcctttctctccacaggtgtccactcccagttcaattacagctcttaaggctagagtacttaatacgactcsactatagg

SEQ ID NO: 1159 - DNA, 3231 bp, Artificial Sequence
  source: /note="Description of Artificial Sequence: Synthetic polynucleotide"
taagaattcacgcgtggtacctctagagtcgacccgggcggcctcgaggacggggtgaactacgcctgaggatccgatctttttccctctgccaaaaattatggggacatcatgaagccccttgagcatctgacttctggctaataaaggaaatttattttcattgcaatagtgtgttggaattttttgtgtctctcactcggaagcaattcgttgatctgaatttcgaccacccataatacccattaccctggtagataagtagcatggcgggttaatcattaactacaaggaacccctagtgatggagttggccactccctctctgcgcgctcgctcgctcactgaggccgggcgaccaaaggtcgcccgacgcccgggctttgcccgggcggcctcagtgagcgagcgagcgcgcagccttaattaacctaattcactggccgtcgttttacaacgtcgtgactgggaaaaccctggcgttacccaacttaatcgccttgcagcacatccccctttcgccagctggcgtaatagcgaagaggcccgcaccgatcgcccttcccaacagttgcgcagcctgaatggcgaatgggacgcgccctgtagcggcgcattaagcgcggcgggtgtggtggttacgcgcagcgtgaccgctacacttgccagcgccctagcgcccgctcctttcgctttcttcccttcctttctcgccacgttcgccggctttccccgtcaagctctaaatcgggggctccctttagggttccgatttagtgctttacggcacctcgaccccaaaaaacttgattagggtgatggttcacgtagtgggccatcgccctgatagacggtttttcgccctttgacgttggagtccacgttctttaatagtggactcttgttccaaactggaacaacactcaaccctatctcggtctattcttttgatttataagggattttgccgatttcggcctattggttaaaaaatgagctgatttaacaaaaatttaacgcgaattttaacaaaatattaacgcttacaatttaggtggcacttttcggggaaatgtgcgcggaacccctatttgtttatttttctaaatacattcaaatatgtatccgctcatgagacaataaccctgataaatgcttcaataatattgaaaaaggaagagtatgagtattcaacatttccgtgtcgcccttattcccttttttgcggcattttgccttcctgtttttgctcacccagaaacgctggtgaaagtaaaagatgctgaagatcagttgggtgcacgagtgggttacatcgaactggatctcaacagcggtaagatccttgagagttttcgccccgaagaacgttttccaatgatgagcacttttaaagttctgctatgtggcgcggtattatcccgtattgacgccgggcaagagcaactcggtcgccgcatacactattctcagaatgacttggttgagtactcaccagtcacagaaaagcatcttacggatggcatgacagtaagagaattatgcagtgctgccataaccatgagtgataacactgcggccaacttacttctgacaacgatcggaggaccgaaggagctaaccgcttttttgcacaacatgggggatcatgtaactcgccttgatcgttgggaaccggagctgaatgaagccataccaaacgacgagcgtgacaccacgatgcctgtagcaatggcaacaacgttgcgcaaactattaactggcgaactacttactctagcttcccggcaacaattaatagactggatggaggcggataaagttgcaggaccacttctgcgctcggcccttccggctggctggtttattgctgataaatctggagccggtgagcgtgggtctcgcggtatcattgcagcactggggccagatggtaagccctcccgtatcgtagttatctacacgacggggagtcaggcaactatggatgaacgaaatagacagatcgctgagataggtgcctcactgattaagcattggtaactgtcagaccaagtttactcatatatactttagattgatttaaaacttcatttttaatttaaaaggatctaggtgaagatcctttttgataatctcatgaccaaaatcccttaacgtgagttttcgttccactgagcgtcagaccccgtagaaaagatcaaaggatcttcttgagatcctttttttctgcgcgtaatctgctgcttgcaaacaaaaaaaccaccgctaccagcggtggtttgtttgccggatcaagagctaccaactctttttccgaaggtaactggcttcagcagagcgcagataccaaatactgttcttctagtgtagccgtagttaggccaccacttcaagaactctgtagcaccgcctacatacctcgctctgctaatcctgttaccagtggctgctgccagtggcgataagtcgtgtcttaccgggttggactcaagacgatagttaccggataaggcgcagcggtcgggctgaacggggggttcgtgcacacagcccagcttggagcgaacgacctacaccgaactgagatacctacagcgtgagctatgagaaagcgccacgcttcccgaagggagaaaggcggacaggtatccggtaagcggcagggtcggaacaggagagcgcacgagggagcttccagggggaaacgcctggtatctttatagtcctgtcgggtttcgccacctctgacttgagcgtcgatttttgtgatgctcgtcaggggggcggagcctatggaaaaacgccagcaacgcggcctttttacggttcctggccttttgctggccttttgctcacatgttctttcctgcgttatcccctgattctgtggataaccgtattaccgcctttgagtgagctgataccgctcgccgcagccgaacgaccgagcgcagcgagtcagtgagcgaggaagcggaagagcgcccaatacgcaaaccgcctctccccgcgcgttggccgattcattaatgcagctggcacgacaggtttcccgactggaaagcgggcagtgagcgcaacgcaattaatgtgagttagctcactcattaggcaccccaggctttacactttatgcttccggctcgtatgttgtgtggaattgtgagcggataacaatttcacacaggaaacagctatgaccatgattacgccagatttaattaaggc

SEQ ID NO: 1160 - protein, 737 aa, Artificial Sequence
  source: /note="Description of Artificial Sequence: Synthetic polypeptide"
  MOD_RES (264)..(264): Any amino acid
  MOD_RES (266)..(266): Any amino acid
  MOD_RES (268)..(268): Any amino acid
  MOD_RES (448)..(448): Any amino acid
  MOD_RES (459)..(460): Any amino acid
  MOD_RES (467)..(467): Any amino acid
  MOD_RES (470)..(471): Any amino acid
  MOD_RES (474)..(474): Any amino acid
  MOD_RES (495)..(495): Any amino acid
  MOD_RES (516)..(516): Any amino acid
  MOD_RES (533)..(533): Any amino acid
  MOD_RES (547)..(547): Any amino acid
  MOD_RES (551)..(551): Any amino acid
  MOD_RES (555)..(555): Any amino acid
  MOD_RES (557)..(557): Any amino acid
  MOD_RES (561)..(561): Any amino acid
  MOD_RES (563)..(563): Any amino acid
  MOD_RES (577)..(577): Any amino acid
  MOD_RES (583)..(583): Any amino acid
  MOD_RES (593)..(593): Any amino acid
  MOD_RES (596)..(596): Any amino acid
  MOD_RES (661)..(662): Any amino acid
  MOD_RES (664)..(665): Any amino acid
  MOD_RES (710)..(710): Any amino acid
  MOD_RES (717)..(719): Any amino acid
  MOD_RES (723)..(723): Any amino acid
MAADGYLPDWLEDNLSEGIREWWDLKPGAPKPKANQQKQDDGRGLVLPGYKYLGPFNGLDKGEPVNAADAAALEHDKAYDQQLKAGDNPYLRYNHADAEFQERLQEDTSFGGNLGRAVFQAKKRVLEPLGLVEEGAKTAPGKKRPVEPSPQRSPDSSTGIGKKGQQPAKKRLNFGQTGDSESVPDPQPLGEPPAGPSGLGSGTMAAGGGAPMADNNEGADGVGNASGNWHCDSTWLGDRVITTSTRTWALPTYNNHLYKQISSXSXGXTNDNHYFGYSTPWGYFDFNRFHCHFSPRDWQRLINNNWGFRPKRLNFKLFNIQVKEVTTNDGVTTIANNLTSTVQVFSDSEYQLPYVLGSAHQGCLPPFPADVFMIPQYGYLTLNNGSQAVGRSSFYCLEYFPSQMLRTGNNFTFSYTFEDVPFHSSYAHSQSLDRLMNPLIDQYLYYLXRTQSTGGTAGXXELLFSQXGPXXMSXQAKNWLPGPCYRQQRVSKTLXQNNNSNFAWTGATKYHLNGRXSLVNPGVAMATHKDDEXRFFPSSGVLIFGKXGAGXNNTXLXNVMXTXEEEIKTTNPVATEXYGVVAXNLQSSNTAPXTGXVNSQGALPGMVWQNRDVYLQGPIWAKIPHTDGNFHPSPLMGGFGLKHPPPQILIKNTPVPANPPXXFXXAKFASFITQYSTGQVSVEIEWELQKENSKRWNPEIQYTSNYAKSXNVDFAVXXXGVYXEPRPIGTRYLTRNL

SEQ ID NO: 1161 - protein, 737 aa, Artificial Sequence
  source: /note="Description of Artificial Sequence: Synthetic polypeptide"
MAADGYLPDWLEDNLSEGIREWWDLKPGAPKPKANQQKQDDGRGLVLPGYKYLGPFNGLDKGEPVNAADAAALEHDKAYDQQLKAGDNPYLRYNHADAEFQERLQEDTSFGGNLGRAVFQAKKRVLEPLGLVEEGAKTAPGKKRPVEPSPQRSPDSSTGIGKKGQQPAKKRLNFGQTGDSESVPDPQPLGEPPAGPSGLGSGTMAAGGGAPMADNNEGADGVGNASGNWHCDSTWLGDRVITTSTRTWALPTYNNHLYKQISSASSGSTNDNHYFGYSTPWGYFDFNRFHCHFSPRDWQRLINNNWGFRPKRLNFKLFNIQVKEVTTNDGVTTIANNLTSTVQVFSDSEYQLPYVLGSAHQGCLPPFPADVFMIPQYGYLTLNNGSQAVGRSSFYCLEYFPSQMLRTGNNFTFSYTFEDVPFHSSYAHSQSLDRLMNPLIDQYLYYLARTQSTGGTAGNRELLFSQGGPSNMSAQAKNWLPGPCYRQQRVSKTLAQNNNSNFAWTGATKYHLNGRDSLVNPGVAMATHKDDEDRFFPSSGVLIFGKEGAGANNTALENVMLTNEEEIKTTNPVATEQYGVVASNLQSSNTAPATGAVNSQGALPGMVWQNRDVYLQGPIWAKIPHTDGNFHPSPLMGGFGLKHPPPQILIKNTPVPANPPATFTPAKFASFITQYSTGQVSVEIEWELQKENSKRWNPEIQYTSNYAKSTNVDFAVNNEGVYSEPRPIGTRYLTRNL

SEQ ID NO: 1162 - protein, 737 aa, Artificial Sequence
  source: /note="Description of Artificial Sequence: Synthetic polypeptide"
MAADGYLPDWLEDNLSEGIREWWDLKPGAPKPKANQQKQDDGRGLVLPGYKYLGPFNGLDKGEPVNAADAAALEHDKAYDQQLKAGDNPYLRYNHADAEFQERLQEDTSFGGNLGRAVFQAKKRVLEPLGLVEEGAKTAPGKKRPVEPSPQRSPDSSTGIGKKGQQPAKKRLNFGQTGDSESVPDPQPLGEPPAGPSGLGSGTMAAGGGAPMADNNEGADGVGNASGNWHCDSTWLGDRVITTSTRTWALPTYNNHLYKQISSQSSGSTNDNHYFGYSTPWGYFDFNRFHCHFSPRDWQRLINNNWGFRPKRLNFKLFNIQVKEVTTNDGVTTIANNLTSTVQVFSDSEYQLPYVLGSAHQGCLPPFPADVFMIPQYGYLTLNNGSQAVGRSSFYCLEYFPSQMLRTGNNFTFSYTFEDVPFHSSYAHSQSLDRLMNPLIDQYLYYLSRTQSTGGTAGNRELLFSQGGPANMSAQAKNWLPGPCYRQQRVSKTLSQNNNSNFAWTGATKYHLNGRDSLVNPGVAMATHKDDEERFFPSSGVLIFGKQGAGANNTTLDNVMMTSEEEIKTTNPVATEQYGVVASNLQSSNTAPQTGTVNSQGALPGMVWQNRDVYLQGPIWAKIPHTDGNFHPSPLMGGFGLKHPPPQILIKNTPVPANPPAVFSPAKFASFITQYSTGQVSVEIEWELQKENSKRWNPEIQYTSNYAKSTNVDFAVNSEGVYSEPRPIGTRYLTRNL

SEQ ID NO: 1163 - protein, 737 aa, Artificial Sequence
  source: /note="Description of Artificial Sequence: Synthetic polypeptide"
MAADGYLPDWLEDNLSEGIREWWDLKPGAPKPKANQQKQDDGRGLVLPGYKYLGPFNGLDKGEPVNAADAAALEHDKAYDQQLKAGDNPYLRYNHADAEFQERLQEDTSFGGNLGRAVFQAKKRVLEPLGLVEEGAKTAPGKKRPVEPSPQRSPDSSTGIGKKGQQPAKKRLNFGQTGDSESVPDPQPLGEPPAGPSGLGSGTMAAGGGAPMADNNEGADGVGNASGNWHCDSTWLGDRVITTSTRTWALPTYNNHLYKQISSASSGSTNDNHYFGYSTPWGYFDFNRFHCHFSPRDWQRLINNNWGFRPKRLNFKLFNIQVKEVTTNDGVTTIANNLTSTVQVFSDSEYQLPYVLGSAHQGCLPPFPADVFMIPQYGYLTLNNGSQAVGRSSFYCLEYFPSQMLRTGNNFTFSYTFEDVPFHSSYAHSQSLDRLMNPLIDQYLYYLARTQSTGGTAGTRELLFSQGGPSNMSAQAKNWLPGPCYRQQRVSKTLTQNNNSNFAWTGATKYHLNGRDSLVNPGVAMATHKDDEDRFFPSSGVLIFGKQGAGANNTALDNVMITNEEEIKTTNPVATEQYGVVASNLQSSNTAPATGTVNSQGALPGMVWQNRDVYLQGPIWAKIPHTDGNFHPSPLMGGFGLKHPPPQILIKNTPVPANPPTVFSPAKFASFITQYSTGQVSVEIEWELQKENSKRWNPEIQYTSNYAKSTNVDFAVNSEGVYTEPRPIGTRYLTRNL

SEQ ID NO: 1164 - protein, 737 aa, Artificial Sequence
  source: /note="Description of Artificial Sequence: Synthetic polypeptide"
  MOD_RES (264)..(264): Any amino acid
  MOD_RES (448)..(448): Any amino acid
  MOD_RES (459)..(459): Any amino acid
  MOD_RES (470)..(470): Any amino acid
  MOD_RES (495)..(495): Any amino acid
  MOD_RES (533)..(533): Any amino acid
  MOD_RES (547)..(547): Any amino acid
  MOD_RES (555)..(555): Any amino acid
  MOD_RES (557)..(557): Any amino acid
  MOD_RES (561)..(561): Any amino acid
  MOD_RES (563)..(563): Any amino acid
  MOD_RES (593)..(593): Any amino acid
  MOD_RES (596)..(596): Any amino acid
  MOD_RES (661)..(662): Any amino acid
  MOD_RES (664)..(664): Any amino acid
  MOD_RES (718)..(718): Any amino acid
  MOD_RES (723)..(723): Any amino acid
MAADGYLPDWLEDNLSEGIREWWDLKPGAPKPKANQQKQDDGRGLVLPGYKYLGPFNGLDKGEPVNAADAAALEHDKAYDQQLKAGDNPYLRYNHADAEFQERLQEDTSFGGNLGRAVFQAKKRVLEPLGLVEEGAKTAPGKKRPVEPSPQRSPDSSTGIGKKGQQPAKKRLNFGQTGDSESVPDPQPLGEPPAGPSGLGSGTMAAGGGAPMADNNEGADGVGNASGNWHCDSTWLGDRVITTSTRTWALPTYNNHLYKQISSXSSGSTNDNHYFGYSTPWGYFDFNRFHCHFSPRDWQRLINNNWGFRPKRLNFKLFNIQVKEVTTNDGVTTIANNLTSTVQVFSDSEYQLPYVLGSAHQGCLPPFPADVFMIPQYGYLTLNNGSQAVGRSSFYCLEYFPSQMLRTGNNFTFSYTFEDVPFHSSYAHSQSLDRLMNPLIDQYLYYLXRTQSTGGTAGXRELLFSQGGPXNMSAQAKNWLPGPCYRQQRVSKTLXQNNNSNFAWTGATKYHLNGRDSLVNPGVAMATHKDDEXRFFPSSGVLIFGKXGAGANNTXLXNVMXTXEEEIKTTNPVATEQYGVVASNLQSSNTAPXTGXVNSQGALPGMVWQNRDVYLQGPIWAKIPHTDGNFHPSPLMGGFGLKHPPPQILIKNTPVPANPPXXFXPAKFASFITQYSTGQVSVEIEWELQKENSKRWNPEIQYTSNYAKSTNVDFAVNXEGVYXEPRPIGTRYLTRNL

SEQ ID NO: 1165 - protein, 737 aa, Artificial Sequence
  source: /note="Description of Artificial Sequence: Synthetic polypeptide"
  MOD_RES (264)..(264): Any amino acid
  MOD_RES (448)..(448): Any amino acid
  MOD_RES (470)..(470): Any amino acid
  MOD_RES (533)..(533): Any amino acid
  MOD_RES (547)..(547): Any amino acid
  MOD_RES (555)..(555): Any amino acid
  MOD_RES (557)..(557): Any amino acid
  MOD_RES (561)..(561): Any amino acid
  MOD_RES (563)..(563): Any amino acid
  MOD_RES (593)..(593): Any amino acid
  MOD_RES (596)..(596): Any amino acid
  MOD_RES (662)..(662): Any amino acid
  MOD_RES (664)..(664): Any amino acid
  MOD_RES (718)..(718): Any amino acid
MAADGYLPDWLEDNLSEGIREWWDLKPGAPKPKANQQKQDDGRGLVLPGYKYLGPFNGLDKGEPVNAADAAALEHDKAYDQQLKAGDNPYLRYNHADAEFQERLQEDTSFGGNLGRAVFQAKKRVLEPLGLVEEGAKTAPGKKRPVEPSPQRSPDSSTGIGKKGQQPAKKRLNFGQTGDSESVPDPQPLGEPPAGPSGLGSGTMAAGGGAPMADNNEGADGVGNASGNWHCDSTWLGDRVITTSTRTWALPTYNNHLYKQISSXSSGSTNDNHYFGYSTPWGYFDFNRFHCHFSPRDWQRLINNNWGFRPKRLNFKLFNIQVKEVTTNDGVTTIANNLTSTVQVFSDSEYQLPYVLGSAHQGCLPPFPADVFMIPQYGYLTLNNGSQAVGRSSFYCLEYFPSQMLRTGNNFTFSYTFEDVPFHSSYAHSQSLDRLMNPLIDQYLYYLXRTQSTGGTAGNRELLFSQGGPXNMSAQAKNWLPGPCYRQQRVSKTLSQNNNSNFAWTGATKYHLNGRDSLVNPGVAMATHKDDEXRFFPSSGVLIFGKXGAGANNTXLXNVMXTXEEEIKTTNPVATEQYGVVASNLQSSNTAPXTGXVNSQGALPGMVWQNRDVYLQGPIWAKIPHTDGNFHPSPLMGGFGLKHPPPQILIKNTPVPANPPAXFXPAKFASFITQYSTGQVSVEIEWELQKENSKRWNPEIQYTSNYAKSTNVDFAVNXEGVYSEPRPIGTRYLTRNL

SEQ ID NO: 1166 - DNA, 2217 bp, Artificial Sequence
  source: /note="Description of Artificial Sequence: Synthetic polynucleotide"
atggctgccgatggttatcttccagattggctcgaggacactctctctgaaggaataagacagtggtggaagctcaaacctggcccaccaccaccaaagcccgcagagcggcataaggacgacagcaggggtcttgtgcttcctgggtacaagtacctcggacccttcaacggactcgacaagggagagccggtcaacgaggcagacgccgcggccctcgagcacgacaaagcctacgaccggcagctcgacagcggagacaacccgtacctcaagtacaaccacgccgacgcggagtttcaggagcgccttaaagaagatacgtcttttgggggcaacctcggacgagcagtcttccaggcgaaaaagagggttcttgaacctctgggcctggttgaggaacctgttaagacggctccgggaaagaagagaccggtagagccatcaccccagcgttctccagactcctctacgggcatcggcaagaaaggccaacagcccgccagaaaaagactcaattttggtcagactggcgactcagagtcagttccagaccctcaacctctcggagaacctccagcagcgccctctggtgtgggacctaatacaatggctgcaggcggtggcgcaccaatggcagacaataacgaaggcgccgacggagtgggtagttcctcgggaaattggcattgcgattccacatggctgggcgacagagtcatcaccaccagcacccgaacctgggccctgcccacctacaacaaccacctctacaagcaaatctccaacgggacatcgggaggagccaccaacgacaacacctacttcggctacagcaccccctgggggtattttgactttaacagattccactgccacttttcaccacgtgactggcagcgactcatcaacaacaactggggattccggcccaagagactcagcttcaagctcttcaacatccaggtcaaggaggtcacgcagaatgaaggcaccaagaccatcgccaataacctcaccagcaccatccaggtgtttacggactcggagtaccagctgccgtacgttctcggctctgcccaccagggctgcctgcctccgttcccggcggacgtgttcatgattccccagtacggctacctaacactcaacaacggtagtcaggccgtgggacgctcctccttctactgcctggaatactttccttcgcagatgctgagaaccggcaacaacttccagtttacttacaccttcgaggacgtgcctttccacagcagctacgcccacagccagagcttggaccggctgatgaatcctctgattgaccagtacctgtactacttgtctcggactcaaacaacaggaggcacggcaaatacgcagactctgggcttcagccaaggtgggcctaatacaatggccaatcaggcaaagaactggctgccaggaccctgttaccgccaacaacgcgtctcaacgacaaccgggcaaaacaacaatagcaactttgcctggactgctgggaccaaataccatctgaatggaagaaattcattggctaatcctggcatcgctatggcaacacacaaagacgacgaggagcgtttttttcccagtaacgggatcctgatttttggcaaacaaaatgctgccagagacaatgcggattacagcgatgtcatgctcaccagcgaggaagaaatcaaaaccactaaccctgtggctacagaggaatacggtatcgtggcagataacttgcagcagcaaaacacggctcctcaaattggaactgtcaacagccagggggccttacccggtatggtctggcagaaccgggacgtgtacctgcagggtcccatctgggccaagattcctcacacggacggcaacttccacccgtctccgctgatgggcggctttggcctgaaacatcctccgcctcagatcctgatcaagaacacgcctgtacctgcggatcctccgaccaccttcaaccagtcaaagctgaactctttcatcacgcaatacagcaccggacaggtcagcgtggaaattgaatgggagctgcagaaggaaaacagcaagcgctggaaccccgagatccagtacacctccaactactacaaatctacaagtgtggactttgctgttaatacagaaggcgtgtactctgaaccccgccccattggcacccgttacctcacccgtaatctgtaa

SEQ ID NO: 1167 - protein, 733 aa, Artificial Sequence; identical to SEQ ID NO: 952
  source: /note="Description of Artificial Sequence: Synthetic polypeptide"

SEQ ID NO: 1168 - DNA, 2203 bp, Artificial Sequence
  source: /note="Description of Artificial Sequence: Synthetic polynucleotide"
atgtcttttgttgatcaccctccagattggttggaagaagttggtgaaggtcttcgcgagtttttgggccttgaagcgggcccaccgaaaccaaaacccaatcagcagcatcaagatcaagcccgtggtcttgtgctgcctggttataactatctcggacccggaaacggtctcgatcgaggagagcctgtcaacagggcagacgaggtcgcgcgagagcacgacatctcgtacaacgagcagcttgaggcgggagacaacccctacctcaagtacaaccacgcggacgccgagtttcaggagaagctcgccgacgacacatccttcgggggaaacctcggaaaggcagtctttcaggccaagaaaagggttctcgaaccttttggcctggttgaagagggtgctaagacggcccctaccggaaagcggatagacgaccactttccaaaaagaaagaaggctcggaccgaagaggactccaagccttccacctcgtcagacgccgaagctggacccagcggatcccagcagctgcaaatcccagcccaaccagcctcaagtttgggagctgatacaatgtctgcgggaggtggcggcccattgggcgacaataaccaaggtgccgatggagtgggcaatgcctcgggagattggcattgcgattccacgtggatgggggacagagtcgtcaccaagtccacccgaacctgggtgctgcccagctacaacaaccaccagtaccgagagatcaaaagcggctccgtcgacggaagcaacgccaacgcctactttggatacagcaccccctgggggtactttgactttaaccgcttccacagccactggagcccccgagactggcaaagactcatcaacaactactggggcttcagaccccggtccctcagagtcaaaatcttcaacattcaagtcaaagaggtcacggtgcaggactccaccaccaccatcgccaacaacctcacctccaccgtccaagtgtttacggacgacgactaccagctgccctacgtcgtcggcaacgggaccgagggatgcctgccggccttccctccgcaggtctttacgctgccgcagtacggttacgcgacgctgaaccgcgacaacacagaaaatcccaccgagaggagcagcttcttctgcctagagtactttcccagcaagatgctgagaacgggcaacaactttgagtttacctacaactttgaggaggtgcccttccactccagcttcgctcccagtcagaacctgttcaagctggccaacccgctggtggaccagtacttgtaccgcttcgtgagcacaaataacactggcggagtccagttcaacaagaacctggccgggagatacgccaacacctacaaaaactggttcccggggcccatgggccgaacccagggctggaacctgggctccggggtcaaccgcgccagtgtcagcgccttcgccacgaccaataggatggagctcgagggcgcgagttaccaggtgcccccgcagccgaacggcatgaccaacaacctccagggcagcaacacctatgccctggagaacactatgatcttcaacagccagccggcgaacccgggcaccaccgccacgtacctcgagggcaacatgctcatcaccagcgagagcgagacgcagccggtgaaccgcgtggcgtacaacgtcggcgggcaggtggccaccaacaaccagagctccaccactgcccccgcgaccggcacgtacaacctccaggaaatcgtgcccggcagcgtgtggatggagagggacgtgtacctccaaggacccatctgggccaagatcccagagacgggggcgcactttcacccctctccggccatgggcggattcggactcaaacacccaccgcccatgatgctcatcaagaacacgcctgtgcccggaaatatcaccagcttctcggacgtgcccgtcagcagcttcatcacccagtacagcaccgggcaggtcaccgtggagatggagtgggagctcaagaaggaaaactccaagaggtggaacccagagatccagtacacaaacaactacaacgacccccagtttgtggactttgccccggacagcaccggggaatacagaaccaccagacctatcggaacccgataccttacccgacccctttaacccattcatgtcgcataccctcaataaa

SEQ ID NO: 1169 - protein, 724 aa, Artificial Sequence
  source: /note="Description of Artificial Sequence: Synthetic polypeptide"
MSFVDHPPDWLEEVGEGLREFLGLEAGPPKPKPNQQHQDQARGLVLPGYNYLGPGNGLDRGEPVNRADEVAREHDISYNEQLEAGDNPYLKYNHADAEFQEKLADDTSFGGNLGKAVFQAKKRVLEPFGLVEEGAKTAPTGKRIDDHFPKRKKARTEEDSKPSTSSDAEAGPSGSQQLQIPAQPASSLGADTMSAGGGGPLGDNNQGADGVGNASGDWHCDSTWMGDRVVTKSTRTWVLPSYNNHQYREIKSGSVDGSNANAYFGYSTPWGYFDFNRFHSHWSPRDWQRLINNYWGFRPRSLRVKIFNIQVKEVTVQDSTTTIANNLTSTVQVFTDDDYQLPYVVGNGTEGCLPAFPPQVFTLPQYGYATLNRDNTENPTERSSFFCLEYFPSKMLRTGNNFEFTYNFEEVPFHSSFAPSQNLFKLANPLVDQYLYRFVSTNNTGGVQFNKNLAGRYANTYKNWFPGPMGRTQGWNLGSGVNRASVSAFATTNRMELEGASYQVPPQPNGMTNNLQGSNTYALENTMIFNSQPANPGTTATYLEGNMLITSESETQPVNRVAYNVGGQVATNNQSSTTAPATGTYNLQEIVPGSVWMERDVYLQGPIWAKIPETGAHFHPSPAMGGFGLKHPPPMMLIKNTPVPGNITSFSDVPVSSFITQYSTGQVTVEMEWELKKENSKRWNPEIQYTNNYNDPQFVDFAPDSTGEYRTTRPIGTRYLTRPL

SEQ ID NO: 1170 - DNA, 2203 bp, Artificial Sequence
  source: /note="Description of Artificial Sequence: Synthetic polynucleotide"
atgtcttttgttgatcaccctccagattggttggaagaagttggtgaaggtcttcgcgagtttttgggccttgaagcgggcccaccgaaaccaaaacccaatcagcagcatcaagatcaagcccgtggtcttgtgctgcctggttataactatctcggacccggaaacggtctcgatcgaggagagcctgtcaacagggcagacgaggtcgcgcgagagcacgacatctcgtacaacgagcagcttgaggcgggagacaacccctacctcaagtacaaccacgcggacgccgagtttcaggagaagctcgccgacgacacatccttcgggggaaacctcggaaaggcagtctttcaggccaagaaaagggttctcgaaccttttggcctggttgaagagggtgctaagacggcccctaccggaaagcggatagacgaccactttccaaaaagaaagaaggctcggaccgaagaggactccaagccttccacctcgtcagacgccgaagctggacccagcggatcccagcagctgcaaatcccagcccaaccagcctcaagtttgggagctgatacaatgtctgcgggaggtggcggcccattgggcgacaataaccaaggtgccgatggagtgggcaatgcctcgggagattggcattgcgattccacgtggatgggggacagagtcgtcaccaagtccacccgaacctgggtgctgcccagctacaacaaccaccagtaccgagagatcaaaagcggctccgtcgacggaagcaacgccaacgcctactttggatacagcaccccctgggggtactttgactttaaccgcttccacagccactggagcccccgagactggcaaagactcatcaacaactactggggcttcagaccccggtccctcagagtcaaaatcttcaacattcaagtcaaagaggtcacggtgcaggactccaccaccaccatcgccaacaacctcacctccaccgtccaagtgtttacggacgacgactaccagctgccctacgtcgtcggcaacgggaccgagggatgcctgccggccttccctccgcaggtctttacgctgccgcagtacggttacgcgacgctgaaccgcgacaacacagaaaatcccaccgagaggagcagcttcttctgcctagagtactttcccagcaagatgctgagaacgggcaacaactttgagtttacctacaactttgaggaggtgcccttccactccagcttcgctcccagtcagaacctgttcaagctggccaacccgctggtggaccagtacttgtaccgcttcgtgagcacaaataacactggcggagtccagttcaacaagaacctggccgggagatacgccaacacctacaaaaactggttcccggggcccatgggccgaacccagggctggaacctgggctccggggtcaaccgcgccagtgtcagcgccttcgccacgaccaataggatggagctcgagggcgcgagttaccaggtgcccccgcagccgaacggcatgaccaacaacctccagggcagcaacacctatgccctggagaacactatgatcttcaacagccagccggcgaacccgggcaccaccgccacgtacctcgagggcaacatgctcatcaccagcgagagcgagacgcagccggtgaaccgcgtggcgtacaacgtcggcgggcagatggccaccaacaaccagagctccaccactgcccccgcgaccggcacggtcaacctccaggaaatcgtgcccggcagcgtgtggatggagagggacgtgtacctccaaggacccatctgggccaagatcccagagacgggggcgcactttcacccctctccggccatgggcggattcggactcaaacacccaccgcccatgatgctcatcaagaacacgcctgtgcccggaaatatcaccagcttctcggacgtgcccgtcagcagcttcatcacccagtacagcaccgggcaggtcaccgtggagatggagtgggagctcaagaaggaaaactccaagaggtggaacccagagatccagtacacaaacaactacaacgacccccagtttgtggactttgccccggacagcaccggggaatacagaaccaccagacctatcggaacccgataccttacccgacccctttaacccattcatgtcgcataccctcaataaa

SEQ ID NO: 1171 - protein, 724 aa, Artificial Sequence
  source: /note="Description of Artificial Sequence: Synthetic polypeptide"
MSFVDHPPDWLEEVGEGLREFLGLEAGPPKPKPNQQHQDQARGLVLPGYNYLGPGNGLDRGEPVNRADEVAREHDISYNEQLEAGDNPYLKYNHADAEFQEKLADDTSFGGNLGKAVFQAKKRVLEPFGLVEEGAKTAPTGKRIDDHFPKRKKARTEEDSKPSTSSDAEAGPSGSQQLQIPAQPASSLGADTMSAGGGGPLGDNNQGADGVGNASGDWHCDSTWMGDRVVTKSTRTWVLPSYNNHQYREIKSGSVDGSNANAYFGYSTPWGYFDFNRFHSHWSPRDWQRLINNYWGFRPRSLRVKIFNIQVKEVTVQDSTTTIANNLTSTVQVFTDDDYQLPYVVGNGTEGCLPAFPPQVFTLPQYGYATLNRDNTENPTERSSFFCLEYFPSKMLRTGNNFEFTYNFEEVPFHSSFAPSQNLFKLANPLVDQYLYRFVSTNNTGGVQFNKNLAGRYANTYKNWFPGPMGRTQGWNLGSGVNRASVSAFATTNRMELEGASYQVPPQPNGMTNNLQGSNTYALENTMIFNSQPANPGTTATYLEGNMLITSESETQPVNRVAYNVGGQMATNNQSSTTAPATGTVNLQEIVPGSVWMERDVYLQGPIWAKIPETGAHFHPSPAMGGFGLKHPPPMMLIKNTPVPGNITSFSDVPVSSFITQYSTGQVTVEMEWELKKENSKRWNPEIQYTNNYNDPQFVDFAPDSTGEYRTTRPIGTRYLTRPL

SEQ ID NO: 1172 - DNA, 2203 bp, Artificial Sequence
  source: /note="Description of Artificial Sequence: Synthetic polynucleotide"
atgtcttttgttgatcaccctccagattggttggaagaagttggtgaaggtcttcgcgagtttttgggccttgaagcgggcccaccgaaaccaaaacccaatcagcagcatcaagatcaagcccgtggtcttgtgctgcctggttataactatctcggacccggaaacggtctcgatcgaggagagcctgtcaacagggcagacgaggtcgcgcgagagcacgacatctcgtacaacgagcagcttgaggcgggagacaacccctacctcaagtacaaccacgcggacgccgagtttcaggagaagctcgccgacgacacatccttcgggggaaacctcggaaaggcagtctttcaggccaagaaaagggttctcgaaccttttggcctggttgaagagggtgctaagacggcccctaccggaaagcggatagacgaccactttccaaaaagaaagaaggctcggaccgaagaggactccaagccttccacctcgtcagacgccgaagctggacccagcggatcccagcagctgcaaatcccagcccaaccagcctcaagtttgggagctgatacaatgtctgcgggaggtggcggcccattgggcgacaataaccaaggtgccgatggagtgggcaatgcctcgggagattggcattgcgattccacgtggatgggggacagagtcgtcaccaagtccacccgaacctgggtgctgcccagctacaacaaccaccagtaccgagagatcaaaagcggctccgtcgacggaagcaacgccaacgcctactttggatacagcaccccctgggggtactttgactttaaccgcttccacagccactggagcccccgagactggcaaagactcatcaacaactactggggcttcagaccccggtccctcagagtcaaaatcttcaacattcaagtcaaagaggtcacggtgcaggactccaccaccaccatcgccaacaacctcacctccaccgtccaagtgtttacggacgacgactaccagctgccctacgtcgtcggcaacgggaccgagggatgcctgccggccttccctccgcaggtctttacgctgccgcagtacggttacgcgacgctgaaccgcgacaacacagaaaatcccaccgagaggagcagcttcttctgcctagagtactttcccagcaagatgctgagaacgggcaacaactttgagtttacctacaactttgaggaggtgcccttccactccagcttcgctcccagtcagaacctgttcaagctggccaacccgctggtggaccagtacttgtaccgcttcgtgagcacaaataacactggcggagtccagttcaacaagaacctggccgggagatacgccaacacctacaaaaactggttcccggggcccatgggccgaacccagggctggaacctgggctccggggtcaaccgcgccagtgtcagcgccttcgccacgaccaataggatggagctcgagggcgcgagttaccaggtgcccccgcagccgaacggcatgaccaacaacctccagggcagcaacacctatgccctggagaacactatgatcttcaacagccagccggcgaacccgggcaccaccgccacgtacctcgagggcaacatgctcatcaccagcgagagcgagacgcagccggtgaaccgcgtggcgtacaacgtcggcgggcagatggccaccaacaaccagagctccaccactgcccccgcgaccggcacgtacaacacccaggaaatcgtgcccggcagcgtgtggatggagagggacgtgtacctccaaggacccatctgggccaagatcccagagacgggggcgcactttcacccctctccggccatgggcggattcggactcaaacacccaccgcccatgatgctcatcaagaacacgcctgtgcccggaaatatcaccagcttctcggacgtgcccgtcagcagcttcatcacccagtacagcaccgggcaggtcaccgtggagatggagtgggagctcaagaaggaaaactccaagaggtggaacccagagatccagtacacaaacaactacaacgacccccagtttgtggactttgccccggacagcaccggggaatacagaaccaccagacctatcggaacccgataccttacccgacccctttaacccattcatgtcgcataccctcaataaa

SEQ ID NO: 1173 - protein, 724 aa, Artificial Sequence
  source: /note="Description of Artificial Sequence: Synthetic polypeptide"
MSFVDHPPDWLEEVGEGLREFLGLEAGPPKPKPNQQHQDQARGLVLPGYNYLGPGNGLDRGEPVNRADEVAREHDISYNEQLEAGDNPYLKYNHADAEFQEKLADDTSFGGNLGKAVFQAKKRVLEPFGLVEEGAKTAPTGKRIDDHFPKRKKARTEEDSKPSTSSDAEAGPSGSQQLQIPAQPASSLGADTMSAGGGGPLGDNNQGADGVGNASGDWHCDSTWMGDRVVTKSTRTWVLPSYNNHQYREIKSGSVDGSNANAYFGYSTPWGYFDFNRFHSHWSPRDWQRLINNYWGFRPRSLRVKIFNIQVKEVTVQDSTTTIANNLTSTVQVFTDDDYQLPYVVGNGTEGCLPAFPPQVFTLPQYGYATLNRDNTENPTERSSFFCLEYFPSKMLRTGNNFEFTYNFEEVPFHSSFAPSQNLFKLANPLVDQYLYRFVSTNNTGGVQFNKNLAGRYANTYKNWFPGPMGRTQGWNLGSGVNRASVSAFATTNRMELEGASYQVPPQPNGMTNNLQGSNTYALENTMIFNSQPANPGTTATYLEGNMLITSESETQPVNRVAYNVGGQMATNNQSSTTAPATGTYNTQEIVPGSVWMERDVYLQGPIWAKIPETGAHFHPSPAMGGFGLKHPPPMMLIKNTPVPGNITSFSDVPVSSFITQYSTGQVTVEMEWELKKENSKRWNPEIQYTNNYNDPQFVDFAPDSTGEYRTTRPIGTRYLTRPL

SEQ ID NO: 1174 - DNA, 2203 bp, Artificial Sequence
  source: /note="Description of Artificial Sequence: Synthetic polynucleotide"
atgtcttttgttgatcaccctccagattggttggaagaagttggtgaaggtcttcgcgagtttttgggccttgaagcgggcccaccgaaaccaaaacccaatcagcagcatcaagatcaagcccgtggtcttgtgctgcctggttataactatctcggacccggaaacggtctcgatcgaggagagcctgtcaacagggcagacgaggtcgcgcgagagcacgacatctcgtacaacgagcagcttgaggcgggagacaacccctacctcaagtacaaccacgcggacgccgagtttcaggagaagctcgccgacgacacatccttcgggggaaacctcggaaaggcagtctttcaggccaagaaaagggttctcgaaccttttggcctggttgaagagggtgctaagacggcccctaccggaaagcggatagacgaccactttccaaaaagaaagaaggctcggaccgaagaggactccaagccttccacctcgtcagacgccgaagctggacccagcggatcccagcagctgcaaatcccagcccaaccagcctcaagtttgggagctgatacaatgtctgcgggaggtggcggcccattgggcgacaataaccaaggtgccgatggagtgggcaatgcctcgggagattggcattgcgattccacgtggatgggggacagagtcgtcaccaagtccacccgaacctgggtgctgcccagctacaacaaccaccagtaccgagagatcaaaagcggctccgtcgacggaagcaacgccaacgcctactttggatacagcaccccctgggggtactttgactttaaccgcttccacagccactggagcccccgagactggcaaagactcatcaacaactactggggcttcagaccccggtccctcagagtcaaaatcttcaacattcaagtcaaagaggtcacggtgcaggactccaccaccaccatcgccaacaacctcacctccaccgtccaagtgtttacggacgacgactaccagctgccctacgtcgtcggcaacgggaccgagggatgcctgccggccttccctccgcaggtctttacgctgccgcagtacggttacgcgacgctgaaccgcgacaacacagaaaatcccaccgagaggagcagcttcttctgcctagagtactttcccagcaagatgctgagaacgggcaacaactttgagtttacctacaactttgaggaggtgcccttccactccagcttcgctcccagtcagaacctgttcaagctggccaacccgctggtggaccagtacttgtaccgcttcgtgagcacaaataacactggcggagtccagttcaacaagaacctggccgggagatacgccaacacctacaaaaactggttcccggggcccatgggccgaacccagggctggaacctgggctccggggtcaaccgcgccagtgtcagcgccttcgccacgaccaataggatggagctcgagggcgcgagttaccaggtgcccccgcagccgaacggcatgaccaacaacctccagggcagcaacacctatgccctggagaacactatgatcttcaacagccagccggcgaacccgggcaccaccgccacgtacctcgagggcaacatgctcatcaccagcgagagcgagacgcagccggtgaaccgcgtggcgtacaacgtcggcgggcagatggccaccaacaaccagagctccaccactgcccccgcgaccggcacggtcaacacccaggaaatcgtgcccggcagcgtgtggatggagagggacgtgtacctccaaggacccatctgggccaagatcccagagacgggggcgcactttcacccctctccggccatgggcggattcggactcaaacacccaccgcccatgatgctcatcaagaacacgcctgtgcccggaaatatcaccagcttctcggacgtgcccgtcagcagcttcatcacccagtacagcaccgggcaggtcaccgtggagatggagtgggagctcaagaaggaaaactccaagaggtggaacccagagatccagtacacaaacaactacaacgacccccagtttgtggactttgccccggacagcaccggggaatacagaaccaccagacctatcggaacccgataccttacccgacccctttaacccattcatgtcgcataccctcaataaa

SEQ ID NO: 1175 - protein, 724 aa, Artificial Sequence
  source: /note="Description of Artificial Sequence: Synthetic polypeptide"
MSFVDHPPDWLEEVGEGLREFLGLEAGPPKPKPNQQHQDQARGLVLPGYNYLGPGNGLDRGEPVNRADEVAREHDISYNEQLEAGDNPYLKYNHADAEFQEKLADDTSFGGNLGKAVFQAKKRVLEPFGLVEEGAKTAPTGKRIDDHFPKRKKARTEEDSKPSTSSDAEAGPSGSQQLQIPAQPASSLGADTMSAGGGGPLGDNNQGADGVGNASGDWHCDSTWMGDRVVTKSTRTWVLPSYNNHQYREIKSGSVDGSNANAYFGYSTPWGYFDFNRFHSHWSPRDWQRLINNYWGFRPRSLRVKIFNIQVKEVTVQDSTTTIANNLTSTVQVFTDDDYQLPYVVGNGTEGCLPAFPPQVFTLPQYGYATLNRDNTENPTERSSFFCLEYFPSKMLRTGNNFEFTYNFEEVPFHSSFAPSQNLFKLANPLVDQYLYRFVSTNNTGGVQFNKNLAGRYANTYKNWFPGPMGRTQGWNLGSGVNRASVSAFATTNRMELEGASYQVPPQPNGMTNNLQGSNTYALENTMIFNSQPANPGTTATYLEGNMLITSESETQPVNRVAYNVGGQMATNNQSSTTAPATGTVNTQEIVPGSVWMERDVYLQGPIWAKIPETGAHFHPSPAMGGFGLKHPPPMMLIKNTPVPGNITSFSDVPVSSFITQYSTGQVTVEMEWELKKENSKRWNPEIQYTNNYNDPQFVDFAPDSTGEYRTTRPIGTRYLTRPL

SEQ ID NO: 1176 - DNA, 2203 bp, Artificial Sequence
  source: /note="Description of Artificial Sequence: Synthetic polynucleotide"
atgtcttttgttgatcaccctccagattggttggaagaagttggtgaaggtcttcgcgagtttttgggccttgaagcgggcccaccgaaaccaaaacccaatcagcagcatcaagatcaagcccgtggtcttgtgctgcctggttataactatctcggacccggaaacggtctcgatcgaggagagcctgtcaacagggcagacgaggtcgcgcgagagcacgacatctcgtacaacgagcagcttgaggcgggagacaacccctacctcaagtacaaccacgcggacgccgagtttcaggagaagctcgccgacgacacatccttcgggggaaacctcggaaaggcagtctttcaggccaagaaaagggttctcgaaccttttggcctggttgaagagggtgctaagacggcccctaccggaaagcggatagacgaccactttccaaaaagaaagaaggctcggaccgaagaggactccaagccttccacctcgtcagacgccgaagctggacccagcggatcccagcagctgcaaatcccagcccaaccagcctcaagtttgggagctgatacaatgtctgcgggaggtggcggcccattgggcgacaataaccaaggtgccgatggagtgggcaatgcctcgggagattggcattgcgattccacgtggatgggggacagagtcgtcaccaagtccacccgaacctgggtgctgcccagctacaacaaccaccagtaccgagagatcaaaagcggctccgtcgacggaagcaacgccaacgcctactttggatacagcaccccctgggggtactttgactttaaccgcttccacagccactggagcccccgagactggcaaagactcatcaacaactactggggcttcagaccccggtccctcagagtcaaaatcttcaacattcaagtcaaagaggtcacggtgcaggactccaccaccaccatcgccaacaacctcacctccaccgtccaagtgtttacggacgacgactaccagctgccctacgtcgtcggcaacgggaccgagggatgcctgccggccttccctccgcaggtctttacgctgccgcagtacggttacgcgacgctgaaccgcgacaacacagaaaatcccaccgagaggagcagcttcttctgcctagagtactttcccagcaagatgctgagaacgggcaacaactttgagtttacctacaactttgaggaggtgcccttccactccagcttcgctcccagtcagaacctgttcaagctggccaacccgctggtggaccagtacttgtaccgcttcgtgagcacaaataacactggcggagtccagttcaacaagaacctggccgggagatacgccaacacctacaaaaactggttcccggggcccatgggccgaacccagggctggaacctgggctccggggtcaaccgcgccagtgtcagcgccttcgccacgaccaataggatggagctcgagggcgcgagttaccaggtgcccccgcagccgaacggcatgaccaacaacctccagggcagcaacacctatgccctggagaacactatgatcttcaacagccagccggcgaacccgggcaccaccgccacgtacctcgagggcaacatgctcatcaccagcgagagcgagacgcagccggtgaaccgcgtggcgtacaacgtcggcgggcagatggccaccaacaaccagagctccaccactgcccccgcgaccggcacgtacaacctccaggaaatcgtgcccggcagcgtgtggatggagagggacgtgtacctccaaggacccatctgggccaagatcccagagacgggggcgcactttcacccctctccggccatgggcggattcggactcaaacacccaccgcccatgatgctcatcaagaacacgcctgtgcccggaaatatcaccagcttctcggccgtgcccgtcagcagcttcatcacccagtacagcaccgggcaggtcaccgtggagatggagtgggagctcaagaaggaaaactccaagaggtggaacccagagatccagtacacaaacaactacaacgacccccagtttgtggactttgccccggacagcaccggggaatacagaaccaccagacctatcggaacccgataccttacccgacccctttaacccattcatgtcgcataccctcaataaa

SEQ ID NO: 1177 - protein, 724 aa, Artificial Sequence
  source: /note="Description of Artificial Sequence: Synthetic polypeptide"
MSFVDHPPDWLEEVGEGLREFLGLEAGPPKPKPNQQHQDQARGLVLPGYNYLGPGNGLDRGEPVNRADEVAREHDISYNEQLEAGDNPYLKYNHADAEFQEKLADDTSFGGNLGKAVFQAKKRVLEPFGLVEEGAKTAPTGKRIDDHFPKRKKARTEEDSKPSTSSDAEAGPSGSQQLQIPAQPASSLGADTMSAGGGGPLGDNNQGADGVGNASGDWHCDSTWMGDRVVTKSTRTWVLPSYNNHQYREIKSGSVDGSNANAYFGYSTPWGYFDFNRFHSHWSPRDWQRLINNYWGFRPRSLRVKIFNIQVKEVTVQDSTTTIANNLTSTVQVFTDDDYQLPYVVGNGTEGCLPAFPPQVFTLPQYGYATLNRDNTENPTERSSFFCLEYFPSKMLRTGNNFEFTYNFEEVPFHSSFAPSQNLFKLANPLVDQYLYRFVSTNNTGGVQFNKNLAGRYANTYKNWFPGPMGRTQGWNLGSGVNRASVSAFATTNRMELEGASYQVPPQPNGMTNNLQGSNTYALENTMIFNSQPANPGTTATYLEGNMLITSESETQPVNRVAYNVGGQMATNNQSSTTAPATGTYNLQEIVPGSVWMERDVYLQGPIWAKIPETGAHFHPSPAMGGFGLKHPPPMMLIKNTPVPGNITSFSAVPVSSFITQYSTGQVTVEMEWELKKENSKRWNPEIQYTNNYNDPQFVDFAPDSTGEYRTTRPIGTRYLTRPL

SEQ ID NO: 1178 - DNA, 2203 bp, Artificial Sequence
  source: /note="Description of Artificial Sequence: Synthetic polynucleotide"
atgtcttttgttgatcaccctccagattggttggaagaagttggtgaaggtcttcgcgagtttttgggccttgaagcgggcccaccgaaaccaaaacccaatcagcagcatcaagatcaagcccgtggtcttgtgctgcctggttataactatctcggacccggaaacggtctcgatcgaggagagcctgtcaacagggcagacgaggtcgcgcgagagcacgacatctcgtacaacgagcagcttgaggcgggagacaacccctacctcaagtacaaccacgcggacgccgagtttcaggagaagctcgccgacgacacatccttcgggggaaacctcggaaaggcagtctttcaggccaagaaaagggttctcgaaccttttggcctggttgaagagggtgctaagacggcccctaccggaaagcggatagacgaccactttccaaaaagaaagaaggctcggaccgaagaggactccaagccttccacctcgtcagacgccgaagctggacccagcggatcccagcagctgcaaatcccagcccaaccagcctcaagtttgggagctgatacaatgtctgcgggaggtggcggcccattgggcgacaataaccaaggtgccgatggagtgggcaatgcctcgggagattggcattgcgattccacgtggatgggggacagagtcgtcaccaagtccacccgaacctgggtgctgcccagctacaacaaccaccagtaccgagagatcaaaagcggctccgtcgacggaagcaacgccaacgcctactttggatacagcaccccctgggggtactttgactttaaccgcttccacagccactggagcccccgagactggcaaagactcatcaacaactactggggcttcagaccccggtccctcagagtcaaaatcttcaacattcaagtcaaagaggtcacggtgcaggactccaccaccaccatcgccaacaacctcacctccaccgtccaagtgtttatggacgacgactaccagctgccctacgtcgtcggcaacgggaccgagggatgcctgccggccttccctccgcaggtctttacgctgccgcagtacggttacgcgacgctgaaccgcgacaacacagaaaatcccaccgagaggagcagcttcttctgcctagagtactttcccagcaagatgctgagaacgggcaacaactttgagtttacctacaactttgaggaggtgcccttccactccagcttcgctcccagtcagaacctgttcaagctggccaacccgctggtggaccagtacttgtaccgcttcgtgagcacaaataacactggcggagtccagttcaacaagaacctggccgggagatacgccaacacctacaaaaactggttcccggggcccatgggccgaacccagggctggaacctgggctccggggtcaaccgcgccagtgtcagcgccttcgccacgaccaataggatggagctcgagggcgcgagttaccaggtgcccccgcagccgaacggcatgaccaacaacctccagggcagcaacacctatgccctggagaacactatgatcttcaacagccagccggcgaacccgggcaccaccgccacgtacctcgagggcaacatgctcatcaccagcgagagcgagacgcagccggtgaaccgcgtggcgtacaacgtcggcgggcagatggccaccaacaaccagagctccaccactgcccccgcgaccggcacgtacaacctccaggaaatcgtgcccggcagcgtgtggatggagagggacgtgtacctccaaggacccatctgggccaagatcccagagacgggggcgcactttcacccctctccggccatgggcggattcggactcaaacacccaccgcccatgatgctcatcaagaacacgcctgtgcccggaaatatcaccagcttctcggacgtgcccgtcagcagcttcatcacccagtacagcaccgggcaggtcaccgtggagatggagtgggagctcaagaaggaaaactccaagaggtggaacccagagatccagtacacaaacaactacaacgacccccagtttgtggactttgccccggacagcaccggggaatacagaaccaccagacctatcggaacccgataccttacccgacccctttaacccattcatgtcgcataccctcaataaa

SEQ ID NO: 1179 - protein, 724 aa, Artificial Sequence
  source: /note="Description of Artificial Sequence: Synthetic polypeptide"
MSFVDHPPDWLEEVGEGLREFLGLEAGPPKPKPNQQHQDQARGLVLPGYNYLGPGNGLDRGEPVNRADEVAREHDISYNEQLEAGDNPYLKYNHADAEFQEKLADDTSFGGNLGKAVFQAKKRVLEPFGLVEEGAKTAPTGKRIDDHFPKRKKARTEEDSKPSTSSDAEAGPSGSQQLQIPAQPASSLGADTMSAGGGGPLGDNNQGADGVGNASGDWHCDSTWMGDRVVTKSTRTWVLPSYNNHQYREIKSGSVDGSNANAYFGYSTPWGYFDFNRFHSHWSPRDWQRLINNYWGFRPRSLRVKIFNIQVKEVTVQDSTTTIANNLTSTVQVFMDDDYQLPYVVGNGTEGCLPAFPPQVFTLPQYGYATLNRDNTENPTERSSFFCLEYFPSKMLRTGNNFEFTYNFEEVPFHSSFAPSQNLFKLANPLVDQYLYRFVSTNNTGGVQFNKNLAGRYANTYKNWFPGPMGRTQGWNLGSGVNRASVSAFATTNRMELEGASYQVPPQPNGMTNNLQGSNTYALENTMIFNSQPANPGTTATYLEGNMLITSESETQPVNRVAYNVGGQMATNNQSSTTAPATGTYNLQEIVPGSVWMERDVYLQGPIWAKIPETGAHFHPSPAMGGFGLKHPPPMMLIKNTPVPGNITSFSDVPVSSFITQYSTGQVTVEMEWELKKENSKRWNPEIQYTNNYNDPQFVDFAPDSTGEYRTTRPIGTRYLTRPL

SEQ ID NO: 1180 - DNA, 2203 bp, Artificial Sequence
  source: /note="Description of Artificial Sequence: Synthetic polynucleotide"
atgtcttttgttgatcaccctccagattggttggaagaagttggtgaaggtcttcgcgagtttttgggccttgaagcgggcccaccgaaaccaaaacccaatcagcagcatcaagatcaagcccgtggtcttgtgctgcctggttataactatctcggacccggaaacggtctcgatcgaggagagcctgtcaacagggcagacgaggtcgcgcgagagcacgacatctcgtacaacgagcagcttgaggcgggagacaacccctacctcaagtacaaccacgcggacgccgagtttcaggagaagctcgccgacgacacatccttcgggggaaacctcggaaaggcagtctttcaggccaagaaaagggttctcgaaccttttggcctggttgaagagggtgctaagacggcccctaccggaaagcggatagacgaccactttccaaaaagaaagaaggctcggaccgaagaggactccaagccttccacctcgtcagacgccgaagctggacccagcggatcccagcagctgcaaatcccagcccaaccagcctcaagtttgggagctgatacaatgtctgcgggaggtggcggcccattgggcgacaataaccaaggtgccgatggagtgggcaatgcctcgggagattggcattgcgattccacgtggatgggggacagagtcgtcaccaagtccacccgaacctgggtgctgcccagctacaacaaccaccagtaccgagagatcaaaagcggctccgtcgacggaagcaacgccaacgcctactttggatacagcaccccctgggggtactttgactttaaccgcttccacagccactggagcccccgagactggcaaagactcatcaacaactactggggcttcagaccccggtccctcagagtcaaaatcttcaacattcaagtcaaagaggtcacggtgcaggactccaccaccaccatcgccaacaacctcacctccaccgtcgatgtgtttacggacgacgactaccagctgccctacgtcgtcggcaacgggaccgagggatgcctgccggccttccctccgcaggtctttacgctgccgcagtacggttacgcgacgctgaaccgcgacaacacagaaaatcccaccgagaggagcagcttcttctgcctagagtactttcccagcaagatgctgagaacgggcaacaactttgagtttacctacaactttgaggaggtgcccttccactccagcttcgctcccagtcagaacctgttcaagctggccaacccgctggtggaccagtacttgtaccgcttcgtgagcacaaataacactggcggagtccagttcaacaagaacctggccgggagatacgccaacacctacaaaaactggttcccggggcccatgggccgaacccagggctggaacctgggctccggggtcaaccgcgccagtgtcagcgccttcgccacgaccaataggatggagctcgagggcgcgagttaccaggtgcccccgcagccgaacggcatgaccaacaacctccagggcagcaacacctatgccctggagaacactatgatcttcaacagccagccggcgaacccgggcaccaccgccacgtacctcgagggcaacatgctcatcaccagcgagagcgagacgcagccggtgaaccgcgtggcgtacaacgtcggcgggcagatggccaccaacaaccagagctccaccactgcccccgcgaccggcacgtacaacctccaggaaatcgtgcccggcagcgtgtggatggagagggacgtgtacctccaaggacccatctgggccaagatcccagagacgggggcgcactttcacccctctccggccatgggcggattcggactcaaacacccaccgcccatgatgctcatcaagaacacgcctgtgcccggaaatatcaccagcttctcggacgtgcccgtcagcagcttcatcacccagtacagcaccgggcaggtcaccgtggagatggagtgggagctcaagaaggaaaactccaagaggtggaacccagagatccagtacacaaacaactacaacgacccccagtttgtggactttgccccggacagcaccggggaatacagaaccaccagacctatcggaacccgataccttacccgacccctttaacccattcatgtcgcataccctcaataaa

SEQ ID NO: 1181 - protein, 724 aa, Artificial Sequence
  source: /note="Description of Artificial Sequence: Synthetic polypeptide"
MSFVDHPPDWLEEVGEGLREFLGLEAGPPKPKPNQQHQDQARGLVLPGYNYLGPGNGLDRGEPVNRADEVAREHDISYNEQLEAGDNPYLKYNHADAEFQEKLADDTSFGGNLGKAVFQAKKRVLEPFGLVEEGAKTAPTGKRIDDHFPKRKKARTEEDSKPSTSSDAEAGPSGSQQLQIPAQPASSLGADTMSAGGGGPLGDNNQGADGVGNASGDWHCDSTWMGDRVVTKSTRTWVLPSYNNHQYREIKSGSVDGSNANAYFGYSTPWGYFDFNRFHSHWSPRDWQRLINNYWGFRPRSLRVKIFNIQVKEVTVQDSTTTIANNLTSTVDVFTDDDYQLPYVVGNGTEGCLPAFPPQVFTLPQYGYATLNRDNTENPTERSSFFCLEYFPSKMLRTGNNFEFTYNFEEVPFHSSFAPSQNLFKLANPLVDQYLYRFVSTNNTGGVQFNKNLAGRYANTYKNWFPGPMGRTQGWNLGSGVNRASVSAFATTNRMELEGASYQVPPQPNGMTNNLQGSNTYALENTMIFNSQPANPGTTATYLEGNMLITSESETQPVNRVAYNVGGQMATNNQSSTTAPATGTYNLQEIVPGSVWMERDVYLQGPIWAKIPETGAHFHPSPAMGGFGLKHPPPMMLIKNTPVPGNITSFSDVPVSSFITQYSTGQVTVEMEWELKKENSKRWNPEIQYTNNYNDPQFVDFAPDSTGEYRTTRPIGTRYLTRPL

SEQ ID NO: 1182 - DNA, 2203 bp, Artificial Sequence
  source: /note="Description of Artificial Sequence: Synthetic polynucleotide"
atgtcttttgttgatcaccctccagattggttggaagaagttggtgaaggtcttcgcgagtttttgggccttgaagcgggcccaccgaaaccaaaacccaatcagcagcatcaagatcaagcccgtggtcttgtgctgcctggttataactatctcggacccggaaacggtctcgatcgaggagagcctgtcaacagggcagacgaggtcgcgcgagagcacgacatctcgtacaacgagcagcttgaggcgggagacaacccctacctcaagtacaaccacgcggacgccgagtttcaggagaagctcgccgacgacacatccttcgggggaaacctcggaaaggcagtctttcaggccaagaaaagggttctcgaaccttttggcctggttgaagagggtgctaagacggcccctaccggaaagcggatagacgaccactttccaaaaagaaagaaggctcggaccgaagaggactccaagccttccacctcgtcagacgccgaagctggacccagcggatcccagcagctgcaaatcccagcccaaccagcctcaagtttgggagctgatacaatgtctgcgggaggtggcggcccattgggcgacaataaccaaggtgccgatggagtgggcaatgcctcgggagattggcattgcgattccacgtggatgggggacagagtcgtcaccaagtccacccgaacctgggtgctgcccagctacaacaaccaccagtaccgagagatcaaaagcggctccgtcgacggaagcaacgccaacgcctactttggatacagcaccccctgggggtactttgactttaaccgcttccacagccactggagcccccgagactggcaaagactcatcaacaactactggggcttcagaccccggtccctcagagtcaaaatcttcaacattcaagtcaaagaggtcacggtgcaggactccaccaccaccatcgccaacaacctcacctccaccgtccaagtgtttacggacgacgactaccagctgccctacgtcgtcggcaacgggacccagggatgcctgccggccttccctccgcaggtctttacgctgccgcagtacggttacgcgacgctgaaccgcgacaacacagaaaatcccaccgagaggagcagcttcttctgcctagagtactttcccagcaagatgctgagaacgggcaacaactttgagtttacctacaactttgaggaggtgcccttccactccagcttcgctcccagtcagaacctgttcaagctggccaacccgctggtggaccagtacttgtaccgcttcgtgagcacaaataacactggcggagtccagttcaacaagaacctggccgggagatacgccaacacctacaaaaactggttcccggggcccatgggccgaacccagggctggaacctgggctccggggtcaaccgcgccagtgtcagcgccttcgccacgaccaataggatggagctcgagggcgcgagttaccaggtgcccccgcagccgaacggcatgaccaacaacctccagggcagcaacacctatgccctggagaacactatgatcttcaacagccagccggcgaacccgggcaccaccgccacgtacctcgagggcaacatgctcatcaccagcgagagcgagacgcagccggtgaaccgcgtggcgtacaacgtcggcgggcagatggccaccaacaaccagagctccaccactgcccccgcgaccggcacgtacaacctccaggaaatcgtgcccggcagcgtgtggatggagagggacgtgtacctccaaggacccatctgggccaagatcccagagacgggggcgcactttcacccctctccggccatgggcggattcggactcaaacacccaccgcccatgatgctcatcaagaacacgcctgtgcccggaaatatcaccagcttctcggacgtgcccgtcagcagcttcatcacccagtacagcaccgggcaggtcaccgtggagatggagtgggagctcaagaaggaaaactccaagaggtggaacccagagatccagtacacaaacaactacaacgacccccagtttgtggactttgccccggacagcaccggggaatacagaaccaccagacctatcggaacccgataccttacccgacccctttaacccattcatgtcgcataccctcaataaa

SEQ ID NO: 1183 - protein, 724 aa, Artificial Sequence
  source: /note="Description of Artificial Sequence: Synthetic polypeptide"
MSFVDHPPDWLEEVGEGLREFLGLEAGPPKPKPNQQHQDQARGLVLPGYNYLGPGNGLDRGEPVNRADEVAREHDISYNEQLEAGDNPYLKYNHADAEFQEKLADDTSFGGNLGKAVFQAKKRVLEPFGLVEEGAKTAPTGKRIDDHFPKRKKARTEEDSKPSTSSDAEAGPSGSQQLQIPAQPASSLGADTMSAGGGGPLGDNNQGADGVGNASGDWHCDSTWMGDRVVTKSTRTWVLPSYNNHQYREIKSGSVDGSNANAYFGYSTPWGYFDFNRFHSHWSPRDWQRLINNYWGFRPRSLRVKIFNIQVKEVTVQDSTTTIANNLTSTVQVFTDDDYQLPYVVGNGTQGCLPAFPPQVFTLPQYGYATLNRDNTENPTERSSFFCLEYFPSKMLRTGNNFEFTYNFEEVPFHSSFAPSQNLFKLANPLVDQYLYRFVSTNNTGGVQFNKNLAGRYANTYKNWFPGPMGRTQGWNLGSGVNRASVSAFATTNRMELEGASYQVPPQPNGMTNNLQGSNTYALENTMIFNSQPANPGTTATYLEGNMLITSESETQPVNRVAYNVGGQMATNNQSSTTAPATGTYNLQEIVPGSVWMERDVYLQGPIWAKIPETGAHFHPSPAMGGFGLKHPPPMMLIKNTPVPGNITSFSDVPVSSFITQYSTGQVTVEMEWELKKENSKRWNPEIQYTNNYNDPQFVDFAPDSTGEYRTTRPIGTRYLTRPL

SEQ ID NO: 1184 - DNA, 2203 bp, Artificial Sequence
  source: /note="Description of Artificial Sequence: Synthetic polynucleotide"
atgtcttttgttgatcaccctccagattggttggaagaagttggtgaaggtcttcgcgagtttttgggccttgaagcgggcccaccgaaaccaaaacccaatcagcagcatcaagatcaagcccgtggtcttgtgctgcctggttataactatctcggacccggaaacggtctcgatcgaggagagcctgtcaacagggcagacgaggtcgcgcgagagcacgacatctcgtacaacgagcagcttgaggcgggagacaacccctacctcaagtacaaccacgcggacgccgagtttcaggagaagctcgccgacgacacatccttcgggggaaacctcggaaaggcagtctttcaggccaagaaaagggttctcgaaccttttggcctggttgaagagggtgctaagacggcccctaccggaaagcggatagacgaccactttccaaaaagaaagaaggctcggaccgaagaggactccaagccttccacctcgtcagacgccgaagctggacccagcggatcccagcagctgcaaatcccagcccaaccagcctcaagtttgggagctgatacaatgtctgcgggaggtggcggcccattgggcgacaataaccaaggtgccgatggagtgggcaatgcctcgggagattggcattgcgattccacgtggatgggggacagagtcgtcaccaagtccacccgaacctgggtgctgcccagctacaacaaccaccagtaccgagagatcaaaagcggctccgtcgacggaagcaacgccaacgcctactttggatacagcaccccctgggggtactttgactttaaccgcttccacagccactggagcccccgagactggcaaagactcatcaacaactactggggcttcagaccccggtccctcagagtcaaaatcttcaacattcaagtcaaagaggtcacggtgcaggactccaccaccaccatcgccaacaacctcacctccaccgtccaagtgtttacggacgacgactaccagctgccctacgtcgtcggcaacgggaccgagggatgcctgccggccttccctccgcaggtctttacgctgccgcagtacggttacgcgacgctgaaccgcgacaacacagaaaatcccaccgagaggagcagcttcttctgcctagagtactttcccagcaagatgctgagaacgggcaacaactttgagtttacctacaactttgaggaggtgcccttccactccagcttcgctcccagtcagaacctgttcaagctggccaacccgctggtggaccagtacttgtaccgcttcgtgagcacaaataacactggcggagtccagttcaacaagaacctggccgggagatacgccaacacctacaaaaactggttcccggggcccatgggccgaacccagggctggaacctgggctccggggtcaaccgcgccagtgtcagcgccttcgccacgaccaataggatggagctcgagggcgcgagttaccaggtgcccccgcagccgaacggcatgaccaacaacctccagggcagcaacacctatgccctggagaacactatgatcttcaacagccagtcggcgaacccgggcaccaccgccacgtacctcgagggcaacatgctcatcaccagcgagagcgagacgcagccggtgaaccgcgtggcgtacaacgtcggcgggcagatggccaccaacaaccagagctccaccactgcccccgcgaccggcacgtacaacctccaggaaatcgtgcccggcagcgtgtggatggagagggacgtgtacctccaaggacccatctgggccaagatcccagagacgggggcgcactttcacccctctccggccatgggcggattcggactcaaacacccaccgcccatgatgctcatcaagaacacgcctgtgcccggaaatatcaccagcttctcggacgtgcccgtcagcagcttcatcacccagtacagcaccgggcaggtcaccgtggagatggagtgggagctcaagaaggaaaactccaagaggtggaacccagagatccagtacacaaacaactacaacgacccccagtttgtggactttgccccggacagcaccggggaatacagaaccaccagacctatcggaacccgataccttacccgacccctttaacccattcatgtcgcataccctcaataaa

SEQ ID NO: 1185 - protein, 724 aa, Artificial Sequence
  source: /note="Description of Artificial Sequence: Synthetic polypeptide"
MSFVDHPPDWLEEVGEGLREFLGLEAGPPKPKPNQQHQDQARGLVLPGYNYLGPGNGLDRGEPVNRADEVAREHDISYNEQLEAGDNPYLKYNHADAEFQEKLADDTSFGGNLGKAVFQAKKRVLEPFGLVEEGAKTAPTGKRIDDHFPKRKKARTEEDSKPSTSSDAEAGPSGSQQLQIPAQPASSLGADTMSAGGGGPLGDNNQGADGVGNASGDWHCDSTWMGDRVVTKSTRTWVLPSYNNHQYREIKSGSVDGSNANAYFGYSTPWGYFDFNRFHSHWSPRDWQRLINNYWGFRPRSLRVKIFNIQVKEVTVQDSTTTIANNLTSTVQVFTDDDYQLPYVVGNGTEGCLPAFPPQVFTLPQYGYATLNRDNTENPTERSSFFCLEYFPSKMLRTGNNFEFTYNFEEVPFHSSFAPSQNLFKLANPLVDQYLYRFVSTNNTGGVQFNKNLAGRYANTYKNWFPGPMGRTQGWNLGSGVNRASVSAFATTNRMELEGASYQVPPQPNGMTNNLQGSNTYALENTMIFNSQSANPGTTATYLEGNMLITSESETQPVNRVAYNVGGQMATNNQSSTTAPATGTYNLQEIVPGSVWMERDVYLQGPIWAKIPETGAHFHPSPAMGGFGLKHPPPMMLIKNTPVPGNITSFSDVPVSSFITQYSTGQVTVEMEWELKKENSKRWNPEIQYTNNYNDPQFVDFAPDSTGEYRTTRPIGTRYLTRPL

SEQ ID NO: 1186 - DNA, 2203 bp, Artificial Sequence
  source: /note="Description of Artificial Sequence: Synthetic polynucleotide"
atgtcttttgttgatcaccctccagattggttggaagaagttggtgaaggtcttcgcgagtttttgggccttgaagcgggcccaccgaaaccaaaacccaatcagcagcatcaagatcaagcccgtggtcttgtgctgcctggttataactatctcggacccggaaacggtctcgatcgaggagagcctgtcaacagggcagacgaggtcgcgcgagagcacgacatctcgtacaacgagcagcttgaggcgggagacaacccctacctcaagtacaaccacgcggacgccgagtttcaggagaagctcgccgacgacacatccttcgggggaaacctcggaaaggcagtctttcaggccaagaaaagggttctcgaaccttttggcctggttgaagagggtgctaagacggcccctaccggaaagcggatagacgaccactttccaaaaagaaagaaggctcggaccgaagaggactccaagccttccacctcgtcagacgccgaagctggacccagcggatcccagcagctgcaaatcccagcccaaccagcctcaagtttgggagctgatacaatgtctgcgggaggtggcggcccattgggcgacaataaccaaggtgccgatggagtgggcaatgcctcgggagattggcattgcgattccacgtggatgggggacagagtcgtcaccaagtccacccgaacctgggtgctgcccagctacaacaaccaccagtaccgagagatcaaaagcggctccgtcgacggaagcaacgccaacgcctactttggatacagcaccccctgggggtactttgactttaaccgcttccacagccactggagcccccgagactggcaaagactcatcaacaactactggggcttcagaccccggtccctcagagtcaaaatcttcaacattcaagtcaaagaggtcacggtgcaggactccaccaccaccatcgccaacaacctcacctccaccgtccaagtgtttacggacgacgactaccagctgccctacgtcgtcggcaacgggaccgagggatgcctgccggccttccctccgcaggtctttacgctgccgcagtacggttacgcgacgctgaaccgcgacaacacagaaaatcccaccgagaggagcagcttcttctgcctagagtactttcccagcaagatgctgagaacgggcaacaactttgagtttacctacaactttgaggaggtgcccttccactccagcttcgctcccagtcagaacctgttcaagctggccaacccgctggtggaccagtacttgtaccgcttcgtgagcacaaataacactggcggagtccagttcaacaagaacctggccgggagatacgccaacacctacaaaaactggttcccggggcccatgggccgaacccagggctggaacctgggctccggggtcaaccgcgccagtgtcagcgccttcgccacgaccaataggatggagctcgagggcgcgagttaccaggtgcccccgcagccgaacggcatgaccaacaacctccagggcagcaacacctatgccctggagaacactatgatcttcaacagccagggggcgaacccgggcaccaccgccacgtacctcgagggcaacatgctcatcaccagcgagagcgagacgcagccggtgaaccgcgtggcgtacaacgtcggcgggcagatggccaccaacaaccagagctccaccactgcccccgcgaccggcacgtacaacctccaggaaatcgtgcccggcagcgtgtggatggagagggacgtgtacctccaaggacccatctgggccaagatcccagagacgggggcgcactttcacccctctccggccatgggcggattcggactcaaacacccaccgcccatgatgctcatcaagaacacgcctgtgcccggaaatatcaccagcttctcggacgtgcccgtcagcagcttcatcacccagtacagcaccgggcaggtcaccgtggagatggagtgggagctcaagaaggaaaactccaagaggtggaacccagagatccagtacacaaacaactacaacgacccccagtttgtggactttgccccggacagcaccggggaatacagaaccaccagacctatcggaacccgataccttacccgacccctttaacccattcatgtcgcataccctcaataaa

SEQ ID NO: 1187 - protein, 724 aa, Artificial Sequence
  source: /note="Description of Artificial Sequence: Synthetic polypeptide"
MSFVDHPPDWLEEVGEGLREFLGLEAGPPKPKPNQQHQDQARGLVLPGYNYLGPGNGLDRGEPVNRADEVAREHDISYNEQLEAGDNPYLKYNHADAEFQEKLADDTSFGGNLGKAVFQAKKRVLEPFGLVEEGAKTAPTGKRIDDHFPKRKKARTEEDSKPSTSSDAEAGPSGSQQLQIPAQPASSLGADTMSAGGGGPLGDNNQGADGVGNASGDWHCDSTWMGDRVVTKSTRTWVLPSYNNHQYREIKSGSVDGSNANAYFGYSTPWGYFDFNRFHSHWSPRDWQRLINNYWGFRPRSLRVKIFNIQVKEVTVQDSTTTIANNLTSTVQVFTDDDYQLPYVVGNGTEGCLPAFPPQVFTLPQYGYATLNRDNTENPTERSSFFCLEYFPSKMLRTGNNFEFTYNFEEVPFHSSFAPSQNLFKLANPLVDQYLYRFVSTNNTGGVQFNKNLAGRYANTYKNWFPGPMGRTQGWNLGSGVNRASVSAFATTNRMELEGASYQVPPQPNGMTNNLQGSNTYALENTMIFNSQGANPGTTATYLEGNMLITSESETQPVNRVAYNVGGQMATNNQSSTTAPATGTYNLQEIVPGSVWMERDVYLQGPIWAKIPETGAHFHPSPAMGGFGLKHPPPMMLIKNTPVPGNITSFSDVPVSSFITQYSTGQVTVEMEWELKKENSKRWNPEIQYTNNYNDPQFVDFAPDSTGEYRTTRPIGTRYLTRPL

SEQ ID NO: 1188 - DNA, 2194 bp, Artificial Sequence
  source: /note="Description of Artificial Sequence: Synthetic polynucleotide"
atgtcttttgttgatcaccctccagattggttggaagaagttggtgaaggtcttcgcgagtttttgggccttgaagcgggcccaccgaaaccaaaacccaatcagcagcatcaagatcaagcccgtggtcttgtgctgcctggttataactatctcggacccggaaacggtctcgatcgaggagagcctgtcaacagggcagacgaggtcgcgcgagagcacgacatctcgtacaacgagcagcttgaggcgggagacaacccctacctcaagtacaaccacgcggacgccgagtttcaggagaagctcgccgacgacacatccttcgggggaaacctcggaaaggcagtctttcaggccaagaaaagggttctcgaaccttttggcctggttgaagagggtgctaagacggcccctaccggaaagcggatagacgaccactttccaaaaagaaagaaggctcggaccgaagaggactccaagccttccacctcgtcagacgccgaagctggacccagcggatcccagcagctgcaaatcccagcccaaccagcctcaagtttgggagctgatacaatgtctgcgggaggtggcggcccattgggcgacaataaccaaggtgccgatggagtgggcaatgcctcgggagattggcattgcgattccacgtggatgggggacagagtcgtcaccaagtccacccgaacctgggtgctgcccagctacaacaaccaccagtaccgagagatcaaaagcggctccgtcgacggaagcaacgccaacgcctactttggatacagcaccccctgggggtactttgactttaaccgcttccacagccactggagcccccgagactggcaaagactcatcaacaactactggggcttcagaccccggtccctcagagtcaaaatcttcaacattcaagtcaaagaggtcacggtgcaggactccaccaccaccatcgccaacaacctcacctccaccgtccaagtgtttacggacgacgactaccagctgccctacgtcgtcggcaacgggaccgagggatgcctgccggccttccctccgcaggtctttacgctgccgcagtacggttacgcgacgctgaaccgcgacaacacagaaaatcccaccgagaggagcagcttcttctgcctagagtactttcccagcaagatgctgagaacgggcaacaactttgagtttacctacaactttgaggaggtgcccttccactccagcttcgctcccagtcagaacctgttcaagctggccaacccgctggtggaccagtacttgtaccgcttcgtgagcacaaataacactggcggagtccagttcaacaagaacctggccgggagatacgccaacacctacaaaaactggttcccggggcccatgggccgaacccagggctggaacctgggctccggggtcaaccgcgccagtgtcagcgccttcgccacgaccaataggatggagctcgagggcgcgagttaccaggtgcccccgcagccgaacggcatgaccaacaacctccagggcagcaacacctatgccctggagaacactatgatcttcgggaagcaaggctcagagaaaacaaatgtggacattgaaaaggtcatgatcaccagcgagagcgagacgcagccggtgaaccgcgtggcgtacaacgtcggcgggcagatggccaccaacaaccagagctccaccactgcccccgcgaccggcacgtacaacctccaggaaatcgtgcccggcagcgtgtggatggagagggacgtgtacctccaaggacccatctgggccaagatcccagagacgggggcgcactttcacccctctccggccatgggcggattcggactcaaacacccaccgcccatgatgctcatcaagaacacgcctgtgcccggaaatatcaccagcttctcggacgtgcccgtcagcagcttcatcacccagtacagcaccgggcaggtcaccgtggagatggagtgggagctcaagaaggaaaactccaagaggtggaacccagagatccagtacacaaacaactacaacgacccccagtttgtggactttgccccggacagcaccggggaatacagaaccaccagacctatcggaacccgataccttacccgacccctttaacccattcatgtcgcataccctcaataaa

SEQ ID NO: 1189 - protein, 721 aa, Artificial Sequence
  source: /note="Description of Artificial Sequence: Synthetic polypeptide"
MSFVDHPPDWLEEVGEGLREFLGLEAGPPKPKPNQQHQDQARGLVLPGYNYLGPGNGLDRGEPVNRADEVAREHDISYNEQLEAGDNPYLKYNHADAEFQEKLADDTSFGGNLGKAVFQAKKRVLEPFGLVEEGAKTAPTGKRIDDHFPKRKKARTEEDSKPSTSSDAEAGPSGSQQLQIPAQPASSLGADTMSAGGGGPLGDNNQGADGVGNASGDWHCDSTWMGDRVVTKSTRTWVLPSYNNHQYREIKSGSVDGSNANAYFGYSTPWGYFDFNRFHSHWSPRDWQRLINNYWGFRPRSLRVKIFNIQVKEVTVQDSTTTIANNLTSTVQVFTDDDYQLPYVVGNGTEGCLPAFPPQVFTLPQYGYATLNRDNTENPTERSSFFCLEYFPSKMLRTGNNFEFTYNFEEVPFHSSFAPSQNLFKLANPLVDQYLYRFVSTNNTGGVQFNKNLAGRYANTYKNWFPGPMGRTQGWNLGSGVNRASVSAFATTNRMELEGASYQVPPQPNGMTNNLQGSNTYALENTMIFGKQGSEKTNVDIEKVMITSESETQPVNRVAYNVGGQMATNNQSSTTAPATGTYNLQEIVPGSVWMERDVYLQGPIWAKIPETGAHFHPSPAMGGFGLKHPPPMMLIKNTPVPGNITSFSDVPVSSFITQYSTGQVTVEMEWELKKENSKRWNPEIQYTNNYNDPQFVDFAPDSTGEYRTTRPIGTRYLTRPL

SEQ ID NO: 1190 - protein, 519 aa, Artificial Sequence
  source: /note="Description of Artificial Sequence: Synthetic polypeptide"
DGVGSSSGNWHCDSTWLGDRVITTSTRTWALPTYNNHLYKQISNGTSGGATNDNTYFGYSTPWGYFDFNRFHCHFSPRDWQRLINNNWGFRPKRLSFKLFNIQVKEVTQNEGTKTIANNLTSTIQVFTDSEYQLPYVLGSAHQGCLPPFPADVFMIPQYGYLTLNNGSQAVGRSSFYCLEYFPSQMLRTGNNFQFTYTFEDVPFHSSYAHSQSLDRLMNPLIDQYLYYLSRTQTTGGTANTQTLGFSQGGPNTMANQAKNWLPGPCYRQQRVSTTTGQNNNSNFAWTAGTKYHLNGRNSLANPGIAMATHKDDEERFFPSNGILIFGKQNAARDNADYSDVMLTSEEEIKTTNPVATEEYGIVADNLQQQNTAPQIGTVNSQGALPGMVWQNRDVYLQGPIWAKIPHTDGNFHPSPLMGGFGLKHPPPQILIKNTPVPADPPTTFNQSKLNSFITQYSTGQVSVEIEWELQKENSKRWNPEIQYTSNYYKSTSVDFAVNTEGVYSEPRPIGTRYLTRNL

SEQ ID NO: 1191 - protein, 738 aa, Artificial Sequence
  source: /note="Description of Artificial Sequence: Synthetic polypeptide"
MAADGYLPDWLEDNLSEGIREWWALQPGAPKPKANQQHQDNARGLVLPGYKYLGPGNGLDKGEPVNAADAAALEHDKAYDQQLKAGDNPYLKYNHADAEFQERLKEDTSFGGNLGRAVFQAKKRLLEPLGLVEEAAKTAPGKKRPVEPSPQRSPDSSTGIGKKGQQPARKRLNFGQTGDSESVPDPQPLGEPPAAPSGVGPNTMAAGGGAPMADNNEGADGVGSSSGNWHCDSTWLGDRVITTSTRTWALPTYNNHLYKQISNGTSGGATNDNTYFGYSTPWGYFDFNRFHCHFSPRDWQRLINNNWGFRPKRLSFKLFNIQVKEVTQNEGTKTIANNLTSTIQVFTDSEYQLPYVLGSAHQGCLPPFPADVFMIPQYGYLTLNNGSQAVGRSSFYCLEYFPSQMLRTGNNFQFTYTFEDVPFHSSYAHSQSLDRLMNPLIDQYLYYLSRTQTTGGTANTQTLGFSQGGPNTMANQAKNWLPGPCYRQQRVSTTTGQNNNSNFAWTAGTKYHLNGRNSLANPGIAMATHKDDEERFFPSNGILIFGKQNAARDNADYSDVMLTSEEEIKTTNPVATEEYGIVADNLQQQNTAPQIGTVNSQGALPGMVWQNRDVYLQGPIWAKIPHTDGNFHPSPLMGGFGLKHPPPQILIKNTPVPADPPTTFNQSKLNSFITQYSTGQVSVEIEWELQKENSKRWNPEIQYTSNYYKSTSVDFAVNTEGVYSEPRPIGTRYLTRNL

SEQ ID NO: 1192 - protein, 725 aa, Artificial Sequence
  source: /note="Description of Artificial Sequence: Synthetic polypeptide"
MAADGYLPDWLEDNLSEGIREWWALQPGAPKPKANQQHQDNARGLVLPGYKYLGPGNGLDKGEPVNAADAAALEHDKAYDQQLKAGDNPYLKYNHADAEFQERLKEDTSFGGNLGRAVFQAKKRLLEPLGLVEEAAKTAPTGKRIDDHFPKRKKARTEEDSKPSTSSDAEAGPSGSQQLQIPAQPASSLGADTMSAGGGGPLGDNNQGADGVGNASGDWHCDSTWMGDRVVTKSTRTWVLPSYNNHQYREIKSGSVDGSNANAYFGYSTPWGYFDFNRFHSHWSPRDWQRLINNYWGFRPRSLRVKIFNIQVKEVTVQDSTTTIANNLTSTVQVFTDDDYQLPYVVGNGTEGCLPAFPPQVFTLPQYGYATLNRDNTENPTERSSFFCLEYFPSKMLRTGNNFEFTYNFEEVPFHSSFAPSQNLFKLANPLVDQYLYRFVSTNNTGGVQFNKNLAGRYANTYKNWFPGPMGRTQGWNLGSGVNRASVSAFATTNRMELEGASYQVPPQPNGMTNNLQGSNTYALENTMIFNSQPANPGTTATYLEGNMLITSESETQPVNRVAYNVGGQMATNNQSSTTAPATGTYNLQEIVPGSVWMERDVYLQGPIWAKIPETGAHFHPSPAMGGFGLKHPPPMMLIKNTPVPGNITSFSDVPVSSFITQYSTGQVTVEMEWELKKENSKRWNPEIQYTNNYNDPQFVDFAPDSTGEYRTTRPIGTRYLTRPL

SEQ ID NO: 1193 - protein, 736 aa, Artificial Sequence
  source: /note="Description of Artificial Sequence: Synthetic polypeptide"
MAADGYLPDWLEDNLSEGIREWWALKPGAPKPKANQQKQDDGRGLVLPGYKYLGPFNGLDKGEPVNAADAAALEHDKAYDQQLQAGDNPYLRYNHADAEFQERLQEDTSFGGNLGRAVFQAKKRVLEPLGLVEEGAKTAPGKKRPVDQSPQEPDSSSGVGKSGKQPARKRLNFGQTGDSESVPDPQPLGEPPAAPTSLGSNTMASGGGAPMADNNEGADGVGNSSGNWHCDSQWLGDRVITTSTRTWALPTYNNHLYKQISSQSGASNDNHYFGYSTPWGYFDFNRFHCHFSPRDWQRLINNNWGFRPKKLSFKLFNIQVKEVTQNDGTTTIANNLTSTVQVFTDSEYQLPYVLGSAHQGCLPPFPADVFMVPQYGYLTLNNGSQAVGRSSFYCLEYFPSQMLRTGNNFQFSYTFEDVPFHSSYAHSQSLDRLMNPLIDQYLYYLNRTQGTTSGTTNQSRLLFSQAGPQSMSLQARNWLPGPCYRQQRLSKTANDNNNSNFPWTAASKYHLNGRDSLVNPGPAMASHKDDEEKFFPMHGNLIFGKEGTTASNAELDNVMITDEEEIRTTNPVATEQYGTVANNLQSSNTAPTTRTVNDQGALPGMVWQDRDVYLQGPIWAKIPHTDGHFHPSPLMGGFGLKHPPPQIMIKNTPVPANPPTTFSPAKFASFITQYSTGQVSVEIEWELQKENSKRWNPEIQYTSNYNKSVNVDFTVDTNGVYSEPRPIGTRYLTRNL

SEQ ID NO: 1194 - protein, 735 aa, Artificial Sequence
  source: /note="Description of Artificial Sequence: Synthetic polypeptide"
MSFVDHPPDWLEEVGEGLREFLGLEAGPPKPKPNQQHQDQARGLVLPGYNYLGPGNGLDRGEPVNRADEVAREHDISYNEQLEAGDNPYLKYNHADAEFQEKLADDTSFGGNLGKAVFQAKKRVLEPFGLVEEGAKTAPGKKRPVDQSPQEPDSSSGVGKSGKQPARKRLNFGQTGDSESVPDPQPLGEPPAAPTSLGSNTMASGGGAPMADNNEGADGVGNSSGNWHCDSQWLGDRVITTSTRTWALPTYNNHLYKQISSQSGASNDNHYFGYSTPWGYFDFNRFHCHFSPRDWQRLINNNWGFRPKKLSFKLFNIQVKEVTQNDGTTTIANNLTSTVQVFTDSEYQLPYVLGSAHQGCLPPFPADVFMVPQYGYLTLNNGSQAVGRSSFYCLEYFPSQMLRTGNNFQFSYTFEDVPFHSSYAHSQSLDRLMNPLIDQYLYYLNRTQGTTSGTTNQSRLLFSQAGPQSMSLQARNWLPGPCYRQQRLSKTANDNNNSNFPWTAASKYHLNGRDSLVNPGPAMASHKDDEEKFFPMHGNLIFGKEGTTASNAELDNVMITDEEEIRTTNPVATEQYGTVANNLQSSNTAPTTRTVNDQGALPGMVWQDRDVYLQGPIWAKIPHTDGHFHPSPLMGGFGLKHPPPQIMIKNTPVPANPPTTFSPAKFASFITQYSTGQVSVEIEWELQKENSKRWNPEIQYTSNYNKSVNVDFTVDTNGVYSEPRPIGTRYLTRPL

SEQ ID NO: 1195 - protein, 736 aa, Artificial Sequence
  source: /note="Description of Artificial Sequence: Synthetic polypeptide"
MAADGYLPDWLEDNLSEGIREWWALKPGAPKPKANQQKQDDGRGLVLPGYKYLGPFNGLDKGEPVNAADAAALEHDKAYDQQLQAGDNPYLRYNHADAEFQERLQEDTSFGGNLGRAVFQAKKRVLEPLGLVEEGAKTAPGKKRPVEPSPQRSPDSSTGIGKKGQQPARKRLNFGQTGDSESVPDPQPLGEPPAAPSGVGPNTMAAGGGAPMADNNEGADGVGSSSGNWHCDSTWLGDRVITTSTRTWALPTYNNHLYKQISSQSGASNDNHYFGYSTPWGYFDFNRFHCHFSPRDWQRLINNNWGFRPKRLSFKLFNIQVKEVTQNEGTKTIANNLTSTIQVFTDSEYQLPYVLGSAHQGCLPPFPADVFMIPQYGYLTLNNGSQAVGRSSFYCLEYFPSQMLRTGNNFQFTYTFEDVPFHSSYAHSQSLDRLMNPLIDQYLYYLSRTQTTGGTANTQTLGFSQGGPNTMANQAKNWLPGPCYRQQRVSTTTGQNNNSNFAWTAGTKYHLNGRNSLANPGIAMATHKDDEERFFPSNGILIFGKQGTTASNAELDNVMITDEEEIKTTNPVATEEYGIVADNLQQQNTAPQIGTVNSQGALPGMVWQNRDVYLQGPIWAKIPHTDGNFHPSPLMGGFGLKHPPPQILIKNTPVPADPPTTFNQSKLNSFITQYSTGQVSVEIEWELQKENSKRWNPEIQYTSNYNKSVNVDFTVDTNGVYSEPRPIGTRYLTRNL

SEQ ID NO: 1196 - protein, 736 aa, Artificial Sequence
  source: /note="Description of Artificial Sequence: Synthetic polypeptide"
MAADGYLPDWLEDNLSEGIREWWALKPGAPKPKANQQKQDDGRGLVLPGYKYLGPFNGLDKGEPVNAADAAALEHDKAYDQQLQAGDNPYLRYNHADAEFQERLQEDTSFGGNLGRAVFQAKKRVLEPLGLVEEGAKTAPGKKRPVEPSPQRSPDSSTGIGKKGQQPARKRLNFGQTGDSESVPDPQPLGEPPAAPSGVGPNTMAAGGGAPMADNNEGADGVGSSSGNWHCDSTWLGDRVITTSTRTWALPTYNNHLYKQISSQSGASNDNHYFGYSTPWGYFDFNRFHCHFSPRDWQRLINNNWGFRPKRLSFKLFNIQVKEVTQNEGTKTIANNLTSTIQVFTDSEYQLPYVLGSAHQGCLPPFPADVFMIPQYGYLTLNNGSQAVGRSSFYCLEYFPSQMLRTGNNFQFTYTFEDVPFHSSYAHSQSLDRLMNPLIDQYLYYLSRTQTTGGTANTQTLGFSQGGPNTMANQAKNWLPGPCYRQQRVSTTTGQNNNSNFAWTAGTKYHLNGRNSLANPGIAMATHKDDEERFFPSNGILIFGKQNAARDNADYSDVMLTSEEEIKTTNPVATEEYGIVADNLQQQNTAPQIGTVNSQGALPGMVWQNRDVYLQGPIWAKIPHTDGNFHPSPLMGGFGLKHPPPQILIKNTPVPADPPTTFNQSKLNSFITQYSTGQVSVEIEWELQKENSKRWNPEIQYTSNYYKSTSVDFAVNTEGVYSEPRPIGTRYLTRNL

SEQ ID NO: 1197 - protein, 736 aa, Artificial Sequence
  source: /note="Description of Artificial Sequence: Synthetic polypeptide"
MAADGYLPDWLEDNLSEGIREWWDLKPGAPKPKANQQKQDDGRGLVLPGYKYLGPFNGLDKGEPVNAADAAALEHDKAYDQQLKAGDNPYLRYNHADAEFQERLQEDTSFGGNLGRAVFQAKKRVLEPLGLVEEGAKTAPGKKRPVEQSPQEPDSSSGIGKTGQQPAKKRLNFGQTGDTESVPDPQPLGEPPAAPSGLGPNTMASGGGAPMADNNEGADGVGNSSGNWHCDSTWLGDRVITTSTRTWALPTYNNHLYKQISNGTSGGSTNDNTYFGYSTPWGYFDFNRFHCHFSPRDWQRLINNNWGFRPKRLNFKLFNIQVKEVTTNEGTKTIANNLTSTVQVFTDSEYQLPYVLGSAHQGCLPPFPADVFMVPQYGYLTLNNGSQALGRSSFYCLEYFPSQMLRTGNNFQFSYTFEDVPFHSSYAHSQSLDRLMNPLIDQYLYYLVRTQTTGTGGTQTLAFSQAGPSSMASQARNWVPGPSYRQQRVSTTTNQNNNSNFAWTGAAKFKLNGRDSLMNPGVAMASHKDDEDRFFPSSGVLIFGKQGAGNDGVDYSQVLITDEEEIKATNPVATEEYGAVAINNQAANTQAQTGLVHNQGVIPGMVWQNRDVYLQGPIWAKIPHTDGNFHPSPLMGGFGLKHPPPQILIKNTPVPADPPLTFNQAKLNSFITQYSTGQVSVEIEWELQKENSKRWNPEIQYTSNYYKSTNVDFAVNTEGVYSEPRPIGTRYLTRNL

SEQ ID NO: 1198 - DNA, 3695 bp, Artificial Sequence
  source: /note="Description of Artificial Sequence: Synthetic polynucleotide"
ctctttgcgcttgcgttttcccttgtccagatagcccagtagctgacattcatccggggtcagcaccgtttctgcggactggctttctacgtgaaaaggatctaggtgaagatcctttttgataatctcatgcctgacatttatattccccagaacatcaggttaatggcgtttttgatgtcattttcgcggtggctgagatcagccacttcttccccgataacggagaccggcacactggccatatcggtggtcatcatgcgccagctttcatccccgatatgcaccaccgggtaaagttcacgggagactttatctgacagcagacgtgcactggccagggggatcaccatccgtcgccccggcgtgtcaataatatcactctgtacatccacaaacagacgataacggctctctcttttataggtgtaaaccttaaactgccgtacgtataggctgcgcaactgttgggaagggcgatcggtgcgggcctcttcgctattacgccagctggcgaaagggggatgtgctgcaaggcgattaagttgggtaacgccagggttttcccagtcacgacgttgtaaaacgacggccagtgaattgtaatacgactcactatagggcgaattgaatttagcggccgcgaattcgcccttatgatatctggtgggaggagggcaagatgacggccaaggtcgtggagtccgccaaggccattctcggcggcagcaaagtgcgcgtggaccaaaagtgcaagtcgtccgcccagatcgatcccactcccgtcattgtcacctccaacaccaacatgtgcgccgtgattgacgggaacagcaccaccttcgagcaccagcagccgttgcaggaccggatgttcaaatttgaacttacccgccgtctggagcatgactttggcaaggtgacaaagcaggaagtcaaagagttcttccgctgggcgcaggatcacgtgaccgaggtggcgcatgagttccacgtcagaaagggtggagccaacaagagacccgcccccgatgacgctgataaaagcgagcccaagcgggcctgcccctcagtcgcagatccatcgacgtcagacgcggaaggagctccggtggactttgccgacaggtaccaaaacaaatgttctcgtcacgcgggcatgcttcagatgctgtttccctgcaagacatgcgagagaatgaatcagaatttcaacatttgcttcacgcacgggaccagggactgttcggagtgcttccccggcgtgtcagaatctcaaccggtcgtcagaaaaaggacgtatcggaaactctgtgccattcatcatctgctggggagggctcccgagattgcttgctcggcctgcgatctggtcaacgtggacctggatgactgtgtctctgagcaataaatgacttaaaccaggtatggctgccgatggttatcttccagattggctcgaggacaacctctctgagggcattcgcgagtggtgggacttgaaacctggagccccgaaacccaaagccaaccagcaaaagcaggacgacggccggggtctggtgcttcctggctacaagtacctcggacccttcaacggactcgacaagggggagcccgtcaacgcggcggacgcagcggccctcgagcacgacaaggcctacgaccagcagctcaaagcgggtgacaatccgtacctgcggtataaccacgccgacgccgagtttcaggagcgtctgcaagaagatacgtcttttgggggcaacctcgggcgagcagtcttccaggccaagaagcgggttctcgaacctctcggtctggttgaggaaggcgctaagacggctcctggaaagaagagaccggtagagcagtcaccccaagaaccagactcctcatcgggcatcggcaagacaggccagcagcccgctaaaaagagactcaattttggtcagactggcgacacagagtcagtccccgacccacaacctctcggagaacctccagcagccccctcaggtctgggacctaatacaatggcttcaggcggtggcgctccaatggcagacaataacgaaggcgccgacggagtgggtaattcctcgggaaattggcattgcgattccacatggctgggggacagagtcatcaccaccagcacccgaacctgggccctgcccacctacaacaaccacctctacaagcaaatctccaacggcacctcgggaggaagcaccaacgacaacacctactttggctacagcaccccctgggggtattttgacttcaacagattccactgccacttttcaccacgtgactggcagcgactcatcaacaacaattggggattccggcccaagagactcaacttcaagctcttcaacatccaggtcaaggaagtcacgacgaacgaaggcaccaagaccatcgccaataatctcaccagcaccgtgcaggtctttacggactcggagtaccagctaccgtacgtgctaggatcagctcaccagggatgtctgcctccgttcccggcggacgtcttcatggttcctcagtacggttatctaactctgaacaatggcagccaggccctgggacgttcctccttctactgcctggagtatttcccatcgcagatgctgagaaccggcaacaactttcagttcagctacaccttcgaggacgtgcctttccacagcagctacgcgcacagccaaagcctggacaggctgatgaatcccctcatcgaccagtacctgtattacctggtcagaacgcagacaaccgggactggagggacgcagactctggcattcagccaagcaggccctagctcaatggccagccaggctagaaactgggtgcccggaccgagctaccggcagcagcgcgtctccacgacaaccaaccagaacaacaacagcaactttgcctggacgggagctgccaaatttaaactgaacggccgagactctctaatgaaccccggcgtggccatggcttcacacaaggatgacgaggaccgcttcttcccttctagcggggtcctgattttcggcaagcaaggagccgggaatgatggagtggattacagccaagtgctgattacagatgaggaagaaatcaaggctaccaaccccgtggcaacagaggaatatggagcagtggccatcaacaaccaggccgctaatacgcaggcgcagaccggactcgtgcacaaccagggggtgattcccggcatggtgtggcagaacagagacgtgtacctgcagggtcccatctgggccaaaattcctcacacggacggcaactttcacccgtctcccctgatgggcggctttggactgaagcacccgcctcctcaaattctcatcaagaacacaccggttccagcggacccgccgcttaccttcaaccaggccaagctgaactctttcatcacgcagtacagcaccggacaggtcagcgtggaaatcgagtgggagctgcagaaagaaaacagcaaacgctggaatccagagattcagtacacttccaactactacaaatctacaaatgtggactttgctgtcaacacggaaggagtgtatagcgagcctcgccccattggcacccgttacctcacccgcaacctgtaattgcctgttaatcaataaaccggttaattcgtttcagtaaggaagaattcgtttaaa

SEQ ID NO: 1199 - protein, 736 aa, Artificial Sequence; identical to SEQ ID NO: 518
  source: /note="Description of Artificial Sequence: Synthetic polypeptide"

SEQ ID NO: 1200 - protein, 736 aa, Artificial Sequence
  source: /note="Description of Artificial Sequence: Synthetic polypeptide"
MAADGYLPDWLEDNLSEGIREWWDLKPGAPKPKANQQKQDDGRGLVLPGYKYLGPFNGLDKGEPVNAADAAALEHDKAYDQQLKAGDNPYLRYNHADAEFQERLQEDTSFGGNLGRAVFQAKKRVLEPLGLVEEGAKTAPGKKRPVEQSPQEPDSSSGIGKTGQQPAKKRLNFGQTGDTESVPDPQPLGEPPAAPSGLGPNTMASGGGAPMADNNEGADGVGNSSGNWHCDSTWLGDRVITTSTRTWALPTYNNHLYKQISNGTSGGSTNDNTYFGYSTPWGYFDFNRFHCHFSPRDWQRLINNNWGFRPKRLNFKLFNIQVKEVTTNEGTKTIANNLTSTVQVFTDSEYQLPYVLGSAHQGCLPPFPADVFMVPQYGYLTLNNGSQALGRSSFYCLEYFPSQMLRTGNNFQFSYTFEDVPFHSSYAHSQSLDRLMNPLIDQYLYYLVRTQTTGTGGTQTLAFSQAGPSNMASQARNWVPGPSYRQQRVSTTTNQNNNSNFAWTGAAKFKLNGRDSLMNPGVAMASHKDDEDRFFPSSGVLIFGKQGAGNDGVDYSQVLITDEEEIKATNPVATEEYGAVAINNQAANTQAQTGLVHNQGVIPGMVWQNRDVYLQGPIWAKIPHTDGNFHPSPLMGGFGLKHPPPQILIKNTPVPADPPLTFNQAKLNSFITQYSTGQVSVEIEWELQKENSKRWNPEIQYTSNYYKSTNVDFAVNTEGVYSEPRPIGTRYLTRNL

SEQ ID NO: 1201 - protein, 738 aa, Artificial Sequence; identical to SEQ ID NO: 895
  source: /note="Description of Artificial Sequence: Synthetic polypeptide"

SEQ ID NO: 1202 - protein, 736 aa, Artificial Sequence
  source: /note="Description of Artificial Sequence: Synthetic polypeptide"
MAADGYLPDWLEDNLSEGIREWWALQPGAPKPKANQQHQDNARGLVLPGYKYLGPGNGLDKGEPVNAADAAALEHDKAYDQQLKAGDNPYLKYNHADAEFQERLKEDTSFGGNLGRAVFQAKKRILEPLGLVEEAAKTAPGKKRPVDQSPQEPDSSSGVGKSGKQPARKRLNFGQTGDSESVPDPQPLGEPPAAPTSLGSNTMASGGGAPMADNNEGADGVGNSSGNWHCDSQWLGDRVITTSTRTWALPTYNNHLYKQISSQSGASNDNHYFGYSTPWGYFDFNRFHCHFSPRDWQRLINNNWGFRPKKLSFKLFNIQVKEVTQNDGTTTIANNLTSTVQVFTDSEYQLPYVLGSAHQGCLPPFPADVFMVPQYGYLTLNNGSQAVGRSSFYCLEYFPSQMLRTGNNFQFSYTFEDVPFHSSYAHSQSLDRLMNPLIDQYLYYLNRTQGTTSGTTNQSRLLFSQAGPQSMSLQARNWLPGPCYRQQRLSKTANDNNNSNFPWTAASKYHLNGRDSLVNPGPAMASHKDDEEKFFPMHGNLIFGKEGTTASNAELDNVMITDEEEIRTTNPVATEQYGTVANNLQSSNTAPTTRTVNDQGALPGMVWQDRDVYLQGPIWAKIPHTDGHFHPSPLMGGFGLKHPPPQIMIKNTPVPANPPTTFSPAKFASFITQYSTGQVSVEIEWELQKENSKRWNPEIQYTSNYNKSVNVDFTVDTNGVYSEPRPIGTRYLTRPL

SEQ ID NO: 1203 - protein, 736 aa, Artificial Sequence
  source: /note="Description of Artificial Sequence: Synthetic polypeptide"
MAADGYLPDWLEDNLSEGIREWWALQPGAPKPKANQQHQDNARGLVLPGYKYLGPGNGLDKGEPVNAADAAALEHDKAYDQQLKAGDNPYLKYNHADAEFQERLKEDTSFGGNLGRAVFQAKKRLLEPLGLVEEAAKTAPGKKRPVDQSPQEPDSSSGVGKSGKQPARKRLNFGQTGDSESVPDPQPLGEPPAAPTSLGSNTMASGGGAPMADNNEGADGVGNSSGNWHCDSQWLGDRVITTSTRTWALPTYNNHLYKQISSQSGASNDNHYFGYSTPWGYFDFNRFHCHFSPRDWQRLINNNWGFRPKKLSFKLFNIQVKEVTQNDGTTTIANNLTSTVQVFTDSEYQLPYVLGSAHQGCLPPFPADVFMVPQYGYLTLNNGSQAVGRSSFYCLEYFPSQMLRTGNNFQFSYTFEDVPFHSSYAHSQSLDRLMNPLIDQYLYYLNRTQGTTSGTTNQSRLLFSQAGPQSMSLQARNWLPGPCYRQQRLSKVANDNNNSNFPWTAASKYHLNGRDSLVNPGPAMASHKDDEEKFFPMHGNLIFGKEGTTASNAELDNVMITDEEEIRTTNPVATEQYGTVANNLQSSNTAPTTRTVNDQGALPGMVWQDRDVYLQGPIWAKIPHTDGHFHPSPLMGGFGLKHPPPQIMIKNTPVPANPPTTFVPAKFASFITQYSTGQVSVEIEWELQKENSKRWNPEIQYTSNYNKSVNVDFTVDTNGVYSEPRPIGTRYLTRPL

SEQ ID NO: 1204 - protein, 736 aa, Artificial Sequence; identical to SEQ ID NO: 912
  source: /note="Description of Artificial Sequence: Synthetic polypeptide"
  VARIANT (168)..(168): /replace="Arg"
  VARIANT (204)..(204): /replace="Ser"
  VARIANT (266)..(266): /replace="Gly"
  VARIANT (311)..(311): /replace="Lys"
  VARIANT (411)..(411): /replace="Gln"
  VARIANT (460)..(460): /replace="Glu"
  VARIANT (493)..(493): /replace="Thr"
  VARIANT (562)..(562): /replace="Asn"
  VARIANT (576)..(576): /replace="Glu"
  VARIANT (587)..(587): /replace="Ala"
  VARIANT (609)..(609): /replace="Asp"
  SITE (1)..(736): /note="Variant residues given in the sequence have no preference with respect to those in the annotations for variant positions"

SEQ ID NO: 1205 - DNA, 2208 bp, Artificial Sequence; identical to SEQ ID NO: 913
  source: /note="Description of Artificial Sequence: Synthetic polynucleotide"
  variation (502)..(504): /replace="aaa"
  variation (610)..(612): /replace="agc"
  variation (796)..(798): /replace="ggc"
  variation (931)..(933): /replace="aag"
  variation (1231)..(1233): /replace="cag"
  variation (1378)..(1380): /replace="gag"
  variation (1477)..(1479): /replace="acc"
  variation (1684)..(1686): /replace="aac"
  variation (1726)..(1728): /replace="gag"
  variation (1759)..(1761): /replace="gcc"
  variation (1825)..(1827): /replace="gac"
  misc_feature (1)..(2208): /note="Variant nucleotides given in the sequence have no preference with respect to those in the annotations for variant positions"

SEQ ID NO: 1206 - protein, 737 aa, Artificial Sequence
  source: /note="Description of Artificial Sequence: Synthetic polypeptide"
  VARIANT (157)..(157): /replace="Ser"
  VARIANT (168)..(168): /replace="Arg"
  VARIANT (262)..(262): /replace="Ser"
  VARIANT (263)..(263): /replace="His"
  VARIANT (312)..(312): /replace="Lys"
  VARIANT (412)..(412): /replace="Gln"
  VARIANT (460)..(460): /replace="Gln"
  VARIANT (461)..(461): /replace="Glu"
  VARIANT (552)..(552): /replace="Ser"
  VARIANT (556)..(556): /replace="Tyr"
  VARIANT (557)..(557): /replace="Ser"
  VARIANT (563)..(563): /replace="Asn"
  VARIANT (580)..(580): /replace="Ile"
  VARIANT (588)..(588): /replace="Ser"
  VARIANT (664)..(664): /replace="Thr"
  SITE (1)..(737): /note="Variant residues given in the sequence have no preference with respect to those in the annotations for variant positions"
MAADGYLPDWLEDNLSEGIREWWDLKPGAPKPKANQQKQDDGRGLVLPGYKYLGPFNGLDKGEPVNAADAAALEHDKAYDQQLKAGDNPYLRYNHADAEFQERLQEDTSFGGNLGRAVFQAKKRVLEPLGLVEEGAKTAPGKKRPVEQSPQEPDSSTGIGKKGQQPAKKRLNFGQTGDSESVPDPQPLGEPPAAPSGVGSNTMAAGGGAPMADNNEGADGVGNASGNWHCDSTWLGDRVITTSTRTWALPTYNNHLYKQISNSQSGGSTNDNTYFGYSTPWGYFDFNRFHCHFSPRDWQRLINNNWGFRPKRLNFKLFNIQVKEVTTNDGTTTIANNLTSTVQVFTDSEYQLPYVLGSAHQGCLPPFPADVFMIPQYGYLTLNNGSQAVGRSSFYCLEYFPSQMLRTGNNFEFSYTFEDVPFHSSYAHSQSLDRLMNPLIDQYLYYLSRTQTTGGTAGNRTLQFSQAGPSSMANQAKNWLPGPCYRQQRVSKTTNQNNNSNFAWTGATKYHLNGRDSLVNPGVAMATHKDDEDRFFPSSGVLIFGKQGAGNDNVDLDNVMITSEEEIKTTNPVATEEYGVVATNLQSNNTAPQTGTVNSQGALPGMVWQNRDVYLQGPIWAKIPHTDGNFHPSPLMGGFGLKHPPPQILIKNTPVPANPPTTFSPAKFASFITQYSTGQVSVEIEWELQKENSKRWNPEIQYTSNYNKSTNVDFAVDTEGVYSEPRPIGTRYLTRNL

SEQ ID NO: 1207 - DNA, 2211 bp, Artificial Sequence; identical to SEQ ID NO: 915
  source: /note="Description of Artificial Sequence: Synthetic polynucleotide"
  variation (469)..(471): /replace="agc"
  variation (502)..(504): /replace="aag"
  variation (784)..(786): /replace="agt"
  variation (787)..(789): /replace="cac"
  variation (934)..(936): /replace="aag"
  variation (1234)..(1236): /replace="cag"
  variation (1378)..(1380): /replace="cag"
  variation (1381)..(1383): /replace="gag"
  variation (1654)..(1656): /replace="agc"
  variation (1666)..(1668): /replace="tac"
  variation (1669)..(1671): /replace="agc"
  variation (1687)..(1689): /replace="aac"
  variation (1738)..(1740): /replace="atc"
  variation (1762)..(1764): /replace="agc"
  variation (1990)..(1992): /replace="acc"
  misc_feature (1)..(2211): /note="Variant nucleotides given in the sequence have no preference with respect to those in the annotations for variant positions"

SEQ ID NO: 1208 - protein, 738 aa, Artificial Sequence; identical to SEQ ID NO: 916
  source: /note="Description of Artificial Sequence: Synthetic polypeptide"
  VARIANT (158)..(158): /replace="Ser"
  VARIANT (169)..(169): /replace="Arg"
  VARIANT (564)..(564): /replace="Asn"
  SITE (1)..(738): /note="Variant residues given in the sequence have no preference with respect to those in the annotations for variant positions"

SEQ ID NO: 1209 - DNA, 2214 bp, Artificial Sequence; identical to SEQ ID NO: 917
  source: /note="Description of Artificial Sequence: Synthetic polynucleotide"
  variation (472)..(474): /replace="agc"
  variation (505)..(507): /replace="aga"
  variation (1690)..(1692): /replace="aac"
  misc_feature (1)..(2214): /note="Variant nucleotides given in the sequence have no preference with respect to those in the annotations for variant positions"

SEQ ID NO: 1210 - protein, 738 aa, Artificial Sequence; identical to SEQ ID NO: 918
  source: /note="Description of Artificial Sequence: Synthetic polypeptide"
  VARIANT (158)..(158): /replace="Ser"
  VARIANT (169)..(169): /replace="Lys"
  VARIANT (315)..(315): /replace="Ser"
  VARIANT (413)..(413): /replace="Glu"
  VARIANT (472)..(472): /replace="Thr" or "Ser"
  VARIANT (534)..(534): /replace="Glu"
  VARIANT (542)..(542): /replace="Val"
  VARIANT (595)..(595): /replace="Val"
  SITE (1)..(738): /note="Variant residues given in the sequence have no preference with respect to those in the annotations for variant positions"

SEQ ID NO: 1211 - DNA, 2214 bp, Artificial Sequence
  source: /note="Description of Artificial Sequence: Synthetic polynucleotide"
  variation (472)..(474): /replace="agc"
  variation (505)..(507): /replace="aag"
  variation (943)..(945): /replace="agc"
  variation (1237)..(1239): /replace="gaa"
  variation (1414)..(1416): /replace="acc" or "agc"
  variation (1600)..(1602): /replace="gag"
  variation (1624)..(1626): /replace="gtc"
  variation (1783)..(1785): /replace="gta"
  misc_feature (1)..(2214): /note="Variant nucleotides given in the sequence have no preference with respect to those in the annotations for variant positions"
atggctgccgatggttatcttccagattggctcgaggacaacctctctgagggcattcgcgagtggtgggacctgaaacctggagccccgaaacccaaagccaaccagcaaaagcaggacgacggccggggtctggtgcttcctggctacaagtacctcggacccttcaacggactcgacaagggggagcccgtcaacgcggcggacgcagcggccctcgagcacgacaaggcctacgaccagcagctcaaagcgggtgacaatccgtacctgcggtataatcacgccgacgccgagtttcaggagcgtctgcaagaagatacgtcttttgggggcaacctcgggcgagcagtcttccaggccaagaagcgggttctcgaacctctcggtctggttgaggaaggcgctaagacggctcctggaaagaagagaccggtagagcagtcaccacagcgtgagcccgactcctccacgggcatcggcaagaaaggccagcagcccgccagaaagagactcaatttcggtcagactggcgactcagagtcagtccccgaccctcaacctctcggagaacctccagcagcgccctctggtgtgggatctaatacaatggctgcaggcggtggcgcaccaatggcagacaataacgaaggtgccgacggagtgggtagttcctcgggaaattggcattgcgattccacatggctgggcgacagagtcatcaccaccagcacccgaacctgggccctgcccacctacaacaaccacctctacaagcaaatctccaacgggacctcgggaggcagcaccaacgacaacacctactttggctacagcaccccctgggggtattttgactttaacagattccactgccacttctcaccacgtgactggcagcgactcatcaacaacaactggggattccggcccaagagactcaacttcaagctcttcaacatccaggtcaaagaggtcacgcagaatgaaggcaccaagaccatcgccaataacctcaccagcaccatccaggtgtttacggactcggaataccagctgccgtacgtcctcggctctgcccaccagggctgcctgcctccgttcccggcggacgtcttcatgattcctcagtacggctacctgactctcaacaacggtagtcaggccgtgggacgttcctccttctactgcctggagtacttcccctctcagatgctgagaacgggcaacaactttcaattcagctacactttcgaggacgtgcctttccacagcagctacgcgcacagccagagtttggacaggctgatgaatcctctcatcgaccagtacctgtactacctgtcaagaacccagactacgggaggcacagcgggaacccagacgttgcagttttctcaggccgggcctagcaacatggcgaatcaggccaaaaactggctgcctggaccctgctacagacagcagcgcgtctccacgacaacgtcgcaaaacaacaacagcaactttgcctggactggtgccaccaagtatcatctgaacggcagagactctctggtgaatccgggcgtcgccatggcaacccacaaggacgacgaggaccgcttcttcccatccagcggcatcctcatatttggcaagcagggagctggaaaagacaacgtggactatagcaacgtgatgctaaccagcgaggaagaaatcaagaccaccaaccccgtggccacagaagagtatggcgtggtggctgataacctacagcagcaaaacaccgctcctcaaatagggaccgtcaacagccagggagccttacctggcatggtctggcagaaccgggacgtgtacctgcagggtcctatttgggccaagattcctcacacagatggcaactttcacccgtctcctttaatgggcggctttggacttaaacatccgcctcctcagatcctcatcaaaaacactcctgttcctgcggatcctccaacaacgttcaaccaggccaagctgaattctttcatcacgcagtacagcaccggacaagtcagcgtggagatcgagtgggagctgcagaaggagaacagcaagcgctggaacccagagattcagtatacttccaactactacaaatctacaaatgtggactttgctgttaatactgagggtgtttactctgagcctcgccccattggcactcgttacctcacccgtaatctg

SEQ ID NO: 1212 - protein, 738 aa, Artificial Sequence; identical to SEQ ID NO: 920
  source: /note="Description of Artificial Sequence: Synthetic polypeptide"
  VARIANT (169)..(169): /replace="Lys"
  VARIANT (315)..(315): /replace="Ser"
  VARIANT (534)..(534): /replace="Glu"
  VARIANT (542)..(542): /replace="Val"
  SITE (1)..(738): /note="Variant residues given in the sequence have no preference with respect to those in the annotations for variant positions"

SEQ ID NO: 1213 - DNA, 2214 bp, Artificial Sequence; identical to SEQ ID NO: 921
  source: /note="Description of Artificial Sequence: Synthetic polynucleotide"
  variation (505)..(507): /replace="aaa"
  variation (943)..(945): /replace="agc"
  variation (1600)..(1602): /replace="gag"
  variation (1624)..(1626): /replace="gtc"
  misc_feature (1)..(2214): /note="Variant nucleotides given in the sequence have no preference with respect to those in the annotations for variant positions"

SEQ ID NO: 1214 - protein, 738 aa, Artificial Sequence; identical to SEQ ID NO: 922
  source: /note="Description of Artificial Sequence: Synthetic polypeptide"
  VARIANT (471)..(471): /replace="Asn"
  SITE (1)..(738): /note="Variant residues given in the sequence have no preference with respect to those in the annotations for variant positions"

SEQ ID NO: 1215 - DNA, 2214 bp, Artificial Sequence; identical to SEQ ID NO: 923
  source: /note="Description of Artificial Sequence: Synthetic polynucleotide"
  variation (1411)..(1413): /replace="aat"
  misc_feature (1)..(2214): /note="Variant nucleotides given in the sequence have no preference with respect to those in the annotations for variant positions"

SEQ ID NO: 1216 - protein, 737 aa, Artificial Sequence; identical to SEQ ID NO: 924
  source: /note="Description of Artificial Sequence: Synthetic polypeptide"
  VARIANT (148)..(148): /replace="Gln"
  VARIANT (169)..(169): /replace="Arg"
  VARIANT (314)..(314): /replace="Asn"
  VARIANT (466)..(466): /replace="His"
  VARIANT (563)..(563): /replace="Ser"
  VARIANT (580)..(580): /replace="Ile"
  VARIANT (588)..(588): /replace="Ser"
  SITE (1)..(737): /note="Variant residues given in the sequence have no preference with respect to those in the annotations for variant positions"

SEQ ID NO: 1217 - DNA, 2211 bp, Artificial Sequence; identical to SEQ ID NO: 925
  source: /note="Description of Artificial Sequence: Synthetic polynucleotide"
  variation (442)..(444): /replace="cag"
  variation (505)..(507): /replace="aga"
  variation (940)..(942): /replace="aac"
  variation (1396)..(1398): /replace="cac"
  variation (1687)..(1689): /replace="agt"
  variation (1738)..(1740): /replace="ata"
  variation (1762)..(1764): /replace="tct"
  misc_feature (1)..(2211): /note="Variant nucleotides given in the sequence have no preference with respect to those in the annotations for variant positions"

SEQ ID NO: 1218 - protein, 735 aa, Artificial Sequence; identical to SEQ ID NO: 926
  source: /note="Description of Artificial Sequence: Synthetic polypeptide"
  VARIANT (162)..(162): /replace="Thr"
  VARIANT (168)..(168): /replace="Arg"
  VARIANT (224)..(224): /replace="Ser"
  VARIANT (310)..(310): /replace="Lys"
  VARIANT (410)..(410): /replace="Gln"
  VARIANT (446)..(446): /replace="Asn"
  VARIANT (461)..(461): /replace="Leu"
  VARIANT (471)..(471): /replace="Ser"
  VARIANT (708)..(708): /replace="Thr"
  SITE (1)..(735): /note="Variant residues given in the sequence have no preference with respect to those in the annotations for variant positions"

SEQ ID NO: 1219 - DNA, 2205 bp, Artificial Sequence; identical to SEQ ID NO: 927
  source: /note="Description of Artificial Sequence: Synthetic polynucleotide"
  variation (484)..(486): /replace="aca"
  variation (502)..(504): /replace="aga"
  variation (670)..(672): /replace="tcc"
  variation (928)..(930): /replace="aaa"
  variation (1228)..(1230): /replace="cag"
  variation (1336)..(1338): /replace="aac"
  variation (1381)..(1383): /replace="ctg"
  variation (1411)..(1413): /replace="tct"
  variation (2122)..(2124): /replace="acc"
  misc_feature (1)..(2205): /note="Variant nucleotides given in the sequence have no preference with respect to those in the annotations for variant positions"

SEQ ID NO: 1220 - protein, 735 aa, Artificial Sequence; identical to SEQ ID NO: 928
  source: /note="Description of Artificial Sequence: Synthetic polypeptide"
  VARIANT (42)..(42): /replace="Ser"
  VARIANT (168)..(168): /replace="Lys"
  VARIANT (310)..(310): /replace="Arg"
  VARIANT (410)..(410): /replace="Gln"
  VARIANT (446)..(446): /replace="Arg"
  VARIANT (461)..(461): /replace="Leu"
  VARIANT (471)..(471): /replace="Ser"
  VARIANT (475)..(475): /replace="Arg"
  VARIANT (504)..(504): /replace="Ala"
  VARIANT (539)..(539): /replace="Asn"
  SITE (1)..(735): /note="Variant residues given in the sequence have no preference with respect to those in the annotations for variant positions"

SEQ ID NO: 1221 - DNA, 2205 bp, Artificial Sequence; identical to SEQ ID NO: 929
  source: /note="Description of Artificial Sequence: Synthetic polynucleotide"
  variation (124)..(126): /replace="agt"
  variation (502)..(504): /replace="aaa"
  variation (928)..(930): /replace="aga"
  variation (1228)..(1230): /replace="cag"
  variation (1336)..(1338): /replace="aga"
  variation (1381)..(1383): /replace="ctc"
  variation (1411)..(1413): /replace="tct"
  variation (1423)..(1425): /replace="aga"
  variation (1510)..(1512): /replace="gcg"
  variation (1615)..(1617): /replace="gac"
  misc_feature (1)..(2205): /note="Variant nucleotides given in the sequence have no preference with respect to those in the annotations for variant positions"

SEQ ID NO: 1222 - protein, 736 aa, Artificial Sequence; identical to SEQ ID NO: 930
  source: /note="Description of Artificial Sequence: Synthetic polypeptide"

SEQ ID NO: 1223 - protein, 736 aa, Artificial Sequence; identical to SEQ ID NO: 931
  source: /note="Description of Artificial Sequence: Synthetic polypeptide"

SEQ ID NO: 1224 - protein, 736 aa, Artificial Sequence; identical to SEQ ID NO: 932
  source: /note="Description of Artificial Sequence: Synthetic polypeptide"

SEQ ID NO: 1225 - protein, 736 aa, Artificial Sequence; identical to SEQ ID NO: 933
  source: /note="Description of Artificial Sequence: Synthetic polypeptide"

SEQ ID NO: 1226 - protein, 736 aa, Artificial Sequence; identical to SEQ ID NO: 934
  source: /note="Description of Artificial Sequence: Synthetic polypeptide"

SEQ ID NO: 1227 - protein, 736 aa, Artificial Sequence; identical to SEQ ID NO: 935
  source: /note="Description of Artificial Sequence: Synthetic polypeptide"

SEQ ID NO: 1228 - protein, 736 aa, Artificial Sequence; identical to SEQ ID NO: 936
  source: /note="Description of Artificial Sequence: Synthetic polypeptide"

SEQ ID NO: 1229 - protein, 736 aa, Artificial Sequence; identical to SEQ ID NO: 937
  source: /note="Description of Artificial Sequence: Synthetic polypeptide"

SEQ ID NO: 1230 - DNA, 2211 bp, Artificial Sequence; identical to SEQ ID NO: 938
  source: /note="Description of Artificial Sequence: Synthetic polynucleotide"

SEQ ID NO: 1231 - protein, 738 aa, Artificial Sequence; identical to SEQ ID NO: 18
  source: /note="Description of Artificial Sequence: Synthetic polypeptide"

SEQ ID NO: 1232 - protein, 738 aa, Artificial Sequence; identical to SEQ ID NO: 18
  source: /note="Description of Artificial Sequence: Synthetic polypeptide"

SEQ ID NO: 1233 - protein, 738 aa, Artificial Sequence
  source: /note="Description of Artificial Sequence: Synthetic polypeptide"
  VARIANT (157)..(157): /replace="Thr"
  VARIANT (169)..(169): /replace="Arg"
  VARIANT (457)..(457): /replace="Gly"
  VARIANT (463)..(463): /replace="Ala"
  VARIANT (508)..(508): /replace="Ala"
  VARIANT (510)..(510): /replace="Phe"
  VARIANT (511)..(511): /replace="Lys"
  VARIANT (558)..(558): /replace="Asn"
  VARIANT (585)..(585): /replace="His"
  VARIANT (587)..(587): /replace="Ala"
  SITE (1)..(738): /note="Variant residues given in the sequence have no preference with respect to those in the annotations for variant positions"
MAADGYLPDWLEDNLSEGIREWWDLKPGAPKPKANQQKQDDGRGLVLPGYKYLGPFNGLDKGEPVNAADAAALEHDKAYDQQLKAGDNPYLRYNHADAEFQERLQEDTSFGGNLGRAVFQAKKRVLEPLGLVEEGAKTAPGKKRPVEQSPQEPDSSSLGIGKTGQQPAKKRLNFGQTGDSESVPDPQPLGEPPAAPSGVGSNTMASGGGAPMADNNEGADGVGNSSGNWHCDSTWLGDRVITTSTRTWALPTYNNHLYKQISNGTSGGSTNDNTYFGYSTPWGYFDFNRFHCHFSPRDWQRLINNNWGFRPKRLNFKLFNIQVKEVTTNEGTKTIANNLTSTVQVFTDSEYQLPYVLGSAHQGCLPPFPADVFMIPQYGYLTLNNGSQAVGRSSFYCLEYFPSQMLRTGNNFQFSYTFEDVPFHSSYAHSQSLDRLMNPLIDQYLYYLSRTQTTGTAGTQTLQFSQAGPSSMANQARNWVPGPCYRQQRVSTTTNQNNNSNFAWTGATKYHLNGRDSLMNPGVAMASHKDDEDRFFPSSGVLIFGKQGAGNDNVDYSQVMITNEEEIKTTNPVATEEYGAVATNNQSLANTQAQTGLVHNQGVLPGMVWQNRDVYLQGPIWAKIPHTDGNFHPSPLMGGFGLKHPPPQILIKNTPVPADPPTTFNQAKLNSFITQYSTGQVSVEIEWELQKENSKRWNPEIQYTSNYYKSTNVDFAVNTEGVYSEPRPIGTRYLTRNL

SEQ ID NO: 1234 - DNA, 2211 bp, Artificial Sequence
  source: /note="Description of Artificial Sequence: Synthetic polynucleotide"
  variation (469)..(471): /replace="acg"
  variation (502)..(504): /replace="aga"
  variation (1366)..(1368): /replace="gga"
  variation (1384)..(1386): /replace="gca"
  variation (1519)..(1521): /replace="gcc"
  variation (1525)..(1527): /replace="ttt"
  variation (1528)..(1530): /replace="aaa"
  variation (1669)..(1671): /replace="aac"
  variation (1750)..(1752): /replace="cac"
  variation (1756)..(1758): /replace="gcc"
  misc_feature (1)..(2211): /note="Variant nucleotides given in the sequence have no preference with respect to those in the annotations for variant positions"
atggctgccgatggttatcttccagattggctcgaggacaacctctctgagggcattcgcgagtggtgggacttgaaacctggagccccgaaacccaaagccaaccagcaaaagcaggacgacggccggggtctggtgcttcctggctacaagtacctcggacccttcaacggactcgacaagggggagcccgtcaacgcggcggacgcagcggccctcgagcacgacaaagcctacgaccagcagctcaaagcgggtgacaatccgtacctgcggtataatcacgccgacgccgagtttcaggagcgtctgcaagaagatacgtcttttgggggcaacctcgggcgagcagtcttccaggccaagaagcgggttctcgaacctctcggtctggttgaggaaggcgctaagacggctcctggaaagaagaggccggtagagcagtcgccacaagagccagactcctcctcgggcatcggcaagacaggccagcagcccgctaaaaagagactcaattttggtcagactggcgactcagagtcagtccccgacccacaacctctcggagaacctccagcagccccctcaggtgtgggatctaatacaatggcttcaggcggtggcgctccaatggcagacaataacgaaggcgccgacggagtgggtaattcctcgggaaattggcattgcgattccacatggctgggggacagagtcatcaccaccagcacccgaacctgggccctgcccacctacaacaaccacctctacaagcaaatctccaacggcacctcgggaggaagcaccaacgacaacacctattttggctacagcaccccctgggggtattttgacttcaacagattccactgtcacttttcaccacgtgactggcaacgactcatcaacaacaattggggattccggcccaaaagactcaacttcaagctgttcaacatccaggtcaaggaagtcacgacgaacgaaggcaccaagaccatcgccaataatctcaccagcaccgtgcaggtctttacggactcggagtaccagttaccgtacgtgctaggatccgctcaccagggatgtctgcctccgttcccggcggacgtcttcatgattcctcagtacggctatttaactttaaacaatggaagccaagccgtgggacgttcctccttctactgtctggagtatttcccatcgcagatgctgagaaccggcaacaactttcagttcagctacaccttcgaggacgtgcctttccacagcagctacgcgcacagccagagcctggacaggctgatgaatcccctcatcgaccagtacctgtactacctgtccagaacgcaaacgactggaactgcagggacgcagactctgcaattcagccaagcgggtcctagctcaatggccaaccaggctagaaattgggtgcccggaccttgctaccggcagcagcgcgtctccacgacaaccaaccagaacaacaacagcaactttgcctggacgggagctaccaagtatcacctgaacggccgagactctctaatgaatccgggcgtggcaatggcttcccacaaggatgacgaggaccgcttcttcccttcgagcggggtcctgatttttggcaagcaaggagccgggaacgataatgtggattacagccaagtgatgattacaaatgaggaagaaatcaagactaccaaccccgtggccacagaagaatatggagcagtggccaccaacaaccagtccgccaatacgcaggcgcagaccggactcgtgcacaaccagggggtgcttcccggcatggtgtggcagaatagagacgtgtacctgcagggtcccatctgggccaaaattcctcacacggacggcaactttcacccgtctcccctgatgggcggctttggactgaagcacccgcctcctcaaattctcatcaagaacacaccggttccagcggacccgccgactaccttcaaccaggccaagctgaactctttcatcacgcagtacagcaccggacaggtcagcgtggaaatcgagtgggagctgcagaaagaaaacagcaaacgctggaatccagagattcaatacacttccaactactacaaatctacaaatgtggactttgctgtcaacacggagggggtttatagcgagcctcgccccattggcacccgttacctcacccgcaacctgtaa

SEQ ID NO: 1235 - protein, 733 aa, Artificial Sequence; identical to SEQ ID NO: 434
  source: /note="Description of Artificial Sequence: Synthetic polypeptide"

SEQ ID NO: 1236 - DNA, 4472 bp, Artificial Sequence
  source: /note="Description of Artificial Sequence: Synthetic polynucleotide"
ctccatcactaggggtaaccgcgaagcgcctcccacgctgccgcgtcagcgctgacgtaaattacgtcataggggagtggtcctgtattagctgtcacgtgagtgcttttgcgacattttgcgacaccacgtggccattcatggtatatatggccgagtgagcgagcaggatctccattttgaccgcgaaatttgaacgagcagcagccatgccgggcttctacgagatcgtgcttaaggtgccgagcgacctggacgagcacctgccgggcatttctgactcgtttgtgaactgggtggcagagaaggaatgggagctgcccccggattctgacatggatcggaatctgattgagcaggcacccctgaccgtggccgagaagctacagcgcgacttcctggtccaatggcgccgcgtgagtaaggccccggaggccctcttctttgttcagttcgagaagggcgagtcctacttccacctccatattctggtagagaccacgggggtcaaatccatggtgctgggccgcttcctgagtcagattcgggacaagctggtgcagaccatctaccgcgggatcgagccgaccctgcccaactggttcgcggtgacaaagacgcgtaatggcgccggaggggggaacaaggtggtggacgagtgctacatccccaactacctgctgcccaagactcagcccgagctgcagtgggcgtggactaacatggaggagtatataagcgcgtgcttgaacctggccgagcgcaaacggctcgtggcgcagcacctgacccacgtcagccagacccaggagcagaacaaggagaatctgaacccgaattctgacgcgcctgtcatccggtcaaaaacctccgcgcgctacatggagctggtcgggtggctggtggaccggggcatcacctccgagaagcagtggatccaggaggaccaggcctcgtacatctccttcaacgccgcctccaactcgcggtctcagatcaaggccgcgctggacaatgccggcaagatcatggcgctgaccaaatccgcgcccgactacctggtaggccccgctctgcccgcggacattaaatccaaccgcatctaccgcatcctggagctgaatggctacgaccctgcctacgccggttccgtctttctcggctgggcccagaaaaagtttggcaaaaggaacaccatctggctgtttgggccggccaccacgggcaagaccaacatcgcggaagccatcgcccacgccgtgcccttctacggctgcgtcaactggaccaatgagaactttcccttcaacgattgcgtcgacaagatggtgatctggtgggaggagggcaagatgacggccaaggtcgtggagtccgccaaggccattctcggcggcagcaaggtgcgcgtggaccaaaagtgcaagtcgtccgcccagatcgatcccacccccgtgatcgtcacctccaacaccaacatgtgcgccgtgattgacgggaacagcaccaccttcgagcaccagcagccgttgcaggaccggatgttcaaatttgaacttacccgccgtctggagcacgactttggcaaggtgacaaagcaggaagtcaaagagttcttccgctgggcgcaggatcacgtgaccgaggtggcgcatgagttctacgtcagaaagggtggagctaacaaaagacccgcccccgatgacgcggatataagcgagcccaagcgggcctgcccctcagtcgcggatccatcgacgtcagacgcggaaggagctccggtggactttgccgacaggtaccaaaacaaatgttctcgtcacgcgggcatgcttcagatgctgtttccctgcaaaacatgcgagagaatgaatcagaatttcaacatttgcttcacgcacgggaccagagactgttcagaatgtttccctggcgtgtcagaatctcaaccggtcgtcagaaaaaagacgtatcggaaactctgtgcgattcatcatctgctggggcgggcacccgagattgcttgctcggcctgcgacctggtcaacgtggacctggatgactgtgtttctgagcaataaatgacttaaaccaggtatggctgccgatggttatcttccagattggctcgaggacaacctctctgagggcattcgcgagtggtgggacctgaaacctggagccccgaaacccaaagccaaccagcaaaagcaggacaacggccggggtctggtgcttcctggctacaagtacctcggacccttcaacggactcgacaagggggagcccgtcaacgcggcggacgcagcggccctcgagcacgacaaggcctacgaccagcagctccaagcgggtgacaatccgtacctgcggtataatcacgccgacgccgagtttcaggagcgtctgcaagaagatacgtcttttgggggcaacctcgggcgcgcagtcttccaggccaaaaagcgggttctcgaacctctgggcctggttgaatcgccggttaagacggctcctggaaagaagagaccggtagagccatcaccccagcgctctccagactcctctacgggcatcggcaagaaaggccagcagcccgcaaaaaagagactcaattttgggcagactggcgactcagagtcagtccccgaccctcaaccaatcggagaaccaccagcaggcccctctggtctgggatctggtacaatggctgcaggcggtggcgctccaatggcagacaataacgaaggcgccgacggagtgggtagttcctcaggaaattggcattgcgattccacatggctgggcgacagagtcatcaccaccagcacccgcacctgggccctgcccacctacaacaaccacctctacaagcaaatctccaacgggacctcgggaggaagcaccaacgacaacacctacttcggctacagcaccccctgggggtattttgacttcaacagattccactgccacttttcaccacgtgactggcagcgactcatcaacaacaactggggattccggcccaagaggctcaacttcaagctcttcaacatccaagtcaaggaggtcacgcagaatgaaggcaccaagaccatcgccaataaccttaccagcacgattcaggtctttacggactcggaataccagctcccgtacgtgctcggctcggcgcaccagggctgcctgcctccgttcccggcggacgtcttcatgattcctcagtacgggtacctgactctgaacaatggcagtcaggctgtgggccggtcgtccttctactgcctggagtactttccttctcaaatgctgagaacgggcaacaactttgaattcagctacaacttcgaggacgtgcccttccacagcagctacgcgcacagccagagcctggaccggctgatgaaccctctcatcgaccagtacttgtactacctgtcccggactcaaagcacgggcggtactgcaggaactcagcagttgctattttctcaggccgggcctaacaacatgtcggctcaggccaagaactggctacccggtccctgctaccggcagcaacgcgtctccacgacactgtcgcagaacaacaacagcaactttgcctggacgggtgccaccaagtatcatctgaatggcagagactctctggtgaatcctggcgttgccatggctacccacaaggacgacgaagagcgattttttccatccagcggagtcttaatgtttgggaaacagggagctggaaaagacaacgtggactatagcagcgtgatgctaaccagcgaggaagaaataaagaccaccaacccagtggccacagaacagtacggcgtggtggccgataacctgcaacagcaaaacgccgctcctattgtaggggccgtcaatagtcaaggagccttacctggcatggtgtggcagaaccgggacgtgtacctgcagggtcccatctgggccaagattcctcatacggacggcaactttcatccctcgccgctgatgggaggctttggactgaagcatccgcctcctcagatcctgattaaaaacacacctgttcccgcggatcctccgaccaccttcactaaggccaagctggcttctttcatcacgcagtacagtaccggccaggtcagcgtggagatcgagtgggagctgcagaaggagaacagcaaacgctggaacccagagattcagtacacttccaactactacaaatctacaaatgtggactttgctgtcaatactgagggtacttattccgagcctcgccccattggcacccgttacctcacccgtaatctgtaattacatgttaatcaataaaccggttaattcgtttcagttgaactttggtctcctgtccttcttatcttatcggttaccatagaaactggttacttattaactgcttggtgcgcttcgcgataaaagacttacgtcatcgggttacccctagtgatgga

SEQ ID NO: 1237 - DNA, 2208 bp, Artificial Sequence
  source: /note="Description of Artificial Sequence: Synthetic polynucleotide"
atggctgccgatggttatcttccagattggctcgaggacactctctctgaaggaataagacagtggtggaagctcaaacctggcccaccaccaccaaagcccgcagagcggcataaggacgacagcaggggtcttgtgcttcctgggtacaagtacctcggacccttcaacggactcgacaagggagagccggtcaacgaggcagacgccgcggccctcgagcacgacaaagcctacgaccggcagctcgacagcggagacaacccgtacctcaagtacaaccacgccgacgcggagtttcaggagcgccttaaagaagatacgtcttttgggggcaacctcggacgagcagtcttccaggcgaaaaagagggttcttgaacctctgggcctggttgaggaacctgttaagaaggctccgggaaaaaagaggccggtagagcactctcctgtggagccagactcctcctcgggaaccggaaaggcgggccagcagcctgcaagaaaaagattgaattttggtcagactggagacgcagactcagtacctgacccccagcctctcggacagccaccagcagccccctctggtctgggaactaataccatggctacaggcagtggcgcaccaatggcagacaataacgagggtgccgacggagtgggtaattcctcgggaaattggcattgcgattccacatggatgggcgacagagtcatcaccaccagcacccgaacctgggccctgcccacctacaacaaccacctctacaaacaaatttccagccaatcaggagcctcgaacgacaatcactactttggctacagcaccccttgggggtattttgacttcaacagattccactgccacttttcaccacgtgactggcaaagactcatcaacaacaactggggattccgacccaagagactcaacttcaagctctttaacattcaagtcaaagaggtcacgcagaatgacggtacgacgacgattgccaataaccttaccagcacggttcaggtgtttactgactcggagtaccagctcccgtacgtcctcggctcggcgcatcaaggatgcctcccgccgttcccagcagacgtcttcatggtgccacagtatggatacctcaccctgaacaacgggagtcaggcagtaggacgctcttcattttactgcctggagtactttccttctcagatgctgcgtaccggaaacaactttaccttcagctacacttttgaggacgttcctttccacagcagctacgctcacagccagagtctggaccgtctcatgaatcctctcatcgaccagtacctgtattacttgagcagaacaaacactccaagtggaaccaccacgcagtcaaggcttcagttttctcaggccggagcgagtgacattcgggaccagtctaggaactggcttcctggaccctgttaccgccagcagcgagtatcaaagacatctgcggataacaacaacagtgaatactcgtggactggagctaccaagtaccacctcaatggcagagactctctggtgaatccgggcccggctatggcaagccacaaggacgatgaagaaaagttttttcctcagagcggggttctcatctttgggaagcaaggctcagagaaaacaaatgtggacattgaaaaggtcatgattacagacgaagaggaaatcaggacaaccaatcccgtggctacggagcagtatggttctgtatctaccaacctccagagaggcaacagacaagcagctaccgcagatgtcaacacacaaggcgttcttccaggcatggtctggcaggacagagatgtgtaccttcaggggcccatctgggcaaagattccacacacggacggacattttcacccctctcccctcatgggtggattcggacttaaacaccctcctccacagattctcatcaagaacaccccggtgcctgcgaatccttcgaccaccttcagtgcggcaaagtttgcttccttcatcacacagtactccacgggacaggtcagcgtggagatcgagtgggagctgcagaaggaaaacagcaaacgctggaatcccgaaattcagtacacttccaactacaacaagtctgttaatgtggactttactgtggacactaatggcgtgtattcagagcctcgccccattggcaccagatacctgactcgtaatctgtaa

SEQ ID NO: 1238 - protein, 735 aa, Artificial Sequence
  source: /note="Description of Artificial Sequence: Synthetic polypeptide"
MAADGYLPDWLEDTLSEGIRQWWKLKPGPPPPKPAERHKDDSRGLVLPGYKYLGPFNGLDKGEPVNEADAAALEHDKAYDRQLDSGDNPYLKYNHADAEFQERLKEDTSFGGNLGRAVFQAKKRVLEPLGLVEEPVKKAPGKKRPVEHSPVEPDSSSGTGKAGQQPARKRLNFGQTGDADSVPDPQPLGQPPAAPSGLGTNTMATGSGAPMADNNEGADGVGNSSGNWHCDSTWMGDRVITTSTRTWALPTYNNHLYKQISSQSGASNDNHYFGYSTPWGYFDFNRFHCHFSPRDWQRLINNNWGFRPKRLNFKLFNIQVKEVTQNDGTTTIANNLTSTVQVFTDSEYQLPYVLGSAHQGCLPPFPADVFMVPQYGYLTLNNGSQAVGRSSFYCLEYFPSQMLRTGNNFTFSYTFEDVPFHSSYAHSQSLDRLMNPLIDQYLYYLSRTNTPSGTTTQSRLQFSQAGASDIRDQSRNWLPGPCYRQQRVSKTSADNNNSEYSWTGATKYHLNGRDSLVNPGPAMASHKDDEEKFFPQSGVLIFGKQGSEKTNVDIEKVMITDEEEIRTTNPVATEQYGSVSTNLQRGNRQAATADVNTQGVLPGMVWQDRDVYLQGPIWAKIPHTDGHFHPSPLMGGFGLKHPPPQILIKNTPVPANPSTTFSAAKFASFITQYSTGQVSVEIEWELQKENSKRWNPEIQYTSNYNKSVNVDFTVDTNGVYSEPRPIGTRYLTRNL

SEQ ID NO: 1239 - DNA, 8376 bp, Artificial Sequence
  source: /note="Description of Artificial Sequence: Synthetic polynucleotide"
aattcccatcatcaataatataccttattttggattgaagccaatatgataatgagggggtggagtttgtgacgtggcgcggggcgtgggaacggggcgggtgacgtagtagtctctagagtcctgtattagaggtcacgtgagtgttttgcgacattttgcgacaccatgtggtcacgctgggtatttaagcccgagtgagcacgcagggtctccattttgaagcgggaggtttgaacgcgcagccaccacgccggggttttacgagattgtgattaaggtccccagcgaccttgacgggcatctgcccggcatttctgacagctttgtgaactgggtggccgagaaggaatgggagttgccgccagattctgacatggatctgaatctgattgagcaggcacccctgaccgtggccgagaagctgcagcgcgactttctgacggaatggcgccgtgtgagtaaggccccggaggcccttttctttgtgcaatttgagaagggagagagctacttccacatgcacgtgctcgtggaaaccaccggggtgaaatccatggttttgggacgtttcctgagtcagattcgcgaaaaactgattcagagaatttaccgcgggatcgagccgactttgccaaactggttcgcggtcacaaagaccagaaatggcgccggaggcgggaacaaggtggtggatgagtgctacatccccaattacttgctccccaaaacccagcctgagctccagtgggcgtggactaatatggaacagtatttaagcgcctgtttgaatctcacggagcgtaaacggttggtggcgcagcatctgacgcacgtgtcgcagacgcaggagcagaacaaagagaatcagaatcccaattctgatgcgccggtgatcagatcaaaaacttcagccaggtacatggagctggtcgggtggctcgtggacaaggggattacctcggagaagcagtggatccaggaggaccaggcctcatacatctccttcaatgcggcctccaactcgcggtcccaaatcaaggctgccttggacaatgcgggaaagattatgagcctgactaaaaccgcccccgactacctggtgggccagcagcccgtggaggacatttccagcaatcggatttataaaattttggaactaaacgggtacgatccccaatatgcggcttccgtctttctgggatgggccacgaaaaagttcggcaagaggaacaccatctggctgtttgggcctgcaactaccgggaagaccaacatcgcggaggccatagcccacactgtgcccttctacgggtgcgtaaactggaccaatgagaactttcccttcaacgactgtgtcgacaagatggtgatctggtgggaggaggggaagatgaccgccaaggtcgtggagtcggccaaagccattctcggaggaagcaaggtgcgcgtggaccagaaatgcaagtcctcggcccagatagacccgactcccgtgatcgtcacctccaacaccaacatgtgcgccgtgattgacgggaactcaacgaccttcgaacaccagcagccgttgcaagaccggatgttcaaatttgaactcacccgccgtctggatcatgactttgggaaggtcaccaagcaggaagtcaaagactttttccggtgggcaaaggatcacgtggttgaggtggagcatgaattctacgtcaaaaagggtggagccaagaaaagacccgcccccagtgacgcagatataagtgagcccaaacgggtgcgcgagtcagttgcgcagccatcgacgtcagacgcggaagcttcgatcaactacgcagacaggtaccaaaacaaatgttctcgtcacgtgggcatgaatctgatgctgtttccctgcagacaatgcgagagaatgaatcagaattcaaatatctgcttcactcacggacagaaagactgtttagagtgctttcccgtgtcagaatctcaacccgtttctgtcgtcaaaaaggcgtatcagaaactgtgctacattcatcatatcatgggaaaggtgccagacgcttgcactgcctgcgatctggtcaatgtggatttggatgactgcatctttgaacaataaatgatttaaatcaggtatggctgccgatggttatcttccagattggctcgaggacactctctctgaaggaataagacagtggtggaagctcaaacctggcccaccaccaccaaagcccgcagagcggcataaggacgacagcaggggtcttgtgcttcctgggtacaagtacctcggacccttcaacggactcgacaagggagagccggtcaacgaggcagacgccgcggccctcgagcacgacaaagcctacgaccggcagctcgacagcggagacaacccgtacctcaagtacaaccacgccgacgcggagtttcaggagcgccttaaagaagatacgtcttttgggggcaacctcggacgagcagtcttccaggcgaaaaagagggttcttgaacctctgggcctggttgaggaacctgttaagacggctccgggaaaaaagaggccggtagagcactctcctgtggagccagactcctcctcgggaaccggaaaggcgggccagcagcctgcaagaaaaagattgaattttggtcagactggagacgcagactcagtacctgacccccagcctctcggacagccaccagcagccccctctggtctgggaactaatacgatggctacaggcagtggcgcaccaatggcagacaataacgagggcgccgacggagtgggtaattcctcgggaaattggcattgcgattccacatggatgggcgacagagtcatcaccaccagcacccgaacctgggccctgcccacctacaacaaccacctctacaaacaaatttccagccaatcaggagcctcgaacgacaatcactactttggctacagcaccccttgggggtattttgacttcaacagattccactgccacttttcaccacgtgactggcaaagactcatcaacaacaactggggattccgacccaagagactcaacttcaagctctttaacattcaagtcaaagaggtcacgcagaatgacggtacgacgacgattgccaataaccttaccagcacggttcaggtgtttactgactcggagtaccagctcccgtacgtcctcggctcggcgcatcaaggatgcctcccgccgttcccagcagacgtcttcatggtgccacagtatggatacctcaccctgaacaacgggagtcaggcagtaggacgctcttcattttactgcctggagtactttccttctcagatgctgcgtaccggaaacaactttaccttcagctacacttttgaggacgttcctttccacagcagctacgctcacagccagagtctggaccgtctcatgaatcctctcatcgaccagtacctgtattacttgagcagaacaaacactccaagtggaaccaccacgcagtcaaggcttcagttttctcaggccggagcgagtgacattcgggaccagtctaggaactggcttcctggaccctgttaccgccagcagcgagtatcaaagacatctgcggataacaacaacagtgaatactcgtggactggagctaccaagtaccacctcaatggcagagactctctggtgaatccgggcccggccatggcaagccacaaggacgatgaagaaaagttttttcctcagagcggggttctcatctttgggaagcaaggctcagagaaaacaaatgtggacattgaaaaggtcatgattacagacgaagaggaaatcaggacaaccaatcccgtggctacggagcagtatggttctgtatctaccaacctccagagaggcaacagacaagcagctaccgcagatgtcaacacacaaggcgttcttccaggcatggtctggcaggacagagatgtgtaccttcaggggcccatctgggcaaagattccacacacggacggacattttcacccctctcccctcatgggtggattcggacttaaacaccctcctccacagattctcatcaagaacaccccggtacctgcgaatccttcgaccaccttcagtgcggcaaagtttgcttccttcatcacacagtactccacgggacaggtcagcgtggagatcgagtgggagctgcagaaggaaaacagcaaacgctggaatcccgaaattcagtacacttccaactacaacaagtctgttaatgtggactttactgtggacactaatggcgtgtattcagagcctcgccccattggcaccagatacctgactcgtaatctgtaattgcttgttaatcaataaaccgtttaattcgtttcagttgaactttggtctctgcgtatttctttcttatctagtttccatgctctagagtcctgtattagaggtcacgtgagtgttttgcgacattttgcgacaccatgtggtcacgctgggtatttaagcccgagtgagcacgcagggtctccattttgaagcgggaggtttgaacgcgcagccaccacggcggggttttacgagattgtgattaaggtccccagcgaccttgacgggcatctgcccggcatttctgacagctttgtgaactgggtggccgagaaggaatgggagttgccgccagattctgacatggatctgaatctgattgagcaggcacccctgaccgtggccgagaagctgcatcgctggcgtaatagcgaagaggcccgcaccgatcgcccttcccaacagttgcgcagcctgaatggcgaatggaattccagacgattgagcgtcaaaatgtaggtatttccatgagcgtttttcctgttgcaatggctggcggtaatattgttctggatattaccagcaaggccgatagtttgagttcttctactcaggcaagtgatgttattactaatcaaagaagtattgcgacaacggttaatttgcgtgatggacagactcttttactcggtggcctcactgattataaaaacacttctcaggattctggcgtaccgttcctgtctaaaatccctttaatcggcctcctgtttagctcccgctctgattctaacgaggaaagcacgttatacgtgctcgtcaaagcaaccatagtacgcgccctgtagcggcgcattaagcgcggcgggtgtggtggttacgcgcagcgtgaccgctacacttgccagcgccctagcgcccgctcctttcgctttcttcccttcctttctcgccacgttcgccggctttccccgtcaagctctaaatcgggggctccctttagggttccgatttagtgctttacggcacctcgaccccaaaaaacttgattagggtgatggttcacgtagtgggccatcgccctgatagacggtttttcgccctttgacgttggagtccacgttctttaatagtggactcttgttccaaactggaacaacactcaaccctatctcggtctattcttttgatttataagggattttgccgatttcggcctattggttaaaaaatgagctgatttaacaaaaatttaacgcgaattttaacaaaatattaacgtttacaatttaaatatttgcttatacaatcttcctgtttttggggcttttctgattatcaaccggggtacatatgattgacatgctagttttacgattaccgttcatcgattctcttgtttgctccagactctcaggcaatgacctgatagcctttgtagagacctctcaaaaatagctaccctctccggcatgaatttatcagctagaacggttgaatatcatattgatggtgatttgactgtctccggcctttctcacccgtttgaatctttacctacacattactcaggcattgcatttaaaatatatgagggttctaaaaatttttatccttgcgttgaaataaaggcttctcccgcaaaagtattacagggtcataatgtttttggtacaaccgatttagctttatgctctgaggctttattgcttaattttgctaattctttgccttgcctgtatgatttattggatgttggaattcctgatgcggtattttctccttacgcatctgtgcggtatttcacaccgcatatggtgcactctcagtacaatctgctctgatgccgcatagttaagccagccccgacacccgccaacacccgctgacgcgccctgacgggcttgtctgctcccggcatccgcttacagacaagctgtgaccgtctccgggagctgcatgtgtcagaggttttcaccgtcatcaccgaaacgcgcgagacgaaagggcctcgtgatacgcctatttttataggttaatgtcatgataataatggtttcttagacgtcaggtggcacttttcggggaaatgtgcgcggaacccctatttgtttatttttctaaatacattcaaatatgtatccgctcatgagacaataaccctgataaatgcttcaataatattgaaaaaggaagagtatgagtattcaacatttccgtgtcgcccttattcccttttttgcggcattttgccttcctgtttttgctcacccagaaacgctggtgaaagtaaaagatgctgaagatcagttgggtgcacgagtgggttacatcgaactggatctcaacagcggtaagatccttgagagttttcgccccgaagaacgttttccaatgatgagcacttttaaagttctgctatgtggcgcggtattatcccgtattgacgccgggcaagagcaactcggtcgccgcatacactattctcagaatgacttggttgagtactcaccagtcacagaaaagcatcttacggatggcatgacagtaagagaattatgcagtgctgccataaccatgagtgataacactgcggccaacttacttctgacaacgatcggaggaccgaaggagctaaccgcttttttgcacaacatgggggatcatgtaactcgccttgatcgttgggaaccggagctgaatgaagccataccaaacgacgagcgtgacaccacgatgcctgtagcaatggcaacaacgttgcgcaaactattaactggcgaactacttactctagcttcccggcaacaattaatagactggatggaggcggataaagttgcaggaccacttctgcgctcggcccttccggctggctggtttattgctgataaatctggagccggtgagcgtgggtctcgcggtatcattgcagcactggggccagatggtaagccctcccgtatcgtagttatctacacgacggggagtcaggcaactatggatgaacgaaatagacagatcgctgagataggtgcctcactgattaagcattggtaactgtcagaccaagtttactcatatatactttagattgatttaaaacttcatttttaatttaaaaggatctaggtgaagatcctttttgataatctcatgaccaaaatcccttaacgtgagttttcgttccactgagcgtcagaccccgtagaaaagatcaaaggatcttcttgagatcctttttttctgcgcgtaatctgctgcttgcaaacaaaaaaaccaccgctaccagcggtggtttgtttgccggatcaagagctaccaactctttttccgaaggtaactggcttcagcagagcgcagataccaaatactgtccttctagtgtagccgtagttaggccaccacttcaagaactctgtagcaccgcctacatacctcgctctgctaatcctgttaccagtggctgctgccagtggcgataagtcgtgtcttaccgggttggactcaagacgatagttaccggataaggcgcagcggtcgggctgaacggggggttcgtgcacacagcccagcttggagcgaacgacctacaccgaactgagatacctacagcgtgagctatgagaaagcgccacgcttcccgaagggagaaaggcggacaggtatccggtaagcggcagggtcggaacaggagagcgcacgagggagcttccagggggaaacgcctggtatctttatagtcctgtcgggtttcgccacctctgacttgagcgtcgatttttgtgatgctcgtcaggggggcggagcctatggaaaaacgccagcaacgcggcctttttacggttcctggccttttgctggccttttgctcacatgttctttcctgcgttatcccctgattctgtggataaccgtattaccgcctttgagtgagctgataccgctcgccgcagccgaacgaccgagcgcagcgagtcagtgagcgaggaagcggaagagcgcccaatacgcaaaccgcctctccccgcgcgttggccgattcattaatgca

SEQ ID NO: 1240 - DNA, 1085 bp, Artificial Sequence
  source: /note="Description of Artificial Sequence: Synthetic polynucleotide"
  modified_base (611)..(611): a, c, g or t
  modified_base (640)..(640): a, c, g or t
  modified_base (1039)..(1039): a, c, g or t
tgcccacttacaacaaccatctctacaagcaaatctccagcvvmdcaggagctascaacgacaaccactactttggctacagcaccccttgggggtattttgactttaacagattccactgccacttctcaccacgtgactggcagcgactcattaacaacaactggggattccggcccaagaaactcagcttcaagctcttcaacatccaagttagaggggtcacgcagaacgatggcacgacgactattgccaataaccttaccagcacggttcaagtgtttacggactcggagtatcagctcccgtacgtgctcgggtcggcgcaccaaggctgtctcccgccgtttccagcggacgtcttcatggtccctcagtatggatacctcaccctgaacaacggaagtcaagcggtgggacgctcatccttttactgcctggagtacttcccttcgcagatgctaaggactggaaataacttccaattcagctataccttcgaggatgtaccttttcacagcagctacgctcacagccagagtttggatcgcttgatgaatcctcttattgatcagtatctgtactacctgaacagaacgcaargcamcvcnrgcggaacarccrvcmhsmrsvvsctgvngtttagccaggctgggcctcagtctatgtctttgcaggccagaaattggctacctgggccctgctaccggcaacagagactttcaamarycbmcrvcsrsaacaacaacagtrastttccttggmcagcggccagcamatatcatctcaatggccgcgactcgctggtgaatccaggaccagctatggccagtcacrrggacgatrmsgrsaratttttccctatgcacggcaatctaatatttggcaaasaarrcrscrvsrvarvcratrycgmsdwcgrsvrsgtaatgattacggatgaagaagagattcgtaccaccaatcctgtggcaacagagcagtatggaactgtggcaaataacttgcagrvsvvsmrsrvcvvscccacgdhtvvsrnsgtcvmscatcagggggccttacctggcatggtgtggcaagatcgt

SEQ ID NO: 1241 - protein, 620 aa, Artificial Sequence
  source: /note="Description of Artificial Sequence: Synthetic polypeptide"
  MOD_RES (263)..(264): Any naturally occurring amino acid
  MOD_RES (267)..(267): Any naturally occurring amino acid
  MOD_RES (450)..(453): Any naturally occurring amino acid
  MOD_RES (456)..(460): Any naturally occurring amino acid
  MOD_RES (462)..(462): Any naturally occurring amino acid
  MOD_RES (491)..(495): Any naturally occurring amino acid
  MOD_RES (500)..(500): Any naturally occurring amino acid
  MOD_RES (504)..(504): Any naturally occurring amino acid
  MOD_RES (508)..(508): Any naturally occurring amino acid
  MOD_RES (528)..(528): Any naturally occurring amino acid
  MOD_RES (531)..(533): Any naturally occurring amino acid
  MOD_RES (546)..(557): Any naturally occurring amino acid
  MOD_RES (586)..(590): Any naturally occurring amino acid
  MOD_RES (593)..(595): Any naturally occurring amino acid
  MOD_RES (597)..(597): Any naturally occurring amino acid
MAADGYLPDWLEDNLSEGIREWWALKPGVPQPKANQQHQDNRRGLVLPGYKYLGPGNGLDKGEPVNEADAAALEHDKAYDQQLKAGDNPYLKYNHADAEFQERLQEDTSFGGNLGRAVFQAKKRILEPLGLVEEAAKTAPGKKGAVDQSPQEPDSSSGVGKSGKQPARKRLNFGQTGDSESVPDPQPLGEPPAAPTSLGSNTMASGGGAPMADNNEGADGVGNSSGNWHCDSQWLGDRVITTSTRTWALPTYNNHLYKQISSXXGAXNDNHYFGYSTPWGYFDFNRFHCHFSPRDWQRLINNNWGFRPKKLSFKLFNIQVRGVTQNDGTTTIANNLTSTVQVFTDSEYQLPYVLGSAHQGCLPPFPADVFMVPQYGYLTLNNGSQAVGRSSFYCLEYFPSQMLRTGNNFQFSYTFEDVPFHSSYAHSQSLDRLMNPLIDQYLYYLNRTQXXXXGTXXXXXLXFSQAGPQSMSLQARNWLPGPCYRQQRLSXXXXXNNNSXFPWXAASXYHLNGRDSLVNPGPAMASHXDDXXXFFPMHGNLIFGKXXXXXXXXXXXXVMITDEEEIRTTNPVATEQYGTVANNLQXXXXXPTXXXVXHQGALPGMVWQDRDVYLQGPIWA

SEQ ID NO: 1242 - DNA, 1491 bp, Artificial Sequence
  source: /note="Description of Artificial Sequence: Synthetic polynucleotide"
accaccagcaccagaacctgggccctgcccacttacaacaaccatctctacaagcaaatctccagccaatcaggagcttcaaacgacaaccactactttggctacagcaccccttgggggtattttgactttaacagattccactgccacttctcaccacgtgactggcagcgactcattaacaacaactggggattccggcccaagaaactcagcttcaagctcttcaacatccaagttagaggggtcacgcagaacgatggcacgacgactattgccaataaccttaccagcacggttcaagtgtttacggactcggagtatcagctcccgtacgtgctcgggtcggcgcaccaaggctgtctcccgccgtttccagcggacgtcttcatggtccctcagtatggatacctcaccctgaacaacggaagtcaagcggtgggacgctcatccttttactgcctggagtacttcccttcgcagatgctaaggactggaaataacttccaattcagctataccttcgaggatgtaccttttcacagcagctacgctcacagccagagtttggatcgcttgatgaatcctcttattgatcagtatctgtactacctgaacagaacgcaaggaacaacctctggaacaaccaaccaatcacggctgctttttagccaggctgggcctcagtctatgtctttgcaggccagaaattggctacctgggccctgctaccggcaacagagactttcaaagactgctaacgacaacaacaacagtaactttccttggacagcggccagcaaatatcatctcaatggccgcgactcgctggtgaatccaggaccagctatggccagtcacaaggacgatgaagaaaaatttttccctatgcacggcaatctaatatttggcaaagaagggacaacggcaagtaacgcagaattagataatgtaatgattacggatgaagaagagattcgtaccaccaatcctgtggcaacagagcagtatggaactgtggcaaataacttgcagagctcaaatacagctcccacgactggaactgtcaatcatcagggggccttacctggcatggtgtggcaagatcgtgacgtctaccttcaaggacctatctgggcaaagattcctcacacggatggacactttcatccttctcctctgatgggaggctttggactgaaacatccgcctcctcaaatcatgatcaaaaatactccggtaccggcaaatcctccgacgactttcagcccggccaagtttgcttcatttatcactcagtactccactggacaggtcagcgtggaaattgagtgggagctacagaaagaaaacagcaaacgttggaatccagagattcagtacacttccaactacaacaagtctgttaatgtggactttactgtagacactaatggtgtttatagtgaacctcgccctattggaacccggtatctcacacgaaacttgtga

SEQ ID NO: 1243 - protein, 482 aa, Artificial Sequence
  source: /note="Description of Artificial Sequence: Synthetic polypeptide"
TTSTRTWALPTYNNHLYKQISSQSGASNDNHYFGYSTPWYFDFNRFHCHFSPRDWQRLNNNWGFRPKKLSFKLFNIQRGVTQNDGTTTIANNLTSTQVFTDSEYQLPYVLGSAHQCLPPFPADVFMVPQYGYLTNNGSQAVGRSSFYCLEYFPQMLRTGNNFQFSYTFEDVPHSSYAHSQSLDRLMNPLIDYLYYLNRTQGTTSGTTNQSLLFSQAGPQSMSLQARNWLGPCYRQQRLSKTANDNNNSFPWTAASKYHLNGRDSLVNGPAMASHKDDEEKFFPMHGLIFGKEGTTASNAELDNVMITDEEEIRTTNPVATEQYGTVANNLQSSNTAPTTGTVNHQGALPGMVWQDRDVYLQGPIWAKIPHTDGHFHPSPLMGGFGLKHPPPQIMIKNTPVPANPPTTFSPAKFASFITQYSTGQVSVEIEWELQKENSKRWNPEIQYTSNYNKSVNVDFTVDTNGVYSEPRPIGTRYLTRNL

SEQ ID NO: 1244 - DNA, 1140 bp, Artificial Sequence
  source: /note="Description of Artificial Sequence: Synthetic polynucleotide"
  modified_base (636)..(636): a, c, g or t
  modified_base (665)..(665): a, c, g or t
  modified_base (1064)..(1064): a, c, g or t
accaccagcaccagaacctgggccctgcccacttacaacaaccatctctacaagcaaatctccagcvvmdcaggagctascaacgacaaccactactttggctacagcaccccttgggggtattttgactttaacagattccactgccacttctcaccacgtgactggcagcgactcattaacaacaactggggattccggcccaagaaactcagcttcaagctcttcaacatccaagttagaggggtcacgcagaacgatggcacgacgactattgccaataaccttaccagcacggttcaagtgtttacggactcggagtatcagctcccgtacgtgctcgggtcggcgcaccaaggctgtctcccgccgtttccagcggacgtcttcatggtccctcagtatggatacctcaccctgaacaacggaagtcaagcggtgggacgctcatccttttactgcctggagtacttcccttcgcagatgctaaggactggaaataacttccaattcagctataccttcgaggatgtaccttttcacagcagctacgctcacagccagagtttggatcgcttgatgaatcctcttattgatcagtatctgtactacctgaacagaacgcaargcamcvcnrgcggaacarccrvcmhsmrsvvsctgvngtttagccaggctgggcctcagtctatgtctttgcaggccagaaattggctacctgggccctgctaccggcaacagagactttcaamarycbmcrvcsrsaacaacaacagtrastttccttggmcagcggccagcamatatcatctcaatggccgcgactcgctggtgaatccaggaccagctatggccagtcacrrggacgatrmsgrsaratttttccctatgcacggcaatctaatatttggcaaasaarrcrscrvsrvarvcratrycgmsdwcgrsvrsgtaatgattacggatgaagaagagattcgtaccaccaatcctgtggcaacagagcagtatggaactgtggcaaataacttgcagrvsvvsmrsrvcvvscccacgdhtvvsrnsgtcvmscatcagggggccttacctggcatggtgtggcaagatcgtgacgtctaccttcaaggacctatctgggca

SEQ ID NO: 1245 - protein, 620 aa, Artificial Sequence; identical to SEQ ID NO: 1241
  source: /note="Description of Artificial Sequence: Synthetic polypeptide"
  MOD_RES (263)..(264): Any naturally occurring amino acid
  MOD_RES (267)..(267): Any naturally occurring amino acid
  MOD_RES (450)..(453): Any naturally occurring amino acid
  MOD_RES (456)..(460): Any naturally occurring amino acid
  MOD_RES (462)..(462): Any naturally occurring amino acid
  MOD_RES (491)..(495): Any naturally occurring amino acid
  MOD_RES (500)..(500): Any naturally occurring amino acid
  MOD_RES (504)..(504): Any naturally occurring amino acid
  MOD_RES (508)..(508): Any naturally occurring amino acid
  MOD_RES (528)..(528): Any naturally occurring amino acid
  MOD_RES (531)..(533): Any naturally occurring amino acid
  MOD_RES (546)..(557): Any naturally occurring amino acid
  MOD_RES (586)..(590): Any naturally occurring amino acid
  MOD_RES (593)..(595): Any naturally occurring amino acid
  MOD_RES (597)..(597): Any naturally occurring amino acid

SEQ ID NO: 1246 - protein, 738 aa, Artificial Sequence; identical to SEQ ID NO: 18
  source: /note="Description of Artificial Sequence: Synthetic polypeptide"

SEQ ID NO: 1247 - DNA, 2258 bp, Artificial Sequence
  source: /note="Description of Artificial Sequence: Synthetic polynucleotide"
tcgaggacaacctctctgagggcattcgcgagtggtgggacttgaaacctggagccccgaaacccaaagccaaccagcaaaagcaggacgacggccggggtctggtgcttcctggctacaagtacctcggacccttcaacggactcgacaagggggagcccgtcaacgcggcggacgcagcggccctcgagcacgacaaggcctacgaccagcagctcaaagcgggtgacaatccgtacctgcggtataaccacgccgacgccgagtttcaggagcgtctgcaagaagatacgtcttttgggggcaacctcgggcgagcagtcttccaggccaagaagcgggttctcgaacctctcggtctggttgaggaaggcgctaagacggctcctggaaagaagagaccggtagagccatcaccccagcgttctccagactcctctacgggcatcggcaagaaaggccagcagcccgcgaaaaagagactcaactttgggcagactggcgactcagagtcagtgcccgaccctcaaccaatcggagaaccccccgcaggcccctctggtctgggatctggtacaatggctgcaggcggtggcgctccaatggcagacaataacgaaggcgccgacggagtgggtagttcctcaggaaattggcattgcgattccacatggctgggcgacagagtcatcaccaccagcacccgaacctgggccctccccacctacaacaaccacctctacaagcaaatctccaacgggacttcgggaggaagcaccaacgacaacacctacttcggctacagcaccccctgggggtattttgactttaacagattccactgccacttctcaccacgtgactggcagcgactcatcaacaacaactggggattccggcccaagagactcaacttcaagctcttcaacatccaggtcaaggaggtcacgcagaatgaaggcaccaagaccatcgccaataaccttaccagcacgattcaggtctttacggactcggaataccagctcccgtacgtcctcggctctgcgcaccagggctgcctgcctccgttcccggcggacgtcttcatgattcctcagtacgggtacctgactctgaacaatggcagtcaggccgtgggccgttcctccttctactgcctggagtactttccttctcaaatgctgagaacgggcaacaactttgagttcagctaccagtttgaggacgtgccttttcacagcagctacgcgcacagccaaagcctggaccggctgatgaaccccctcatcgaccagtacctgtactacctgtctcggactcagtccacgggaggtaccgcaggaactcagcagttgctattttctcaggccgggcctaataacatgtcggctcaggccaaaaactggctacccgggccctgctaccggcagcaacgcgtctccacgacactgtcgcaaaataacaacagcaactttgcctggaccggtgccaccaagtatcatctgaatggcagagactctctggtaaatcccggtgtcgctatggcaacccacaaggacgacgaagagcgattttttccgtccagcggagtcttaatgtttgggaaacagggagctggaaaagacaacgtggactatagcagcgttatgctaaccagtgaggaagaaattaaaaccaccaacccagtggccacagaacagtacggcgtggtggccgataacctgcaacagcaaaacgccgctcctattgtaggggccgtcaacagtcaaggagccttacctggcatggtctggcagaaccgggacgtgtacctgcagggtcctatctgggccaagattcctcacacggacggaaactttcatccctcgccgctgatgggaggctttggactgaaacacccgcctcctcagatcctgattaagaatacacctgttcccgcggatcctccaactaccttcagtcaagctaagctggcgtcgttcatcacgcagtacagcaccggacaggtcagcgtggaaattgaatgggagctgcagaaagaaaacagcaaacgctggaacccagagattcaatacacttccaactactacaaatctacaaatgtggactttgctgttaacacagatggcacttattctgagcctcgccccatcggcacccgttacctcacccgtaatctgtaattgcttgttaatcaataaaccggttgattcgtttcagttgaactttggtctctgcgaagggcgaattcgttt

SEQ ID NO: 1248 - DNA, 2208 bp, Artificial Sequence
  source: /note="Description of Artificial Sequence: Synthetic polynucleotide"
atggctgccgatggttatcttccagattggctcgaggacactctctctgaaggaataagacagtggtggaagctcaaacctggcccaccaccaccaaagcccgcagagcggcataaggacgacagcaggggtcttgtgcttcctgggtacaagtacctcggacccttcaacggactcgacaagggagagccggtcaacgaggcagacgccgcggccctcgagcacgacaaagcctacgaccggcagctcgacagcggagacaacccgtacctcaagtacaaccacgccgacgcggagtttcaggagcgccttaaagaagatacgtcttttgggggcaacctcggacgagcagtcttccaggcgaaaaagagggttcttgaacctctgggcctggttgaggaacctgttaagacggctccgggaaaaaagaggccggtagagcactctcctgtggagccagactcctcctcgggaaccggaaaggcgggccagcagcctgcaagaaaaagattgaattttggtcagactggagacgcagactcagtacctgacccccagcctctcggacagccaccagcagccccctctggtctgggaactaatacgatggctacaggcagtggcgcaccaatggcagacaataacgagggcgccgacggagtgggtaattcctcgggaaattggcattgcgattccacatggatgggcgacagagtcatcaccaccagcacccgaacctgggccctgcccacctacaacaaccacctctacaaacaaatttccagccaatcaggagcctcgaacgacaatcactactttggctacagcaccccttgggggtattttgacttcaacagattccactgccacttttcaccacgtgactggcaaagactcatcaacaacaactggggattccgacccaagagactcaacttcaagctctttaacattcaagtcaaagaggtcacgcagaatgacggtacgacgacgattgccaataaccttaccagcacggttcaggtgtttactgactcggagtaccagctcccgtacgtcctcggctcggcgcatcaaggatgcctcccgccgttcccagcagacgtcttcatggtgccacagtatggatacctcaccctgaacaacgggagtcaggcagtaggacgctcttcattttactgcctggagtactttccttctcagatgctgcgtaccggaaacaactttaccttcagctacacttttgaggacgttcctttccacagcagctacgctcacagccagagtctggaccgtctcatgaatcctctcatcgaccagtacctgtatttcttaagcagaacaaacactccaagtggaaccaccacgcagtcaaggcttcagttttctcaggccggagcgagtgacattcgggaccagtctaggaactggcttcctggaccctgttaccgccagcagcgagtatcaaagacatctgcggataacaacaacagtgaattctcgtggaccggtgctaccaagtaccacctcaatggcagagactctctggtgaatccgggcccggccatggcaagccacaaggacgatgaagaaaagttttttcctcagagcggggttctcatctttgggaagcaaggctcagagaaaacaaatgtggacattgaaaaggtcatgattacagacgaagaggaaatcaggacaaccaatcccgtggctacggagcagtatggttctgtatctaccaacctccagagaggcaacagacaagcagctaccgcagatgtcaacacacaaggcgttcttccaggcatggtctggcaggacagagatgtgtaccttcaggggcccatctgggcaaagattccacacacggacggacattttcacccctctcccctcatgggtggattcggacttaaacaccctcctccacagattctcatcaagaacaccccggtacctgcgaatccttcgaccaccttcagtgcggcaaagtttgcttccttcatcacacagtactccacgggacaggtcagcgtggagatcgagtgggagctgcagaaggaaaacagcaaacgctggaatcccgaaattcagtacacttccaactacaacaagtctgttaatgtggactttactgtggacactaatggcgtgtattcagagcctcgccccattggtaccagattcctgactcgtaatctgtaa

SEQ ID NO: 1249 - protein, 737 aa, Artificial Sequence
  source: /note="Description of Artificial Sequence: Synthetic polypeptide"
MAADGYLPDWLEDNLSEGIREWWDLKPGAPKPKANQQKQDNGRGLVLPGYKYLGPFNGLDKGEPVNAADAAALEHDKAYDQQLQAGDNPYLRYNHADAEFQERLQEDTSFGGNLGRAVFQAKKRVLEPLGLVESPVKTAPGKKRPVEPSPQRSPDSSTGIGKKGQQPAKKRLNFGQTGDSESVPDPQPIGEPPAAPSGVGPNTMAAGGGAPMADNNEGADGVGSSSGNWHCDSTWLGDRVITTSTRTWALPTYNNHLYKQISNGTSGGSTNDNTYFGYSTPWGYFDFNRFHCHFSPRDWQRLINNNWGFRPKRLNFKLFNIQVKEVTQNEGTKTIANNLTSTIQVFTDSEYQLPYVLGSAHQGCLPPFPADVFMIPQYGYLTLNNGSQAVGRSSFYCLEYFPSQMLRTGNNFEFSYNFEDVPFHSSYAHSQSLDRLMNPLIDQYLYYLSRTQSTGGTAGTQQLLFSQAGPNNMSAQAKNWLPGPCYRQQRVSTTLSQNNNSNFAWTGATKYHLNGRDSLVNPGVAMATHKDDEERFFPSSGVLMFGKQGAGKDNVDYSSVMLTSEEEIKTTNPVATEQYGWADNLQQQNAAPIVGAVNSQGALPGMVWQNRDVYLQGPIWAKIPHTDGNFHPSPLMGGFGLKHPPPQILIKNTPVPADPPTTFNQAKLASFITQYSTGQVSVEIEWELQKENSKRWNPEIQYTSNYYKSTNVDFAVNTEGTYSEPRPIGTRYLTRNL

SEQ ID NO: 1250 - DNA, 2211 bp, Artificial Sequence
  source: /note="Description of Artificial Sequence: Synthetic polynucleotide"
atggctgccgatggttatcttccagattggctcgaggacactctctctgaaggaataagacagtggtggaagctcaaacctggcccaccaccaccaaagcccgcagagcggcataaggacgacagcaggggtcttgtgcttcctgggtacaagtacctcggacccttcaacggactcgacaagggagagccggtcaacgaggcagacgccgcggccctcgagcacgacaaagcctacgaccggcagctcgacagcggagacaacccgtacctcaagtacaaccacgccgacgcggagtttcaggagcgccttaaagaagatacgtcttttgggggcaacctcggacgagcagtcttccaggcgaaaaagagggttcttgaacctctgggcctggttgaggaacctgttaagacggctccgggaaaaaagaggccggtagagcactctcctgtggagccagactcctcctcgggaaccggaaaggcgggccagcagcctgcaagaaaaagattgaattttggtcagactggagacgcagactcagtacctgacccccagcctctcggacagccaccagcagccccctctggtctgggaactaatacgatggctacaggcagtggcgcaccaatggcagacaataacgagggcgccgacggagtgggtaattcctcgggaaattggcattgcgattccacatggatgggcgacagagtcatcaccaccagcacccgaacctgggccctgcccacctacaacaaccacctctacaaacaaatttccagcgcttcaacgggagcctcgaacgacaatcactactttggctacagcaccccttgggggtattttgacttcaacagattccactgccacttttcaccacgtgactggcaaagactcatcaacaacaactggggattccgacccaagagactcaacttcaagctctttaacattcaagtcaaagaggtcacgcagaatgacggtacgacgacgattgccaataaccttaccagcacggttcaggtgtttactgactcggagtaccagctcccgtacgtcctcggctcggcgcatcaaggatgcctcccgccgttcccagcagacgtcttcatggtgccacagtatggatacctcaccctgaacaacgggagtcaggcagtaggacgctcttcattttactgcctggagtactttccttctcagatgctgcgtaccggaaacaactttaccttcagctacacttttgaggacgttcctttccacagcagctacgctcacagccagagtctggaccgtctcatgaatcctctcatcgaccagtacctgtattacttgagcagaacaaacactccaagtggaaccaccacgcagtcaaggcttcagttttctcaggccggagcgagtgacattcgggaccagtctaggaactggcttcctggaccctgttaccgccagcagcgagtatcaaagacatctgcggataacaacaacagtgaatactcgtggactggagctaccaagtaccacctcaatggcagagactctctggtgaatccgggcccggccatggcaagccacaaggacgatgaagaaaagttttttcctcagagcggggttctcatctttgggaagcaaggctcagagaaaacaaatgtggacattgaaaaggtcatgattacagacgaagaggaaatcaggacaaccaatcccgtggctacggagcagtatggttctgtatctaccaacctccagagaggcaacagacaagcagctaccgcagatgtcaacacacaaggcgttcttccaggcatggtctggcaggacagagatgtgtaccttcaggggcccatctgggcaaagattccacacacggacggacattttcacccctctcccctcatgggtggattcggacttaaacaccctcctccacagattctcatcaagaacaccccggtacctgcgaatccttcgaccaccttcagtgcggcaaagtttgcttccttcatcacacagtactccacgggacaggtcagcgtggagatcgagtgggagctgcagaaggaaaacagcaaacgctggaatcccgaaattcagtacacttccaactacgccaagtctgtcaatgtggactttactgtggacaataatggcgtgtattcagagcctcgccccattggcaccagatacctgactcgtaatctgtaa

SEQ ID NO: 1251 - DNA, 2208 bp, Artificial Sequence
  source: /note="Description of Artificial Sequence: Synthetic polynucleotide"
atggctgccgatggttatcttccagattggctcgaggacaacctctctgagggcattcgcgagtggtgggacttgaaacctggagccccgaagcccaaagccaaccagcaaaagcaggacgacggccggggtctggtgcttcctggctacaagtacctcggacccttcaacggactcgacaagggggagcccgtcaacgcggcggacgcagcggccctcgagcacgacaaggcctacgaccagcagctcaaagcgggtgacaatccgtacctgcggtataaccacgccgacgccgagtttcaggagcgtctgcaagaagatacgtcttttgggggcaacctcgggcgagcagtcttccaggccaagaagcgggttctcgaacctctcggtctggttgaggaaggcgctaagacggctcctggaaagaaacgtccggtagagcagtcgccacaagagccagactcctcctcgggcatcggcaagacaggccagcagcccgctaaaaagagactcaattttggtcagactggcgactcagagtcagtccccgatccacaacctctcggagaacctccagcaacccccgctgctgtgggacctactacaatggcttcaggcggtggcgcaccaatggcagacaataacgaaggcgccgacggagtgggtaatgcctcaggaaattggcattgcgattccacatggctgggcgacagagtcatcaccaccagcacccgcacctgggccttgcccacctacaataaccacctctacaagcaaatctccagtgcttcaggggccagcaacgacaaccactacttcggctacagcaccccctgggggtattttgatttcaacagattccactgccacttttcaccacgtgactggcagcgactcatcaacaacaattggggattccggcccaagagactcaacttcaaactcttcaacatccaagtcaaggaggtcacgacgaatgatggcgtcacaaccatcgctaataaccttaccagcacggttcaagtcttctcggactcggagtaccagcttccgtacgtcctcggctctgcgcaccagggctgcctccctccgttcccggcggacgtgttcatgattccgcaatacggctacctgacgctcaacaatggcagccaagccgtgggacgttcatccttttactgcctggaatatttcccttctcagatgctgagaacgggcaacaactttaccttcagctacacctttgaggaagtgcctttccacagcagctacgcgcacagccagagcctggaccggctgatgaatcctctcatcgaccaatacctgtattacctgaacagaactcaaaatcagtccggaagtgcccaaaacaaggacttgctgtttagccgtgggtctccagctggcatgtctgttcagcccaaaaactggctacctggaccctgttatcggcagcagcgcgtttctaaaacaaaaacagacaacaacaacagcaattttacctggactggtgcttcaaaatataacctcaatgggcgtgaatccatcatcaaccctggcactgctatggcctcacacaaagacgacgaagacaagttctttcccatgagcggtgtcatgatttttggaaaagagagcgccggagcttcaaacactgcattggacaatgtcatgattacagacgaagaggaaattaaagccactaaccctgtggccaccgaaagatttgggaccgtggcagtcaatttccagagcagcagcacagaccctgcgaccggagatgtgcatgctatgggagcattacctggcatggtgtggcaagatagagacgtgtacctgcagggtcccatttgggccaaaattcctcacacagatggacactttcacccgtctcctcttatgggcggctttggactcaagaacccgcctcctcagatcctcatcaaaaacacgcctgttcctgcgaatcctccggcggagttttcagctacaaagtttgcttcattcatcacccaatactccacaggacaagtgagtgtggaaattgaatgggagctgcagaaagaaaacagcaagcgctggaatcccgaagtgcagtacacatccaattatgcaaaatctgccaacgttgattttactgtggacaacaatggactttatactgagcctcgccccattggcacccgttaccttacccgtcccctgtaa

SEQ ID NO: 1252 - DNA, 2205 bp, Artificial Sequence
  source: /note="Description of Artificial Sequence: Synthetic polynucleotide"
atggctgccgatggttatcttccagattggctcgaggacaacctctdgagggcattcgcgagtggtgggacttgaaacctggagccccgaaacccaaagccaaccagcaaaagcaggacgacggccggggtdggtgcttcctggctacaagtacctcggacccttcaacggactcgacaagggggagcccgtcaacgcggcggatgcagcggccctcgagcacgacaaggcctacgaccagcagctcaaagcgggtgacaatccgtacctgcggtataaccacgccgacgccgagtttcaggagcgtctgcaagaagatacgtcttttgggggcaacctcgggcgagcagtcttccaggccaagaagagggttctcgaaccttttggtdggttgaggaaggtgctaagacggctcctggaaagaaacgtccggtagagcagtcgccacaagagccagactcctcctcgggcattggcaagacaggccagcagcccgctaaaaagagactcaattttggtcagactggcgactcagagtcagtccccgacccacaacctctcggagaacctccagcaacccccgctgctgtgggacctactacaatggcttcaggcggtggcgcaccaatggcagacaataacgaaggcgccgacggagtgggtaatgcctcaggaaattggcattgcgattccacatggctgggcgacagagtcatcaccaccagcacccgaacatgggccttgcccacctataacaaccacctctacaagcaaatctccagtgcttcaggggccagcaacgacaaccactacttcggctacagcaccccctgggggtattttgatttcaacagattccactgccatttctcaccacgtgactggcagcgactcatcaacaacaattggggattccggcccaagagactcaacttcaagctcttcaacatccaagtcaaggaggtcacgacgaatgatggcgtcacgaccatcgctaataaccttaccagcacggttcaagtcttctcggactcggagtaccagttgccgtacgtcctcggctctgcgcaccagggctgcctccctccgttcccggcggacgtgttcatgattccgcagtacggctacctaacgctcaacaatggcagccaggcagtgggacggtcatccttttactgcctggaatatttcccatcgcagatgctgagaacgggcaataactttaccttcagctacaccttcgaggacgtgcctttccacagcagctacgcgcacagccagagcctggaccggctgatgaatcctctcatcgaccagtacctgtattacctgaacagaactcagaatcagtccggaagtgcccaaaacaaggacttgctgtttagccgggggtctccagctggcatgtctgttcagcccaaaaactggctacctggaccctgttaccggcagcagcgcgtttctaaaacaaaaacagacaacaacaacagcaactttacctggactggtgcttcaaaatataaccttaatgggcgtgaatctataatcaaccctggcactgctatggcctcacacaaagacgacaaagacaagttctttcccatgagcggtgtcatgatttttggaaaggagagcgccggagcttcaaacactgcattggacaatgtcatgatcacagacgaagaggaaatcaaagccactaaccccgtggccaccgaaagatttgggactgtggcagtcaatctccagagcagcagcacagaccctgcgaccggagatgtgcatgttatgggagccttacctggaatggtgtggcaagacagagacgtatacctgcagggtcctatttgggccaaaattcctcacacggatggacactttcacccgtctcctctcatgggcggctttggacttaagcacccgcctcctcagatcctcatcaaaaacacgcctgttcctgcgaatcctccggcagagttttcggctacaaagtttgcttcattcatcacccagtattccacaggacaagtgagcgtggagattgaatgggagctgcagaaagaaaacagcaaacgctggaatcccgaagtgcagtatacatctaactatgcaaaatctgccaacgttgatttcactgtggacaacaatggactttatactgagcctcgccccattggcacccgttacctcacccgtcccctgtaa

SEQ ID NO: 1253 - DNA, 2208 bp, Artificial Sequence
  source: /note="Description of Artificial Sequence: Synthetic polynucleotide"
atggctgccgatggttatcttccagattggctcgaggacaacctctctgagggcattcgcgagtggtgggacttgaaacctggagccccgaaacccaaagccaaccagcaaaagcaggacgacggccggggtctggtgcttcctggctacaagtacctcggacccttcaacggactcgacaagggggagcccgtcaacgcggcggatgcagcggccctcgagcacgacaaggcctacgaccagcagctcaaagcgggtgacaatccgtacctgcggtataaccacgccgacgccgagtttcaggagcgtctgcaagaagatacgtcttttgggggcaacctcgggcgagcagtcttccaggccaagaagagggttctcgaaccttttggtctggttgaggaaggtgctaagacggctcctggaaagaaacgtccggtagagcagtcgccacaagagccagactcctcctcgggcattggcaagacaggccagcagcccgctaaaaagagactcaattttggtcagactggcgactcagagtcagtccccgacccacaacctctcggagaacctccagcaacccccgctgctgtgggacctactacaatggcttcaggcggtggcgcaccaatggcagacaataacgaaggcgccgacggagtgggtaatgcctcaggaaattggcattgcgattccacatggctgggcgacagagtcatcaccaccagcacccgaacatgggccttgcccacctataacaaccacctctacaagcaaatctccagtgcttcaggggccagcaacgacaaccactacttcggctacagcaccccctgggggtattttgatttcaacagattccactgccatttctcaccacgtgactggcagcgactcatcaacaacaattggggattccggcccaagagactcaacttcaagctcttcaacatccaagtcaaggaggtcacgacgaatgatggcgtcacgaccatcgctaataaccttaccagcacggttcaagtcttctcggactcggagtaccagttgccgtacgtcctcggctctgcgcaccagggctgcctccctccgttcccggcggacgtgttcatgattccgcagtacggctacctaacgctcaacaatggcagccaggcagtgggacggtcatccttttactgcctggaatatttcccatcgcagatgctgagaacgggcaataactttaccttcagctacaccttcgaggacgtgcctttccacagcagctacgcgcacagccagagcctggaccggctgatgaatcctctcatcgaccagtacctgtattacctgaacagaactcagaatcagtccggaagtgcccaaaacaaggacttgctgtttagccgggggtctccagctggcatgtctgttcagcccaaaaactggctacctggaccctgttaccggcagcagcgcgtttctaaaacaaaaacagacaacaacaacagcaactttacctggactggtgcttcaaaatataaccttaatgggcgtgaatctataatcaaccctggcactgctatggcctcacacaaagacgacgaagacaagttctttcccatgagcggtgtcatgatttttggaaaggagagcgccggagcttcaaacactgcattggacaatgtcatgatcacagacgaagaggaaatcaaagccactaaccccgtggccaccgaaagatttgggactgtggcagtcaatctccagagcagcagcacagaccctgcgaccggagatgtgcatgttatgggagccttacctggaatggtgtggcaagacagagacgtatacctgcagggtcctatttgggccaaaattcctcacacggatggacactttcacccgtctcctctcatgggcggctttggacttaagcacccgcctcctcagatcctcatcaaaaacacgcctgttcctgcgaatcctccggcagagttttcggctacaaagtttgcttcattcatcacccagtattccacaggacaagtgagcgtggagattgaatgggagctgcagaaagaaaacagcaaacgctggaatcccgaagtgcagtatacatctaactatgcaaaatctgccaacgttgatttcactgtggacaacaatggactttatactgagcctcgccccattggcacccgttacctcacccgtcccctgtaa

SEQ ID NO: 1254 - DNA, 2208 bp, Artificial Sequence
  source: /note="Description of Artificial Sequence: Synthetic polynucleotide"
atggctgccgatggttatcttccagattggctcgaggacactctctctgaaggaataagacagtggtggaagctcaaacctggcccaccaccaccaaagcccgcagagcggcataaggacgacagcaggggtcttgtgcttcctgggtacaagtacctcggacccttcaacggactcgacaagggagagccggtcaacgaggcagacgccgcggccctcgagcacgacaaagcctacgaccggcagctcgacagcggagacaacccgtacctcaagtacaaccacgccgacgcggagtttcaggagcgccttaaagaagatacgtcttttgggggcaacctcggacgagcagtcttccaggcgaaaaagagggttcttgaacctctgggcctggttgaggaacctgttaagacggctccgggaaaaaagaggccggtagagcactctcctgtggagccagactcctcctcgggaaccggaaaggcgggccagcagcctgcaagaaaaagattgaattttggtcagactggagacgcagactcagtacctgacccccagcctctcggacagccaccagcagccccctctggtctgggaactaatacgatggctacaggcagtggcgcaccaatggcagacaataacgagggcgccgacggagtgggtaattcctcgggaaattggcattgcgattccacatggatgggcgacagagtcatcaccaccagcacccgaacctgggccctgcccacctacaacaaccacctctacaaacaaatttccagccaatcaggagcctcgaacgacaatcactactttggctacagcaccccttgggggtattttgacttcaacagattccactgccacttttcaccacgtgactggcaaagactcatcaacaacaactggggattccgacccaagagactcaacttcaagctctttaacattcaagtcaaagaggtcacgcagaatgacggtacgacgacgattgccaataaccttaccagcacggttcaggtgtttactgactcggagtaccagctcccgtacgtcctcggctcggcgcatcaaggatgcctcccgccgttcccagcagacgtcttcatggtgccacagtatggatacctcaccctgaacaacgggagtcaggcagtaggacgctcttcattttactgcctggagtactttccttctcagatgctgcgtaccggaaacaactttaccttcagctacacttttgaggacgttcctttccacagcagctacgctcacagccagagtctggaccgtctcatgaatcctctcatcgaccagtacctgtattacttgagcagaacaaacactccaagtggaaccaccacgcagtcaaggcttcagttttctgtggccggacccagtaacatggctgtccagggaaggaactggcttcctggaccctgttaccgccagcagcgagtatcaaagacatctgcggataacaacaacagtgaatttgcttggactggagctaccaagtaccacctcaatggcagagactctctggtgaatccgggcccggccatggcaagccacaaggacgatgaagaaaagttttttcctcagagcggggttctcatctttgggaagcaaggctcagagaaaacaaatgtggacattgaaaaggtcatgattacagacgaagaggaaatcaggacaaccaatcccgtggctacggagcagtatggttctgtatctaccaacctccagcaacagaacacagcaccagctaccgcagatgtcaacacacaaggcgttcttccaggcatggtctggcaggacagagatgtgtaccttcaggggcccatctgggcaaagattccacacacggacggacattttcacccctctcccctcatgggtggattcggacttaaacaccctcctccacagattctcatcaagaacaccccggtacctgcgaatccttcgaccaccttcagtgcggcaaagtttgcttccttcatcacacagtactccacgggacaggtcagcgtggagatcgagtgggagctgcagaaggaaaacagcaaacgctggaatcccgaaattcagtacacttccaactacaacaagtctgttaatgtggactttactgtggacactaatggcgtgtattcagagcctcgccccattggcaccagatacctgactcgtaatctgtaa

SEQ ID NO: 1255 - protein, 735 aa, Artificial Sequence
  source: /note="Description of Artificial Sequence: Synthetic polypeptide"
MAADGYLPDWLEDTLSEGIRQWWKLKPGPPPPKPAERHKDDSRGLVLPGYKYLGPFNGLDKGEPVNEADAAALEHDKAYDRQLDSGDNPYLKYNHADAEFQERLKEDTSFGGNLGRAVFQAKKRVLEPLGLVEEPVKTAPGKKRPVEHSPVEPDSSSGTGKAGQQPARKRLNFGQTGDADSVPDPQPLGQPPAAPSGLGTNTMATGSGAPMADNNEGADGVGNSSGNWHCDSTWMGDRVITTSTRTWALPTYNNHLYKQISSQSGASNDNHYFGYSTPWGYFDFNRFHCHFSPRDWQRLINNNWGFRPKRLNFKLFNIQVKEVTQNDGTTTIANNLTSTVQVFTDSEYQLPYVLGSAHQGCLPPFPADVFMVPQYGYLTLNNGSQAVGRSSFYCLEYFPSQMLRTGNNFTFSYTFEDVPFHSSYAHSQSLDRLMNPLIDQYLYYLSRTNTPSGTTTQSRLQFSVAGPSNMAVQGRNWLPGPCYRQQRVSKTSADNNNSEFAWTGATKYHLNGRDSLVNPGPAMASHKDDEEKFFPQSGVLIFGKQGSEKTNVDIEKVMITDEEEIRTTNPVATEQYGSVSTNLQQQNTAPATADVNTQGVLPGMVWQDRDVYLQGPIWAKIPHTDGHFHPSPLMGGFGLKHPPPQILIKNTPVPANPSTTFSAAKFASFITQYSTGQVSVEIEWELQKENSKRWNPEIQYTSNYNKSVNVDFTVDTNGVYSEPRPIGTRYLTRNL

SEQ ID NO: 1256 - DNA, 2208 bp, Artificial Sequence
  source: /note="Description of Artificial Sequence: Synthetic polynucleotide"
atggctgccgatggttatcttccagattggctcgaggacactctctctgaaggaataagacagtggtggaagctcaaacctggcccaccaccaccaaagcccgcagagcggcataaggacgacagcaggggtcttgtgcttcctgggtacaagtacctcggacccttcaacggactcgacaagggagagccggtcaacgaggcagacgccgcggccctcgagcacgacaaagcctacgaccggcagctcgacagcggagacaacccgtacctcaagtacaaccacgccgacgcggagtttcaggagcgccttaaagaagatacgtcttttgggggcaacctcggacgagcagtcttccaggcgaaaaagaggattcttgaacctctgggcctggttgaggaacctgttaagacggctccgggaaaaaagaggccggtagagcactctcctgcggagccagactcctcctcgggaaccggaaagtcgggccagcagcctgcaagaaaaagattgaattttggtcagactggagacgcagactcagtacctgacccccagcctctcggacagccaccagcagccccctctggtctgggaactaatacgatggcttcaggcagtggcgcaccaatggcagacaataacgagggcgccgacggagtgggtaattcctcgggaaattggcattgcgattccacatggatgggcgacagagtcatcaccaccagcacccgaacctgggccctgcccacctacaacaaccacctctacaaacaaatttccagccaatcaggagcctcgaacgacaatcactactttggctacagcaccccttgggggtattttgacttcaacagattccactgccacttttcaccacgtgactggcaaagactcatcaacaacaactggggattccgacccaagagactcagcttcaagctctttaacattcaagtcaaagaggtcacgcagaatgacggtacgacgacgattgccaataaccttaccagcacggttcaggtgtttactgactcggagtaccagctcccgtacgtcctcggctcggcgcatcaaggatgcctcccgccgttcccagcagacgtcttcatggtgccacagtatggatacctcaccctgaacaacgggagtcaggcagtaggacgctcttcattttactgcctggagtactttccttctcagatgctgcgtaccggaaacaactttaccttcagctacacttttgaggacgttcctttccacagcagctacgctcacagccagagtctggaccgtctcatgaatcctctcatcgaccagtacctgtattacttgagcagaacaaacactccaagtggaaccaccacgatgtcaaggcttcagttttctcaggccggagcgagtgacattcgggaccagtctaggaactggcttcctggaccctgttaccgccagcagcgagtatcaaagacagctgcggataacaacaacagtgattactcgtggactggagctaccaagtaccacctcaatggcagagactctctggtgaatccgggcccggccatggcaagccacaaggacgatgaagaaaagtattttcctcagagcggggttctcatctttgggaagcaagactcaggaaaaacaaatgtggacattgaaaaggtcatgattacagacgaagaggaaatcaggacaaccaatcccgtggctacggagcagtatggttctgtatctaccaacctccagagcggcaacacacaagcagctacctcagatgtcaacacacaaggcgttcttccaggcatggtctggcaggacagagatgtgtaccttcaggggcccatctgggcaaagattccacacacggacggacattttcacccctctcccctcatgggtggattcggacttaaacaccctcctccacagattctcatcaagaacaccccggtacctgcgaatccttcgaccaccttcagtgcggcaaagtttgcttccttcatcacacagtactccacgggacaggtcagcgtggagatcgagtgggagctgcagaaggaaaacagcaaacgctggaatcccgaaattcagtacacttccaactacaacaagtctgttaatgtggactttactgtggacactaatggcgtgtattcagagcctcgccccattggcaccagatacctgactcgtaatctgtaa

SEQ ID NO: 1257 - DNA, 2208 bp, Artificial Sequence
  source: /note="Description of Artificial Sequence: Synthetic polynucleotide"
atggctgccgatggttatcttccagattggctcgaggacactctctctgaaggaataagacagtggtggaagctcaaacctggcccaccaccaccaaagcccgcagagcggcataaggacgacagcaggggtcttgtgcttcctgggtacaagtacctcggacccttcaacggactcgacaagggagagccggtcaacgaggcagacgccgcggccctcgagcacgacaaagcctacgaccggcagctcgacagcggagacaacccgtacctcaagtacaaccacgccgacgcggagtttcaggagcgccttaaagaagatacgtcttttgggggcaacctcggacgagcagtcttccaggcgaaaaagaggattcttgaacctctgggcctggttgaggaacctgttaagacggctccgggaaaaaagaggccggtagagcactctcctgcggagccagactcctcctcgggaaccggaaagtcgggccagcagcctgcaagaaaaagattgaattttggtcagactggagacgcagactcagtacctgacccccagcctctcggacagccaccagcagccccctctggtctgggaactaatacgatggcttcaggcagtggcgcaccaatggcagacaataacgagggcgccgacggagtgggtaattcctcgggaaattggcattgcgattccacatggatgggcgacagagtcatcaccaccagcacccgaacctgggccctgcccacctacaacaaccacctctacaaacaaatttccagccaatcaggagcctcgaacgacaatcactactttggctacagcaccccttgggggtattttgacttcaacagattccactgccacttttcaccacgtgactggcaaagactcatcaacaacaactggggattccgacccaagagactcaacttcaagctctttaacattcaagtcaaagaggtcacgcagaatgacggtacgacgacgattgccaataaccttaccagcacggttcaggtgtttactgactcggagtaccagctcccgtacgtcctcggctcggcgcatcaaggatgcctcccgccgttcccagcagacgtcttcatggtgccacagtatggatacctcaccctgaacaacgggagtcaggcagtaggacgctcttcattttactgcctggagtactttccttctcagatgctgcgtaccggaaacaactttaccttcagctacacttttgaggacgttcctttccacagcagctacgctcacagccagagtctggaccgtctcatgaatcctctcatcgaccagtacctgtattacttgagcagaacaaacactccaagtggaaccaccacgatgtcaaggcttcagttttctcaggccggagcgagtgacattcgggaccagtctaggaactggcttcctggaccctgttaccgccagcagcgagtatcaaagacagctgcggataacaacaacagtgattactcgtggactggagctaccaagtaccacctcaatggcagagactctctggtgaatccgggcccggccatggcaagccacaaggacgatgaagaaaagtattttcctcagagcggggttctcatctttgggaagcaagactcaggaaaaacaaatgtggacattgaaaaggtcatgattacagacgaagaggaaatcaggacaaccaatcccgtggctacggagcagtatggttctgtatctaccaacctccagagcggcaacacacaagcagctacctcagatgtcaacacacaaggcgttcttccaggcatggtctggcaggacagagatgtgtaccttcaggggcccatctgggcaaagattccacacacggacggacattttcacccctctcccctcatgggtggattcggacttaaacaccctcctccacagattctcatcaagaacaccccggtacctgcgaatccttcgaccaccttcagtgcggcaaagtttgcttccttcatcacacagtactccacgggacaggtcagcgtggagatcgagtgggagctgcagaaggaaaacagcaaacgctggaatcccgaaattcagtacacttccaactacaacaagtctgttaatgtggactttactgtggacactaatggcgtgtattcagagcctcgccccattggcaccagatacctgactcgtaatctgtaa

SEQ ID NO: 1258 - protein, 735 aa, Artificial Sequence
  source: /note="Description of Artificial Sequence: Synthetic polypeptide"
MAADGYLPDWLEDTLSEGIRQWWKLKPGPPPPKPAERHKDDSRGLVLPGYKYLGPFNGLDKGEPVNEADAAALEHDKAYDRQLDSGDNPYLKYNHADAEFQERLKEDTSFGGNLGRAVFQAKKRILEPLGLVEEPVKTAPGKKRPVEHSPAEPDSSSGTGKSGQQPARKRLNFGQTGDADSVPDPQPLGQPPAAPSGLGTNTMASGSGAPMADNNEGADGVGNSSGNWHCDSTWMGDRVITTSTRTWALPTYNNHLYKQISSQSGASNDNHYFGYSTPWGYFDFNRFHCHFSPRDWQRLINNNWGFRPKRLNFKLFNIQVKEVTQNDGTTTIANNLTSTVQVFTDSEYQLPYVLGSAHQGCLPPFPADVFMVPQYGYLTLNNGSQAVGRSSFYCLEYFPSQMLRTGNNFTFSYTFEDVPFHSSYAHSQSLDRLMNPLIDQYLYYLSRTNTPSGTTTMSRLQFSQAGASDIRDQSRNWLPGPCYRQQRVSKTAADNNNSDYSWTGATKYHLNGRDSLVNPGPAMASHKDDEEKYFPQSGVLIFGKQDSGKTNVDIEKVMITDEEEIRTTNPVATEQYGSVSTNLQSGNTQAATSDVNTQGVLPGMVWQDRDVYLQGPIWAKIPHTDGHFHPSPLMGGFGLKHPPPQILIKNTPVPANPSTTFSAAKFASFITQYSTGQVSVEIEWELQKENSKRWNPEIQYTSNYNKSVNVDFTVDTNGVYSEPRPIGTRYLTRNL

SEQ ID NO: 1259 - protein, 736 aa, Artificial Sequence
  source: /note="Description of Artificial Sequence: Synthetic polypeptide"
MAADGYLPDWLEDNLSEGIREWWDLKPGAPKPKANQQKQDDGRGLVLPGYKYLGPFNGLDKGEPVNAADAAALEHDKAYDQQLKAGDNPYLRYNHADAEFQERLQEDTSFGGNLGRAVFQAKKRVLEPFGLVEEGAKTAPGKKRPVEQSPQEPDSSSGIGKTGQQPAKKRLNFGQTGDSESVPDPQPLGEPPATPAAVGPTTMASGGGAPMADNNEGADGVGNASGNWHCDSTWLGDRVITTSTRTWALPTYNNHLYKQISSASTGASNDNHYFGYSTPWGYFDFNRFHCHFSPRDWQRLINNNWGFRPKRLNFKLFNIQVKEVTTNDGVTTIANNLTSTVQVFSDSEYQLPYVLGSAHQGCLPPFPADVFMIPQYGYLTLNNGSQAVGRSSFYCLEYFPSQMLRTGNNFTFSYTFEDVPFHSSYAHSQSLDRLMNPLIDQYLYFLNRTQNQSGSAQNKDLLFSRGSPAGMSVQPKNWLPGPCYRQQRVSKTKTDNNNSNFTWTGASKYNLNGRESIINPGTAMASHKDDKDKFFPMSGVMIFGKESAGASNTALDNVMITDEEEIKATNPVATERFGTVAVNLQSSSTDPATGDVHVMGALPGMVWQDRDVYLQGPIWAKIPHTDGHFHPSPLMGGFGLKHPPPQILIKNTPVPANPPAEFSATKFASFITQYSTGQVSVEIEWELQKENSKRWNPEVQYTSNYAKSANVDFTVDNNGLYTEPRPIGTRYLTRPL

SEQ ID NO: 1260 - protein, 747 aa, Artificial Sequence
  source: /note="Description of Artificial Sequence: Synthetic polypeptide"
MAADGYLPDWLEDTLSEGIRQWWKLKPGPPPPKPAERHKDDSRGLVLPGYKYLGPFNGLDKGEPVNEADAAALEHDKAYDRQLDSGDNPYLKYNHADAEFQERLKEDTSFGGNLGRAVFQAKKRVLEPLGLVEEPVKTAPGKKRPVEHSPVEPDSSSGTGKAGQQPARKRLNFGQTGDADSVPDPQPLGQPPAAPSGLGTNTMATGSGAPMADNNEGADGVGNSSGNWHCDSTWMGDRVITTSTRTWALPTYNNHLYKQISSQSGASNDNHYFGYSTPWGYFDFNRFHCHFSPRDWQRLINNNWGFRPKRLNFKLFNIQVKEVTQNDGTTTIANNLTSTVQVFTDSEYQLPYVLGSAHQGCLPPFPADVFMVPQYGYLTLNNGSQAVGRSSFYCLEYFPSQMLRTGNNFTFSYTFEDVPFHSSYAHSQSLDRLMNPLIDQYLYYLSRTNTPSGTTTQSRLQFSQAGASDIRDQSRNWLPGPCYRQQRVSKTSADNNNSEYSWTGATKYHLNGRDSLVNPGPAMASHKDDEEKFFPQSGVLIFGKQGSEKTNVDIEKVMITDEEEIRTTNPVATEQYGSVSTNLQRGNAAAGSTPPPMAARQAATADVNTQGVLPGMVWQDRDVYLQGPIWAKIPHTDGHFHPSPLMGGFGLKHPPPQILIKNTPVPANPSTTFSAAKFASFITQYSTGQVSVEIEWELQKENSKRWNPEIQYTSNYNKSVNVDFTVDTNGVYSEPRPIGTRYLTRNL

SEQ ID NO: 1261 - protein, 747 aa, Artificial Sequence
  source: /note="Description of Artificial Sequence: Synthetic polypeptide"
MAADGYLPDWLEDTLSEGIRQWWKLKPGPPPPKPAERHKDDSRGLVLPGYKYLGPFNGLDKGEPVNEADAAALEHDKAYDRQLDSGDNPYLKYNHADAEFQERLKEDTSFGGNLGRAVFQAKKRVLEPLGLVEEPVKTAPGKKRPVEHSPVEPDSSSGTGKAGQQPARKRLNFGQTGDADSVPDPQPLGQPPAAPSGLGTNTMATGSGAPMADNNEGADGVGNSSGNWHCDSTWMGDRVITTSTRTWALPTYNNHLYKQISSQSGASNDNHYFGYSTPWGYFDFNRFHCHFSPRDWQRLINNNWGFRPKRLNFKLFNIQVKEVTQNDGTTTIANNLTSTVQVFTDSEYQLPYVLGSAHQGCLPPFPADVFMVPQYGYLTLNNGSQAVGRSSFYCLEYFPSQMLRTGNNFTFSYTFEDVPFHSSYAHSQSLDRLMNPLIDQYLYYLSRTNTPSGTTTQSRLQFSQAGASDIRDQSRNWLPGPCYRQQRVSKTSADNNNSEYSWTGATKYHLNGRDSLVNPGPAMASHKDDEEKFFPQSGVLIFGKQGSEKTNVDIEKVMITDEEEIRTTNPVATEQYGSVSTNLQRGNAAAGETRAPLAARQAATADVNTQGVLPGMVWQDRDVYLQGPIWAKIPHTDGHFHPSPLMGGFGLKHPPPQILIKNTPVPANPSTTFSAAKFASFITQYSTGQVSVEIEWELQKENSKRWNPEIQYTSNYNKSVNVDFTVDTNGVYSEPRPIGTRYLTRNL

SEQ ID NO: 1262 - protein, 7 aa, Artificial Sequence
  source: /note="Description of Artificial Sequence: Synthetic peptide"
TLAVPFK

SEQ ID NO: 1263 - protein, 7 aa, Artificial Sequence
  source: /note="Description of Artificial Sequence: Synthetic peptide"
KFPVALT

SEQ ID NO: 1264 - protein, 6 aa, Artificial Sequence
  source: /note="Description of Artificial Sequence: Synthetic peptide"
LAVPFK

SEQ ID NO: 1265 - protein, 5 aa, Artificial Sequence
  source: /note="Description of Artificial Sequence: Synthetic peptide"
AVPFK

SEQ ID NO: 1266 - protein, 4 aa, Artificial Sequence
  source: /note="Description of Artificial Sequence: Synthetic peptide"
VPFK

SEQ ID NO: 1267 - protein, 6 aa, Artificial Sequence
  source: /note="Description of Artificial Sequence: Synthetic peptide"
TLAVPF

SEQ ID NO: 1268 - protein, 5 aa, Artificial Sequence
  source: /note="Description of Artificial Sequence: Synthetic peptide"
TLAVP

SEQ ID NO: 1269 - protein, 4 aa, Artificial Sequence
  source: /note="Description of Artificial Sequence: Synthetic peptide"
TLAV

SEQ ID NO: 1270 - protein, 7 aa, Artificial Sequence
  source: /note="Description of Artificial Sequence: Synthetic peptide"
SVSKPFL

SEQ ID NO: 1271 - protein, 7 aa, Artificial Sequence
  source: /note="Description of Artificial Sequence: Synthetic peptide"
FTLTTPK

SEQ ID NO: 1272 - protein, 7 aa, Artificial Sequence
  source: /note="Description of Artificial Sequence: Synthetic peptide"
MNATKNV

SEQ ID NO: 1273 - protein, 7 aa, Artificial Sequence
  source: /note="Description of Artificial Sequence: Synthetic peptide"
QSSQTPR

SEQ ID NO: 1274 - protein, 7 aa, Artificial Sequence
  source: /note="Description of Artificial Sequence: Synthetic peptide"
ILGTGTS

SEQ ID NO: 1275 - protein, 7 aa, Artificial Sequence
  source: /note="Description of Artificial Sequence: Synthetic peptide"
TRTNPEA

SEQ ID NO: 1276 - protein, 7 aa, Artificial Sequence
  source: /note="Description of Artificial Sequence: Synthetic peptide"
NGGTSSS

SEQ ID NO: 1277 - protein, 7 aa, Artificial Sequence
  source: /note="Description of Artificial Sequence: Synthetic peptide"
YTLSQGW

SEQ ID NO: 1278 - DNA, 21 bp, Artificial Sequence
  source: /note="Description of Artificial Sequence: Synthetic oligonucleotide"
aagtttcctgtggcgttgact

SEQ ID NO: 1279 - DNA, 21 bp, Artificial Sequence
  source: /note="Description of Artificial Sequence: Synthetic oligonucleotide"
actttggcggtgccttttaag

SEQ ID NO: 1280 - DNA, 21 bp, Artificial Sequence
  source: /note="Description of Artificial Sequence: Synthetic oligonucleotide"
agtgtgagtaagccttttttg

SEQ ID NO: 1281 - DNA, 21 bp, Artificial Sequence
  source: /note="Description of Artificial Sequence: Synthetic oligonucleotide"
tttacgttgacgacgcctaag

SEQ ID NO: 1282 - DNA, 21 bp, Artificial Sequence
  source: /note="Description of Artificial Sequence: Synthetic oligonucleotide"
atgaatgctacgaagaatgtg

SEQ ID NO: 1283 - DNA, 21 bp, Artificial Sequence
  source: /note="Description of Artificial Sequence: Synthetic oligonucleotide"
cagtcgtcgcagacgcctagg

SEQ ID NO: 1284 - DNA, 21 bp, Artificial Sequence
  source: /note="Description of Artificial Sequence: Synthetic oligonucleotide"
attctggggactggtacttcg

SEQ ID NO: 1285 - DNA, 21 bp, Artificial Sequence
  source: /note="Description of Artificial Sequence: Synthetic oligonucleotide"
acgcggactaatcctgaggct

SEQ ID NO: 1286 - DNA, 21 bp, Artificial Sequence
  source: /note="Description of Artificial Sequence: Synthetic oligonucleotide"
aatggggggactagtagttct

SEQ ID NO: 1287 - DNA, 21 bp, Artificial Sequence
  source: /note="Description of Artificial Sequence: Synthetic oligonucleotide"
tatactttgtcgcagggttgg

SEQ ID NO: 1288 - protein, 11 aa, Artificial Sequence
  source: /note="Description of Artificial Sequence: Synthetic peptide"
AQTLAVPFKAQ

SEQ ID NO: 1289 - protein, 11 aa, Artificial Sequence
  source: /note="Description of Artificial Sequence: Synthetic peptide"
AQSVSKPFLAQ

SEQ ID NO: 1290 - protein, 11 aa, Artificial Sequence
  source: /note="Description of Artificial Sequence: Synthetic peptide"
AQFTLTTPKAQ

SEQ ID NO: 1291 - protein, 11 aa, Artificial Sequence
  source: /note="Description of Artificial Sequence: Synthetic peptide"
DGTLAVPFKAQ

SEQ ID NO: 1292 - protein, 11 aa, Artificial Sequence
  source: /note="Description of Artificial Sequence: Synthetic peptide"
ESTLAVPFKAQ

SEQ ID NO: 1293 - protein, 11 aa, Artificial Sequence
  source: /note="Description of Artificial Sequence: Synthetic peptide"
GGTLAVPFKAQ

SEQ ID NO: 1294 - protein, 11 aa, Artificial Sequence
  source: /note="Description of Artificial Sequence: Synthetic peptide"
AQTLATPFKAQ

SEQ ID NO: 1295 - protein, 11 aa, Artificial Sequence
  source: /note="Description of Artificial Sequence: Synthetic peptide"
ATTLATPFKAQ

SEQ ID NO: 1296 - protein, 11 aa, Artificial Sequence
  source: /note="Description of Artificial Sequence: Synthetic peptide"
DGTLATPFKAQ

SEQ ID NO: 1297 - protein, 11 aa, Artificial Sequence
  source: /note="Description of Artificial Sequence: Synthetic peptide"
GGTLATPFKAQ

SEQ ID NO: 1298 - protein, 11 aa, Artificial Sequence
  source: /note="Description of Artificial Sequence: Synthetic peptide"
SGSLAVPFKAQ

SEQ ID NO: 1299 - protein, 11 aa, Artificial Sequence
  source: /note="Description of Artificial Sequence: Synthetic peptide"
AQTLAQPFKAQ

SEQ ID NO: 1300 - protein, 11 aa, Artificial Sequence
  source: /note="Description of Artificial Sequence: Synthetic peptide"
AQTLQQPFKAQ

SEQ ID NO: 1301 - protein, 11 aa, Artificial Sequence
  source: /note="Description of Artificial Sequence: Synthetic peptide"
AQTLSNPFKAQ

SEQ ID NO: 1302 - protein, 11 aa, Artificial Sequence
  source: /note="Description of Artificial Sequence: Synthetic peptide"
AQTLAVPFSNP

SEQ ID NO: 1303 - protein, 11 aa, Artificial Sequence
  source: /note="Description of Artificial Sequence: Synthetic peptide"
QGTLAVPFKAQ

SEQ ID NO: 1304 - protein, 11 aa, Artificial Sequence
  source: /note="Description of Artificial Sequence: Synthetic peptide"
NQTLAVPFKAQ

SEQ ID NO: 1305 - protein, 11 aa, Artificial Sequence
  source: /note="Description of Artificial Sequence: Synthetic peptide"
EGSLAVPFKAQ

SEQ ID NO: 1306 - protein, 11 aa, Artificial Sequence
  source: /note="Description of Artificial Sequence: Synthetic peptide"
SGNLAVPFKAQ

SEQ ID NO: 1307 - protein, 11 aa, Artificial Sequence
  source: /note="Description of Artificial Sequence: Synthetic peptide"
EGTLAVPFKAQ

SEQ ID NO: 1308 - protein, 11 aa, Artificial Sequence
  source: /note="Description of Artificial Sequence: Synthetic peptide"
DSTLAVPFKAQ

SEQ ID NO: 1309 - protein, 11 aa, Artificial Sequence
  source: /note="Description of Artificial Sequence: Synthetic peptide"
AVTLAVPFKAQ

SEQ ID NO: 1310 - protein, 11 aa, Artificial Sequence
  source: /note="Description of Artificial Sequence: Synthetic peptide"
AQTLSTPFKAQ

SEQ ID NO: 1311 - protein, 11 aa, Artificial Sequence
  source: /note="Description of Artificial Sequence: Synthetic peptide"
AQTLPQPFKAQ

SEQ ID NO: 1312 - protein, 11 aa, Artificial Sequence
  source: /note="Description of Artificial Sequence: Synthetic peptide"
AQTLSQPFKAQ

SEQ ID NO: 1313 - protein, 11 aa, Artificial Sequence
  source: /note="Description of Artificial Sequence: Synthetic peptide"
AQTLQLPFKAQ

SEQ ID NO: 1314 - protein, 11 aa, Artificial Sequence
  source: /note="Description of Artificial Sequence: Synthetic peptide"
AQTLTMPFKAQ

SEQ ID NO: 1315 - protein, 11 aa, Artificial Sequence
  source: /note="Description of Artificial Sequence: Synthetic peptide"
AQTLTTPFKAQ

SEQ ID NO: 1316 - protein, 11 aa, Artificial Sequence
  source: /note="Description of Artificial Sequence: Synthetic peptide"
AQYTLSQGWAQ

SEQ ID NO: 1317 - protein, 11 aa, Artificial Sequence
  source: /note="Description of Artificial Sequence: Synthetic peptide"
AQMNATKNVAQ

SEQ ID NO: 1318 - protein, 11 aa, Artificial Sequence
  source: /note="Description of Artificial Sequence: Synthetic peptide"
AQVSGGHHSAQ

SEQ ID NO: 1319 - protein, 11 aa, Artificial Sequence
  source: /note="Description of Artificial Sequence: Synthetic peptide"
AQTLTAPFKAQ

SEQ ID NO: 1320 - protein, 11 aa, Artificial Sequence
  source: /note="Description of Artificial Sequence: Synthetic peptide"
AQTLSKPFKAQ

SEQ ID NO: 1321 - protein, 7 aa, Artificial Sequence
  source: /note="Description of Artificial Sequence: Synthetic peptide"
QAVRTSL

SEQ ID NO: 1322 - protein, 7 aa, Artificial Sequence
  source: /note="Description of Artificial Sequence: Synthetic peptide"
LAKERLS

SEQ ID NO: 1323 - protein, 7 aa, Artificial Sequence
  source: /note="Description of Artificial Sequence: Synthetic peptide"
MNSTKNV

SEQ ID NO: 1324 - protein, 7 aa, Artificial Sequence
  source: /note="Description of Artificial Sequence: Synthetic peptide"
VSGGHHS

SEQ ID NO: 1325 - protein, 14 aa, Artificial Sequence
  source: /note="Description of Artificial Sequence: Synthetic peptide"
SAQTLAVPFKAQAQ

SEQ ID NO: 1326 - protein, 14 aa, Artificial Sequence
  source: /note="Description of Artificial Sequence: Synthetic peptide"
  MOD_RES (2)..(4): Any amino acid
SXXXLAVPFKAQAQ

SEQ ID NO: 1327 - protein, 14 aa, Artificial Sequence
  source: /note="Description of Artificial Sequence: Synthetic peptide"
  MOD_RES (4)..(6): Any amino acid
SAQXXXVPFKAQAQ

SEQ ID NO: 1328 - protein, 14 aa, Artificial Sequence
  source: /note="Description of Artificial Sequence: Synthetic peptide"
  MOD_RES (6)..(8): Any amino acid
SAQTLXXXFKAQAQ

SEQ ID NO: 1329 - protein, 14 aa, Artificial Sequence
  source: /note="Description of Artificial Sequence: Synthetic peptide"
  MOD_RES (8)..(10): Any amino acid
SAQTLAVXXXAQAQ

SEQ ID NO: 1330 - protein, 14 aa, Artificial Sequence
  source: /note="Description of Artificial Sequence: Synthetic peptide"
  MOD_RES (10)..(12): Any amino acid
SAQTLAVPFXXXAQ

SEQ ID NO: 1331 - protein, 7 aa, Artificial Sequence
  source: /note="Description of Artificial Sequence: Synthetic peptide"
TNHQSAQ

SEQ ID NO: 1332 - protein, 7 aa, Artificial Sequence
  source: /note="Description of Artificial Sequence: Synthetic peptide"
AQAQTGW

SEQ ID NO: 1333 - protein, 9 aa, Artificial Sequence
  source: /note="Description of Artificial Sequence: Synthetic peptide"
DGTLATPFK

SEQ ID NO: 1334 - protein, 11 aa, Artificial Sequence
  source: /note="Description of Artificial Sequence: Synthetic peptide"
  MOD_RES (10)..(11): Any amino acid
DGTLATPFKXX

SEQ ID NO: 1335 - protein, 8 aa, Artificial Sequence
  source: /note="Description of Artificial Sequence: Synthetic peptide"
LAVPFKAQ

SEQ ID NO: 1336 - protein, 6 aa, Artificial Sequence
  source: /note="Description of Artificial Sequence: Synthetic peptide"
VPFKAQ

SEQ ID NO: 1337 - protein, 4 aa, Artificial Sequence
  source: /note="Description of Artificial Sequence: Synthetic peptide"
FKAQ

SEQ ID NO: 1338 - protein, 6 aa, Artificial Sequence
  source: /note="Description of Artificial Sequence: Synthetic peptide"
AQTLAV

SEQ ID NO: 1339 - protein, 8 aa, Artificial Sequence
  source: /note="Description of Artificial Sequence: Synthetic peptide"
AQTLAVPF

SEQ ID NO: 1340 - protein, 4 aa, Artificial Sequence
  source: /note="Description of Artificial Sequence: Synthetic peptide"
QAVR

SEQ ID NO: 1341 - protein, 4 aa, Artificial Sequence
  source: /note="Description of Artificial Sequence: Synthetic peptide"
AVRT

SEQ ID NO: 1342 - protein, 4 aa, Artificial Sequence
  source: /note="Description of Artificial Sequence: Synthetic peptide"
VRTS

SEQ ID NO: 1343 - protein, 4 aa, Artificial Sequence
  source: /note="Description of Artificial Sequence: Synthetic peptide"
RTSL

SEQ ID NO: 1344 - protein, 5 aa, Artificial Sequence
  source: /note="Description of Artificial Sequence: Synthetic peptide"
QAVRT

SEQ ID NO: 1345 - protein, 5 aa, Artificial Sequence
  source: /note="Description of Artificial Sequence: Synthetic peptide"
AVRTS

SEQ ID NO: 1346 - protein, 5 aa, Artificial Sequence
  source: /note="Description of Artificial Sequence: Synthetic peptide"
VRTSL

SEQ ID NO: 1347 - protein, 6 aa, Artificial Sequence
  source: /note="Description of Artificial Sequence: Synthetic peptide"
QAVRTS

SEQ ID NO: 1348 - protein, 6 aa, Artificial Sequence
  source: /note="Description of Artificial Sequence: Synthetic peptide"
AVRTSL

SEQ ID NO: 1349 - DNA, 33 bp, Artificial Sequence
  source: /note="Description of Artificial Sequence: Synthetic oligonucleotide"
gatgggactttggcggtgccttttaaggcacag

SEQ ID NO: 1350 - DNA, 33 bp, Artificial Sequence
  source: /note="Description of Artificial Sequence: Synthetic oligonucleotide"
gatgggacgttggcggtgccttttaaggcacag

SEQ ID NO: 1351 - DNA, 21 bp, Artificial Sequence
  source: /note="Description of Artificial Sequence: Synthetic oligonucleotide"
caggcggttaggacgtctttg

SEQ ID NO: 1352 - DNA, 27 bp, Artificial Sequence
  source: /note="Description of Artificial Sequence: Synthetic oligonucleotide"
caggtcttcacggactcagactatcag

SEQ ID NO: 1353 - DNA, 32 bp, Artificial Sequence
  source: /note="Description of Artificial Sequence: Synthetic oligonucleotide"
caagtaaaacctctacaaatgtggtaaaatcg

SEQ ID NO: 1354 - DNA, 36 bp, Artificial Sequence
  source: /note="Description of Artificial Sequence: Synthetic oligonucleotide"
actcatcgaccaatacttgtactatctctctagaac

SEQ ID NO: 1355 - DNA, 26 bp, Artificial Sequence
  source: /note="Description of Artificial Sequence: Synthetic oligonucleotide"
ggaagtattccttggttttgaaccca

SEQ ID NO: 1356 - DNA, 23 bp, Artificial Sequence
  source: /note="Description of Artificial Sequence: Synthetic oligonucleotide"
ggtcgcggttcttgtttgtggat

SEQ ID NO: 1357 - DNA, 24 bp, Artificial Sequence
  source: /note="Description of Artificial Sequence: Synthetic oligonucleotide"
cgaccttgaagcgcatgaactcct

SEQ ID NO: 1358 - DNA, 83 bp, Artificial Sequence
  source: /note="Description of Artificial Sequence: Synthetic oligonucleotide"
  modified_base (42)..(43): a, c, g or t
  modified_base (45)..(46): a, c, g or t
  modified_base (48)..(49): a, c, g or t
  modified_base (51)..(52): a, c, g or t
  modified_base (54)..(55): a, c, g or t
  modified_base (57)..(58): a, c, g or t
  modified_base (60)..(61): a, c, g or t
gtattccttggttttgaacccaaccggtctgcgcctgtgcmnnmnnmnnmnnmnnmnnmnnttgggcactctggtggtttgtc

SEQ ID NO: 1359 - DNA, 64 bp, Artificial Sequence
  source: /note="Description of Artificial Sequence: Synthetic oligonucleotide"
  modified_base (36)..(37): a, c, g or t
  modified_base (39)..(40): a, c, g or t
  modified_base (42)..(43): a, c, g or t
gtattccttggttttgaacccaaccggtctgcgcmnnmnnmnnaaaaggcaccgccaaagtttg

SEQ ID NO: 1360 - DNA, 70 bp, Artificial Sequence
  source: /note="Description of Artificial Sequence: Synthetic oligonucleotide"
  modified_base (42)..(43): a, c, g or t
  modified_base (45)..(46): a, c, g or t
  modified_base (48)..(49): a, c, g or t
gtattccttggttttgaacccaaccggtctgcgcctgtgcmnnmnnmnncaccgccaaagtttgggcact

SEQ ID NO: 1361 - DNA, 77 bp, Artificial Sequence
  source: /note="Description of Artificial Sequence: Synthetic oligonucleotide"
  modified_base (48)..(49): a, c, g or t
  modified_base (51)..(52): a, c, g or t
  modified_base (54)..(55): a, c, g or t
gtattccttggttttgaacccaaccggtctgcgcctgtgccttaaamnnmnnmnncaaagtttgggcactctggtgg

SEQ ID NO: 1362 - DNA, 83 bp, Artificial Sequence
  source: /note="Description of Artificial Sequence: Synthetic oligonucleotide"
  modified_base (54)..(55): a, c, g or t
  modified_base (57)..(58): a, c, g or t
  modified_base (60)..(61): a, c, g or t
gtattccttggttttgaacccaaccggtctgcgcctgtgccttaaaaggcacmnnmnnmnnttgggcactctggtggtttgtg

SEQ ID NO: 1363 - DNA, 21 bp, Artificial Sequence
  source: /note="Description of Artificial Sequence: Synthetic oligonucleotide"
cttgcgaaggagcggctttcg

SEQ ID NO: 1364 - protein, 10 aa, Artificial Sequence
  source: /note="Description of Artificial Sequence: Synthetic peptide"
VNLTWSRASG

SEQ ID NO: 1365 - protein, 14 aa, Artificial Sequence
  source: /note="Description of Artificial Sequence: Synthetic peptide"
EFCINHRGYWVCGD

SEQ ID NO: 1366 - protein, 11 aa, Artificial Sequence
  source: /note="Description of Artificial Sequence: Synthetic peptide"
EDGQVMDVDLS

SEQ ID NO: 1367 - protein, 9 aa, Artificial Sequence
  source: /note="Description of Artificial Sequence: Synthetic peptide"
EKQRNGTLT

SEQ ID NO: 1368 - protein, 17 aa, Artificial Sequence
  source: /note="Description of Artificial Sequence: Synthetic peptide"
TYQCRVTHPHLPRALMR

SEQ ID NO: 1369 - protein, 14 aa, Artificial Sequence
  source: /note="Description of Artificial Sequence: Synthetic peptide"
RHSTTQPRKTKGSG

SEQ ID NO: 1370 - protein, 13 aa, Artificial Sequence
  source: /note="Description of Artificial Sequence: Synthetic peptide"
DSNPRGVSAYLSR

SEQ ID NO: 1371 - protein, 12 aa, Artificial Sequence
  source: /note="Description of Artificial Sequence: Synthetic peptide"
TITCLWDLAPSK

SEQ ID NO: 1372 - protein, 10 aa, Artificial Sequence
  source: /note="Description of Artificial Sequence: Synthetic peptide"
KTKGSGFFVF

SEQ ID NO: 1373 - protein, 12 aa, Artificial Sequence
  source: /note="Description of Artificial Sequence: Synthetic peptide"
THPHLPRALMRS

SEQ ID NO: 1374 - protein, 23 aa, Artificial Sequence
  source: /note="Description of Artificial Sequence: Synthetic peptide"
GETYQCRVTHPHLPRALMRSTTK

SEQ ID NO: 1375 - protein, 8 aa, Artificial Sequence
  source: /note="Description of Artificial Sequence: Synthetic peptide"
LPRALMRS

SEQ ID NO: 1376 - protein, 8 aa, Artificial Sequence
  source: /note="Description of Artificial Sequence: Synthetic peptide"
INHRGYWV

SEQ ID NO: 1377 - protein, 12 aa, Artificial Sequence
  source: /note="Description of Artificial Sequence: Synthetic peptide"
CDAGSVRTNAPD

SEQ ID NO: 1378 - protein, 17 aa, Artificial Sequence
  source: /note="Description of Artificial Sequence: Synthetic peptide"
AKAVSNLTESRSESLQS

SEQ ID NO: 1379 - protein, 13 aa, Artificial Sequence
  source: /note="Description of Artificial Sequence: Synthetic peptide"
SLTGDEFKKVLET

SEQ ID NO: 1380 - protein, 11 aa, Artificial Sequence
  source: /note="Description of Artificial Sequence: Synthetic peptide"
REAVAYRFEED

SEQ ID NO: 1381 - protein, 10 aa, Artificial Sequence
  source: /note="Description of Artificial Sequence: Synthetic peptide"
INPEIITLDG

SEQ ID NO: 1382 - protein, 15 aa, Artificial Sequence
  source: /note="Description of Artificial Sequence: Synthetic peptide"
DISVTGAPVITATYL

SEQ ID NO: 1383 - protein, 12 aa, Artificial Sequence
  source: /note="Description of Artificial Sequence: Synthetic peptide"
DISVTGAPVITA

SEQ ID NO: 1384 - protein, 17 aa, Artificial Sequence
  source: /note="Description of Artificial Sequence: Synthetic peptide"
PKTVSNLTESSSESVQS

SEQ ID NO: 1385 - protein, 13 aa, Artificial Sequence
  source: /note="Description of Artificial Sequence: Synthetic peptide"
SLMGDEFKAVLET

SEQ ID NO: 1386 - protein, 11 aa, Artificial Sequence
  source: /note="Description of Artificial Sequence: Synthetic peptide"
QHSVAYTFEED

SEQ ID NO: 1387 - protein, 10 aa, Artificial Sequence
  source: /note="Description of Artificial Sequence: Synthetic peptide"
INPEIITRDG

SEQ ID NO: 1388 - protein, 15 aa, Artificial Sequence
  source: /note="Description of Artificial Sequence: Synthetic peptide"
DISLTGDPVITASYL

SEQ ID NO: 1389 - protein, 12 aa, Artificial Sequence
  source: /note="Description of Artificial Sequence: Synthetic peptide"
DISLTGDPVITA

SEQ ID NO: 1390 - protein, 11 aa, Artificial Sequence
  source: /note="Description of Artificial Sequence: Synthetic peptide"
DQSIDFEIDSA

SEQ ID NO: 1391 - protein, 20 aa, Artificial Sequence
  source: /note="Description of Artificial Sequence: Synthetic peptide"
KNVSEDLPLPTFSPTLLGDS

SEQ ID NO: 1392 - protein, 11 aa, Artificial Sequence
  source: /note="Description of Artificial Sequence: Synthetic peptide"
KNVSEDLPLPT

SEQ ID NO: 1393 - protein, 12 aa, Artificial Sequence
  source: /note="Description of Artificial Sequence: Synthetic peptide"
CDSGRVRTDAPD

SEQ ID NO: 1394 - protein, 14 aa, Artificial Sequence
  source: /note="Description of Artificial Sequence: Synthetic peptide"
FPEHLLVDFLQSLS

SEQ ID NO: 1395 - protein, 9 aa, Artificial Sequence
  source: /note="Description of Artificial Sequence: Synthetic peptide"
DAEFRHDSG

SEQ ID NO: 1396 - protein, 16 aa, Artificial Sequence
  source: /note="Description of Artificial Sequence: Synthetic peptide"
HYAAAQWDFGNTMCQL

SEQ ID NO: 1397 - protein, 13 aa, Artificial Sequence
  source: /note="Description of Artificial Sequence: Synthetic peptide"
YAAQWDFGNTMCQ

SEQ ID NO: 1398 - protein, 10 aa, Artificial Sequence
  source: /note="Description of Artificial Sequence: Synthetic peptide"
RSQKEGLHYT

SEQ ID NO: 1399 - protein, 19 aa, Artificial Sequence
  source: /note="Description of Artificial Sequence: Synthetic peptide"
SSRTPSDKPVAHWANPQAE

SEQ ID NO: 1400 - protein, 15 aa, Artificial Sequence
  source: /note="Description of Artificial Sequence: Synthetic peptide"
SRTPSDKPVAHWANP

SEQ ID NO: 1401 - protein, 9 aa, Artificial Sequence
  source: /note="Description of Artificial Sequence: Synthetic peptide"
SSRTPSDKP

SEQ ID NO: 1402 - protein, 14 aa, Artificial Sequence
  source: /note="Description of Artificial Sequence: Synthetic peptide"
NADGNVDYHMNSVP

SEQ ID NO: 1403 - protein, 11 aa, Artificial Sequence
  source: /note="Description of Artificial Sequence: Synthetic peptide"
DGNVDYHMNSV

SEQ ID NO: 1404 - protein, 16 aa, Artificial Sequence
  source: /note="Description of Artificial Sequence: Synthetic peptide"
RSFKEFLQSSLRALRQ

SEQ ID NO: 1405 - protein, 11 aa, Artificial Sequence
  source: /note="Description of Artificial Sequence: Synthetic peptide"
FKEFLQSSLRA

SEQ ID NO: 1406 - protein, 10 aa, Artificial Sequence
  source: /note="Description of Artificial Sequence: Synthetic peptide"
QMWAPQWGPD

SEQ ID NO: 1407 - protein, 6 aa, Artificial Sequence
  source: /note="Description of Artificial Sequence: Synthetic peptide"
RGNRQA

SEQ ID NO: 1408 - protein, 6 aa, Artificial Sequence
  source: /note="Description of Artificial Sequence: Synthetic peptide"
SSSTDP

SEQ ID NO: 1409 - protein, 6 aa, Artificial Sequence
  source: /note="Description of Artificial Sequence: Synthetic peptide"
SSNTAP

SEQ ID NO: 1410 - protein, 6 aa, Artificial Sequence
  source: /note="Description of Artificial Sequence: Synthetic peptide"
SNSNLP

SEQ ID NO: 1411 - protein, 6 aa, Artificial Sequence
  source: /note="Description of Artificial Sequence: Synthetic peptide"
SSTTAP

SEQ ID NO: 1412 - protein, 6 aa, Artificial Sequence
  source: /note="Description of Artificial Sequence: Synthetic peptide"
AANTAA

SEQ ID NO: 1413 - protein, 6 aa, Artificial Sequence
  source: /note="Description of Artificial Sequence: Synthetic peptide"
QQNTAP

SEQ ID NO: 1414 - protein, 6 aa, Artificial Sequence
  source: /note="Description of Artificial Sequence: Synthetic peptide"
SAQAQA

SEQ ID NO: 1415 - protein, 6 aa, Artificial Sequence
  source: /note="Description of Artificial Sequence: Synthetic peptide"
QANTGP

SEQ ID NO: 1416 - protein, 6 aa, Artificial Sequence
  source: /note="Description of Artificial Sequence: Synthetic peptide"
NATTAP

SEQ ID NO: 1417 - protein, 6 aa, Artificial Sequence
  source: /note="Description of Artificial Sequence: Synthetic peptide"
SSTAGP

SEQ ID NO: 1418 - protein, 6 aa, Artificial Sequence
  source: /note="Description of Artificial Sequence: Synthetic peptide"
QQNTAA

SEQ ID NO: 1419 - protein, 6 aa, Artificial Sequence
  source: /note="Description of Artificial Sequence: Synthetic peptide"
PSTAGP

SEQ ID NO: 1420 - protein, 6 aa, Artificial Sequence
  source: /note="Description of Artificial Sequence: Synthetic peptide"
NQNTAP

SEQ ID NO: 1421 - protein, 6 aa, Artificial Sequence
  source: /note="Description of Artificial Sequence: Synthetic peptide"
QAANAP

SEQ ID NO: 1422 - protein, 6 aa, Artificial Sequence
  source: /note="Description of Artificial Sequence: Synthetic peptide"
SIVGLP

SEQ ID NO: 1423 - protein, 6 aa, Artificial Sequence
  source: /note="Description of Artificial Sequence: Synthetic peptide"
AASTAA

SEQ ID NO: 1424 - protein, 6 aa, Artificial Sequence
  source: /note="Description of Artificial Sequence: Synthetic peptide"
SQNTTA

SEQ ID NO: 1425 - protein, 6 aa, Artificial Sequence
  source: /note="Description of Artificial Sequence: Synthetic peptide"
QQDTAP

SEQ ID NO: 1426 - protein, 6 aa, Artificial Sequence
  source: /note="Description of Artificial Sequence: Synthetic peptide"
QTNTGP

SEQ ID NO: 1427 - protein, 6 aa, Artificial Sequence
  source: /note="Description of Artificial Sequence: Synthetic peptide"
QTNGAP

SEQ ID NO: 1428 - protein, 6 aa, Artificial Sequence
  source: /note="Description of Artificial Sequence: Synthetic peptide"
QQNAAP

SEQ ID NO: 1429 - protein, 6 aa, Artificial Sequence
  source: /note="Description of Artificial Sequence: Synthetic peptide"
AANTQA

SEQ ID NO: 1430 - protein, 6 aa, Artificial Sequence
  source: /note="Description of Artificial Sequence: Synthetic peptide"
NGRAHA

SEQ ID NO: 1431 - protein, 7 aa, Artificial Sequence
  source: /note="Description of Artificial Sequence: Synthetic peptide"
QPEHSST

SEQ ID NO: 1432 - protein, 7 aa, Artificial Sequence
  source: /note="Description of Artificial Sequence: Synthetic peptide"
VNTANST

SEQ ID NO: 1433 - protein, 7 aa, Artificial Sequence
  source: /note="Description of Artificial Sequence: Synthetic peptide"
HGPMQKS

SEQ ID NO: 1434 - protein, 7 aa, Artificial Sequence
  source: /note="Description of Artificial Sequence: Synthetic peptide"
PHKPPLA

SEQ ID NO: 1435 - protein, 7 aa, Artificial Sequence
  source: /note="Description of Artificial Sequence: Synthetic peptide"
IKNNEMW

SEQ ID NO: 1436 - protein, 7 aa, Artificial Sequence
  source: /note="Description of Artificial Sequence: Synthetic peptide"
RNLDTPM

SEQ ID NO: 1437 - protein, 7 aa, Artificial Sequence
  source: /note="Description of Artificial Sequence: Synthetic peptide"
VDSHRQS

SEQ ID NO: 1438 - protein, 7 aa, Artificial Sequence
  source: /note="Description of Artificial Sequence: Synthetic peptide"
YDSKTKT

SEQ ID NO: 1439 - protein, 7 aa, Artificial Sequence
  source: /note="Description of Artificial Sequence: Synthetic peptide"
SQLPHQK

SEQ ID NO: 1440 - protein, 7 aa, Artificial Sequence
  source: /note="Description of Artificial Sequence: Synthetic peptide"
STMQQNT

SEQ ID NO: 1441 - protein, 7 aa, Artificial Sequence
  source: /note="Description of Artificial Sequence: Synthetic peptide"
TERYMTQ

SEQ ID NO: 1442 - protein, 7 aa, Artificial Sequence
  source: /note="Description of Artificial Sequence: Synthetic peptide"
DASLSTS

SEQ ID NO: 1443 - protein, 7 aa, Artificial Sequence
  source: /note="Description of Artificial Sequence: Synthetic peptide"
DLPNKKT

SEQ ID NO: 1444 - protein, 7 aa, Artificial Sequence
  source: /note="Description of Artificial Sequence: Synthetic peptide"
DLTAARL

SEQ ID NO: 1445 - protein, 7 aa, Artificial Sequence
  source: /note="Description of Artificial Sequence: Synthetic peptide"
EPHQFNY

SEQ ID NO: 1446 - protein, 7 aa, Artificial Sequence
  source: /note="Description of Artificial Sequence: Synthetic peptide"
EPQSNHT

SEQ ID NO: 1447 - protein, 7 aa, Artificial Sequence
  source: /note="Description of Artificial Sequence: Synthetic peptide"
MSSWPSQ

SEQ ID NO: 1448 - protein, 7 aa, Artificial Sequence
  source: /note="Description of Artificial Sequence: Synthetic peptide"
NPKHNAT

SEQ ID NO: 1449 - protein, 7 aa, Artificial Sequence
  source: /note="Description of Artificial Sequence: Synthetic peptide"
PDGMRTT

SEQ ID NO: 1450 - protein, 7 aa, Artificial Sequence
  source: /note="Description of Artificial Sequence: Synthetic peptide"
PNNNKTT

SEQ ID NO: 1451 - protein, 7 aa, Artificial Sequence
  source: /note="Description of Artificial Sequence: Synthetic peptide"
QSTTHDS

SEQ ID NO: 1452 - protein, 7 aa, Artificial Sequence
  source: /note="Description of Artificial Sequence: Synthetic peptide"
TGSKQKQ

SEQ ID NO: 1453 - protein, 7 aa, Artificial Sequence
  source: /note="Description of Artificial Sequence: Synthetic peptide"
SLKHQAL

SEQ ID NO: 1454 - protein, 7 aa, Artificial Sequence
  source: /note="Description of Artificial Sequence: Synthetic peptide"
SPIDGEQ

SEQ ID NO: 1455 - protein, 8 aa, Artificial Sequence
  source: /note="Description of Artificial Sequence: Synthetic peptide"
WIFPWIQL

SEQ ID NO: 1456 - protein, 9 aa, Artificial Sequence
  source: /note="Description of Artificial Sequence: Synthetic peptide"
CDCRGDCFC

SEQ ID NO: 1457 - protein, 5 aa, Artificial Sequence
  source: /note="Description of Artificial Sequence: Synthetic peptide"
CNGRC

SEQ ID NO: 1458 - protein, 7 aa, Artificial Sequence
  source: /note="Description of Artificial Sequence: Synthetic peptide"
CPRECES

SEQ ID NO: 1459 - protein, 10 aa, Artificial Sequence
  source: /note="Description of Artificial Sequence: Synthetic peptide"
CTTHWGFTLC

SEQ ID NO: 1460 - protein, 9 aa, Artificial Sequence
  source: /note="Description of Artificial Sequence: Synthetic peptide"
CGRRAGGSC

SEQ ID NO: 1461 - protein, 9 aa, Artificial Sequence
  source: /note="Description of Artificial Sequence: Synthetic peptide"
CKGGRAKDC

SEQ ID NO: 1462 - protein, 9 aa, Artificial Sequence
  source: /note="Description of Artificial Sequence: Synthetic peptide"
CVPELGHEC

SEQ ID NO: 1463 - protein, 9 aa, Artificial Sequence
  source: /note="Description of Artificial Sequence: Synthetic peptide"
CRRETAWAK

SEQ ID NO: 1464 - protein, 14 aa, Artificial Sequence
  source: /note="Description of Artificial Sequence: Synthetic peptide"
VSWFSHRYSPFAVS

SEQ ID NO: 1465 - protein, 13 aa, Artificial Sequence
  source: /note="Description of Artificial Sequence: Synthetic peptide"
GYRDGYAGPILYN

SEQ ID NO: 1466 - protein, 7 aa, Artificial Sequence
  source: /note="Description of Artificial Sequence: Synthetic peptide"
  MOD_RES (1)..(3): Any amino acid
  MOD_RES (5)..(7): Any amino acid
XXXYXXX

SEQ ID NO: 1467 - protein, 4 aa, Artificial Sequence
  source: /note="Description of Artificial Sequence: Synthetic peptide"
  VARIANT (2)..(2): /replace="Met"
  SITE (1)..(4): /note="Variant residues given in the sequence have no preference with respect to those in the annotations for variant positions"
YENW

SEQ ID NO: 1468 - protein, 7 aa, Artificial Sequence
  source: /note="Description of Artificial Sequence: Synthetic peptide"
RPLPPLP

SEQ ID NO: 1469 - protein, 7 aa, Artificial Sequence
  source: /note="Description of Artificial Sequence: Synthetic peptide"
APPLPPR

SEQ ID NO: 1470 - protein, 12 aa, Artificial Sequence
  source: /note="Description of Artificial Sequence: Synthetic peptide"
DVFYPYPYASGS

SEQ ID NO: 1471 - protein, 6 aa, Artificial Sequence
  source: /note="Description of Artificial Sequence: Synthetic peptide"
MYWYPY

SEQ ID NO: 1472 - protein, 12 aa, Artificial Sequence
  source: /note="Description of Artificial Sequence: Synthetic peptide"
DITWDQLWDLMK

SEQ ID NO: 1473 - protein, 8 aa, Artificial Sequence
  source: /note="Description of Artificial Sequence: Synthetic peptide"
  VARIANT (5)..(5): /replace="Leu"
  SITE (1)..(8): /note="Variant residues given in the sequence have no preference with respect to those in the annotations for variant positions"
CWDDGWLC

SEQ ID NO: 1474 - protein, 14 aa, Artificial Sequence
  source: /note="Description of Artificial Sequence: Synthetic peptide"
EWCEYLGGYLRCYA

SEQ ID NO: 1475 - protein, 14 aa, Artificial Sequence
  source: /note="Description of Artificial Sequence: Synthetic peptide"
  MOD_RES (2)..(2): Any amino acid
  MOD_RES (4)..(5): Any amino acid
  MOD_RES (8)..(8): Any amino acid
  MOD_RES (11)..(11): Any amino acid
  MOD_RES (13)..(13): Any amino acid
YXCXXGPXTWXCXP

SEQ ID NO: 1476 - protein, 14 aa, Artificial Sequence
  source: /note="Description of Artificial Sequence: Synthetic peptide"
IEGPTLRQWLAARA

SEQ ID NO: 1477 - protein, 5 aa, Artificial Sequence
  source: /note="Description of Artificial Sequence: Synthetic peptide"
  MOD_RES (3)..(4): Any amino acid
  VARIANT (5)..(5): /replace="Trp" or "Phe" or "His"
  SITE (1)..(5): /note="Variant residues given in the sequence have no preference with respect to those in the annotations for variant positions"
LWXXY

SEQ ID NO: 1478 - protein, 7 aa, Artificial Sequence
  source: /note="Description of Artificial Sequence: Synthetic peptide"
  MOD_RES (1)..(1): Any amino acid
  MOD_RES (3)..(4): Any amino acid
XFXXYLW

SEQ ID NO: 1479 - protein, 13 aa, Artificial Sequence
  source: /note="Description of Artificial Sequence: Synthetic peptide"
SSIISHFRWGLCD

SEQ ID NO: 1480 - protein, 13 aa, Artificial Sequence
  source: /note="Description of Artificial Sequence: Synthetic peptide"
MSRPACPPNDKYE

SEQ ID NO: 1481 - protein, 8 aa, Artificial Sequence
  source: /note="Description of Artificial Sequence: Synthetic peptide"
CLRSGRGC

SEQ ID NO: 1482 - protein, 9 aa, Artificial Sequence
  source: /note="Description of Artificial Sequence: Synthetic peptide"
CHWMFSPWC

SEQ ID NO: 1483 - protein, 4 aa, Artificial Sequence
  source: /note="Description of Artificial Sequence: Synthetic peptide"
  MOD_RES (2)..(3): Any amino acid
WXXF

SEQ ID NO: 1484 - protein, 8 aa, Artificial Sequence
  source: /note="Description of Artificial Sequence: Synthetic peptide"
CSSRLDAC

SEQ ID NO: 1485 - protein, 7 aa, Artificial Sequence
  source: /note="Description of Artificial Sequence: Synthetic peptide"
CLPVASC

SEQ ID NO: 1486 - protein, 13 aa, Artificial Sequence
  source: /note="Description of Artificial Sequence: Synthetic peptide"
CGFECVRQCPERC

SEQ ID NO: 1487 - protein, 13 aa, Artificial Sequence
  source: /note="Description of Artificial Sequence: Synthetic peptide"
CVALCREACGEGC

SEQ ID NO: 1488 - protein, 9 aa, Artificial Sequence
  source: /note="Description of Artificial Sequence: Synthetic peptide"
SWCEPGWCR

SEQ ID NO: 1489 - protein, 7 aa, Artificial Sequence
  source: /note="Description of Artificial Sequence: Synthetic peptide"
YSGKWGW

SEQ ID NO: 1490 - protein, 7 aa, Artificial Sequence
  source: /note="Description of Artificial Sequence: Synthetic peptide"
GLSGGRS

SEQ ID NO: 1491 - protein, 7 aa, Artificial Sequence
  source: /note="Description of Artificial Sequence: Synthetic peptide"
LMLPRAD

SEQ ID NO: 1492 - protein, 9 aa, Artificial Sequence
  source: /note="Description of Artificial Sequence: Synthetic peptide"
CSCFRDVCC

SEQ ID NO: 1493 - protein, 9 aa, Artificial Sequence
  source: /note="Description of Artificial Sequence: Synthetic peptide"
CRDVVSVIC

SEQ ID NO: 1494 - protein, 6 aa, Artificial Sequence
  source: /note="Description of Artificial Sequence: Synthetic peptide"
MARSGL

SEQ ID NO: 1495 - protein, 6 aa, Artificial Sequence
  source: /note="Description of Artificial Sequence: Synthetic peptide"
MARAKE

SEQ ID NO: 1496 - protein, 6 aa, Artificial Sequence
  source: /note="Description of Artificial Sequence: Synthetic peptide"
MSRTMS

SEQ ID NO: 1497 - protein, 6 aa, Artificial Sequence
  source: /note="Description of Artificial Sequence: Synthetic peptide"
KCCYSL

SEQ ID NO: 1498 - protein, 14 aa, Artificial Sequence
  source: /note="Description of Artificial Sequence: Synthetic peptide"
MYWGDSHWLQYWYE

SEQ ID NO: 1499 - protein, 7 aa, Artificial Sequence
  source: /note="Description of Artificial Sequence: Synthetic peptide"
MQLPLAT

SEQ ID NO: 1500 - protein, 4 aa, Artificial Sequence
  source: /note="Description of Artificial Sequence: Synthetic peptide"
EWLS

SEQ ID NO: 1501 - protein, 4 aa, Artificial Sequence
  source: /note="Description of Artificial Sequence: Synthetic peptide"
SNEW

SEQ ID NO: 1502 - protein, 4 aa, Artificial Sequence
  source: /note="Description of Artificial Sequence: Synthetic peptide"
TNYL

SEQ ID NO: 1503 - protein, 12 aa, Artificial Sequence
  source: /note="Description of Artificial Sequence: Synthetic peptide"
WDLAWMFRLPVG

SEQ ID NO: 1504 - protein, 13 aa, Artificial Sequence
  source: /note="Description of Artificial Sequence: Synthetic peptide"
CTVALPGGYVRVC

SEQ ID NO: 1505 - protein, 13 aa, Artificial Sequence
  source: /note="Description of Artificial Sequence: Synthetic peptide"
CVAYCIEHHCWTC

SEQ ID NO: 1506 - protein, 12 aa, Artificial Sequence
  source: /note="Description of Artificial Sequence: Synthetic peptide"
CVFAHNYDYLVC

SEQ ID NO: 1507 - protein, 10 aa, Artificial Sequence
  source: /note="Description of Artificial Sequence: Synthetic peptide"
CVFTSNYAFC

SEQ ID NO: 1508 - protein, 7 aa, Artificial Sequence
  source: /note="Description of Artificial Sequence: Synthetic peptide"
VHSPNKK

SEQ ID NO: 1509 - protein, 7 aa, Artificial Sequence
  source: /note="Description of Artificial Sequence: Synthetic peptide"
CRGDGWC

SEQ ID NO: 1510 - protein, 6 aa, Artificial Sequence
  source: /note="Description of Artificial Sequence: Synthetic peptide"
  MOD_RES (1)..(1): Any amino acid
  MOD_RES (6)..(6): Any amino acid
XRGCDX

SEQ ID NO: 1511 - protein, 4 aa, Artificial Sequence
  source: /note="Description of Artificial Sequence: Synthetic peptide"
  MOD_RES (2)..(3): Any amino acid
  VARIANT (4)..(4): /replace="Thr"
  SITE (1)..(4): /note="Variant residues given in the sequence have no preference with respect to those in the annotations for variant positions"
PXXS

SEQ ID NO: 1512 - protein, 11 aa, Artificial Sequence
  source: /note="Description of Artificial Sequence: Synthetic peptide"
SGKGPRQITAL

SEQ ID NO: 1513 - protein, 14 aa, Artificial Sequence
  source: /note="Description of Artificial Sequence: Synthetic peptide"
  VARIANT (10)..(10): /replace="Gln"
  VARIANT (11)..(11): /replace="Ala"
  VARIANT (12)..(12): /replace="Tyr"
  VARIANT (13)..(13): /replace="Val" or "Met" or "Arg"
  VARIANT (14)..(14): /replace="Lys"
  SITE (1)..(14): /note="Variant residues given in the sequence have no preference with respect to those in the annotations for variant positions"
AAAAAAAAAANLTR

SEQ ID NO: 1514 - protein, 6 aa, Artificial Sequence
  source: /note="Description of Artificial Sequence: Synthetic peptide"
VYMSPF

SEQ ID NO: 1515 - protein, 7 aa, Artificial Sequence
  source: /note="Description of Artificial Sequence: Synthetic peptide"
ATWLPPR

SEQ ID NO: 1516 - protein, 12 aa, Artificial Sequence
  source: /note="Description of Artificial Sequence: Synthetic peptide"
HTMYYHHYQHHL

SEQ ID NO: 1517 - protein, 19 aa, Artificial Sequence
  source: /note="Description of Artificial Sequence: Synthetic peptide"
SEVGCRAGPLQWLCEKYFG

SEQ ID NO: 1518 - protein, 18 aa, Artificial Sequence
  source: /note="Description of Artificial Sequence: Synthetic peptide"
CGLLPVGRPDRNVWRWLC

SEQ ID NO: 1519 - protein, 15 aa, Artificial Sequence
  source: /note="Description of Artificial Sequence: Synthetic peptide"
CKGQCDRFKGLPWEC

SEQ ID NO: 1520 - protein, 5 aa, Artificial Sequence
  source: /note="Description of Artificial Sequence: Synthetic peptide"
SGRSA

SEQ ID NO: 1521 - protein, 4 aa, Artificial Sequence
  source: /note="Description of Artificial Sequence: Synthetic peptide"
WGFP

SEQ ID NO: 1522 - protein, 17 aa, Artificial Sequence
  source: /note="Description of Artificial Sequence: Synthetic peptide"
AEPMPHSLNFSQYLWYT

SEQ ID NO: 1523 - protein, 6 aa, Artificial Sequence
  source: /note="Description of Artificial Sequence: Synthetic peptide"
  VARIANT (4)..(4): /replace="Phe"
  SITE (1)..(6): /note="Variant residues given in the sequence have no preference with respect to those in the annotations for variant positions"
WAYWSP

SEQ ID NO: 1524 - protein, 7 aa, Artificial Sequence
  source: /note="Description of Artificial Sequence: Synthetic peptide"
IELLQAR

SEQ ID NO: 1525 - protein, 16 aa, Artificial Sequence
  source: /note="Description of Artificial Sequence: Synthetic peptide"
AYTKCSRQWRTCMTTH

SEQ ID NO: 1526 - protein, 15 aa, Artificial Sequence
  source: /note="Description of Artificial Sequence: Synthetic peptide"
PQNSKIPGPTFLDPH

SEQ ID NO: 1527 - protein, 15 aa, Artificial Sequence
  source: /note="Description of Artificial Sequence: Synthetic peptide"
SMEPALPDWWWKMFK

SEQ ID NO: 1528 - protein, 16 aa, Artificial Sequence
  source: /note="Description of Artificial Sequence: Synthetic peptide"
ANTPCGPYTHDCPVKR

SEQ ID NO: 1529 - protein, 12 aa, Artificial Sequence
  source: /note="Description of Artificial Sequence: Synthetic peptide"
TACHQHVRMVRP

SEQ ID NO: 1530 - protein, 12 aa, Artificial Sequence
  source: /note="Description of Artificial Sequence: Synthetic peptide"
VPWMEPAYQRFL

SEQ ID NO: 1531 - protein, 8 aa, Artificial Sequence
  source: /note="Description of Artificial Sequence: Synthetic peptide"
DPRATPGS

SEQ ID NO: 1532 - protein, 12 aa, Artificial Sequence
  source: /note="Description of Artificial Sequence: Synthetic peptide"
FRPNRAQDYNTN

SEQ ID NO: 1533 - protein, 9 aa, Artificial Sequence
  source: /note="Description of Artificial Sequence: Synthetic peptide"
CTKNSYLMC

SEQ ID NO: 1534 - protein, 11 aa, Artificial Sequence
  source: /note="Description of Artificial Sequence: Synthetic peptide"
  VARIANT (2)..(2): /replace="Arg"
  VARIANT (3)..(3): /replace="Arg"
  VARIANT (5)..(5): /replace="Asn"
  MOD_RES (6)..(7): Any amino acid
  VARIANT (9)..(9): /replace="Val"
  SITE (1)..(11): /note="Variant residues given in the sequence have no preference with respect to those in the annotations for variant positions"
CQLTGXXGAGC

SEQ ID NO: 1535 - protein, 9 aa, Artificial Sequence
  source: /note="Description of Artificial Sequence: Synthetic peptide"
CPIEDRPMC

SEQ ID NO: 1536 - protein, 12 aa, Artificial Sequence
  source: /note="Description of Artificial Sequence: Synthetic peptide"
HEWSYLAPYPWF

SEQ ID NO: 1537 - protein, 9 aa, Artificial Sequence
  source: /note="Description of Artificial Sequence: Synthetic peptide"
MCPKHPLGC

SEQ ID NO: 1538 - protein, 15 aa, Artificial Sequence
  source: /note="Description of Artificial Sequence: Synthetic peptide"
RMWPSSTVNLSAGRR

SEQ ID NO: 1539 - protein, 20 aa, Artificial Sequence
  source: /note="Description of Artificial Sequence: Synthetic peptide"
SAKTAVSQRVWLPSHRGGEP

SEQ ID NO: 1540 - protein, 20 aa, Artificial Sequence
  source: /note="Description of Artificial Sequence: Synthetic peptide"
KSREHVNNSACPSKRITAAL

SEQ ID NO: 1541 - protein, 4 aa, Artificial Sequence
  source: /note="Description of Artificial Sequence: Synthetic peptide"
EGFR

SEQ ID NO: 1542 - protein, 6 aa, Artificial Sequence
  source: /note="Description of Artificial Sequence: Synthetic peptide"
AGLGVR

SEQ ID NO: 1543 - protein, 15 aa, Artificial Sequence
  source: /note="Description of Artificial Sequence: Synthetic peptide"
GTRQGHTMRLGVSDG

SEQ ID NO: 1544 - protein, 15 aa, Artificial Sequence
  source: /note="Description of Artificial Sequence: Synthetic peptide"
IAGLATPGWSHWLAL

SEQ ID NO: 1545 - protein, 7 aa, Artificial Sequence
  source: /note="Description of Artificial Sequence: Synthetic peptide"
SMSIARL

SEQ ID NO: 1546 - protein, 7 aa, Artificial Sequence
  source: /note="Description of Artificial Sequence: Synthetic peptide"
HTFEPGV

SEQ ID NO: 1547 - protein, 15 aa, Artificial Sequence
  source: /note="Description of Artificial Sequence: Synthetic peptide"
NTSLKRISNKRIRRK

SEQ ID NO: 1548 - protein, 15 aa, Artificial Sequence
  source: /note="Description of Artificial Sequence: Synthetic peptide"
LRIKRKRRKRKKTRK

SEQ ID NO: 1549 - DNA, 21 bp, Adeno-associated virus 2
agcvvmdcaggarscascaac

SEQ ID NO: 1550 - protein, 7 aa, Artificial Sequence
  source: /note="Description of Artificial Sequence: Synthetic peptide"
SDSGASN

SEQ ID NO: 1551 - protein, 7 aa, Artificial Sequence
  source: /note="Description of Artificial Sequence: Synthetic peptide"
SPSGASN

SEQ ID NO: 1552 - protein, 7 aa, Artificial Sequence
  source: /note="Description of Artificial Sequence: Synthetic peptide"
SHSGASN

SEQ ID NO: 1553 - protein, 7 aa, Artificial Sequence
  source: /note="Description of Artificial Sequence: Synthetic peptide"
SRSGASN

SEQ ID NO: 1554 - protein, 7 aa, Artificial Sequence
  source: /note="Description of Artificial Sequence: Synthetic peptide"
SKSGASN

SEQ ID NO: 1555 - protein, 7 aa, Artificial Sequence
  source: /note="Description of Artificial Sequence: Synthetic peptide"
SNSGASN

SEQ ID NO: 1556 - protein, 7 aa, Artificial Sequence
  source: /note="Description of Artificial Sequence: Synthetic peptide"
SGSGASN

SEQ ID NO: 1557 - protein, 7 aa, Artificial Sequence
  source: /note="Description of Artificial Sequence: Synthetic peptide"
SASGASN

SEQ ID NO: 1558 - protein, 7 aa, Artificial Sequence
  source: /note="Description of Artificial Sequence: Synthetic peptide"
SESGTSN

SEQ ID NO: 1559 - protein, 7 aa, Artificial Sequence
  source: /note="Description of Artificial Sequence: Synthetic peptide"
STTGGSN

SEQ ID NO: 1560 - protein, 7 aa, Artificial Sequence
  source: /note="Description of Artificial Sequence: Synthetic peptide"
SSAGSTN

SEQ ID NO: 1561 - protein, 6 aa, Artificial Sequence
  source: /note="Description of Artificial Sequence: Synthetic peptide"
NNDSQA

SEQ ID NO: 1562 - protein, 6 aa, Artificial Sequence
  source: /note="Description of Artificial Sequence: Synthetic peptide"
NNRNQA

SEQ ID NO: 1563 - protein, 6 aa, Artificial Sequence
  source: /note="Description of Artificial Sequence: Synthetic peptide"
NNNKQA

SEQ ID NO: 1564 - protein, 6 aa, Artificial Sequence
  source: /note="Description of Artificial Sequence: Synthetic peptide"
NAKRQA

SEQ ID NO: 1565 - protein, 6 aa, Artificial Sequence
  source: /note="Description of Artificial Sequence: Synthetic peptide"
NDEHQA

SEQ ID NO: 1566 - protein, 6 aa, Artificial Sequence
  source: /note="Description of Artificial Sequence: Synthetic peptide"
NTSQKA

SEQ ID NO: 1567 - protein, 25 aa, Artificial Sequence
  source: /note="Description of Artificial Sequence: Synthetic peptide"
YYLSRTNTPSGTDTQSRLVFSQAGA

SEQ ID NO: 1568 - protein, 25 aa, Artificial Sequence
  source: /note="Description of Artificial Sequence: Synthetic peptide"
YYLSRTNTDSGTETQSGLDFSQAGA

SEQ ID NO: 1569 - protein, 25 aa, Artificial Sequence
  source: /note="Description of Artificial Sequence: Synthetic peptide"
YYLSRTNTESGTPTQSALEFSQAGA

SEQ ID NO: 1570 - protein, 25 aa, Artificial Sequence
  source: /note="Description of Artificial Sequence: Synthetic peptide"
YYLSRTNTHSGTHTQSPLHFSQAGA

SEQ ID NO: 1571 - protein, 25 aa, Artificial Sequence
  source: /note="Description of Artificial Sequence: Synthetic peptide"
YYLSRTNTSSGTITISHLIFSQAGA

SEQ ID NO: 1572 - protein, 25 aa, Artificial Sequence
  source: /note="Description of Artificial Sequence: Synthetic peptide"
YYLSRTNTRSGIMTKSSLMFSQAGA

SEQ ID NO: 1573 - protein, 25 aa, Artificial Sequence
  source: /note="Description of Artificial Sequence: Synthetic peptide"
YYLSRTNTKSGRKTLSNLSFSQAGA

SEQ ID NO: 1574 - protein, 25 aa, Artificial Sequence
  source: /note="Description of Artificial Sequence: Synthetic peptide"
YYLSRTNDGSGPVTPSKLRFSQRGA

SEQ ID NO: 1575 - protein, 25 aa, Artificial Sequence
  source: /note="Description of Artificial Sequence: Synthetic peptide"
YYLSRTNAASGHATHSDLKFSQPGA

SEQ ID NO: 1576 - protein, 25 aa, Artificial Sequence
  source: /note="Description of Artificial Sequence: Synthetic peptide"
YYLSRTNGQAGSLTMSELGFSQVGA

SEQ ID NO: 1577 - protein, 25 aa, Artificial Sequence
  source: /note="Description of Artificial Sequence: Synthetic peptide"
YYLSRTNSTGGNQTTSQLLFSQLSA

SEQ ID NO: 1578 - protein, 25 aa, Artificial Sequence
  source: /note="Description of Artificial Sequence: Synthetic peptide"
YFLSRTNNNTGLNTNSTLNFSQGRA

SEQ ID NO: 1579 - protein, 16 aa, Artificial Sequence
  source: /note="Description of Artificial Sequence: Synthetic peptide"
SKTGADNNNSEYSWTG

SEQ ID NO: 1580 - protein, 16 aa, Artificial Sequence
  source: /note="Description of Artificial Sequence: Synthetic peptide"
SKTDADNNNSEYSWTG

SEQ ID NO: 1581 - protein, 16 aa, Artificial Sequence
  source: /note="Description of Artificial Sequence: Synthetic peptide"
SKTEADNNNSEYSWTG

SEQ ID NO: 1582 - protein, 16 aa, Artificial Sequence
  source: /note="Description of Artificial Sequence: Synthetic peptide"
SKTPADNNNSEYSWTG

SEQ ID NO: 1583 - protein, 16 aa, Artificial Sequence
  source: /note="Description of Artificial Sequence: Synthetic peptide"
SKTHADNNNSEYSWTG

SEQ ID NO: 1584 - protein, 16 aa, Artificial Sequence
  source: /note="Description of Artificial Sequence: Synthetic peptide"
SKTQADNNNSEYSWTG

SEQ ID NO: 1585 - protein, 16 aa, Artificial Sequence
  source: /note="Description of Artificial Sequence: Synthetic peptide"
SKTIADNNNSEYSWTG

SEQ ID NO: 1586 - protein, 16 aa, Artificial Sequence
  source: /note="Description of Artificial Sequence: Synthetic peptide"
SKTMADNNNSEYSWTG

SEQ ID NO: 1587 - protein, 16 aa, Artificial Sequence
  source: /note="Description of Artificial Sequence: Synthetic peptide"
SKTRADNNNSEYSWTG

SEQ ID NO: 1588 - protein, 16 aa, Artificial Sequence
  source: /note="Description of Artificial Sequence: Synthetic peptide"
SKTNADNNNSEYSWTG

SEQ ID NO: 1589 - protein, 16 aa, Artificial Sequence
  source: /note="Description of Artificial Sequence: Synthetic peptide"
SKTVGRNNNSEYSWTG

SEQ ID NO: 1590 - protein, 16 aa, Artificial Sequence
  source: /note="Description of Artificial Sequence: Synthetic peptide"
SKTADRNNNSEYSWTG

SEQ ID NO: 1591 - protein, 16 aa, Artificial Sequence
  source: /note="Description of Artificial Sequence: Synthetic peptide"
SKKLSQNNNSKYSWQG

SEQ ID NO: 1592 - protein, 16 aa, Artificial Sequence
  source: /note="Description of Artificial Sequence: Synthetic peptide"
SKPTTGNNNSDYSWPG

SEQ ID NO: 1593 - protein, 16 aa, Artificial Sequence
  source: /note="Description of Artificial Sequence: Synthetic peptide"
STQKNENNNSNYSWPG

SEQ ID NO: 1594 - protein, 8 aa, Artificial Sequence
  source: /note="Description of Artificial Sequence: Synthetic peptide"
HKDDEGKF

SEQ ID NO: 1595 - protein, 8 aa, Artificial Sequence
  source: /note="Description of Artificial Sequence: Synthetic peptide"
HKDDNRKF

SEQ ID NO: 1596 - protein, 8 aa, Artificial Sequence
  source: /note="Description of Artificial Sequence: Synthetic peptide"
HKDDTNKF

SEQ ID NO: 1597 - protein, 8 aa, Artificial Sequence
  source: /note="Description of Artificial Sequence: Synthetic peptide"
HEDSDKNF

SEQ ID NO: 1598 - protein, 8 aa, Artificial Sequence
  source: /note="Description of Artificial Sequence: Synthetic peptide"
HRDGADSF

SEQ ID NO: 1599 - protein, 8 aa, Artificial Sequence
  source: /note="Description of Artificial Sequence: Synthetic peptide"
HGDNKSRF

SEQ ID NO: 1600 - protein, 14 aa, Artificial Sequence
  source: /note="Description of Artificial Sequence: Synthetic peptide"
KQGSEKTNVDFEEV

SEQ ID NO: 1601 - protein, 14 aa, Artificial Sequence
  source: /note="Description of Artificial Sequence: Synthetic peptide"
KQGSEKTNVDSEEV

SEQ ID NO: 1602 - protein, 14 aa, Artificial Sequence
  source: /note="Description of Artificial Sequence: Synthetic peptide"
KQGSEKTNVDVEEV

SEQ ID NO: 1603 - protein, 14 aa, Artificial Sequence
  source: /note="Description of Artificial Sequence: Synthetic peptide"
KQGSDKTNVDDAGV

SEQ ID NO: 1604 - protein, 14 aa, Artificial Sequence
  source: /note="Description of Artificial Sequence: Synthetic peptide"
KQGSSKTNVDPREV

SEQ ID NO: 1605 - protein, 14 aa, Artificial Sequence
  source: /note="Description of Artificial Sequence: Synthetic peptide"
KQGSRKTNVDHKQV

SEQ ID NO: 1606 - protein, 14 aa, Artificial Sequence
  source: /note="Description of Artificial Sequence: Synthetic peptide"
KQGSKGGNVDTNRV

SEQ ID NO: 1607 - protein, 14 aa, Artificial Sequence
  source: /note="Description of Artificial Sequence: Synthetic peptide"
KQGSGEANVDNGDV

SEQ ID NO: 1608 - protein, 14 aa, Artificial Sequence
  source: /note="Description of Artificial Sequence: Synthetic peptide"
KQDAAADNIDYDHV

SEQ ID NO: 1609 - protein, 14 aa, Artificial Sequence
  source: /note="Description of Artificial Sequence: Synthetic peptide"
KQSGTRSNAAASSV

SEQ ID NO: 1610 - protein, 14 aa, Artificial Sequence
  source: /note="Description of Artificial Sequence: Synthetic peptide"
KENTNTNDTELTNV

SEQ ID NO: 1611 - protein, 14 aa, Artificial Sequence
  source: /note="Description of Artificial Sequence: Synthetic peptide"
QRGNNVAATADVNT

SEQ ID NO: 1612 - protein, 14 aa, Artificial Sequence
  source: /note="Description of Artificial Sequence: Synthetic peptide"
QRGNNEAATADVNT

SEQ ID NO: 1613 - protein, 14 aa, Artificial Sequence
  source: /note="Description of Artificial Sequence: Synthetic peptide"
QRGNNPAATADVNT

SEQ ID NO: 1614 - protein, 14 aa, Artificial Sequence
  source: /note="Description of Artificial Sequence: Synthetic peptide"
QRGNNHAATADVNT

SEQ ID NO: 1615 - protein, 14 aa, Artificial Sequence
  source: /note="Description of Artificial Sequence: Synthetic peptide"
QEENNIAATPGVNT

SEQ ID NO: 1616 - protein, 14 aa, Artificial Sequence
  source: /note="Description of Artificial Sequence: Synthetic peptide"
QPPNNMAATHEVNT

SEQ ID NO: 1617 - protein, 14 aa, Artificial Sequence
  source: /note="Description of Artificial Sequence: Synthetic peptide"
QHHNNSAATTIVNT

SEQ ID NO: 1618 - protein, 14 aa, Artificial Sequence
  source: /note="Description of Artificial Sequence: Synthetic peptide"
QTTNNRAAFNMVET

SEQ ID NO: 1619 - protein, 14 aa, Artificial Sequence
  source: /note="Description of Artificial Sequence: Synthetic peptide"
QKKNNNAASKKVAT

SEQ ID NO: 1620 - protein, 14 aa, Artificial Sequence
  source: /note="Description of Artificial Sequence: Synthetic peptide"
QGGNNKAADDAVKT

SEQ ID NO: 1621 - protein, 14 aa, Artificial Sequence
  source: /note="Description of Artificial Sequence: Synthetic peptide"
QAAKGGAADDAVKT

SEQ ID NO: 1622 - protein, 14 aa, Artificial Sequence
  source: /note="Description of Artificial Sequence: Synthetic peptide"
QDDRAAAANESVDT

SEQ ID NO: 1623 - protein, 14 aa, Artificial Sequence
  source: /note="Description of Artificial Sequence: Synthetic peptide"
QQQHDDAAYQRVHT

SEQ ID NO: 1624 - protein, 14 aa, Artificial Sequence
  source: /note="Description of Artificial Sequence: Synthetic peptide"
QSSSSLAAVSTVQT

SEQ ID NO: 1625 - protein, 14 aa, Artificial Sequence
  source: /note="Description of Artificial Sequence: Synthetic peptide"
QNNQTTAAIRNVTT

SEQ ID NO: 1626 - protein, 12 aa, Artificial Sequence
  source: /note="Description of Artificial Sequence: Synthetic peptide"
NYNKKSDNVDFT

SEQ ID NO: 1627 - protein, 12 aa, Artificial Sequence
  source: /note="Description of Artificial Sequence: Synthetic peptide"
NYNKKSENVDFT

SEQ ID NO: 1628 - protein, 12 aa, Artificial Sequence
  source: /note="Description of Artificial Sequence: Synthetic peptide"
NYNKKSLNVDFT

SEQ ID NO: 1629 - protein, 12 aa, Artificial Sequence
  source: /note="Description of Artificial Sequence: Synthetic peptide"
NYNKKSPNVDFT

SEQ ID NO: 1630 - protein, 12 aa, Artificial Sequence
  source: /note="Description of Artificial Sequence: Synthetic peptide"
NYSKKSHCVDFT

SEQ ID NO: 1631 - protein, 11 aa, Artificial Sequence
  source: /note="Description of Artificial Sequence: Synthetic peptide"
NYRKTIYVDFT

SEQ ID NO: 1632 - protein, 11 aa, Artificial Sequence
  source: /note="Description of Artificial Sequence: Synthetic peptide"
NYKEKKDVHFT

SEQ ID NO: 1633 - protein, 11 aa, Artificial Sequence
  source: /note="Description of Artificial Sequence: Synthetic peptide"
NYGHRAIVQFT

SEQ ID NO: 1634 - protein, 11 aa, Artificial Sequence
  source: /note="Description of Artificial Sequence: Synthetic peptide"
NYANHQFVVCT

SEQ ID NO: 1635 - protein, 12 aa, Artificial Sequence
  source: /note="Description of Artificial Sequence: Synthetic peptide"
NYDDDPTGVLLT

SEQ ID NO: 1636 - protein, 11 aa, Artificial Sequence
  source: /note="Description of Artificial Sequence: Synthetic peptide"
NYDDPTGVLLT

SEQ ID NO: 1637 - protein, 11 aa, Artificial Sequence
  source: /note="Description of Artificial Sequence: Synthetic peptide"
NFEQQNSVEWT

SEQ ID NO: 1638 - protein, 7 aa, Artificial Sequence
  source: /note="Description of Artificial Sequence: Synthetic peptide"
SQSGASN

SEQ ID NO: 1639 - protein, 6 aa, Artificial Sequence
  source: /note="Description of Artificial Sequence: Synthetic peptide"
NNGSQA

SEQ ID NO: 1640 - protein, 25 aa, Artificial Sequence
  source: /note="Description of Artificial Sequence: Synthetic peptide"
YYLSRTNTPSGTTTWSRLQFSQAGA

SEQ ID NO: 1641 - protein, 16 aa, Artificial Sequence
  source: /note="Description of Artificial Sequence: Synthetic peptide"
SKTSADNNNSEYSWTG

SEQ ID NO: 1642 - protein, 8 aa, Artificial Sequence
  source: /note="Description of Artificial Sequence: Synthetic peptide"
HKDDEEKF

SEQ ID NO: 1643 - protein, 14 aa, Artificial Sequence
  source: /note="Description of Artificial Sequence: Synthetic peptide"
KQGSEKTNVDIEEV

SEQ ID NO: 1644 - protein, 14 aa, Artificial Sequence
  source: /note="Description of Artificial Sequence: Synthetic peptide"
QRGNNQAATADVNT

SEQ ID NO: 1645 - protein, 12 aa, Artificial Sequence
  source: /note="Description of Artificial Sequence: Synthetic peptide"
NYNKKSVNVDFT

SEQ ID NO: 1646 - protein, 42 aa, Artificial Sequence
  source: /note="Description of Artificial Sequence: Synthetic polypeptide"
SQSGASNYNTPSGTTTQSRLQFSTSADNNNSEYSWTGATKYH

SEQ ID NO: 1647 - protein, 42 aa, Artificial Sequence
  source: /note="Description of Artificial Sequence: Synthetic polypeptide"
SASGASNFNSEGGSLTQSSLGFSTDGENNNSDFSWTGATKYH

SEQ ID NO: 1648 - protein, 42 aa, Artificial Sequence
  source: /note="Description of Artificial Sequence: Synthetic polypeptide"
SQSGASNYNTPSGTTTQSRLQFSTDGENNNSDFSWTGATKYH

SEQ ID NO: 1649 - protein, 42 aa, Artificial Sequence
  source: /note="Description of Artificial Sequence: Synthetic polypeptide"
SASGASNYNTPSGTTTQSRLQFSTSADNNNSEFSWPGATTYH

SEQ ID NO: 1650 - protein, 42 aa, Artificial Sequence
  source: /note="Description of Artificial Sequence: Synthetic polypeptide"
SQSGASNFNSEGGSLTQSSLGFSTDGENNNSDFSWTGATKYH

SEQ ID NO: 1651 - protein, 42 aa, Artificial Sequence
  source: /note="Description of Artificial Sequence: Synthetic polypeptide"
SASGASNYNTPSGSLTQSSLGFSTDGENNNSDFSWTGATKYH

SEQ ID NO: 1652 - protein, 42 aa, Artificial Sequence
  source: /note="Description of Artificial Sequence: Synthetic polypeptide"
SQSGASNYNTPSGTTTQSRLQFSTSADNNNSDFSWTGATKYH

SEQ ID NO: 1653 - protein, 42 aa, Artificial Sequence
  source: /note="Description of Artificial Sequence: Synthetic polypeptide"
SGAGASNFNSEGGSLTQSSLGFSTDGENNNSDFSWTGATKYH

SEQ ID NO: 1654 - protein, 7 aa, Artificial Sequence
  source: /note="Description of Artificial Sequence: Synthetic peptide"
SGAGASN

SEQ ID NO: 1655 - protein, 15 aa, Artificial Sequence
  source: /note="Description of Artificial Sequence: Synthetic peptide"
NSEGGSLTQSSLGFS

SEQ ID NO: 1656 - protein, 11 aa, Artificial Sequence
  source: /note="Description of Artificial Sequence: Synthetic peptide"
TDGENNNSDFS

SEQ ID NO: 1657 - protein, 10 aa, Artificial Sequence
  source: /note="Description of Artificial Sequence: Synthetic peptide"
SEFSWPGATT

SEQ ID NO: 1658 - protein, 13 aa, Artificial Sequence
  source: /note="Description of Artificial Sequence: Synthetic peptide"
TSADNNNSDFSWT

SEQ ID NO: 1659 - protein, 8 aa, Artificial Sequence
  source: /note="Description of Artificial Sequence: Synthetic peptide"
SQSGASNY

SEQ ID NO: 1660 - protein, 15 aa, Artificial Sequence
  source: /note="Description of Artificial Sequence: Synthetic peptide"
NTPSGTTTQSRLQFS

SEQ ID NO: 1661 - protein, 19 aa, Artificial Sequence
  source: /note="Description of Artificial Sequence: Synthetic peptide"
TSADNNNSEYSWTGATKYH

SEQ ID NO: 1662 - protein, 8 aa, Artificial Sequence
  source: /note="Description of Artificial Sequence: Synthetic peptide"
SASGASNF

SEQ ID NO: 1663 - protein, 19 aa, Artificial Sequence
  source: /note="Description of Artificial Sequence: Synthetic peptide"
TDGENNNSDFSWTGATKYH

SEQ ID NO: 1664 - protein, 8 aa, Artificial Sequence
  source: /note="Description of Artificial Sequence: Synthetic peptide"
SASGASNY

SEQ ID NO: 1665 - protein, 19 aa, Artificial Sequence
  source: /note="Description of Artificial Sequence: Synthetic peptide"
TSADNNNSEFSWPGATTYH

SEQ ID NO: 1666 - protein, 15 aa, Artificial Sequence
  source: /note="Description of Artificial Sequence: Synthetic peptide"
NTPSGSLTQSSLGFS

SEQ ID NO: 1667 - protein, 19 aa, Artificial Sequence
  source: /note="Description of Artificial Sequence: Synthetic peptide"
TSADNNNSDFSWTGATKYH

SEQ ID NO: 1668 - protein, 8 aa, Artificial Sequence
  source: /note="Description of Artificial Sequence: Synthetic peptide"
SGAGASNF

SEQ ID NO: 1669 - DNA, 48 bp, Artificial Sequence
  source: /note="Description of Artificial Sequence: Synthetic oligonucleotide"
  modified_base (20)..(20): a, c, g or t
  modified_base (35)..(35): a, c, g or t
ctccagvvsvvsmrsrvcvnsgcagctdhcvvsrnsgtcvmsacacaa

SEQ ID NO: 1670 - DNA, 48 bp, Artificial Sequence
  source: /note="Description of Artificial Sequence: Synthetic oligonucleotide"
ctccagagaggcaacagacaagcagctaccgcagatgtcaacacacaa

SEQ ID NO: 1671 - protein, 7 aa, Artificial Sequence
  source: /note="Description of Artificial Sequence: Synthetic peptide"
SAAGASN

SEQ ID NO: 1672 - protein, 24 aa, Artificial Sequence
  source: /note="Description of Artificial Sequence: Synthetic peptide"
YFLSRTNTESGSTTQSTLRFSQAG

SEQ ID NO: 1673 - protein, 13 aa, Artificial Sequence
  source: /note="Description of Artificial Sequence: Synthetic peptide"
SKTSADNNNSDFS

SEQ ID NO: 1674 - protein, 14 aa, Artificial Sequence
  source: /note="Description of Artificial Sequence: Synthetic peptide"
KQGSEKTDVDIDKV

SEQ ID NO: 1675 - protein, 7 aa, Artificial Sequence
  source: /note="Description of Artificial Sequence: Synthetic peptide"
STAGASN

SEQ ID NO: 1676 - protein, 24 aa, Artificial Sequence
  source: /note="Description of Artificial Sequence: Synthetic peptide"
YFLSRTNTTSGIETQSTLRFSQAG

SEQ ID NO: 1677 - protein, 13 aa, Artificial Sequence
  source: /note="Description of Artificial Sequence: Synthetic peptide"
SKTDGENNNSDFS

SEQ ID NO: 1678 - protein, 14 aa, Artificial Sequence
  source: /note="Description of Artificial Sequence: Synthetic peptide"
KQGAAADDVEIDGV

SEQ ID NO: 1679 - protein, 7 aa, Artificial Sequence
  source: /note="Description of Artificial Sequence: Synthetic peptide"
SEAGASN

SEQ ID NO: 1680 - protein, 24 aa, Artificial Sequence
  source: /note="Description of Artificial Sequence: Synthetic peptide"
YYLSRTNTPSGTTTQSRLQFSQAG

SEQ ID NO: 1681 - protein, 13 aa, Artificial Sequence
  source: /note="Description of Artificial Sequence: Synthetic peptide"
SKTSADNNNSEYS

SEQ ID NO: 1682 - protein, 14 aa, Artificial Sequence
  source: /note="Description of Artificial Sequence: Synthetic peptide"
KQGSEKTNVDIEKV

SEQ ID NO: 1683 - protein, 24 aa, Artificial Sequence
  source: /note="Description of Artificial Sequence: Synthetic peptide"
YFLSRTNDASGSDTKSTLLFSQAG

SEQ ID NO: 1684 - protein, 13 aa, Artificial Sequence
  source: /note="Description of Artificial Sequence: Synthetic peptide"
STTPSENNNSEYS

SEQ ID NO: 1685 - protein, 7 aa, Artificial Sequence
  source: /note="Description of Artificial Sequence: Synthetic peptide"
SAAGATN

SEQ ID NO: 1686 - protein, 24 aa, Artificial Sequence
  source: /note="Description of Artificial Sequence: Synthetic peptide"
YFLSRTNGEAGSATLSELRFSQAG

SEQ ID NO: 1687 - protein, 8 aa, Artificial Sequence
  source: /note="Description of Artificial Sequence: Synthetic peptide"
HGDDADRF

SEQ ID NO: 1688 - protein, 14 aa, Artificial Sequence
  source: /note="Description of Artificial Sequence: Synthetic peptide"
KQGAEKSDVEVDRV

SEQ ID NO: 1689 - protein, 14 aa, Artificial Sequence
  source: /note="Description of Artificial Sequence: Synthetic peptide"
KQDSGGDNIDIDQV

SEQ ID NO: 1690 - protein, 7 aa, Artificial Sequence
  source: /note="Description of Artificial Sequence: Synthetic peptide"
SDAGASN

SEQ ID NO: 1691 - protein, 24 aa, Artificial Sequence
  source: /note="Description of Artificial Sequence: Synthetic peptide"
YFLSRTNTEGGHDTQSTLRFSQAG

SEQ ID NO: 1692 - protein, 14 aa, Artificial Sequence
  source: /note="Description of Artificial Sequence: Synthetic peptide"
KEDGGGSDVAIDEV

SEQ ID NO: 1693 - protein, 7 aa, Artificial Sequence
  source: /note="Description of Artificial Sequence: Synthetic peptide"
SNAGASN

SEQ ID NO: 1694 - protein, 24 aa, Artificial Sequence
  source: /note="Description of Artificial Sequence: Synthetic peptide"
YFLSRTNGEAGSATLSELRFSQPG

SEQ ID NO: 1695 - DNA, 21 bp, Artificial Sequence
  source: /note="Description of Artificial Sequence: Synthetic oligonucleotide"
agcvvmdcaggarscascaac

SEQ ID NO: 1696 - DNA, 18 bp, Artificial Sequence
  source: /note="Description of Artificial Sequence: Synthetic oligonucleotide"
aacracrrsmrsmaggca

SEQ ID NO: 1697 - DNA, 24 bp, Artificial Sequence
  source: /note="Description of Artificial Sequence: Synthetic oligonucleotide"
cacrrggacrrcrmsrrsarsttt

SEQ ID NO: 1698 - DNA, 75 bp, Artificial Sequence
  source: /note="Description of Artificial Sequence: Synthetic oligonucleotide"
  modified_base (35)..(35): a, c, g or t
tatttcttgagcagaacaaacrvcvvsrscggamncvhsacgmhstcavvscttvdsttttctcagsbcrgsgcg

SEQ ID NO: 1699 - DNA, 48 bp, Artificial Sequence
  source: /note="Description of Artificial Sequence: Synthetic oligonucleotide"
  modified_base (11)..(11): a, c, g or t
tcaamammavnsrvcsrsaacaacaacagtrasttctcgtggmmagga

SEQ ID NO: 1700 - DNA, 42 bp, Artificial Sequence
  source: /note="Description of Artificial Sequence: Synthetic oligonucleotide"
  modified_base (31)..(31): a, c, g or t
aagsaarrcrscrvsrvarvcratrycgmsnhcrvmvrsgtc

SEQ ID NO: 1701 - DNA, 42 bp, Artificial Sequence
  source: /note="Description of Artificial Sequence: Synthetic oligonucleotide"
  modified_base (17)..(17): a, c, g or t
  modified_base (32)..(32): a, c, g or t
cagvvsvvsmrsrvcvnsgcagctdhcvvsrnsgtcvmsaca

SEQ ID NO: 1702 - DNA, 33 bp, Artificial Sequence
  source: /note="Description of Artificial Sequence: Synthetic oligonucleotide"
aactwcrvsvasmvsvhsddtgtgswstksact

SEQ ID NO: 1703 - DNA, 30 bp, Artificial Sequence
  source: /note="Description of Artificial Sequence: Synthetic oligonucleotide"
ttgttgaacatcaccacgtgacgcacgttc

SEQ ID NO: 1704 - DNA, 30 bp, Artificial Sequence
  source: /note="Description of Artificial Sequence: Synthetic oligonucleotide"
tccccgtggttctactacataatgtggccg

SEQ ID NO: 1705 - DNA, 30 bp, Artificial Sequence
  source: /note="Description of Artificial Sequence: Synthetic oligonucleotide"
ttccacactccgttttggataatgttgaac

SEQ ID NO: 1706 - DNA, 30 bp, Artificial Sequence
  source: /note="Description of Artificial Sequence: Synthetic oligonucleotide"
agggacatccccagctccatgctgtggtcg

SEQ ID NO: 1707 - DNA, 30 bp, Artificial Sequence
  source: /note="Description of Artificial Sequence: Synthetic oligonucleotide"
agggacaacccctccgactcgccctaatcc

SEQ ID NO: 1708 - DNA, 30 bp, Artificial Sequence
  source: /note="Description of Artificial Sequence: Synthetic oligonucleotide"
tcctagtagaagacaccctctcactgcccg

SEQ ID NO: 1709 - DNA, 30 bp, Artificial Sequence
  source: /note="Description of Artificial Sequence: Synthetic oligonucleotide"
agtaccatgtacacccactctcccagtgcc

SEQ ID NO: 1710 - DNA, 30 bp, Artificial Sequence
  source: /note="Description of Artificial Sequence: Synthetic oligonucleotide"
atatggacgttcatgctgatcaccataccg

SEQ ID NO: 1711 - DNA, 30 bp, Artificial Sequence
  source: /note="Description of Artificial Sequence: Synthetic oligonucleotide"
agcaggagctccttggcctcagcgtgcgag

SEQ ID NO: 1712 - DNA, 30 bp, Artificial Sequence
  source: /note="Description of Artificial Sequence: Synthetic oligonucleotide"
acaagcagcttcactatgacaaccactgac

SEQ ID NO: 1713 - DNA, 284 bp, Artificial Sequence
  source: /note="Description of Artificial Sequence: Synthetic polynucleotide"
  modified_base (59)..(59): a, c, g or t
  modified_base (244)..(244): a, c, g or t
cagcctaggaactggcttcctggaccctgttaccgccagcagagagtctcaamammavnsrvcsrsaacaacaacagtrasttctcctggmmaggagctaccaagtaccacctcaatggcagagactctctggtgaatcccggaccagctatggcaagccacrrggacrrcrmsrrsarsttttttcctcagagcggggttctcatctttgggaagsaarrcrscrvsrvarvcratrycgmsnhcrvmvrsgtcatgattacagacgaagaggagatctggac

SEQ ID NO: 1714 - DNA, 34 bp, Artificial Sequence
  source: /note="Description of Artificial Sequence: Synthetic oligonucleotide"
tgggacaatggcggtcgtctctcagagttktkkt

SEQ ID NO: 1715 - DNA, 35 bp, Artificial Sequence
  source: /note="Description of Artificial Sequence: Synthetic oligonucleotide"
agaggacckktcctcgatggttcatggtggagtta

SEQ ID NO: 1716 - DNA, 31 bp, Artificial Sequence
  source: /note="Description of Artificial Sequence: Synthetic oligonucleotide"
ccacttagggcctggtcgataccgttcggtg

SEQ ID NO: 1717 - DNA, 32 bp, Artificial Sequence
  source: /note="Description of Artificial Sequence: Synthetic oligonucleotide"
tctcgccccaagagtagaaacccttcsttyyg

SEQ ID NO: 1718 - protein, 735 aa, Adeno-associated virus 2 [sequence omitted]

SEQ ID NO: 1719 - protein, 736 aa, Adeno-associated virus 9; identical to SEQ ID NO: 134

SEQ ID NO: 1720 - protein, 7 aa, Artificial Sequence
  source: /note="Description of Artificial Sequence: Synthetic peptide"
GSTPPPM

SEQ ID NO: 1721 - protein, 7 aa, Artificial Sequence
  source: /note="Description of Artificial Sequence: Synthetic peptide"
GETRAPL

SEQ ID NO: 1722 - protein, 6 aa, Artificial Sequence
  source: /note="Description of Artificial Sequence: Synthetic peptide"
SPAKFA

SEQ ID NO: 1723 - protein, 6 aa, Artificial Sequence
  source: /note="Description of Artificial Sequence: Synthetic peptide"
NKDKLN

SEQ ID NO: 1724 - DNA, 12 bp, Artificial Sequence
  source: /note="Description of Artificial Sequence: Synthetic oligonucleotide"
agaaagaggcga

SEQ ID NO: 1725 - DNA, 12 bp, Artificial Sequence
  source: /note="Description of Artificial Sequence: Synthetic oligonucleotide"
cgggccaagcgg

SEQ ID NO: 1726 - DNA, 54 bp, Artificial Sequence
  source: /note="Description of Artificial Sequence: Synthetic oligonucleotide"
gagggcagaggaagtcttctaacatgcggtgacgtggaggagaatcccggccct

SEQ ID NO: 1727 - DNA, 75 bp, Artificial Sequence
  source: /note="Description of Artificial Sequence: Synthetic oligonucleotide"
ggaagcggagtgaaacagactttgaattttgaccttctcaagttggcgggagacgtggagtccaaccctggacct

SEQ ID NO: 1728 - DNA, 66 bp, Artificial Sequence
  source: /note="Description of Artificial Sequence: Synthetic oligonucleotide"
ggaagcggagctactaacttcagcctgctgaagcaggctggagacgtggaggagaaccctggacct

SEQ ID NO: 1729 - DNA, 18 bp, Artificial Sequence
  source: /note="Description of Artificial Sequence: Synthetic oligonucleotide"
tccggaggcggcggcagc

SEQ ID NO: 1730 - DNA, 45 bp, Artificial Sequence
  source: /note="Description of Artificial Sequence: Synthetic oligonucleotide"
ggtggtggtggtagcggcggcggcggctctggtggtggtggatcc

SEQ ID NO: 1731 - DNA, 75 bp, Artificial Sequence
  source: /note="Description of Artificial Sequence: Synthetic oligonucleotide"
ggcggaggtggctccggaggcggaggcagcggcggaggtgggtctggcggaggcgggtgcggcggaggtggctcc

SEQ ID NO: 1732 - DNA, 609 bp, Artificial Sequence
  source: /note="Description of Artificial Sequence: Synthetic polynucleotide"
aattccgcccctctcccccccccccctctccctcccccccccctaacgttactggccgaagccgcttggaataaggccggtgtgcgtttgtctatatgttattttccaccatattgccgtcttttggcaatgtgagggcccggaaacctggccctgtcttcttgacgagcattcctaggggtctttcccctctcgccaaaggaatgcaaggtctgttgaatgtcgtgaaggaagcagttcctctggaagcttcttgaagacaaacaacgtctgtagcgaccctttgcaggcagcggaaccccccacctggcgacaggtgcctctgcggccaaaagccacgtgtataagatacacctgcaaaggcggcacaaccccagtgccacgttgtgagttggatagttgtggaaagagtcaaatggctctcctcaagcgtattcaacaaggggctgaaggatgcccagaaggtaccccattgtatgggatctgatctggggcctcggtgcacatgctttacatgtgtttagtcgaggttaaaaaaacgtctaggccccccgaaccacggggacgtggttttcctttgaaaaacacgatgataatatggccacaacc

SEQ ID NO: 1733 - DNA, 623 bp, Artificial Sequence
  source: /note="Description of Artificial Sequence: Synthetic polynucleotide"
taacgaattccgcccctctcccccccccccctctccctcccccccccctaacgttactggccgaagccgcttggaataaggccggtgtgcgtttgtctatatgttattttccaccatattgccgtcttttggcaatgtgagggcccggaaacctggccctgtcttcttgacgagcattcctaggggtctttcccctctcgccaaaggaatgcaaggtctgttgaatgtcgtgaaggaagcagttcctctggaagcttcttgaagacaaacaacgtctgtagcgaccctttgcaggcagcggaaccccccacctggcgacaggtgcctctgcggccaaaagccacgtgtataagatacacctgcaaaggcggcacaaccccagtgccacgttgtgagttggatagttgtggaaagagtcaaatggctctcctcaagcgtattcaacaaggggctgaaggatgcccagaaggtaccccattgtatgggatctgatctggggcctcggtgcacatgctttacatgtgtttagtcgaggttaaaaaaacgtctaggccccccgaaccacggggacgtggttttcctttgaaaaacacgatgataatatggccacaaccgccgccacc

SEQ ID NO: 1734 - DNA, 54 bp, Artificial Sequence
  source: /note="Description of Artificial Sequence: Synthetic oligonucleotide"
gtggagaggaagtgctgcgtggagtgcccaccatgccctgcccctcctgtggcc

SEQ ID NO: 1735 - DNA, 108 bp, Artificial Sequence
  source: /note="Description of Artificial Sequence: Synthetic polynucleotide"
gagctcaaaaccccacttggtgacacaactcacacatgcccacggtgcccagagcccaaatcttgtgacacacctcccccgtgcccacggtgcccagcacctgaactc

SEQ ID NO: 1736 - DNA, 153 bp, Artificial Sequence
  source: /note="Description of Artificial Sequence: Synthetic polynucleotide"
gagctcaaaaccccacttggtgacacaactcacacatgcccacggtgcccagagcccaaatcttgtgacacacctcccccgtgcccacggtgcccagagcccaaatcttgtgacacacctcccccatgcccacggtgcccagcacctgaactc

SEQ ID NO: 1737 - DNA, 198 bp, Artificial Sequence
  source: /note="Description of Artificial Sequence: Synthetic polynucleotide"
gagctcaaaaccccacttggtgacacaactcacacatgcccacggtgcccagagcccaaatcttgtgacacacctcccccgtgcccacggtgcccagagcccaaatcttgtgacacacctcccccatgcccacggtgcccagagcccaaatcttgtgacacacctcccccgtgcccaaggtgcccagcacctgaactc

SEQ ID NO: 1738 - DNA, 45 bp, Artificial Sequence
  source: /note="Description of Artificial Sequence: Synthetic oligonucleotide"
gtgcccagggattgtggttgtaagccttgcatatgtacagtccca

SEQ ID NO: 1739 - DNA, 18 bp, Artificial Sequence
  source: /note="Description of Artificial Sequence: Synthetic oligonucleotide"
gtgcccagggattgtggt

SEQ ID NO: 1740 - DNA, 14 bp, Artificial Sequence
  source: /note="Description of Artificial Sequence: Synthetic oligonucleotide"
actatattatcaac

SEQ ID NO: 1741 - DNA, 24 bp, Homo sapiens
atatcttatgatggagaaaataca

SEQ ID NO: 1742 - DNA, 21 bp, Artificial Sequence
  source: /note="Description of Artificial Sequence: Synthetic oligonucleotide"
caacaatatgataatctccca

SEQ ID NO: 1743 - DNA, 33 bp, Artificial Sequence
  source: /note="Description of Artificial Sequence: Synthetic oligonucleotide"
caggcgagtcaggacattgtcaactatttaaat

SEQ ID NO: 1744 - DNA, 51 bp, Artificial Sequence
  source: /note="Description of Artificial Sequence: Synthetic oligonucleotide"
gaaacagctctggttgtatctactacctacctaccacactactttgacaac

SEQ ID NO: 1745 - DNA, 24 bp, Homo sapiens
ggattcagcttcagtcactatgcc

SEQ ID NO: 1746 - DNA, 51 bp, Artificial Sequence
  source: /note="Description of Artificial Sequence: Synthetic oligonucleotide"
gggatcattcctgtcttgggtacagtacactacgcaccgaagttccagggc

SEQ ID NO: 1747 - DNA, 21 bp, Artificial Sequence
  source: /note="Description of Artificial Sequence: Synthetic oligonucleotide"
gttgcatccaatttggagaca

SEQ ID NO: 1748 - DNA, 24 bp, Artificial Sequence
  source: /note="Description of Artificial Sequence: Synthetic oligonucleotide"
ataaaacaagatggaagtgtgaaa

SEQ ID NO: 1749 - DNA, 24 bp, Artificial Sequence
  source: /note="Description of Artificial Sequence: Synthetic oligonucleotide"
atatattatgaaggaagtaatgat

SEQ ID NO: 1750 - DNA, 24 bp, Artificial Sequence
  source: /note="Description of Artificial Sequence: Synthetic oligonucleotide"
atatggtctgatggaagtaataaa

SEQ ID NO: 1751 - DNA, 24 bp, Artificial Sequence
  source: /note="Description of Artificial Sequence: Synthetic oligonucleotide"
atcaaccctaccagtggtggcaca

SEQ ID NO: 1752 - DNA, 24 bp, Artificial Sequence
  source: /note="Description of Artificial Sequence: Synthetic oligonucleotide"
atcaatactaacagtggtggcaca

SEQ ID NO: 1753 - DNA, 21 bp, Artificial Sequence
  source: /note="Description of Artificial Sequence: Synthetic oligonucleotide"
atcaatcatagtggagacacc

SEQ ID NO: 1754 - DNA, 24 bp, Artificial Sequence
  source: /note="Description of Artificial Sequence: Synthetic oligonucleotide"
atcagtagtactgggaataacaga

SEQ ID NO: 1755 - DNA, 24 bp, Artificial Sequence
  source: /note="Description of Artificial Sequence: Synthetic oligonucleotide"
atcagtggtcctggtggtagtaca

SEQ ID NO: 1756 - DNA, 24 bp, Artificial Sequence
  source: /note="Description of Artificial Sequence: Synthetic oligonucleotide"
atcatccctatctttggtacagga

SEQ ID NO: 1757 - DNA, 21 bp, Artificial Sequence
  source: /note="Description of Artificial Sequence: Synthetic oligonucleotide"
atctattacagtggggccacc

SEQ ID NO: 1758 - DNA, 21 bp, Artificial Sequence
  source: /note="Description of Artificial Sequence: Synthetic oligonucleotide"
atctattatagtgggagcacc

SEQ ID NO: 1759 - DNA, 27 bp, Artificial Sequence
  source: /note="Description of Artificial Sequence: Synthetic oligonucleotide"
atgcaaactacacaatttccgctcact

SEQ ID NO: 1760 - DNA, 27 bp, Artificial Sequence
  source: /note="Description of Artificial Sequence: Synthetic oligonucleotide"
atgcaagctatacaaactccgtacact

SEQ ID NO: 1761 - DNA, 24 bp, Artificial Sequence
  source: /note="Description of Artificial Sequence: Synthetic oligonucleotide"
atgcaagctctacaaactatcacc

SEQ ID NO: 1762 - DNA, 24 bp, Artificial Sequence
  source: /note="Description of Artificial Sequence: Synthetic oligonucleotide"
attagtactagtggtattaccata

SEQ ID NO: 1763 - DNA, 24 bp, Artificial Sequence
  source: /note="Description of Artificial Sequence: Synthetic oligonucleotide"
attagtgatactggcagtcactta

SEQ ID NO: 1764 - DNA, 24 bp, Artificial Sequence
  source: /note="Description of Artificial Sequence: Synthetic oligonucleotide"
attagttggagtagtggtaccata

SEQ ID NO: 1765 - DNA, 24 bp, Artificial Sequence
  source: /note="Description of Artificial Sequence: Synthetic oligonucleotide"
attcttgatagtggtgataacaca

SEQ ID NO: 1766 - DNA, 24 bp, Artificial Sequence
  source: /note="Description of Artificial Sequence: Synthetic oligonucleotide"
attggtggtagtggtggtaacaca

SEQ ID NO: 1767 - DNA, 18 bp, Artificial Sequence
  source: /note="Description of Artificial Sequence: Synthetic oligonucleotide"
caaaacattgacatctat

SEQ ID NO: 1768 - DNA, 33 bp, Artificial Sequence
  source: /note="Description of Artificial Sequence: Synthetic oligonucleotide"
caaagcctcgtatacagtgatggaaacacctac

SEQ ID NO: 1769 - DNA, 27 bp, Artificial Sequence
  source: /note="Description of Artificial Sequence: Synthetic oligonucleotide"
caacagactaacagtttccctctcact

SEQ ID NO: 1770 - DNA, 27 bp, Artificial Sequence
  source: /note="Description of Artificial Sequence: Synthetic oligonucleotide"
caacagagtgtcagtgtcccgtacact

SEQ ID NO: 1771 - DNA, 27 bp, Artificial Sequence
  source: /note="Description of Artificial Sequence: Synthetic oligonucleotide"
caacagagttacaataccccgttcact

SEQ ID NO: 1772 - DNA, 27 bp, Artificial Sequence
  source: /note="Description of Artificial Sequence: Synthetic oligonucleotide"
caacagagttacagtagtcctccgacg

SEQ ID NO: 1773 - DNA, 27 bp, Artificial Sequence
  source: /note="Description of Artificial Sequence: Synthetic oligonucleotide"
caacaggctaacagtttcccgttgacg

SEQ ID NO: 1774 - DNA, 27 bp, Artificial Sequence
  source: /note="Description of Artificial Sequence: Synthetic oligonucleotide"
caacagtataatactttcccgtggacg

SEQ ID NO: 1775 - DNA, 33 bp, Artificial Sequence
  source: /note="Description of Artificial Sequence: Synthetic oligonucleotide"
cagaacctcctaaatagaaatggattcaactat

SEQ ID NO: 1776 - DNA, 36 bp, Artificial Sequence
  source: /note="Description of Artificial Sequence: Synthetic oligonucleotide"
cagaatcttttatacacctccagcaataagaactcc

SEQ ID NO: 1777 - DNA, 18 bp, Artificial Sequence
  source: /note="Description of Artificial Sequence: Synthetic oligonucleotide"
cagaccattagcacctat

SEQ ID NO: 1778 - DNA, 18 bp, Artificial Sequence
  source: /note="Description of Artificial Sequence: Synthetic oligonucleotide"
cagactattctcagcaac

SEQ ID NO: 1779 - DNA, 18 bp, Artificial Sequence
  source: /note="Description of Artificial Sequence: Synthetic oligonucleotide"
cagagcattagcacctat

SEQ ID NO: 1780 - DNA, 33 bp, Artificial Sequence
  source: /note="Description of Artificial Sequence: Synthetic oligonucleotide"
cagagcctcctacatagtaatggatacaactat

SEQ ID NO: 1781 - DNA, 18 bp, Artificial Sequence
  source: /note="Description of Artificial Sequence: Synthetic oligonucleotide"
cagagtattaacaactac

SEQ ID NO: 1782 - DNA, 18 bp, Artificial Sequence
  source: /note="Description of Artificial Sequence: Synthetic oligonucleotide"
cagagtgttaccagctac

SEQ ID NO: 1783 - DNA, 18 bp, Artificial Sequence
  source: /note="Description of Artificial Sequence: Synthetic oligonucleotide"
cagagtgttatcaataac

SEQ ID NO: 1784 - DNA, 27 bp, Artificial Sequence
  source: /note="Description of Artificial Sequence: Synthetic oligonucleotide"
cagcaatattatagtagtccgtggacg

SEQ ID NO: 1785 - DNA, 27 bp, Artificial Sequence
  source: /note="Description of Artificial Sequence: Synthetic oligonucleotide"
cagcagcgtaccaactggccgctcact

SEQ ID NO: 1786 - DNA, 27 bp, Artificial Sequence
  source: /note="Description of Artificial Sequence: Synthetic oligonucleotide"
cagcagcgtagcaactggcctcccacc

SEQ ID NO: 1787 - DNA, 27 bp, Artificial Sequence
  source: /note="Description of Artificial Sequence: Synthetic oligonucleotide"
cagcagtataataactggccgctcacc

SEQ ID NO: 1788 - DNA, 27 bp, Artificial Sequence
  source: /note="Description of Artificial Sequence: Synthetic oligonucleotide"
cagcagtataataactggcctctcact

SEQ ID NO: 1789 - DNA, 18 bp, Artificial Sequence
  source: /note="Description of Artificial Sequence: Synthetic oligonucleotide"
caggacataagaaatgat

SEQ ID NO: 1790 - DNA, 18 bp, Artificial Sequence
  source: /note="Description of Artificial Sequence: Synthetic oligonucleotide"
caggacattggtaattat

SEQ ID NO: 1791 - DNA, 18 bp, Artificial Sequence
  source: /note="Description of Artificial Sequence: Synthetic oligonucleotide"
caggccattagaaatgat

SEQ ID NO: 1792 - DNA, 18 bp, Artificial Sequence
  source: /note="Description of Artificial Sequence: Synthetic oligonucleotide"
cagggcattagaaatgat

SEQ ID NO: 1793 - DNA, 18 bp, Artificial Sequence
  source: /note="Description of Artificial Sequence: Synthetic oligonucleotide"
cagggtattagcagctgg

SEQ ID NO: 1794 - DNA, 18 bp, Artificial Sequence
  source: /note="Description of Artificial Sequence: Synthetic oligonucleotide"
cagggtattagcatctgg

SEQ ID NO: 1795 - DNA, 27 bp, Artificial Sequence
  source: /note="Description of Artificial Sequence: Synthetic oligonucleotide"
ctacaacataaaaattacatgtacact

SEQ ID NO: 1796 - DNA, 27 bp, Artificial Sequence
  source: /note="Description of Artificial Sequence: Synthetic oligonucleotide"
ctacagcataatagttacccgtggacg

SEQ ID NO: 1797 - DNA, 24 bp, Artificial Sequence
  source: /note="Description of Artificial Sequence: Synthetic oligonucleotide"
ctatggtatgatggaagtaataaa

SEQ ID NO: 1798 - DNA, 27 bp, Artificial Sequence
  source: /note="Description of Artificial Sequence: Synthetic oligonucleotide"
cttgcagattacaaatacacgtggacg

SEQ ID NO: 1799 - DNA, 48 bp, Artificial Sequence
  source: /note="Description of Artificial Sequence: Synthetic oligonucleotide"
gcaaaagatgggtataggtggaagtcctactcgtacggtttggacgtc

SEQ ID NO: 1800 - DNA, 51 bp, Artificial Sequence
  source: /note="Description of Artificial Sequence: Synthetic oligonucleotide"
gcaagagagaataattggaatccttacttcttctactatggtatggacgtc

SEQ ID NO: 1801 - DNA, 48 bp, Artificial Sequence
  source: /note="Description of Artificial Sequence: Synthetic oligonucleotide"
gcgaaagatccctatggtgactacagggactactacggtatggacgtc

SEQ ID NO: 1802 - DNA, 57 bp, Artificial Sequence
  source: /note="Description of Artificial Sequence: Synthetic oligonucleotide"
gcgaaaggggggggatatagtggctacgattgggacttttattacggtatggacgtc

SEQ ID NO: 1803 - DNA, 30 bp, Artificial Sequence
  source: /note="Description of Artificial Sequence: Synthetic oligonucleotide"
gcgagaagggactggaactcctttgactat

SEQ ID NO: 1804 - DNA, 45 bp, Artificial Sequence
  source: /note="Description of Artificial Sequence: Synthetic oligonucleotide"
gcgagaagtggactagcctcctattattattacagtatggacgtc

SEQ ID NO: 1805 - DNA, 45 bp, Artificial Sequence
  source: /note="Description of Artificial Sequence: Synthetic oligonucleotide"
gcgagaagtggactagcctcctattattattacggtatggacgtc

SEQ ID NO: 1806 - DNA, 48 bp, Artificial Sequence
  source: /note="Description of Artificial Sequence: Synthetic oligonucleotide"
gcgagaatgttttacgatattttgactaattctgatatttttgatatt

SEQ ID NO: 1807 - DNA, 48 bp, Artificial Sequence
  source: /note="Description of Artificial Sequence: Synthetic oligonucleotide"
gcgagaatgttttacgatattttgactggttctgatgtttttgatatt

SEQ ID NO: 1808 - DNA, 33 bp, Artificial Sequence
  source: /note="Description of Artificial Sequence: Synthetic oligonucleotide"
gcgagagaattttggccccacggtatggacgtc

SEQ ID NO: 1809 - DNA, 54 bp, Artificial Sequence
  source: /note="Description of Artificial Sequence: Synthetic oligonucleotide"
gcgagagagaggcacagagggagctactacggctactacgacggtatggacgtc

SEQ ID NO: 1810 - DNA, 45 bp, Artificial Sequence
  source: /note="Description of Artificial Sequence: Synthetic oligonucleotide"
gcgagagatagcagctcgtccccgaggtactacggtatggacgtc

SEQ ID NO: 1811 - DNA, 66 bp, Artificial Sequence
  source: /note="Description of Artificial Sequence: Synthetic oligonucleotide"
gcgagagatgggaattacgatattttgactggttattataactaccactattacggcatggacgtc

SEQ ID NO: 1812 - DNA, 63 bp, Artificial Sequence
  source: /note="Description of Artificial Sequence: Synthetic oligonucleotide"
gcgagagatggggttgtagcagcagctggtcccccttaccactaccactacggtttggacgtc

SEQ ID NO: 1813 - DNA, 27 bp, Artificial Sequence
  source: /note="Description of Artificial Sequence: Synthetic oligonucleotide"
gcgagcctgtatttcaatttttggatg

SEQ ID NO: 1814 - DNA, 45 bp, Artificial Sequence
  source: /note="Description of Artificial Sequence: Synthetic oligonucleotide"
gcgcgagatcaggatggggaaatggaactacgtttctttgactac

SEQ ID NO: 1815 - DNA, 63 bp, Artificial Sequence
  source: /note="Description of Artificial Sequence: Synthetic oligonucleotide"
gcgcggggatattgtacaaatggtgtatgctatccccattactactactccgatatggacgtc

SEQ ID NO: 1816 - DNA, 27 bp, Artificial Sequence
  source: /note="Description of Artificial Sequence: Synthetic oligonucleotide"
gcgggaactggggcccattttgagttc

SEQ ID NO: 1817 - DNA, 24 bp, Artificial Sequence
  source: /note="Description of Artificial Sequence: Synthetic oligonucleotide"
ggaggcaccctcagtaataacgct

SEQ ID NO: 1818 - DNA, 24 bp, Artificial Sequence
  source: /note="Description of Artificial Sequence: Synthetic oligonucleotide"
ggaggcaccttcagcagctatgct

SEQ ID NO: 1819 - DNA, 24 bp, Artificial Sequence
  source: /note="Description of Artificial Sequence: Synthetic oligonucleotide"
ggatacaccctcaccggctattat

SEQ ID NO: 1820 - DNA, 24 bp, Artificial Sequence
  source: /note="Description of Artificial Sequence: Synthetic oligonucleotide"
ggattcacacttagcagccatgtc

SEQ ID NO: 1821 - DNA, 24 bp, Artificial Sequence
  source: /note="Description of Artificial Sequence: Synthetic oligonucleotide"
ggattcaccatcagtaattatgaa

SEQ ID NO: 1822 - DNA, 24 bp, Artificial Sequence
  source: /note="Description of Artificial Sequence: Synthetic oligonucleotide"
ggattcaccttcaatagttatggc

SEQ ID NO: 1823 - DNA, 24 bp, Artificial Sequence
  source: /note="Description of Artificial Sequence: Synthetic oligonucleotide"
ggattcaccttcagtagctatggc

SEQ ID NO: 1824 - DNA, 24 bp, Artificial Sequence
  source: /note="Description of Artificial Sequence: Synthetic oligonucleotide"
ggattcaccttcagtagttatggc

SEQ ID NO: 1825 - DNA, 24 bp, Artificial Sequence
  source: /note="Description of Artificial Sequence: Synthetic oligonucleotide"
ggattcaccttcagtgactactac

SEQ ID NO: 1826 - DNA, 24 bp, Artificial Sequence
  source: /note="Description of Artificial Sequence: Synthetic oligonucleotide"
ggattcacctttagggactttgac

SEQ ID NO: 1827 - DNA, 24 bp, Artificial Sequence
  source: /note="Description of Artificial Sequence: Synthetic oligonucleotide"
ggattcacctttagtacctattgg

SEQ ID NO: 1828 - DNA, 24 bp, Artificial Sequence
  source: /note="Description of Artificial Sequence: Synthetic oligonucleotide"
ggattcacctttgatgattatgcc

SEQ ID NO: 1829 - DNA, 24 bp, Artificial Sequence
  source: /note="Description of Artificial Sequence: Synthetic oligonucleotide"
ggattcatgtttagaaactatgcc

SEQ ID NO: 1830 - DNA, 24 bp, Artificial Sequence
  source: /note="Description of Artificial Sequence: Synthetic oligonucleotide"
ggcgacaccttcaccggctactat

SEQ ID NO: 1831 - DNA, 24 bp, Artificial Sequence
  source: /note="Description of Artificial Sequence: Synthetic oligonucleotide"
ggcgacatcttcaccggctactat

SEQ ID NO: 1832 - DNA, 24 bp, Artificial Sequence
  source: /note="Description of Artificial Sequence: Synthetic oligonucleotide"
ggtggctccatcagtggttactac

SEQ ID NO: 1833 - DNA, 24 bp, Artificial Sequence
  source: /note="Description of Artificial Sequence: Synthetic oligonucleotide"
ggtggcttcatcagtaattactac

SEQ ID NO: 1834 - DNA, 24 bp, Artificial Sequence
  source: /note="Description of Artificial Sequence: Synthetic oligonucleotide"
ggtgggtccctcagtgattactac

SEQ ID NO: 1835 - DNA, 48 bp, Artificial Sequence
  source: /note="Description of Artificial Sequence: Synthetic oligonucleotide"
gtaaaagacgcgtataaatacaactactactactacggtttggacgtc

SEQ ID NO: 1836 - DNA, 48 bp, Artificial Sequence
  source: /note="Description of Artificial Sequence: Synthetic oligonucleotide"
gtaaaagacgcgtataaatggaactactactactacggtttggacgtc

SEQ ID NO: 1837 - DNA, 48 bp, Artificial Sequence
  source: /note="Description of Artificial Sequence: Synthetic oligonucleotide"
gtaaaagacgcgtataaattcaactactactactacggtttggacgtc

SEQ ID NO: 1838 - DNA, 48 bp, Artificial Sequence
  source: /note="Description of Artificial Sequence: Synthetic oligonucleotide"
gtgaaagatccctatggtgactataggaactactacggtatggacgtc

SEQ ID NO: 1839 - DNA, 24 bp, Artificial Sequence
  source: /note="Description of Artificial Sequence: Synthetic oligonucleotide"
gttagttggagtggtagtaccgta

SEQ ID NO: 1840 - DNA, 24 bp, Artificial Sequence
  source: /note="Description of Artificial Sequence: Synthetic oligonucleotide"
ttcaacccgatctttgatactgca

SEQ ID NO: 1841 - protein, 9 aa, Artificial Sequence
  source: /note="Description of Artificial Sequence: Synthetic peptide"
  MOD_RES (8)..(9): Any amino acid
AASSRGSXX

SEQ ID NO: 1842 - protein, 5 aa, Artificial Sequence
  source: /note="Description of Artificial Sequence: Synthetic peptide"
QQSRT

SEQ ID NO: 1843 - protein, 13 aa, Artificial Sequence
  source: /note="Description of Artificial Sequence: Synthetic peptide"
  MOD_RES (12)..(13): Any amino acid
RTSQSLSSYTHXX

SEQ ID NO: 1844 - protein, 20 aa, Artificial Sequence
  source: /note="Description of Artificial Sequence: Synthetic peptide"
  MOD_RES (19)..(20): Any amino acid
RTYYRSGWYNDYAESVKSXX

SEQ ID NO: 1845 - protein, 20 aa, Artificial Sequence
  source: /note="Description of Artificial Sequence: Synthetic peptide"
  MOD_RES (17)..(20): Any amino acid
SGHITVFGVNVDAFDMXXXX

SEQ ID NO: 1846 - protein, 9 aa, Artificial Sequence
  source: /note="Description of Artificial Sequence: Synthetic peptide"
  MOD_RES (8)..(9): Any amino acid
SYNAVWNXX

SEQ ID NO: 1847 - protein, 16 aa, Homo sapiens
ARDRIVDDYYYYGMDV

SEQ ID NO: 1848 - protein, 18 aa, Homo sapiens
AREDYGPGNYYSPNWFDP

SEQ ID NO: 1849 - protein, 17 aa, Homo sapiens
ETALVVSTTYLPHYFDN

SEQ ID NO: 1850 - protein, 8 aa, Homo sapiens
GFNFHNYG

SEQ ID NO: 1851 - protein, 8 aa, Homo sapiens
GFSFSHYA

SEQ ID NO: 1852 - protein, 8 aa, Homo sapiens
GFTFSSYN

SEQ ID NO: 1853 - protein, 17 aa, Homo sapiens
GIIPVLGTVHYAPKFQG

SEQ ID NO: 1854 - protein, 9 aa, Homo sapiens
HSYDRSLSG

SEQ ID NO: 1855 - protein, 8 aa, Homo sapiens
ISAGSSYI

SEQ ID NO: 1856 - protein, 8 aa, Homo sapiens
ISYDGENT

SEQ ID NO: 1857 - protein, 6 aa, Homo sapiens
NIGSET

SEQ ID NO: 1858 - protein, 5 aa, Homo sapiens
NYIIN

SEQ ID NO: 1859 - protein, 11 aa, Homo sapiens
QASQDIVNYLN

SEQ ID NO: 1860 - protein, 6 aa, Homo sapiens
QDIKKY

SEQ ID NO: 1861 - protein, 7 aa, Homo sapiens
QQYDNLP

SEQ ID NO: 1862 - protein, 10 aa, Homo sapiens
QQYDNLPPLT

SEQ ID NO: 1863 - protein, 11 aa, Homo sapiens
QVWDRSNYHQV

SEQ ID NO: 1864 - protein, 9 aa, Homo sapiens
SSNIGAGYD

SEQ ID NO: 1865 - protein, 7 aa, Homo sapiens
VASNLET

SEQ ID NO: 1866 - protein, 13 aa, Homo sapiens
VRDKVGPTPYFDS

SEQ ID NO: 1867 - protein, 8 aa, Homo sapiens
VWYDGSKK

SEQ ID NO: 1868 - protein, 9 aa, Artificial Sequence
  source: /note="Description of Artificial Sequence: Synthetic peptide"
AGTGAHFEF

SEQ ID NO: 1869 - protein, 107 aa, Artificial Sequence
  source: /note="Description of Artificial Sequence: Synthetic polypeptide"
AIQMTQSPSSLSASVGDRVTITCRASQAIRNDLGWYQQKPGKAPKLLIYASSSLQSGVPSRFSGSGSGTDFTLTISSLQPEDFATYYCLADYKYTWTFGQGTKVEIK

SEQ ID NO: 1870 - protein, 16 aa, Artificial Sequence
  source: /note="Description of Artificial Sequence: Synthetic peptide"
AKDGYRWKSYSYGLDV

SEQ ID NO: 1871 - protein, 16 aa, Artificial Sequence
  source: /note="Description of Artificial Sequence: Synthetic peptide"
AKDPYGDYRDYYGMDV

SEQ ID NO: 1872 - protein, 19 aa, Artificial Sequence
  source: /note="Description of Artificial Sequence: Synthetic peptide"
AKGGGYSGYDWDFYYGMDV

SEQ ID NO: 1873 - protein, 22 aa, Artificial Sequence
  source: /note="Description of Artificial Sequence: Synthetic peptide"
ARDGNYDILTGYYNYHYYGMDV

SEQ ID NO: 1874 - protein, 21 aa, Artificial Sequence
  source: /note="Description of Artificial Sequence: Synthetic peptide"
ARDGVVAAAGPPYHYHYGLDV

SEQ ID NO: 1875 - protein, 15 aa, Artificial Sequence
  source: /note="Description of Artificial Sequence: Synthetic peptide"
ARDQDGEMELRFFDY

SEQ ID NO: 1876 - protein, 15 aa, Artificial Sequence
  source: /note="Description of Artificial Sequence: Synthetic peptide"
ARDSSSSPRYYGMDV

SEQ ID NO: 1877 - protein, 11 aa, Artificial Sequence
  source: /note="Description of Artificial Sequence: Synthetic peptide"
AREFWPHGMDV

SEQ ID NO: 1878 - protein, 17 aa, Artificial Sequence
  source: /note="Description of Artificial Sequence: Synthetic peptide"
ARENNWNPYFFYYGMDV

SEQ ID NO: 1879 - protein, 18 aa, Artificial Sequence
  source: /note="Description of Artificial Sequence: Synthetic peptide"
ARERHRGSYYGYYDGMDV

SEQ ID NO: 1880 - protein, 21 aa, Artificial Sequence
  source: /note="Description of Artificial Sequence: Synthetic peptide"
ARGYCTNGVCYPHYYYSDMDV

SEQ ID NO: 1881 - protein, 16 aa, Artificial Sequence
  source: /note="Description of Artificial Sequence: Synthetic peptide"
ARMFYDILTGSDVFDI

SEQ ID NO: 1882 - protein, 16 aa, Artificial Sequence
  source: /note="Description of Artificial Sequence: Synthetic peptide"
ARMFYDILTNSDIFDI

SEQ ID NO: 1883 - protein, 10 aa, Artificial Sequence
  source: /note="Description of Artificial Sequence: Synthetic peptide"
ARRDWNSFDY

SEQ ID NO: 1884 - protein, 15 aa, Artificial Sequence
  source: /note="Description of Artificial Sequence: Synthetic peptide"
ARSGLASYYYYGMDV

SEQ ID NO: 1885 - protein, 15 aa, Artificial Sequence
  source: /note="Description of Artificial Sequence: Synthetic peptide"
ARSGLASYYYYSMDV

SEQ ID NO: 1886 - protein, 9 aa, Artificial Sequence
  source: /note="Description of Artificial Sequence: Synthetic peptide"
ASLYFNFWM

SEQ ID NO: 1887 - protein, 107 aa, Artificial Sequence
  source: /note="Description of Artificial Sequence: Synthetic polypeptide"
DIQMTQSPSSLSASVGDRLTITCRASQTISTYLNWFQQKVGNAPKLLIYSTSSLQSGVPARFSGSGSGTDFTLTISSLQPEDFATYYCQQSYSSPPTFGQGTKVEIK

SEQ ID NO: 1888 - protein, 107 aa, Artificial Sequence
  source: /note="Description of Artificial Sequence: Synthetic polypeptide"
DIQMTQSPSSLSASVGDRVTITCRASQDIGNYLAWFQQKPGKAPESLIYAASILQSGVPSKFSGSGSGTDFTLTISSLQPEDFATYYCQQYNTFPWTFGQGTKVEIK

SEQ ID NO: 1889 - protein, 107 aa, Artificial Sequence
  source: /note="Description of Artificial Sequence: Synthetic polypeptide"
DIQMTQSPSSLSASVGDRVTITCRASQDIRNDLGWYHQKPGKAPKCLIYGASSLQSGVPSRFSGSGSGTEFTLTISSLQPEDFATYYCLQHKNYMYTFGQGTKLEIK

SEQ ID NO: 1890 - protein, 107 aa, Artificial Sequence
  source: /note="Description of Artificial Sequence: Synthetic polypeptide"
DIQMTQSPSSLSASVGDRVTITCRASQDIRNDLGWYQQKPGKAPKCLIYGASSLQSGVPSRFSGSGSGTEFTLTISSLQPEDFATYYCLQHKNYMYTFGQGTKLEIK

SEQ ID NO: 1891 - protein, 107 aa, Artificial Sequence
  source: /note="Description of Artificial Sequence: Synthetic polypeptide"
DIQMTQSPSSLSASVGDRVTITCRASQGIRNDLAWYQQKPGKAPKRLIYGASSLHSGVPSRFSGSGSGTEFTLTISSLQPEDFATYSCLQHNSYPWTFGQGTKVEIK

SEQ ID NO: 1892 - protein, 107 aa, Artificial Sequence
  source: /note="Description of Artificial Sequence: Synthetic polypeptide"
DIQMTQSPSSLSASVGDRVTITCRASQGIRNDLGWYQQKPGKAPKRLIYGASSLQSGVPSRFSGSGSGTEFTLTISSLQPEDFATYSCLQHNSYPWTFGQGTKVEIK

SEQ ID NO: 1893 - protein, 107 aa, Artificial Sequence
  source: /note="Description of Artificial Sequence: Synthetic polypeptide"
DIQMTQSPSSLSASVGDRVTITCRASQNIDIYLNWYQERPGKAPNLLIYAASSLQSGVPSRFSGSGSGTDFTLTISSLQPEDFATYYCQQSYNTPFTFGGGTKVEIK

SEQ ID NO: 1894 - protein, 107 aa, Artificial Sequence
  source: /note="Description of Artificial Sequence: Synthetic polypeptide"
DIQMTQSPSSLSASVGDRVTITCRTSQSISTYLNWYQQKPGKAPKFLIYAASTLQSGVPSRFSGSGSRTDFTLTISSLQPEDFATYYCQQSVSVPYTFGQGTKLEIK

SEQ ID NO: 1895 - protein, 107 aa, Artificial Sequence
  source: /note="Description of Artificial Sequence: Synthetic polypeptide"
DIQMTQSPSSVSASVGDRVTITCRASQGISIWLAWYQQKPGKAPKLLISAASTLQSGVPSRFSGSGSGTDFTLTISSLQPEDFATYYCQQANSFPLTFGQGTKVEIK

SEQ ID NO: 1896 - protein, 107 aa, Artificial Sequence
  source: /note="Description of Artificial Sequence: Synthetic polypeptide"
DIQMTQSPSSVSASVGDRVTITCRASQGISSWLAWYQQKPGKAPKLLIYAASSLQSGVPSRFSGSGSGTDFTLTISSLQPEDFATYYCQQTNSFPLTFGGGTKVDIK

SEQ ID NO: 1897 - protein, 113 aa, Artificial Sequence
  source: /note="Description of Artificial Sequence: Synthetic polypeptide"
DIVMTQSPDSLAVSLGERATINCKSSQNLLYTSSNKNSLAWYQQKPGQPPELLIYWASTRESGVPDRFSGSGSGTDFILTISSLQAEDVAVYYCQQYYSSPWTFGQGTKVEIK

SEQ ID NO: 1898 - protein, 111 aa, Artificial Sequence
  source: /note="Description of Artificial Sequence: Synthetic polypeptide"
DIVMTQSPLSLPVTPGEPASISCRSSQSLLHSNGYNYLDWYLQKPGQSPQLLIYLGSNRASGVPDRFRGSGSDKDFTLKISRVGAEDVGVYYCMQALQTITFGQGTRLEIK

SEQ ID NO: 1899 - protein, 111 aa, Artificial Sequence
  source: /note="Description of Artificial Sequence: Synthetic polypeptide"
DIVMTQSPLSLPVTPGEPASISCRSSQSLLHSNGYNYLDWYLQKPGQSPQLLIYLGSNRASGVPDRFRGSGSGKDFTLKISRVEAEDVGLYYCMQALQTITFGQGTRLEIK

SEQ ID NO: 1900 - protein, 112 aa, Artificial Sequence
  source: /note="Description of Artificial Sequence: Synthetic polypeptide"
DIVMTQSPLSLSVTPGEPASISCRSSQNLLNRNGFNYLDWYLQKPGQSPQLLIYLGSNRASGVPDRFSGSGSGTDFTLKISRVEVEDVGVYYCMQAIQTPYTFGQGTKLEIK

SEQ ID NO: 1901 - protein, 112 aa, Artificial Sequence
  source: /note="Description of Artificial Sequence: Synthetic polypeptide"
DIVMTQTPLSSPVILGQPASISCRSSQSLVYSDGNTYLSWLQQRPGQPPRLLIYKISNRFSGVPDRFSGSGTGTDFTLKISRVEAEDVGIYYCMQTTQFPLTFGGGTKVEIK

SEQ ID NO: 1902 - protein, 16 aa, Homo sapiens
DIWWDDKKDYNPSLKS

SEQ ID NO: 1903 - protein, 7 aa, Homo sapiens
DTSKLAS

SEQ ID NO: 1904 - protein, 107 aa, Artificial Sequence
  source: /note="Description of Artificial Sequence: Synthetic polypeptide"
EIVLTQSPATLSLSPGERATLSCRASQSVTSYLAWYQQKPGQAPRLLIYDVSKRATGIPARFSGSGSGTDFTLTISSLEPEDFATYYCQQRSNWPPTFGQGTRLEIK

SEQ ID NO: 1905 - protein, 107 aa, Artificial Sequence
  source: /note="Description of Artificial Sequence: Synthetic polypeptide"
EIVLTQSPATLSLSPGERGTLSCRASQSINNYLAWYQQKPGQAPRLLIFDASNRATGIPARFSGSGSGTDFTLTISRIEPEDFAVYYCQQRTNWPLTFGGGTKVEIK

SEQ ID NO: 1906 - protein, 107 aa, Artificial Sequence
  source: /note="Description of Artificial Sequence: Synthetic polypeptide"
EIVMTQSPATLSLSPGERATLSCRPSQSVINNLAWYQQKPGQAPRLLIFGASSRATGIPARFSGSGSGTEFTLTISSLQSEDFALYYCQQYNNWPLTFGGGTKVEIK

SEQ ID NO: 1907 - protein, 107 aa, Artificial Sequence
  source: /note="Description of Artificial Sequence: Synthetic polypeptide"
EIVMTQSPATLSVSPGERATLSCRASQTILSNLAWYLQKPGQAPRLLIYGASTRATGLPARFSGSGSGTEFTLTISSLQSEDFAVYYCQQYNNWPLTFGGGTKVEIK

SEQ ID NO: 1908 - protein, 8 aa, Artificial Sequence
  source: /note="Description of Artificial Sequence: Synthetic peptide"
FNPIFDTA

SEQ ID NO: 1909 - protein, 9 aa, Homo sapiens
FQGSGYPFT

SEQ ID NO: 1910 - protein, 8 aa, Artificial Sequence
  source: /note="Description of Artificial Sequence: Synthetic peptide"
GDIFTGYY

SEQ ID NO: 1911 - protein, 8 aa, Artificial Sequence
  source: /note="Description of Artificial Sequence: Synthetic peptide"
GDTFTGYY

SEQ ID NO: 1912 - protein, 8 aa, Artificial Sequence
  source: /note="Description of Artificial Sequence: Synthetic peptide"
GFMFRNYA

SEQ ID NO: 1913 - protein, 8 aa, Artificial Sequence
  source: /note="Description of Artificial Sequence: Synthetic peptide"
GFTFDDYA

SEQ ID NO: 1914 - protein, 8 aa, Artificial Sequence
  source: /note="Description of Artificial Sequence: Synthetic peptide"
GFTFNSYG

SEQ ID NO: 1915 - protein, 8 aa, Artificial Sequence
  source: /note="Description of Artificial Sequence: Synthetic peptide"
GFTFRDFD

SEQ ID NO: 1916 - protein, 8 aa, Artificial Sequence
  source: /note="Description of Artificial Sequence: Synthetic peptide"
GFTFSDYY

SEQ ID NO: 1917 - protein, 8 aa, Artificial Sequence
  source: /note="Description of Artificial Sequence: Synthetic peptide"
GFTFSSYG

SEQ ID NO: 1918 - protein, 8 aa, Artificial Sequence
  source: /note="Description of Artificial Sequence: Synthetic peptide"
GFTFSTYW

SEQ ID NO: 1919 - protein, 8 aa, Artificial Sequence
  source: /note="Description of Artificial Sequence: Synthetic peptide"
GFTISNYE

SEQ ID NO: 1920 - protein, 8 aa, Artificial Sequence
  source: /note="Description of Artificial Sequence: Synthetic peptide"
GFTLSSHV

SEQ ID NO: 1921 - protein, 8 aa, Artificial Sequence
  source: /note="Description of Artificial Sequence: Synthetic peptide"
GGFISNYY

SEQ ID NO: 1922 - protein, 8 aa, Artificial Sequence
  source: /note="Description of Artificial Sequence: Synthetic peptide"
GGSISGYY

SEQ ID NO: 1923 - protein, 8 aa, Artificial Sequence
  source: /note="Description of Artificial Sequence: Synthetic peptide"
GGSLSDYY

SEQ ID NO: 1924 - protein, 8 aa, Artificial Sequence
  source: /note="Description of Artificial Sequence: Synthetic peptide"
GGTFSSYA

SEQ ID NO: 1925 - protein, 8 aa, Artificial Sequence
  source: /note="Description of Artificial Sequence: Synthetic peptide"
GGTLSNNA

SEQ ID NO: 1926 - protein, 8 aa, Artificial Sequence
  source: /note="Description of Artificial Sequence: Synthetic peptide"
GYTLTGYY

SEQ ID NO: 1927 - protein, 8 aa, Artificial Sequence
  source: /note="Description of Artificial Sequence: Synthetic peptide"
IGGSGGNT

SEQ ID NO: 1928 - protein, 8 aa, Artificial Sequence
  source: /note="Description of Artificial Sequence: Synthetic peptide"
IIPIFGTG

SEQ ID NO: 1929 - protein, 8 aa, Artificial Sequence
  source: /note="Description of Artificial Sequence: Synthetic peptide"
IKQDGSVK

SEQ ID NO: 1930 - protein, 8 aa, Artificial Sequence
  source: /note="Description of Artificial Sequence: Synthetic peptide"
ILDSGDNT

SEQ ID NO: 1931 - protein, 7 aa, Artificial Sequence
  source: /note="Description of Artificial Sequence: Synthetic peptide"
INHSGDT

SEQ ID NO: 1932 - protein, 8 aa, Artificial Sequence
  source: /note="Description of Artificial Sequence: Synthetic peptide"
INPTSGGT

SEQ ID NO: 1933 - protein, 8 aa, Artificial Sequence
  source: /note="Description of Artificial Sequence: Synthetic peptide"
INTNSGGT

SEQ ID NO: 1934 - protein, 8 aa, Artificial Sequence
  source: /note="Description of Artificial Sequence: Synthetic peptide"
ISDTGSHL

SEQ ID NO: 1935 - protein, 8 aa, Artificial Sequence
  source: /note="Description of Artificial Sequence: Synthetic peptide"
ISGPGGST

SEQ ID NO: 1936 - protein, 8 aa, Artificial Sequence
  source: /note="Description of Artificial Sequence: Synthetic peptide"
ISSTGNNR

SEQ ID NO: 1937 - protein, 8 aa, Artificial Sequence
  source: /note="Description of Artificial Sequence: Synthetic peptide"
ISTSGITI

SEQ ID NO: 1938 - protein, 8 aa, Artificial Sequence
  source: /note="Description of Artificial Sequence: Synthetic peptide"
ISWSSGTI

SEQ ID NO: 1939 - protein, 8 aa, Artificial Sequence
  source: /note="Description of Artificial Sequence: Synthetic peptide"
IWSDGSNK

SEQ ID NO: 1940 - protein, 8 aa, Artificial Sequence
  source: /note="Description of Artificial Sequence: Synthetic peptide"
IYYEGSND

SEQ ID NO: 1941 - protein, 7 aa, Artificial Sequence
  source: /note="Description of Artificial Sequence: Synthetic peptide"
IYYSGAT

SEQ ID NO: 1942 - protein, 7 aa, Artificial Sequence
  source: /note="Description of Artificial Sequence: Synthetic peptide"
IYYSGST

SEQ ID NO: 1943 - protein, 10 aa, Homo sapiens
KCQLSVGYMH

SEQ ID NO: 1944 - protein, 9 aa, Artificial Sequence
  source: /note="Description of Artificial Sequence: Synthetic peptide"
LADYKYTWT

SEQ ID NO: 1945 - protein, 9 aa, Artificial Sequence
  source: /note="Description of Artificial Sequence: Synthetic peptide"
LQHKNYMYT

SEQ ID NO: 1946 - protein, 9 aa, Artificial Sequence
  source: /note="Description of Artificial Sequence: Synthetic peptide"
LQHNSYPWT

SEQ ID NO: 1947 - protein, 8 aa, Artificial Sequence
  source: /note="Description of Artificial Sequence: Synthetic peptide"
LWYDGSNK

SEQ ID NO: 1948 - protein, 9 aa, Artificial Sequence
  source: /note="Description of Artificial Sequence: Synthetic peptide"
MQAIQTPYT

SEQ ID NO: 1949 - protein, 8 aa, Artificial Sequence
  source: /note="Description of Artificial Sequence: Synthetic peptide"
MQALQTIT

SEQ ID NO: 1950 - protein, 9 aa, Artificial Sequence
  source: /note="Description of Artificial Sequence: Synthetic peptide"
MQTTQFPLT

SEQ ID NO: 1951 - protein, 6 aa, Artificial Sequence
  source: /note="Description of Artificial Sequence: Synthetic peptide"
QAIRND

SEQ ID NO: 1952 - protein, 6 aa, Artificial Sequence
  source: /note="Description of Artificial Sequence: Synthetic peptide"
QDIGNY

SEQ ID NO: 1953 - protein, 6 aa, Artificial Sequence
  source: /note="Description of Artificial Sequence: Synthetic peptide"
QDIRND

SEQ ID NO: 1954 - protein, 6 aa, Artificial Sequence
  source: /note="Description of Artificial Sequence: Synthetic peptide"
QGIRND

SEQ ID NO: 1955 - protein, 6 aa, Artificial Sequence
  source: /note="Description of Artificial Sequence: Synthetic peptide"
QGISIW

SEQ ID NO: 1956 - protein, 6 aa, Artificial Sequence
  source: /note="Description of Artificial Sequence: Synthetic peptide"
QGISSW

SEQ ID NO: 1957 - protein, 6 aa, Artificial Sequence
  source: /note="Description of Artificial Sequence: Synthetic peptide"
QNIDIY

SEQ ID NO: 1958 - protein, 11 aa, Artificial Sequence
  source: /note="Description of Artificial Sequence: Synthetic peptide"
QNLLNRNGFNY

SEQ ID NO: 1959 - protein, 12 aa, Artificial Sequence
  source: /note="Description of Artificial Sequence: Synthetic peptide"
QNLLYTSSNKNS

SEQ ID NO: 1960 - protein, 9 aa, Artificial Sequence
  source: /note="Description of Artificial Sequence: Synthetic peptide"
QQANSFPLT

SEQ ID NO: 1961 - protein, 9 aa, Artificial Sequence
  source: /note="Description of Artificial Sequence: Synthetic peptide"
QQRSNWPPT

SEQ ID NO: 1962 - protein, 9 aa, Artificial Sequence
  source: /note="Description of Artificial Sequence: Synthetic peptide"
QQRTNWPLT

SEQ ID NO: 1963 - protein, 9 aa, Artificial Sequence
  source: /note="Description of Artificial Sequence: Synthetic peptide"
QQSVSVPYT

SEQ ID NO: 1964 - protein, 9 aa, Artificial Sequence
  source: /note="Description of Artificial Sequence: Synthetic peptide"
QQSYNTPFT

SEQ ID NO: 1965 - protein, 9 aa, Artificial Sequence
  source: /note="Description of Artificial Sequence: Synthetic peptide"
QQSYSSPPT

SEQ ID NO: 1966 - protein, 9 aa, Artificial Sequence
  source: /note="Description of Artificial Sequence: Synthetic peptide"
QQTNSFPLT

SEQ ID NO: 1967 - protein, 9 aa, Artificial Sequence
  source: /note="Description of Artificial Sequence: Synthetic peptide"
QQYNNWPLT

SEQ ID NO: 1968 - protein, 9 aa, Artificial Sequence
  source: /note="Description of Artificial Sequence: Synthetic peptide"
QQYNTFPWT

SEQ ID NO: 1969 - protein, 9 aa, Artificial Sequence
  source: /note="Description of Artificial Sequence: Synthetic peptide"
QQYYSSPWT

SEQ ID NO: 1970 - protein, 6 aa, Artificial Sequence
  source: /note="Description of Artificial Sequence: Synthetic peptide"
QSINNY

SEQ ID NO: 1971 - protein, 6 aa, Artificial Sequence
  source: /note="Description of Artificial Sequence: Synthetic peptide"
QSISTY

SEQ ID NO: 1972 - protein, 11 aa, Artificial Sequence
  source: /note="Description of Artificial Sequence: Synthetic peptide"
QSLLHSNGYNY

SEQ ID NO: 1973 - protein, 11 aa, Artificial Sequence
  source: /note="Description of Artificial Sequence: Synthetic peptide"
QSLVYSDGNTY

SEQ ID NO: 1974 - protein, 6 aa, Artificial Sequence
  source: /note="Description of Artificial Sequence: Synthetic peptide"
QSVINN

SEQ ID NO: 1975 - protein, 6 aa, Artificial Sequence
  source: /note="Description of Artificial Sequence: Synthetic peptide"
QSVTSY

SEQ ID NO: 1976 - protein, 6 aa, Artificial Sequence
  source: /note="Description of Artificial Sequence: Synthetic peptide"
QTILSN

SEQ ID NO: 1977 - protein, 6 aa, Artificial Sequence
  source: /note="Description of Artificial Sequence: Synthetic peptide"
QTISTY

SEQ ID NO: 1978 - protein, 10 aa, Homo sapiens
SMITNWYFDV

SEQ ID NO: 1979 - protein, 16 aa, Artificial Sequence
  source: /note="Description of Artificial Sequence: Synthetic peptide"
VKDAYKFNYYYYGLDV

SEQ ID NO: 1980 - protein, 16 aa, Artificial Sequence
  source: /note="Description of Artificial Sequence: Synthetic peptide"
VKDAYKWNYYYYGLDV

SEQ ID NO: 1981 - protein, 16 aa, Artificial Sequence
  source: /note="Description of Artificial Sequence: Synthetic peptide"
VKDAYKYNYYYYGLDV

SEQ ID NO: 1982 - protein, 16 aa, Artificial Sequence
  source: /note="Description of Artificial Sequence: Synthetic peptide"
VKDPYGDYRNYYGMDV

SEQ ID NO: 1983 - protein, 8 aa, Artificial Sequence
  source: /note="Description of Artificial Sequence: Synthetic peptide"
VSWSGSTV

SEQ ID NO: 1984 - DNA, 96 bp, Artificial Sequence
  source: /note="Description of Artificial Sequence: Synthetic oligonucleotide"
agagtcacgattaccgcggacgaatccacagacacagcctacatccatctgatcagcctgagatctgaggacacggccatgtattactgtgcgacg

SEQ ID NO: 1985 - DNA, 91 bp, Artificial Sequence
  source: /note="Description of Artificial Sequence: Synthetic oligonucleotide"
caggtgcagctggtacagtctggggctgaagtgaagaagcctgggtcctcggtgatggtctcctgccaggcctctggaggccccctcagaa

SEQ ID NO: 1986 - DNA, 39 bp, Artificial Sequence
  source: /note="Description of Artificial Sequence: Synthetic oligonucleotide"
ctcacattcggcggagggaccaaggttgagatcaaaaga

SEQ ID NO: 1987 - DNA, 69 bp, Artificial Sequence
  source: /note="Description of Artificial Sequence: Synthetic oligonucleotide"
gacatccagatgacccagtctccatcctccctgtctgcagctgtaggagacagagtcaccatcacttgc

SEQ ID NO: 1988 - DNA, 96 bp, Artificial Sequence
  source: /note="Description of Artificial Sequence: Synthetic oligonucleotide"
ggggtcccatcaaggttcagtggaagtggatctgggacagattttagtctcaccatcagcagcctgcagcctgaagatgttgcaacatattattgt

SEQ ID NO: 1989 - DNA, 42 bp, Artificial Sequence
  source: /note="Description of Artificial Sequence: Synthetic oligonucleotide"
tggctacgacaggcccctggacaaggccctgagtggatggga

SEQ ID NO: 1990 - DNA, 34 bp, Artificial Sequence
  source: /note="Description of Artificial Sequence: Synthetic oligonucleotide"
tggggccagggaaccctggtcaccgtctcctcag

SEQ ID NO: 1991 - DNA, 45 bp, Artificial Sequence
  source: /note="Description of Artificial Sequence: Synthetic oligonucleotide"
tggtatcaacagaaaccagggaaagcccctaagctcctgatctac

SEQ ID NO: 1992 - DNA, 376 bp, Artificial Sequence
  source: /note="Description of Artificial Sequence: Synthetic polynucleotide"
caggtgcagctggtacagtctggggctgaagtgaagaagcctgggtcggtgatggtctcctgccaggcctctggaggccccctcagaaactatattatcaactggctacgacaggcccctggacaaggccctgagtggatgggagggatcattcctgtcttgggtacagtacactacgcaccgaagttccagggcagagtcacgattaccgcggacgaatccacagacacagcctacatccatctgatcagcctgagatctgaggacacggccatgtattactgtgcgacggaaacagctctggttgtatctactacctacctaccacactactttgacaactggggccagggaaccctggtcaccgtctcctcag

SEQ ID NO: 1993 - protein, 110 aa, Artificial Sequence
  source: /note="Description of Artificial Sequence: Synthetic polypeptide"
DIQMTQSPSSLSAAVGDRVTITCQASQDIVNYLNWYQQKPGKAPKLLIYVASNLETGVPSRFSGSGSGTDFSLTISSLQPEDVATYYCQQYDNLPLTFGGGTKVEIKRTV

SEQ ID NO: 1994 - protein, 95 aa, Artificial Sequence
  source: /note="Description of Artificial Sequence: Synthetic polypeptide"
DIQMTQSPSSLSASVGDRVTITCQASQDISNYLNWYQQKPGKAPKLLIYDASNLETGVPSRFSGSGSGTDFTFTISSLQPEDIATYYCQQYDNLP

SEQ ID NO: 1995 - protein, 126 aa, Artificial Sequence [sequence omitted]

SEQ ID NO: 1996 - DNA, 51 bp, Homo sapiens
atgaactgggtccgccaggctccaggcaaggggctggagtgggtggcggtt

SEQ ID NO: 1997 - DNA, 51 bp, Homo sapiens
atgaactgggtccgccaggctccagggaaggggctggagtgggtctcacac

SEQ ID NO: 1998 - DNA, 24 bp, Homo sapiens
attagtgcgggtagtagttacata

SEQ ID NO: 1999 - DNA, 75 bp, Homo sapiens
caggtgcaactggtggagtctgggggaaatgtggtcaagcctgggacgtccctgagactgtcctgtgcagcgact

SEQ ID NO: 2000 - DNA, 379 bp, Homo sapiens
caggtgcagctggtacagtctggggctgaagtgaagaagcctgggtcctcggtgatggtctcctgccaggcctctggaggccccctcagaaactatattatcaactggctacgacaggcccctggacaaggccctgagtggatgggagggatcattcctgtcttgggtacagtacactacgcaccgaagttccagggcagagtcacgattaccgcggacgaatccacagacacagcctacatccatctgatcagcctgagatctgaggacacggccatgtattactgtgcgacggaaacagctctggttgtatctactacctacctaccacactactttgacaactggggccagggaaccctggtcaccgtctcctcag

SEQ ID NO: 2001 - DNA, 75 bp, Homo sapiens
gaggtgcagctggtggagaccgggggaggcctggcccagcctggggggtccctgagactctcctgtgcagcctct

SEQ ID NO: 2002 - DNA, 375 bp, Homo sapiens
gaggtgcagctggtggagaccgggggaggcctggcccagcctggggggtccctgagactctcctgtgcagcctctggattcacattcagtagttataacatgaactgggtccgccaggctccagggaaggggctggagtgggtctcacacattagtgcgggtagtagttacatatactactcagactcagtgaagggccgattcaccgtctccagagacaacgtcaggaactcagtatatctgcaaatgaacagcctgagagccgctgacacggctgtgtattactgtgcgagagaggattatggtccgggaaattattatagtcctaactggttcgacccctggggccagggaaccctggtcaccgtctcctca

SEQ ID NO: 2003 - DNA, 360 bp, Homo sapiens
gaggtgcagctggtggagtctgggggaaatgtggtcaagcctgggacgtccctgagactgtcctgtgcagcgactggattcaacttccataactacggcatgaactgggtccgccaggctccaggcaaggggctggagtgggtggcggttgtttggtatgatggaagtaagaaatactatgcagactccgtgacgggccgattcgccatctccagagacaattccaagaacactctgtatctgcaaatgaacagcctgagagtcgaggacacggctgtttattattgtgtgagagataaagtgggaccgactccctactttgactcctggggccagggaaccctggtcaccgtctcgagt

SEQ ID NO: 2004 - DNA, 48 bp, Homo sapiens
gcgagagaccgcatagtggacgactactactactacggtatggacgtc

SEQ ID NO: 2005 - DNA, 54 bp, Homo sapiens
gcgagagaggattatggtccgggaaattattatagtcctaactggttcgacccc

SEQ ID NO: 2006 - DNA, 24 bp, Homo sapiens
ggattcaacttccataactacggc

SEQ ID NO: 2007 - DNA, 24 bp, Homo sapiens
ggattcacattcagtagttataac

SEQ ID NO: 2008 - DNA, 39 bp, Homo sapiens
gtgagagataaagtgggaccgactccctactttgactcc

SEQ ID NO: 2009 - DNA, 24 bp, Homo sapiens
gtttggtatgatggaagtaagaaa

SEQ ID NO: 2010 - DNA, 114 bp, Homo sapiens
tactactcagactcagtgaagggccgattcaccgtctccagagacaacgtcaggaactcagtatatctgcaaatgaacagcctgagagccgctgacacggctgtgtattactgt

SEQ ID NO: 2011 - DNA, 114 bp, Homo sapiens
tactatgcagactccgtgacgggccgattcgccatctccagagacaattccaagaacactctgtatctgcaaatgaacagcctgagagtcgaggacacggctgtttattattgt

SEQ ID NO: 2012 - DNA, 114 bp, Homo sapiens
tattacgcagactccgtgaagggccgattctccatctccagagacaattccaagaacacagtgtctctgcaaatgaacagcctgagacctgaggacacggctctatattactgt

SEQ ID NO: 2013 - DNA, 34 bp, Homo sapiens
tggggccaaggggccacggtcaccgtctcctcag

SEQ ID NO: 2014 - DNA, 34 bp, Homo sapiens
tggggccagggaaccctggtcaccgtatcctcag

SEQ ID NO: 2015 - protein, 120 aa, Homo sapiens
EVQLVESGGNVVKPGTSLRLSCAATGFNFHNYGMNWVRQAPGKGLEWVAVVWYDGSKKYYADSVTGRFAISRDNSKNTLYLQMNSLRVEDTAVYYCVRDKVGPTPYFDSWGQGTLVTVSS

SEQ ID NO: 2016 - protein, 125 aa, Homo sapiens
EVQLVETGGGLAQPGGSLRLSCAASGFTFSSYNMNWVRQAPGKGLEWVSHISAGSSYIYYSDSVKGRFTVSRDNVRNSVYLQMNSLRAADTAVYYCAREDYGPGNYYSPNWFDPWGQGTLVTVSS

SEQ ID NO: 2017 - protein, 453 aa, Artificial Sequence
  source: /note="Description of Artificial Sequence: Synthetic polypeptide"
EVQLVESGGDLVQPGRSLRLSCVASGFTFDDYAMHWVRQAPGKGLEWVSGVSWSGSTVGYADSVKGRFTVSRDNAQKSLYLQMNSLRAEDTALYYCVKDAYKFNYYYYGLDVWGQGTTVTVSSASTKGPSVFPLAPSSKSTSGGTAALGCLVKDYFPEPVTVSWNSGALTSGVHTFPAVLQSSGLYSLSSVVTVPSSSLGTQTYICNVNHKPSNTKVDKKVEPKSCDKTHTCPPCPAPELLGGPSVFLFPPKPKDTLMISRTPEVTCVVVDVSHEDPEVKFNWYVDGVEVHNAKTKPREEQYNSTYRVVSVLTVLHQDWLNGKEYKCKVSNKALPAPIEKTISKAKGQPREPQVYTLPPSRDELTKNQVSLTCLVKGFYPSDIAVEWESNGQPENNYKTTPPVLDSDGSFFLYSKLTVDKSRWQQGNVFSCSVMHEALHNHYTQKSLSLSPGK

SEQ ID NO: 2018 - protein, 455 aa, Artificial Sequence
  source: /note="Description of Artificial Sequence: Synthetic polypeptide"
  MOD_RES (455)..(455): Any amino acid
QVQLVQSGAEVKKPGATVKVSCKISGHTLIKLSIHWVRQAPGKGLEWMGGYEGEVDEIFYAQKFQHRLTVIADTATDTVYMELGRLTSDDTAVYFCGTLGVTVTEAGLGIDDYWGQGTLVTVSSASTKGPSVFPLAPSSKSTSGGTAALGCLVKDYFPEPVTVSWNSGALTSGVHTFPAVLQSSGLYSLSSVVTVPSSSLGTQTYICNVNHKPSNTKVDKKVEPKSCDKTHTCPPCPAPELLGGPSVFLFPPKPKDTLMISRTPEVTCVVVDVSHEDPEVKFNWYVDGVEVHNAKTKPREEQYNSTYRVVSVLTVLHQDWLNGKEYKCKVSNKALPAPIEKTISKAKGQPREPQVYTLPPSRDELTKNQVSLTCLVKGFYPSDIAVEWESNGQPENNYKTTPPVLDSDGSFFLYSKLTVDKSRWQQGNVFSCSVMHEALHNHYTQKSLSLSPGKX

SEQ ID NO: 2019 - protein, 454 aa, Artificial Sequence
  source: /note="Description of Artificial Sequence: Synthetic polypeptide"
  MOD_RES (451)..(454): Any amino acid
QVTLRESGPALVKPTQTLTLTCTFSGFSLSTAGMSVGWIRQPPGKALEWLADIWWDDKKHYNPSLKDRLTISKDTSKNQVVLKVTNMDPADTATYYCARDMIFNFYFDVWGQGTTVTVSSASTKGPSVFPLAPSSKSTSGGTAALGCLVKDYFPEPVTVSWNSGALTSGVHTFPAVLQSSGLYSLSSVVTVPSSSLGTQTYICNVNHKPSNTKVDKKVEPKSCDKTHTCPPCPAPELLGGPSVFLFPPKPKDTLMISRTPEVTCVVVDVSHEDPEVKFNWYVDGVEVHNAKTKPREEQYNSTYRVVSVLTVLHQDWLNGKEYKCKVSNKALPAPIEKTISKAKGQPREPQVYTLPPSRDELTKNQVSLTCLVKGFYPSDIAVEWESNGQPENNYKTTPPVLDSDGSFFLYSKLTVDKSRWQQGNVFSCSVMHEALHNHYTQKSLSLSPGKXXXX

SEQ ID NO: 2020 - protein, 454 aa, Artificial Sequence
  source: /note="Description of Artificial Sequence: Synthetic polypeptide"
  MOD_RES (451)..(454): Any amino acid
QVTLRESGPALVKPTQTLTLTCTFSGFSLSTSGMSVGWIRQPPGKALEWLADIWWDDKKDYNPSLKSRLTISKDTSKNQVVLKVTNMDPADTATYYCARSMITNWYFDVWGAGTTVTVSSASTKGPSVFPLAPSSKSTSGGTAALGCLVKDYFPEPVTVSWNSGALTSGVHTFPAVLQSSGLYSLSSVVTVPSSSLGTQTYICNVNHKPSNTKVDKKVEPKSCDKTHTCPPCPAPELLGGPSVFLFPPKPKDTLMISRTPEVTCVVVDVSHEDPEVKFNWYVDGVEVHNAKTKPREEQYNSTYRVVSVLTVLHQDWLNGKEYKCKVSNKALPAPIEKTISKAKGQPREPQVYTLPPSRDELTKNQVSLTCLVKGFYPSDIAVEWESNGQPENNYKTTPPVLDSDGSFFLYSKLTVDKSRWQQGNVFSCSVMHEALHNHYTQKSLSLSPGKXXXX

SEQ ID NO: 2021 - DNA, 18 bp, Homo sapiens
aacattggaagtgaaact

SEQ ID NO: 2022 - DNA, 108 bp, Homo sapiens
aatcggccctcaggggtctccgaccgattctctggctccaagtctggcacctcagcctccctggccatcactggactccaggctgaggatgaggctgattattactgc

SEQ ID NO: 2023 - DNA, 108 bp, Homo sapiens
aatttggaaacaggggtcccatcaaggttcagtggcaggggatctgggacagattttactctcaccattagcagcctgcagcctgaagatattggaacatattactgt

SEQ ID NO: 2024 - DNA, 27 bp, Homo sapiens
agctccaacatcggggcaggttatgat

SEQ ID NO: 2025 - DNA, 30 bp, Homo sapiens
caacagtatgataatctgcctccgctcact

SEQ ID NO: 2026 - DNA, 27 bp, Homo sapiens
cactcctatgacagaagcctgagtggt

SEQ ID NO: 2027 - DNA, 18 bp, Homo sapiens
caggacattaagaagtat

SEQ ID NO: 2028 - DNA, 33 bp, Homo sapiens
caggtgtgggataggagtaattatcatcaggta

SEQ ID NO: 2029 - DNA, 75 bp, Homo sapiens
cagtctgtcgtgacgcagccgccctcagtgtctggggccccagggcagagagtcaccatctcctgcactgggagc

SEQ ID NO: 2030 - DNA, 330 bp, Homo sapiens
cagtctgtcgtgacgcagccgccctcagtgtctggggccccagggcagagagtcaccatctcctgcactgggagcagctccaacatcggggcaggttatgatgtacactggtaccagcagcttccaggaacagcccccaaactcctcatctatggcaacactaatcggccctcaggggtctccgaccgattctctggctccaagtctggcacctcagcctccctggccatcactggactccaggctgaggatgaggctgattattactgccactcctatgacagaagcctgagtggttcagtattcggcggagggaccaagctgaccgtc

SEQ ID NO: 2031 - DNA, 324 bp, Homo sapiens
gacatccagatgacccagtctccatcctccctgtctgcagctgtaggagacagagtcaccatcacttgccaggcgagtcaggacattgtcaactatttaaattggtatcaacagaaaccagggaaagcccctaagctcctgatctacgttgcatccaatttggagacaggggtcccatcaaggttcagtggaagtggatctgggacagattttagtctcaccatcagcagcctgcagcctgaagatgttgcaacatattattgtcaacaatatgataatctcccactcacattcggcggagggaccaaggttgagatcaaaaga

SEQ ID NO: 2032 - DNA, 78 bp, Homo sapiens
gacatccagatgacccagtctccatcttccctgtctgcatctgtaggagacagagtcaccatcacttgccaggcgagt

SEQ ID NO: 2033 - DNA, 108 bp, Homo sapiens
gaccggccctcagggatccctgagcgattctctggctccaactctgggaacacggccaccctgaccatcagcagggtcgaggccggggatgaggccgactattactgt

SEQ ID NO: 2034 - DNA, 51 bp, Homo sapiens
gtacactggtaccagcagcttccaggaacagcccccaaactcctcatctat

SEQ ID NO: 2035 - DNA, 51 bp, Homo sapiens
gtgcactggtaccagcagaagccaggccaggcccctgtgctggtcgtctat

SEQ ID NO: 2036 - DNA, 37 bp, Homo sapiens
tcagtattcggcggagggaccaagctgaccgtcctag

SEQ ID NO: 2037 - DNA, 75 bp, Homo sapiens
tcctatgtgctgactcagccaccctcggtgtcactggccccaggagggacggccgcgatcacctgtggaagaaac

SEQ ID NO: 2038 - DNA, 321 bp, Homo sapiens
tcctatgtgctgactcagcccccctcggtgtcactggccccaggagggacggccgcgatcacctgtggaagaaacaacattggaagtgaaactgtgcactggtaccagcagaagccaggccaggcccctgtgctggtcgtctatgatgatgacgaccggccctcagggatccctgagcgattctctggctccaactctgggaacacggccaccctgaccatcagcagggtcgaggccggggatgaggccgactattactgtcaggtgtgggataggagtaattatcatcaggtattcggcggagggaccaagctgaccgtc

SEQ ID NO: 2039 - DNA, 51 bp, Homo sapiens
ttaaattggtatcatcagaaaccagggaaagtccctgagctcctgatgcac

SEQ ID NO: 2040 - DNA, 31 bp, Homo sapiens
ttcggcggagggaccaaggtggagatcaaac

SEQ ID NO: 2041 - DNA, 31 bp, Homo sapiens
ttcggcggagggaccaagttgaccgtcctag

SEQ ID NO: 2042 - protein, 110 aa, Homo sapiens
QSVVTQPPSVSGAPGQRVTISCTGSSSNIGAGYDVHWYQQLPGTAPKLLIYGNTNRPSGVSDRFSGSKSGTSASLAITGLQAEDEADYYCHSYDRSLSGSVFGGGTKLTV

SEQ ID NO: 2043 - protein, 107 aa, Homo sapiens
SYVLTQPPSVSLAPGGTAAITCGRNNIGSETVHWYQQKPGQAPVLVVYDDDDRPSGIPERFSGSNSGNTATLTISRVEAGDEADYYCQVWDRSNYHQVFGGGTKLTV

SEQ ID NO: 2044 - protein, 213 aa, Artificial Sequence
  source: /note="Description of Artificial Sequence: Synthetic polypeptide"
DIQMTQSPSTLSASVGDRVTITCKCQLSVGYMHWYQQKPGKAPKLLIYDTSKLASGVPSRFSGSGSGTEFTLTISSLQPDDFATYYCFQGSGYPFTFGGGTKLEIKRTVAAPSVFIFPPSDEQLKSGTASVVCLLNNFYPREAKVQWKVDNALQSGNSQESVTEQDSKDSTYSLSSTLTLSKADYEKHKVYACEVTHQGLSSPVTKSFNRGEC

SEQ ID NO: 2045 - protein, 217 aa, Artificial Sequence
  source: /note="Description of Artificial Sequence: Synthetic polypeptide"
  MOD_RES (214)..(217): Any amino acid
DIQMTQSPSTLSASVGDRVTITCSASSRVGYMHWYQQKPGKAPKLLIYDTSKLASGVPSRFSGSGSGTEFTLTISSLQPDDFATYYCFQGSGYPFTFGGGTKVEIKRTVAAPSVFIFPPSDEQLKSGTASVVCLLNNFYPREAKVQWKVDNALQSGNSQESVTEQDSKDSTYSLSSTLTLSKADYEKHKVYACEVTHQGLSSPVTKSFNRGECXXXX

SEQ ID NO: 2046 - protein, 219 aa, Artificial Sequence
  source: /note="Description of Artificial Sequence: Synthetic polypeptide"
  MOD_RES (216)..(219): Any amino acid
EIVLTQSPGTLSLSPGERATLSCRASQIVSRNHLAWYQQKPGQAPRLLIFGASSRATGIPVRFSGSGSGTDFTLTINGLAPEDFAVYYCLSSDSSIFTFGPGTKVDFKRTVAAPSVFIFPPSDEQLKSGTASVVCLLNNFYPREAKVQWKVDNALQSGNSQESVTEQDSKDSTYSLSSTLTLSKADYEKHKVYACEVTHQGLSSPVTKSFNRGECXXXX

SEQ ID NO: 2047 - protein, 214 aa, Artificial Sequence
  source: /note="Description of Artificial Sequence: Synthetic polypeptide"
EIVMTQSPATLSVSPGERATLSCRASQTILSNLAWYLQKPGQAPRLLIYGASTRATGLPARFSGSGSGTEFTLTISSLQSEDFAVYYCQQYNNWPLTFGGGTKVEIKRTVAAPSVFIFPPSDEQLKSGTASVVCLLNNFYPREAKVQWKVDNALQSGNSQESVTEQDSKDSTYSLSSTLTLSKADYEKHKVYACEVTHQGLSSPVTKSFNRGEC

SEQ ID NO: 2048 - DNA, 384 bp, Artificial Sequence
  source: /note="Description of Artificial Sequence: Synthetic polynucleotide"
caggtccagctgcagcagagcggccccggactggtcaagccttcacagacactgagcctgacatgcgccattagcggagatagcgtgagctcctacaatgccgtgtggaactggatcaggcagtctccaagtcgaggactggagtggctgggacgaacatactatagatccgggtggtacaatgactatgctgaatcagtgaaaagccgaattactatcaaccccgatacctccaagaatcagttctctctgcagctgaacagtgtgacccctgaggacacagccgtgtactactgcgccagaagcggccatatcaccgtctttggcgtcaatgtggatgctttcgatatgtgggggcaggggactatggtcaccgtgtcaagc

SEQ ID NO: 2049 - DNA, 51 bp, Homo sapiens
atgcactgggtccgccaggctccaggcaagggactggagtgggtggcagtt

SEQ ID NO: 2050 - DNA, 75 bp, Homo sapiens
gaggtgcagctggtggagtctgggggaggcgtggtccagcctgggaggtccctgagactctcctgtgcggcctct

SEQ ID NO: 2051 - DNA, 369 bp, Homo sapiens
gaggtgcagctggtggagtctgggggaggcgtggtccagcctgggaggtccctgagactctcctgtgcggcctctggattcagcttcagtcactatgccatgcactgggtccgccaggctccaggcaagggactggagtgggtggcagttatatcttatgatggagaaaatacatattacgcagactccgtgaagggccgattctccatctccagagacaattccaagaacacagtgtctctgcaaatgaacagcctgagacctgaggacacggctctatattactgtgcgagagaccgcatagtggacgactactactactacggtatggacgtctggggccaaggggccacggtcaccgtctcctca

SEQ ID NO: 2052 - DNA, 345 bp, Artificial Sequence
  source: /note="Description of Artificial Sequence: Synthetic polynucleotide"
caggtgcagctacagcagtggggcgcaggactgttgaagccttcggagaccctgtccctcacctgcgctgtctatggtgggtccctcagtgattactactggagctggatccgccagcccccagggaaggggctggagtggattggggaaatcaatcatagtggagacaccaactacgacccgtccctcaagagtcgactcaccatctcagtagacacgtccaagaaccagttctccctgaagctgaactctgtgaccgccgcggacacggctgtgtattactgtgcgagcctgtatttcaatttttggatgtggggtcgaggagccctggtcaccgtctcctca

SEQ ID NO: 2053 - DNA, 384 bp, Artificial Sequence
  source: /note="Description of Artificial Sequence: Synthetic polynucleotide"
caggtgcagctgcaggagtcgggcccaggactggtgaagccttcggagaccctgtccctcacctgcactgtctctggtggctccatcagtggttactactggacctggatccggcagcccccagggaagggactggagtggattggatatatctattacagtggggccaccaactacaacccctccctcaagagtcgagtcaccatatcattagacacgtccaagaaccagttctccctgaaactgagctctgtgaccgctgcggacacggccgtgtattattgtgcgagagatgggaattacgatattttgactggttattataactaccactattacggcatggacgtctggggccaagggaccacggtcaccgtctcctca

SEQ ID NO: 2054 - DNA, 381 bp, Artificial Sequence
  source: /note="Description of Artificial Sequence: Synthetic polynucleotide"
caggtgcagctgcaggagtcgggcccaggactggtgaagccttcggagaccctgtccctcacctgcactgtctctggtggcttcatcagtaattactactggagctggatccggcagcccccagggaagggactggagtggattggatatatctattatagtgggagcaccaagtacaacccctccctcaagagtcgagtcaccatatcagtagacacgtccaagaaccagttctccctgaagctgagctctgtgagcgctgcggacacggccgtgtattactgtgcgagagatggggttgtagcagcagctggtcccccttaccactaccactacggtttggacgtctggggccaagggaccacggtcaccgtctcctca

SEQ ID NO: 2055 - DNA, 369 bp, Artificial Sequence
  source: /note="Description of Artificial Sequence: Synthetic polynucleotide"
caggtgcagctggagcagtctggggctgaggtgaagaagcctggggcctcagtgaggatctcctgtaaggcttctggcgacaccttcaccggctactatataaactgggtgcgccaggcccctggacaagggcttgagtggatgggatggatcaatactaacagtggtggcacatacttttcacagaaatttcaggtcagggtcatcctgaccagggacacgtccatcaacacagcctacatggagttgagcaggctgagatctgacgacacggccgtttattactgtgcgagaatgttttacgatattttgactaattctgatatttttgatatttggggccaagggacaatggtcaccgtctcttca

SEQ ID NO: 2056 - DNA, 354 bp, Artificial Sequence
  source: /note="Description of Artificial Sequence: Synthetic polynucleotide"
caggtgcagctggtgcagtctggggctgaggtgaagaagcctggggcctcagtgaaggtctcctgcaaggcttctggatacaccctcaccggctattatctacactgggtgcgacaggcccctggacaagggcttgagtggatgggatggatcaaccctaccagtggtggcacaaactatgcacagaagtttcagggcagggtcaccatgaccagggacacgtccatcagtgcagccttcatggagctgagtaggctgagatctgacgacacggccgtgtatcactgtgcgagagaattttggccccacggtatggacgtctggggccaagggaccacggtcaccgtctcctca

SEQ ID NO: 2057 - DNA, 366 bp, Artificial Sequence
  source: /note="Description of Artificial Sequence: Synthetic polynucleotide"
caggtgcagctggtgcagtctggggctgaggtgaagaagcctgggtcctcggtgaaggtctcctgcaaggcttctggaggcaccctcagtaataacgctttcagctgggtgcgacaggcccctggacaagggcttgagtggttgggagggttcaacccgatctttgatactgcaaactacgcgcaaaagttccagggcagaatcacgatcaccctggacgcatccacgggcacagtctacatggaactgagcagcctgagatctgaggacacgggcgtgtattactgcgcgggaactggggcccattttgagttctggggccagggaaccctggtcaccgtctcctcagcctccaccaagggccca

SEQ ID NO: 2058 - DNA, 366 bp, Artificial Sequence
  source: /note="Description of Artificial Sequence: Synthetic polynucleotide"
caggtgcagctggtgcagtctggggctgaggtgaagaagtctgggtcctcggtgaaggtctcctgcaaggcttctggaggcaccttcagcagctatgctatcagctgggtgcgacaggccccgggacaagggcttgagtggatgggagggatcatccctatctttggtacaggaaattacgcacagaagttccagggcagagtcacgattaccacggacgaatccacgagcacagcctatatggagctgagcagcctgagatctgaggacacggccgtgtattattgtgcgagagatagcagctcgtccccgaggtactacggtatggacgtctggggccacgggaccacggtcaccgtctcctca

SEQ ID NO: 2059 - DNA, 366 bp, Artificial Sequence
  source: /note="Description of Artificial Sequence: Synthetic polynucleotide"
caggtgcagctggtggagtctgggggaggcgtggtccagcctgggaggtccctgagactctcctgtgcagcgtcgggattcaccttcagtagttatggcatgcactgggtccgccaggctccaggcaaggggctggagtgggtggtatttctatggtatgatggaagtaataaacactatgcagactccgtgaagggccgattcaccatctccagagacaattccaagaacacattgtatttgcaaatgaatagtctgagagccgaggacacggctgtatattactgtgcgagaagtggactagcctcctattattattacagtatggacgtctggggccaagggaccacggtcaccgtctcctca

SEQ ID NO: 2060 - DNA, 366 bp, Artificial Sequence
  source: /note="Description of Artificial Sequence: Synthetic polynucleotide"
caggtgcagctggtggagtctgggggaggcgtggtccagcctgggaggtccctgagactctcctgtgcagcgtctggattcaccttcaatagttatggcatgcactgggtccgccaggctccaggcaaggggctggagtgggtgacattcatatggtctgatggaagtaataaatattatttagactccgtgaagggccgattcaccatctccagagacaattccaagaacacactgtatctgcaaatgaacagcctgagagccgaggacacggctgtatattactgtgcgagaagtggactagcctcctattattattacggtatggacgtctggggccaagggaccacggtcaccgtctcctca

SEQ ID NO: 2061 - DNA, 351 bp, Artificial Sequence
  source: /note="Description of Artificial Sequence: Synthetic polynucleotide"
caggtgcagctggtggagtctgggggaggcgtggtccagcctgggaggtccctgagactctcctgtgcagcgtctggattcaccttcagtagctatggcatgcactgggtccgccaggctccaggcaaggggctggagtgggtggcagttatatattatgaaggaagtaatgattactatgtagactccgtgaagggccgattcaccatctccagagacaattccaaaaacacgctatatctgcaaatgaacagcctgagagccgaggacacggctgtgtattactgtgcgagaagggactggaactcctttgactattggggccagggcaccctggtcaccgtctcctca

SEQ ID NO: 2062 - DNA, 372 bp, Artificial Sequence
  source: /note="Description of Artificial Sequence: Synthetic polynucleotide"
caggtgcagctggtggagtctgggggaggcttggtcaagcctggagggtccctgagactctcctgtgcagcctctggattcaccttcagtgactactacatgacctggatccgccaggttccagggaagggactggagtgggtttcatatatcagtagtactgggaataacagatattacggagactctgtgaagggccgattcgccatctcaagggacaacgccaagaacttactgtttctgcaaatgaacagcctgaaagccgaggacacggccgtttattactgtgcaagagagaataattggaatccttacttcttctactatggtatggacgtctggggccaagggaccacggtcaccgtctcctca

SEQ ID NO: 2063 - DNA, 366 bp, Artificial Sequence
  source: /note="Description of Artificial Sequence: Synthetic polynucleotide"
caggtgcagctggtggagtctgggggaggcttggtcaagcctggagggtccctgaggctctcctgtgcagcctctggattcaccttcagtgactactacatgacctggatccgtcaggctccagggagggggctggagtgggtttcatacattagtgatactggcagtcacttatactacgcagactctgtgaggggccgattcaccatctccagggacaacgccaaaaactcactgtatctgcaaatgaacaacctgagagccgaggacacggccgtatattactgtgcgcgagatcaggatggggaaatggaactacgtttctttgactactggggccagggaaccctggtcaccgtctcctca

SEQ ID NO: 2064 - DNA, 369 bp, Artificial Sequence
  source: /note="Description of Artificial Sequence: Synthetic polynucleotide"
caggtgcagttggagcaatctggggctgaggtgaagaagcctgggacctcagtgaggatctcctgcaaggcttctggcgacatcttcaccggctactatatgaactgggtgcgccaggcccctggacaagggcttgagtggatgggatggatcaatactaacagtggtggcacatacttttcacagagatttcagggcagggtcaccctgaccagggacacgtccatcagaacagcctacatggagttgagcaggctgagatctgacgacacggccgtttattactgtgcgagaatgttttacgatattttgactggttctgatgtttttgatatttggggccaagggacaatggtcaccgtctcttca

SEQ ID NO: 2065 - DNA, 369 bp, Artificial Sequence
  source: /note="Description of Artificial Sequence: Synthetic polynucleotide"
gaagtgcagctggtggagtctgggggagacttggtacagcctggcaggtccctgagactctcctgtgtagcctctggattcacctttgatgattatgccatgcactgggtccggcaagctccagggaagggcctggagtgggtctcaggtgttagttggagtggtagtaccgtaggctatgcggactctgtgaagggccgattcaccgtctccagagacaacgcccagaaatccctgtatctacaaatgaacagtctgagagctgaggacacggccttgtattactgtgtaaaagacgcgtataaatggaactactactactacggtttggacgtctggggccaagggaccacggtcaccgtctcctca

SEQ ID NO: 2066 - DNA, 369 bp, Artificial Sequence
  source: /note="Description of Artificial Sequence: Synthetic polynucleotide"
gaagtgcagctggtggagtctgggggagacttggtacagcctggcaggtccctgagactctcctgtgtagcctctggattcacctttgatgattatgccatgcactgggtccggcaagctccagggaagggcctggagtgggtctcaggtgttagttggagtggtagtaccgtaggctatgcggactctgtgaagggccgattcaccgtctccagagacaacgcccagaaatccctgtatctacaaatgaacagtctgagagctgaggacacggccttgtattactgtgtaaaagacgcgtataaatacaactactactactacggtttggacgtctggggccaagggaccacggtcaccgtctcctca

SEQ ID NO: 2067 - DNA, 369 bp, Artificial Sequence
  source: /note="Description of Artificial Sequence: Synthetic polynucleotide"
gaagtgcagctggtggagtctgggggagacttggtacagcctggcaggtccctgagactctcctgtgtagcctctggattcacctttgatgattatgccatgcactgggtccggcaagctccagggaagggcctggagtgggtctcaggtgttagttggagtggtagtaccgtaggctatgcggactctgtgaagggccgattcaccgtctccagagacaacgcccagaaatccctgtatctacaaatgaacagtctgagagctgaggacacggccttgtattactgtgtaaaagacgcgtataaattcaactactactactacggtttggacgtctggggccaagggaccacggtcaccgtctcctca

SEQ ID NO: 2068 - DNA, 369 bp, Artificial Sequence
  source: /note="Description of Artificial Sequence: Synthetic polynucleotide"
gaagtgcagctggtggagtctgggggaggcttggtacagcctggcaggtccctgagactctcctgtgcagcctctggattcacctttgatgattatgccatgcactgggtccggcaaactccagggaagggcctggagtggatctcaggtattagttggagtagtggtaccatagtctatgcagactctgtgaagggccgcttcaccatctccagagacaacgccaagaactccctgtatctgcaaatgaacagtctgagaggtgaggacacggccttgtatcactgtgcaaaagatgggtataggtggaagtcctactcgtacggtttggacgtctggggccaagggaccacggtcaccgtctcctca

SEQ ID NO: 2069 - DNA, 369 bp, Artificial Sequence
  source: /note="Description of Artificial Sequence: Synthetic polynucleotide"
gaggtgcagctggtggagtctgggggaggcttgggacagcctggggggtccctgagactctcctgtggagcctctggattcatgtttagaaactatgccatgagttgggtccgccaggctccagggaaggggctggagtgggtctcaactattcttgatagtggtgataacacatattacgcagactccgtgaagggccggttcaccatctccagggacaattccaagaacacactgtatctgcaaatgaacagcctgagagccgaggacacggccgtttattactgtgcgaaagatccctatggtgactacagggactactacggtatggacgtctggggccaagggaccacggtcaccgtctcctca

SEQ ID NO: 2070 - DNA, 378 bp, Artificial Sequence
  source: /note="Description of Artificial Sequence: Synthetic polynucleotide"
gaggtgcagctggtggagtctgggggaggcttggtacacccgggggggtccctgagactctcctgtgaagcctctggattcacacttagcagccatgtcatgagctgggtccgccaggttccaggcaaggggctggagtgggtctcacgtatcagtggtcctggtggtagtacaaagtatgcggactccgtgcagggccggttcaccacctccagagacaactccaagaacaccctgtatctacaaatgaacagcctgatagccgaggactcggccgcatattactgtgcgaaaggggggggatatagtggctacgattgggacttttattacggtatggacgtctggggccaagggaccacggtcaccgtctcctca

SEQ ID NO: 2071 - DNA, 384 bp, Artificial Sequence
  source: /note="Description of Artificial Sequence: Synthetic polynucleotide"
gaggtgcagctggtggagtctgggggaggcttggtacagcctggagggtccctgagactctcctgtgcagcctctggattcaccatcagtaattatgaaatgaactgggtccgtcaggctccagggaaggggctggagtgggtttcatacattagtactagtggtattaccatatactacgcagactctgtgcagggccgattcaccatctccagagacaatgccaagaactcactgtatctgcaattgaacagcctgagagccgaggacacggctgtttattactgtgcgcggggatattgtacaaatggtgtatgctatccccattactactactccgatatggacgtctggggccaagggaccacggtcaccgtctcctca

SEQ ID NO: 2072 - DNA, 369 bp, Artificial Sequence
  source: /note="Description of Artificial Sequence: Synthetic polynucleotide"
gaggtgcagctggtggagtctgggggaggcttggtacagcctggggggtccctgagactctcctgtggagcctctggattcacctttagggactttgacatgaattgggtccgtcaggctccagggagggggctggagtgggtctcaggtattggtggtagtggtggtaacacatattacgcagactccgtgaagggccggttcaccatatccagggacaattccaaaaacacgctgtttctgcaaatgagcagcctgagagccgaggacacggccgtttattactgtgtgaaagatccctatggtgactataggaactactacggtatggacgtctggggccaagggaccacggtcaccgtctcctca

SEQ ID NO: 2073 - DNA, 375 bp, Artificial Sequence
  source: /note="Description of Artificial Sequence: Synthetic polynucleotide"
gaggtgcagctggtggagtctgggggaggcttggtccagcctggggggtccctgagactctcctgtgaagcctctggattcacctttagtacctattggatgagttgggtccgccaggctccagggaaggggctagagtgggtggccaacataaaacaagatggaagtgtgaaatactttgtggactctgtgaagggccgattcaccgtctccagagacaacgccaagaactccctgtatctgcaaatgaacagcctgagagccgaggacacggctctgtatcactgtgcgagagagaggcacagagggagctactacggctactacgacggtatggacgtctggggccaagggaccacggtcaccgtctcctca

SEQ ID NO: 2074 - protein, 130 aa, Artificial Sequence
  source: /note="Description of Artificial Sequence: Synthetic polypeptide"
  MOD_RES (129)..(130): Any amino acid
QVQLQQSGPGLVKPSQTLSLTCAISGDSVSSYNAVWNWIRQSPSRGLEWLGRTYYRSGWYNDYAESVKSRITINPDTSKNQFSLQLNSVTPEDTAVYYCARSGHITVFGVNVDAFDMWGQGTMVTVSSXX

SEQ ID NO: 2075 - protein, 123 aa, Homo sapiens
EVQLVESGGGVVQPGRSLRLSCAASGFSFSHYAMHWVRQAPGKGLEWVAVISYDGENTYYADSVKGRFSISRDNSKNTVSLQMNSLRPEDTALYYCARDRIVDDYYYYGMDVWGQGATVTVSS

SEQ ID NO: 2076 - protein, 98 aa, Artificial Sequence
  source: /note="Description of Artificial Sequence: Synthetic polypeptide"
QVQLVQSGAEVKKPGSSVKVSCKASGGTFSSYAISWVRQAPGQGLEWMGGIIPIFGTANYAQKFQGRVTITADESTSTAYMELSSLRSEDTAVYYCAR

SEQ ID NO: 2077 - protein, 123 aa, Artificial Sequence
  source: /note="Description of Artificial Sequence: Synthetic polypeptide"
EVQLVESGGDLVQPGRSLRLSCVASGFTFDDYAMHWVRQAPGKGLEWVSGVSWSGSTVGYADSVKGRFTVSRDNAQKSLYLQMNSLRAEDTALYYCVKDAYKFNYYYYGLDVWGQGTTVTVSS

SEQ ID NO: 2078 - protein, 123 aa, Artificial Sequence
  source: /note="Description of Artificial Sequence: Synthetic polypeptide"
EVQLVESGGDLVQPGRSLRLSCVASGFTFDDYAMHWVRQAPGKGLEWVSGVSWSGSTVGYADSVKGRFTVSRDNAQKSLYLQMNSLRAEDTALYYCVKDAYKWNYYYYGLDVWGQGTTVTVSS

SEQ ID NO: 2079 - protein, 123 aa, Artificial Sequence
  source: /note="Description of Artificial Sequence: Synthetic polypeptide"
EVQLVESGGDLVQPGRSLRLSCVASGFTFDDYAMHWVRQAPGKGLEWVSGVSWSGSTVGYADSVKGRFTVSRDNAQKSLYLQMNSLRAEDTALYYCVKDAYKYNYYYYGLDVWGQGTTVTVSS

SEQ ID NO: 2080 - protein, 123 aa, Artificial Sequence
  source: /note="Description of Artificial Sequence: Synthetic polypeptide"
EVQLVESGGGLGQPGGSLRLSCGASGFMFRNYAMSWVRQAPGKGLEWVSTILDSGDNTYYADSVKGRFTISRDNSKNTLYLQMNSLRAEDTAVYYCAKDPYGDYRDYYGMDVWGQGTTVTVSS

SEQ ID NO: 2081 - protein, 126 aa, Artificial Sequence
  source: /note="Description of Artificial Sequence: Synthetic polypeptide"
EVQLVESGGGLVHPGGSLRLSCEASGFTLSSHVMSWVRQVPGKGLEWVSRISGPGGSTKYADSVQGRFTTSRDNSKNTLYLQMNSLIAEDSAAYYCAKGGGYSGYDWDFYYGMDVWGQGTTVTVSS

SEQ ID NO: 2082 - protein, 128 aa, Artificial Sequence
  source: /note="Description of Artificial Sequence: Synthetic polypeptide"
EVQLVESGGGLVQPGGSLRLSCAASGFTISNYEMNWVRQAPGKGLEWVSYISTSGITIYYADSVQGRFTISRDNAKNSLYLQLNSLRAEDTAVYYCARGYCTNGVCYPHYYYSDMDVWGQGTTVTVSS

SEQ ID NO: 2083 - protein, 125 aa, Artificial Sequence
  source: /note="Description of Artificial Sequence: Synthetic polypeptide"
EVQLVESGGGLVQPGGSLRLSCEASGFTFSTYWMSWVRQAPGKGLEWVANIKQDGSVKYFVDSVKGRFTVSRDNAKNSLYLQMNSLRAEDTALYHCARERHRGSYYGYYDGMDVWGQGTTVTVSS

SEQ ID NO: 2084 - protein, 123 aa, Artificial Sequence
  source: /note="Description of Artificial Sequence: Synthetic polypeptide"
EVQLVESGGGLVQPGGSLRLSCGASGFTFRDFDMNWVRQAPGRGLEWVSGIGGSGGNTYYADSVKGRFTISRDNSKNTLFLQMSSLRAEDTAVYYCVKDPYGDYRNYYGMDVWGQGTTVTVSS

SEQ ID NO: 2085 - protein, 123 aa, Artificial Sequence
  source: /note="Description of Artificial Sequence: Synthetic polypeptide"
EVQLVESGGGLVQPGRSLRLSCAASGFTFDDYAMHWVRQTPGKGLEWISGISWSSGTIVYADSVKGRFTISRDNAKNSLYLQMNSLRGEDTALYHCAKDGYRWKSYSYGLDVWGQGTTVTVSS

SEQ ID NO: 2086 - protein, 123 aa, Artificial Sequence
  source: /note="Description of Artificial Sequence: Synthetic polypeptide"
QVQLEQSGAEVKKPGASVRISCKASGDTFTGYYINWVRQAPGQGLEWMGWINTNSGGTYFSQKFQVRVILTRDTSINTAYMELSRLRSDDTAVYYCARMFYDILTNSDIFDIWGQGTMVTVSS

SEQ ID NO: 2087 - protein, 123 aa, Artificial Sequence
  source: /note="Description of Artificial Sequence: Synthetic polypeptide"
QVQLEQSGAEVKKPGTSVRISCKASGDIFTGYYMNWVRQAPGQGLEWMGWINTNSGGTYFSQRFQGRVTLTRDTSIRTAYMELSRLRSDDTAVYYCARMFYDILTGSDVFDIWGQGTMVTVSS

SEQ ID NO: 2088 - protein, 127 aa, Artificial Sequence
  source: /note="Description of Artificial Sequence: Synthetic polypeptide"
QVQLQESGPGLVKPSETLSLTCTVSGGFISNYYWSWIRQPPGKGLEWIGYIYYSGSTKYNPSLKSRVTISVDTSKNQFSLKLSSVSAADTAVYYCARDGVVAAAGPPYHYHYGLDVWGQGTTVTVSS

SEQ ID NO: 2089 - protein, 128 aa, Artificial Sequence
  source: /note="Description of Artificial Sequence: Synthetic polypeptide"
QVQLQESGPGLVKPSETLSLTCTVSGGSISGYYWTWIRQPPGKGLEWIGYIYYSGATNYNPSLKSRVTISLDTSKNQFSLKLSSVTAADTAVYYCARDGNYDILTGYYNYHYYGMDVWGQGTTVTVSS

SEQ ID NO: 2090 - protein, 115 aa, Artificial Sequence
  source: /note="Description of Artificial Sequence: Synthetic polypeptide"
QVQLQQWGAGLLKPSETLSLTCAVYGGSLSDYYWSWIRQPPGKGLEWIGEINHSGDTNYDPSLKSRLTISVDTSKNQFSLKLNSVTAADTAVYYCASLYFNFWMWGRGALVTVSS

SEQ ID NO: 2091 - protein, 122 aa, Artificial Sequence
  source: /note="Description of Artificial Sequence: Synthetic polypeptide"
QVQLVESGGGLVKPGGSLRLSCAASGFTFSDYYMTWIRQAPGRGLEWVSYISDTGSHLYYADSVRGRFTISRDNAKNSLYLQMNNLRAEDTAVYYCARDQDGEMELRFFDYWGQGTLVTVSS

SEQ ID NO: 2092 - protein, 124 aa, Artificial Sequence
  source: /note="Description of Artificial Sequence: Synthetic polypeptide"
QVQLVESGGGLVKPGGSLRLSCAASGFTFSDYYMTWIRQVPGKGLEWVSYISSTGNNRYYGDSVKGRFAISRDNAKNLLFLQMNSLKAEDTAVYYCARENNWNPYFFYYGMDVWGQGTTVTVSS

SEQ ID NO: 2093 - protein, 122 aa, Artificial Sequence
  source: /note="Description of Artificial Sequence: Synthetic polypeptide"
QVQLVESGGGVVQPGRSLRLSCAASGFTFNSYGMHWVRQAPGKGLEWVTFIWSDGSNKYYLDSVKGRFTISRDNSKNTLYLQMNSLRAEDTAVYYCARSGLASYYYYGMDVWGQGTTVTVSS

SEQ ID NO: 2094 - protein, 117 aa, Artificial Sequence
  source: /note="Description of Artificial Sequence: Synthetic polypeptide"
QVQLVESGGGVVQPGRSLRLSCAASGFTFSSYGMHWVRQAPGKGLEWVAVIYYEGSNDYYVDSVKGRFTISRDNSKNTLYLQMNSLRAEDTAVYYCARRDWNSFDYWGQGTLVTVSS

SEQ ID NO: 2095 - protein, 122 aa, Artificial Sequence
  source: /note="Description of Artificial Sequence: Synthetic polypeptide"
QVQLVESGGGVVQPGRSLRLSCAASGFTFSSYGMHWVRQAPGKGLEWVVFLWYDGSNKHYADSVKGRFTISRDNSKNTLYLQMNSLRAEDTAVYYCARSGLASYYYYSMDVWGQGTTVTVSS

SEQ ID NO: 2096 - protein, 118 aa, Artificial Sequence
  source: /note="Description of Artificial Sequence: Synthetic polypeptide"
QVQLVQSGAEVKKPGASVKVSCKASGYTLTGYYLHWVRQAPGQGLEWMGWINPTSGGTNYAQKFQGRVTMTRDTSISAAFMELSRLRSDDTAVYHCAREFWPHGMDVWGQGTTVTVSS

SEQ ID NO: 2097 - protein, 122 aa, Artificial Sequence
  source: /note="Description of Artificial Sequence: Synthetic polypeptide"
QVQLVQSGAEVKKPGSSVKVSCKASGGTLSNNAFSWVRQAPGQGLEWLGGFNPIFDTANYAQKFQGRITITLDASTGTVYMELSSLRSEDTGVYYCAGTGAHFEFWGQGTLVTVSSASTKGP

SEQ ID NO: 2098 - protein, 122 aa, Artificial Sequence
  source: /note="Description of Artificial Sequence: Synthetic polypeptide"
QVQLVQSGAEVKKSGSSVKVSCKASGGTFSSYAISWVRQAPGQGLEWMGGIIPIFGTGNYAQKFQGRVTITTDESTSTAYMELSSLRSEDTAVYYCARDSSSSPRYYGMDVWGHGTTVTVSS

SEQ ID NO: 2099 - DNA, 309 bp, Artificial Sequence
  source: /note="Description of Artificial Sequence: Synthetic polynucleotide"
gatattcagatgacccagagcccttccagcctgtccgcttcagtgggggatcgagtgaccattacctgccgaaccagccagagcctgagctcctacacgcactggtatcagcagaagcccggcaaagcccctaagctgctgatctacgccgcttctagtcgggggtccggagtgccaagccggttctccggatctgggagtggaaccgactttaccctgacaatttcaagcctgcagcccgaggatttcgctacatactactgtcagcagagcagaactttcgggcagggcactaaggtggagatcaaa

SEQ ID NO: 2100 - DNA, 333 bp, Homo sapiens
gacatccagatgacccagtctccatcttccctgtctgcatctgtaggagacagagtcaccatcacttgccaggcgagtcaggacattaagaagtatttaaattggtatcatcagaaaccagggaaagtccctgagctcctgatgcacgatgcatccaatttggaaacaggggtcccatcaaggttcagtggcaggggatctgggacagattttactctcaccattagcagcctgcagcctgaagatattggaacatattactgtcaacagtatgataatctgcctccgctcactttcggcggagggaccaaggtggagatcaaacgaactgtg

SEQ ID NO: 2101 - DNA, 321 bp, Artificial Sequence
  source: /note="Description of Artificial Sequence: Synthetic polynucleotide"
gaaatagtgatgacgcagtctccagccaccctctctttgtctccaggggaaagagccaccctctcctgcaggcccagtcagagtgttatcaataacttagcctggtaccagcagaaacctggccaggctcccagactcctcatctttggtgcatcctccagggccactggtatcccagccagattcagtggcagtgggtctgggacagagtttactctcaccatcagcagcctgcagtctgaagattttgcactttattactgtcagcagtataataactggccgctcaccttcggcggagggaccaaggtggagatcaaa

SEQ ID NO: 2102 - DNA, 321 bp, Artificial Sequence
  source: /note="Description of Artificial Sequence: Synthetic polynucleotide"
gaaatagtgatgacgcagtctccagccaccctgtctgtgtctccaggggaaagagccaccctctcctgcagggccagtcagactattctcagcaacttagcctggtacctacagaaacctggccaggctcccaggctcctcatctatggtgcatccaccagggccactggtctcccagccaggttcagtggcagtgggtctgggacagagttcactctcaccatcagcagcctgcagtctgaagattttgcagtttattactgtcagcagtataataactggcctctcactttcggcggagggaccaaggtggagatcaaa

SEQ ID NO: 2103 - DNA, 321 bp, Artificial Sequence
  source: /note="Description of Artificial Sequence: Synthetic polynucleotide"
gaaatagtgttgacgcagtctccagccactctgtctttgtctccaggggaaagaggcaccctctcctgcagggccagtcagagtattaacaactacttagcctggtaccagcagaaacctggccaggctcccaggctcctcatctttgatgcatccaacagggccactggcatcccagccaggttcagtggcagtgggtctgggacagacttcactctcaccatcagcagaatagagcctgaagattttgcagtttattactgtcagcagcgtaccaactggccgctcactttcggcggagggaccaaggtggagatcaaa

SEQ ID NO: 2104 - DNA, 321 bp, Artificial Sequence
  source: /note="Description of Artificial Sequence: Synthetic polynucleotide"
gaaattgtgttgacacagtctccagccaccctgtctttgtctccaggggaaagagccaccctctcctgcagggccagtcagagtgttaccagctacttagcctggtaccaacagaaacctggccaggctcccaggctcctcatctatgatgtatccaagagggccactggcatcccagccaggttcagtggcagtgggtctgggacagacttcactctcaccatcagcagcctagagcctgaagattttgcaacttattattgtcagcagcgtagcaactggcctcccaccttcggccaagggacacgactggagattaaa

SEQ ID NO: 2105 - DNA, 321 bp, Artificial Sequence
  source: /note="Description of Artificial Sequence: Synthetic polynucleotide"
gacatccagatgacccagtctccatcctcactgtctgcatctgtaggagacagagtcaccatcacttgtcgggcgagtcaggacattggtaattatttagcctggtttcagcagaaaccagggaaagcccctgagtccctgatctatgctgcatccattttacaaagtggggtcccatcaaagttcagcggcagtggatctgggacagatttcactctcaccatcagcagcctgcagcctgaagattttgcaacttattactgccaacagtataatactttcccgtggacgttcggccaagggaccaaggtggaaatcaaa

SEQ ID NO: 2106 - DNA, 321 bp, Artificial Sequence
  source: /note="Description of Artificial Sequence: Synthetic polynucleotide"
gacatccagatgacccagtctccatcctccctgtctgcatctgtaggagacagactcaccatcacttgccgggcaagtcagaccattagcacctatttaaattggtttcagcagaaagtagggaatgcccctaaactcctgatctattctacatccagtttgcaaagtggggtcccagcaaggttcagtggcagtggatctgggacagatttcactctcaccatcagcagtctgcaacctgaagattttgcaacttactactgtcaacagagttacagtagtcctccgacgttcggccaagggaccaaggtggaaatcaaa

SEQ ID NO: 2107 - DNA, 321 bp, Artificial Sequence
  source: /note="Description of Artificial Sequence: Synthetic polynucleotide"
gacatccagatgacccagtctccatcctccctgtctgcatctgtaggagacagagtcaccatcacttgccggacaagtcagagcattagcacctatttaaattggtatcagcagaaaccaggaaaagcccctaagttcctgatctatgctgcatccaccttacaaagtggggtcccatcaaggttcagtggcagtggatctcggacagatttcactctcaccatcagcagtctgcaacctgaagattttgcaacttactactgtcaacagagtgtcagtgtcccgtacacttttggccaggggaccaagctggagatcaaa

SEQ ID NO: 2108 - DNA, 321 bp, Artificial Sequence
  source: /note="Description of Artificial Sequence: Synthetic polynucleotide"
gacatccagatgacccagtctccatcctccctgtctgcatctgtaggagacagagtcaccatcacttgccgggcaagtcaaaacattgacatctatttaaattggtatcaggagaggccagggaaagcccctaatctcctgatctatgctgcatccagtttgcaaagtggggtcccatcaaggttcagtggcagtggatctgggacagatttcactctcaccatcagtagtctgcaacctgaagattttgcaacttactactgtcaacagagttacaataccccgttcactttcggcggcgggaccaaggtggagatcaaa

SEQ ID NO: 2109 - DNA, 321 bp, Artificial Sequence
  source: /note="Description of Artificial Sequence: Synthetic polynucleotide"
gacatccagatgacccagtctccatcctccctgtctgcatctgtaggagacagagtcaccatcacttgccgggcaagtcaggacataagaaatgatttaggctggtatcagcagaaaccagggaaagcccctaagtgcctgatctatggtgcatccagtttgcaaagtggggtcccatcaaggttcagcggcagtggatctgggacagaattcactctcacaatcagcagcctgcagcctgaagattttgcaacttattactgtctacaacataaaaattacatgtacacttttggccaggggaccaagttggagatcaaa

SEQ ID NO: 2110 - DNA, 321 bp, Artificial Sequence
  source: /note="Description of Artificial Sequence: Synthetic polynucleotide"
gacatccagatgacccagtctccatcctccctgtctgcatctgtaggagacagagtcaccatcacttgccgggcaagtcagggcattagaaatgatttagcctggtatcagcagaaaccagggaaagcccctaagcgcctgatctatggtgcatccagtttacacagtggggtcccatcaaggttcagcggcagtggatctgggacagaattcactctcacaatcagcagcctgcagcctgaagattttgcaacttattcctgtctacagcataatagttacccgtggacgttcggccaagggaccaaggtggaaatcaaa

SEQ ID NO: 2111 - DNA, 321 bp, Artificial Sequence
  source: /note="Description of Artificial Sequence: Synthetic polynucleotide"
gacatccagatgacccagtctccatcctccctgtctgcatctgtaggagacagagtcaccatcacttgccgggcaagtcagggcattagaaatgatttaggctggtatcagcagaaaccagggaaagcccctaagcgcctgatctatggtgcatccagtttgcaaagtggggtcccgtcaaggttcagcggcagtggatctgggacagaattcactctcacaatcagcagcctgcagcctgaagattttgccacttattcctgtctacagcataatagttacccgtggacgttcggccaagggaccaaggtggaaatcaaa

SEQ ID NO: 2112 - DNA, 321 bp, Artificial Sequence
  source: /note="Description of Artificial Sequence: Synthetic polynucleotide"
gacatccagatgacccagtctccatcctccctgtctgcatctgttggagacagagtcaccatcacttgccgggcaagtcaggacataagaaatgatttaggctggtatcaccagaaaccagggaaagcccctaagtgcctgatctatggtgcatccagtttgcaaagtggggtcccatctaggttcagcggcagtggatctgggacagaattcactctcacaatcagcagcctgcagcctgaagattttgcaacttattactgtctacaacataaaaattacatgtacacttttggccaggggaccaagttggagatcaaa

SEQ ID NO: 2113 - DNA, 321 bp, Artificial Sequence
  source: /note="Description of Artificial Sequence: Synthetic polynucleotide"
gacatccagatgacccagtctccatcttccgtgtctgcatctgtaggagacagagtcaccatcacttgtcgggcgagtcagggtattagcagctggttagcctggtatcagcagaaaccagggaaagcccctaagctcctgatctatgctgcatccagtttgcaaagtggggtcccatcaaggttcagcggcagtggatctgggacagatttcactctcaccatcagcagcctgcagcctgaagattttgcaacttactattgtcaacagactaacagtttccctctcactttcggcggagggaccaaagtggatatcaaa

SEQ ID NO: 2114 - DNA, 321 bp, Artificial Sequence
  source: /note="Description of Artificial Sequence: Synthetic polynucleotide"
gacatccagatgacccagtctccatcttccgtgtctgcatctgtaggagacagagtcaccatcacttgtcgggcgagtcagggtattagcatctggttagcctggtatcagcagaaaccagggaaagcccctaaactcctgatctctgctgcgtccactttgcaaagtggggtcccatcaaggttcagcggcagtggatctgggacagatttcactctcaccatcagcagcctgcagcctgaagattttgcaacttactattgtcaacaggctaacagtttcccgttgacgttcggccaagggaccaaggtggaaatcaaa

SEQ ID NO: 2115 - DNA, 339 bp, Artificial Sequence
  source: /note="Description of Artificial Sequence: Synthetic polynucleotide"
gacatcgtgatgacccagtctccagactccctggctgtgtctctgggcgagagggccaccatcaactgcaagtccagccagaatcttttatacacctccagcaataagaactccttagcttggtaccagcagaaaccaggacagcctcctgagctgctcatttactgggcatctacccgggaatccggggtccctgaccgattcagtggcagcgggtctgggacagatttcattctcaccatcagcagcctgcaggctgaagatgtggcagtttattactgtcagcaatattatagtagtccgtggacgttcggccaagggaccaaggtggaaatcaaa

SEQ ID NO: 2116 - DNA, 336 bp, Artificial Sequence
  source: /note="Description of Artificial Sequence: Synthetic polynucleotide"
gatattgtgatgacccagactccactctcctcacctgtcattcttggacagccggcctccatctcctgcaggtctagtcaaagcctcgtatacagtgatggaaacacctacttgagttggcttcagcagaggccaggccagcctccaagactcctaatttataagatttctaaccggttctctggggtcccagacagattcagtggcagtgggacagggacagatttcacactgaaaatcagcagggtggaagctgaggatgtcggaatttattactgcatgcaaactacacaatttccgctcactttcggcggagggaccaaggtggagatcaaa

SEQ ID NO: 2117 - DNA, 333 bp, Artificial Sequence
  source: /note="Description of Artificial Sequence: Synthetic polynucleotide"
gatattgtgatgactcagtctccactctccctgcccgtcacccctggagagccggcctccatctcctgcaggtctagtcagagcctcctacatagtaatggatacaactatttggattggtacctgcagaagccagggcagtctccacaactcctgatctatttgggttctaatcgggcctccggggtccctgacaggttcaggggcagtggatcagacaaggactttacactgaaaatcagcagagtgggggctgaggatgttggggtttattactgcatgcaagctctacaaactatcaccttcggccaagggacacgactggagattaaa

SEQ ID NO: 2118 - DNA, 333 bp, Artificial Sequence
  source: /note="Description of Artificial Sequence: Synthetic polynucleotide"
gatattgtgatgactcagtctccactctccctgcccgtcacccctggagagccggcctccatctcctgcaggtctagtcagagcctcctacatagtaatggatacaactatttggattggtacctgcagaagccagggcagtctccgcaactcctgatctatttgggttctaatcgggcctccggggtccctgacaggttcaggggcagtggatcaggcaaagactttacactgaaaatcagcagagtggaggctgaggatgttggactttattactgcatgcaagctctacaaactatcaccttcggccaagggacacgactggagattaaa

SEQ ID NO: 2119 - DNA, 336 bp, Artificial Sequence
  source: /note="Description of Artificial Sequence: Synthetic polynucleotide"
gatattgtgatgactcagtctccactctccctgtccgtcacccctggagagccggcctccatctcctgcaggtccagtcagaacctcctaaatagaaatggattcaactatttggattggtatttgcagaagccagggcagtctccacagctcctgatctatttgggttctaatcgggcctccggggtccctgacaggttcagtggcagtggatcaggcacagattttacactgaaaatcagcagagtggaggttgaggatgttggggtttattattgcatgcaagctatacaaactccgtacacttttggccaggggaccaagctggagatcaaa

SEQ ID NO: 2120 - DNA, 321 bp, Artificial Sequence
  source: /note="Description of Artificial Sequence: Synthetic polynucleotide"
gccatccagatgacccagtctccatcctccctgtctgcatctgtaggagacagagtcaccatcacttgccgggcaagtcaggccattagaaatgatttaggctggtatcagcagaaaccagggaaagcccctaagctcctgatctatgcttcatccagtttacaaagtggggtcccttcaaggttcagcggcagtggatctggcacagatttcactctcaccatcagcagcctgcagcctgaagattttgcaacttattactgtcttgcagattacaaatacacgtggacgttcggccaagggaccaaggtggaaatcaaa

SEQ ID NO: 2121 - protein, 105 aa, Artificial Sequence
  source: /note="Description of Artificial Sequence: Synthetic polypeptide"
  MOD_RES (104)..(105): Any amino acid
DIQMTQSPSSLSASVGDRVTITCRTSQSLSSYTHWYQQKPGKAPKLLIYAASSRGSGVPSRFSGSGSGTDFTLTISSLQPEDFATYYCQQSRTFGQGTKVEIKXX

SEQ ID NO: 2122 - protein, 111 aa, Homo sapiens
DIQMTQSPSSLSASVGDRVTITCQASQDIKKYLNWYHQKPGKVPELLMHDASNLETGVPSRFSGRGSGTDFTLTISSLQPEDIGTYYCQQYDNLPPLTFGGGTKVEIKRTV

SEQ ID NO: 2123 - protein, 131 aa, Homo sapiens
MKLPVRLLVLMFWIPASSSDIVMTQSPLSLPVTPGEPASISCRSSQRLLSSYGHTYLHWYLQKPGQSPQLLIYEVSNRFSGVPDRFSGSGSGTDFTLKISRVEAEDVGVYYCSQSTHVPLTFGQGTKVEIK

SEQ ID NO: 2124 - protein, 219 aa, Artificial Sequence
  source: /note="Description of Artificial Sequence: Synthetic polypeptide"
DVVMTQSPLSLPVTPGEPASISCRSSQSLAKSYGNTYLSWYLQKPGQSPQLLIYGISNRFSGVPDRFSGSGSGTDFTLKISRVEAEDVGVYYCLQGTHQPYTFGQGTKVEIKRTVAAPSVFIFPPSDEQLKSGTASVVCLLNNFYPREAKVQWKVDNALQSGNSQESVTEQDSKDSTYSLSSTLTLSKADYEKHKVYACEVTHQGLSSPVTKSFNRGEC

SEQ ID NO: 2125 - protein, 141 aa, Homo sapiens
MEWSGVFIFLLSVTAGVHSEVQLVESGGGLVKPGGSLRLSCAASGYTFSNYWIGWVRQAPGKGLEWIGDIYPGGNYIRNNEKFKDKTTLSADTSKNTAYLQMNSLKTEDTAVYYCGSSFGSNYVFAWFTYWGQGTLVTVSS

SEQ ID NO: 2126 - protein, 141 aa, Homo sapiens
MEWSGVFIFLLSVTAGVHSQVQLVQSGPDVKKPGTSMKMSCKTSGYTFSNYWIGWVRQAPGQGLEWIGDIYPGGNYIRNNEKFKDKTTLTADTSTSTAYMQLGSLRSEDTAVYYCGSSFGSNYVFAWFTYWGQGTLVTVSS

SEQ ID NO: 2127 - protein, 451 aa, Artificial Sequence
  source: /note="Description of Artificial Sequence: Synthetic polypeptide"
QVQLVQSGAEVKKPGASVKVSCKGSGYTFTSYWMHWVRQAPGQRLEWIGEIDPSESNTNYNQKFKGRVTLTVDISASTAYMELSSLRSEDTAVYYCARGGYDGWDYAIDYWGQGTLVTVSSASTKGPSVFPLAPSSKSTSGGTAALGCLVKDYFPEPVTVSWNSGALTSGVHTFPAVLQSSGLYSLSSVVTVPSSSLGTQTYICNVNHKPSNTKVDKKVEPKSCDKTHTCPPCPAPELAGAPSVFLFPPKPKDTLMISRTPEVTCVVVDVSHEDPEVKFNWYVDGVEVHNAKTKPREEQYNSTYRVVSVLTVLHQDWLNGKEYKCKVSNKALPAPIEKTISKAKGQPREPQVYTLPPSRDELTKNQVSLTCLVKGFYPSDIAVEWESNGQPENNYKTTPPVLDSDGSFFLYSKLTVDKSRWQQGNVFSCSVLHEALHSHYTQKSLSLSPGK

SEQ ID NO: 2128 - protein, 451 aa, Artificial Sequence
  source: /note="Description of Artificial Sequence: Synthetic polypeptide"
QVQLVQSGAEVKKPGASVKVSCKGSGYTFTSYWMHWVRQAPGQRLEWIGEIDPSESNTNYNQKFKGRVTLTVDISASTAYMELSSLRSEDTAVYYCARGGYDGWDYAIDYWGQGTLVTVSSASTKGPSVFPLAPSSKSTSGGTAALGCLVKDYFPEPVTVSWNSGALTSGVHTFPAVLQSSGLYSLSSVVTVPSSSLGTQTYICNVNHKPSNTKVDKKVEPKSCDKTHTCPPCPAPELAGAPSVFLFPPKPKDTLMISRTPEVTCVVVDVSHEDPEVKFNWYVDGVEVHNAKTKPREEQYNSTYRVVSVLTVLHQDWLNGKEYKCKVSNKALPAPIEKTISKAKGQPREPQVYTLPPSRDELTKNQVSLTCLVKGFYPSDIAVEWESNGQPENNYKTTPPVLDSDGSFFLYSKLTVDKSRWQQGNVFSCSVMHEALKFHYTQKSLSLSPGK

SEQ ID NO: 2129 - protein, 451 aa, Artificial Sequence
  source: /note="Description of Artificial Sequence: Synthetic polypeptide"
QVQLVQSGAEVKKPGASVKVSCKGSGYTFTSYWMHWVRQAPGQRLEWIGEIDPSESNTNYNQKFKGRVTLTVDISASTAYMELSSLRSEDTAVYYCARGGYDGWDYAIDYWGQGTLVTVSSASTKGPSVFPLAPSSKSTSGGTAALGCLVKDYFPEPVTVSWNSGALTSGVHTFPAVLQSSGLYSLSSVVTVPSSSLGTQTYICNVNHKPSNTKVDKKVEPKSCDKTHTCPPCPAPELAGAPSVFLFPPKPKDTLYITREPEVTCVVVDVSHEDPEVKFNWYVDGVEVHNAKTKPREEQYNSTYRVVSVLTVLHQDWLNGKEYKCKVSNKALPAPIEKTISKAKGQPREPQVYTLPPSRDELTKNQVSLTCLVKGFYPSDIAVEWESNGQPENNYKTTPPVLDSDGSFFLYSKLTVDKSRWQQGNVFSCSVMHEALHNHYTQKSLSLSPGK

SEQ ID NO: 2130 - protein, 112 aa, Artificial Sequence [sequence omitted]

SEQ ID NO: 2131 - protein, 121 aa, Artificial Sequence [sequence omitted]

SEQ ID NO: 2132 - protein, 294 aa, Artificial Sequence
  source: /note="Description of Artificial Sequence: Synthetic polypeptide"
MALPVTALLLPLALLLHAARPGSDFVLTQSPHSLSVTPGESASISCKSSHSLIHGDRNNYLAWYVQKPGRSPQLLIYLASSRASGVPDRFSGSGSDKDFTLKISRVETEDVGTYYCMQGRESPWTFGQGTKVDIKGGSSRSSSSGGGGSGGGGQAQLVQSGPEVRKPGTSVKVSCKAPGNTLKTYDLHWVRSVPGQGLQWMGWISHEGDKKVIVERFKAKVTIDWDRSTNTAYLQLSGLTSGDTAVYYCAKGSKHRLRDYALYDDDGALNWAVDVDYLSNLEFWGQGTAVTVSS

SEQ ID NO: 2133 - protein, 278 aa, Artificial Sequence
  source: /note="Description of Artificial Sequence: Synthetic polypeptide"
MALPVTALLLPLALLLHAARPGSQSALTQPPSASGSPGQSITISCTGTSNNFVSWYQQHAGKAPKLVIYDVNKRPSGVPDRFSGSKSGNTASLTVSGLQTDDEAVYYCGSLVGNWDVIFGGGTKLTVLGGSSRSSSSGGGGSGGGGQMQLQESGPGLVKPSETLSLTCSVSGASISDSYWSWIRRSPGKGLEWIGYVHKSGDTNYSPSLKSRVNLSLDTSKNQVSLSLVAATAADSGKYYCARTLHGRRIYGIVAFNEWFTYFYMDVWGNGTQVTVSS

SEQ ID NO: 2134 - protein, 266 aa, Artificial Sequence
  source: /note="Description of Artificial Sequence: Synthetic polypeptide"
MALPVTALLLPLALLLHAARPGSEIVLTQSPGTLSLSPGETAIISCRTSQYGSLAWYQQRPGQAPRLVIYSGSTRAAGIPDRFSGSRWGPDYNLTISNLESGDFGVYYCQQYEFFGQGTKVQVDIKRGGSSRSSSSGGGGSGGGGQVQLVQSGGQMKKPGESMRISCRASGYEFIDCTLNWIRLAPGKRPEWMGWLKPRGGAVNYARPLQGRVTMTRDVYSDTAFLELRSLTVDDTAVYFCTRGKNCDYNWDFEHWGRGTPVIVSS

SEQ ID NO: 2135 - protein, 263 aa, Artificial Sequence
  source: /note="Description of Artificial Sequence: Synthetic polypeptide"
MALPVTALLLPLALLLHAARPGSDIQMTQSPSSLSARVGDTVTITCQANGYLNWYQQRRGKAPKLLIYDGSKLERGVPARFSGRRWGQEYNLTINNLQPEDVATYFCQVYEFIVPGTRLDLKGGSSRSSSSGGGGSGGGGQVHLSQSGAAVTKPGASVRVSCEASGYKISDHFIHWWRQAPGQGLQWVGWINPKTGQPNNPRQFQGRVSLTRQASWDFDTYSFYMDLKAVRSDDTAIYFCARQRSDFWDFDVWGSGTQVTVSS

SEQ ID NO: 2136 - protein, 266 aa, Artificial Sequence
  source: /note="Description of Artificial Sequence: Synthetic polypeptide"
MALPVTALLLPLALLLHAARPGSEIVLTQSPGTLSLSPGETAIISCRTSQYGSLAWYQQRPGQAPRLVIYSGSTRAAGIPDRFSGSRWGPDYNLTISNLESGDFGVYYCQQYEFFGQGTKVQVDIKRGGSSRSSSSGGGGSGGGGQVQLVQSGGQMKKPGESMRISCRASGYEFIDSTLNWIRLAPGKRPEWMGWLKPRGGAVNYARPLQGRVTMTRDVYSDTAFLELRSLTVDDTAVYFCTRGKNADYNWDFEHWGRGTPVIVSS

SEQ ID NO: 2137 - protein, 261 aa, Artificial Sequence
  source: /note="Description of Artificial Sequence: Synthetic polypeptide"
QRLVESGGGVVQPGSSLRLSCAASGFDFSRQGMHWVRQAPGQGLEWVAFIKYDGSEKYHADSVWGRLSISRDNSKDTLYLQMNSLRVEDTATYFCVREAGGPDYRNGYNYYDFYDGYYNYHYMDVWGKGTTVTVSSGGGGSGGGGSGGGGSQSALTQPASVSGSPGQSITISCNGTSNDVGGYESVSWYQQHPGKAPKVVIYDVSKRPSGVSNRFSGSKSGNTASLTISGLQAEDEGDYYCKSLTSTRRRVFGTGTKLTVL

SEQ ID NO: 2138 - protein, 258 aa, Artificial Sequence
  source: /note="Description of Artificial Sequence: Synthetic polypeptide"
QSALTQPPSASGSPGQSITISCTGTSNNFVSWYQQHAGKAPKLVIYDVNKRPSGVPDRFSGSKSGNTASLTVSGLQTDDEAVYYCGSLVGNWDVIFGGGTKLTVLGGSSRSSSSGGGGSGGGGQPQLQESGPTLVEASETLSLTCAVSGDSTAACNSFWGWVRQPPGKGLEWVGSLSHCASYWNRGWTYHNPSLKSRLTLALDTPKNLVFLKLNSVTAADTATYYCARFGGEVLRYTDWPKPAWVDLWGRGTLVTVSS

SEQ ID NO: 2139 - protein, 243 aa, Artificial Sequence
  source: /note="Description of Artificial Sequence: Synthetic polypeptide"
EIVLTQSPGTLSLSPGETAIISCRTSQYGSLAWYQQRPGQAPRLVIYSGSTRAAGIPDRFSGSRWGPDYNLTISNLESGDFGVYYCQQYEFFGQGTKVQVDIKRGGSSRSSSSGGGGSGGGGQVQLVQSGGQMKKPGESMRISCRASGYEFIDCTLNWIRLAPGKRPEWMGWLKPRGGAVNYARPLQGRVTMTRDVYSDTAFLELRSLTVDDTAVYFCTRGKNCDYNWDFEHWGRGTPVIVSS

SEQ ID NO: 2140 - protein, 240 aa, Artificial Sequence
  source: /note="Description of Artificial Sequence: Synthetic polypeptide"
DIQMTQSPSSLSARVGDTVTITCQANGYLNWYQQRRGKAPKLLIYDGSKLERGVPARFSGRRWGQEYNLTINNLQPEDVATYFCQVYEFIVPGTRLDLKGGSSRSSSSGGGGSGGGGQVHLSQSGAAVTKPGASVRVSCEASGYKISDHFIHWWRQAPGQGLQWVGWINPKTGQPNNPRQFQGRVSLTRQASWDFDTYSFYMDLKAVRSDDTAIYFCARQRSDFWDFDVWGSGTQVTVSS

SEQ ID NO: 2141 - protein, 271 aa, Artificial Sequence
  source: /note="Description of Artificial Sequence: Synthetic polypeptide"
DFVLTQSPHSLSVTPGESASISCKSSHSLIHGDRNNYLAWYVQKPGRSPQLLIYLASSRASGVPDRFSGSGSDKDFTLKISRVETEDVGTYYCMQGRESPWTFGQGTKVDIKGGSSRSSSSGGGGSGGGGQAQLVQSGPEVRKPGTSVKVSCKAPGNTLKTYDLHWVRSVPGQGLQWMGWISHEGDKKVIVERFKAKVTIDWDRSTNTAYLQLSGLTSGDTAVYYCAKGSKHRLRDYALYDDDGALNWAVDVDYLSNLEFWGQGTAVTVSS

SEQ ID NO: 2142 - protein, 10 aa, Artificial Sequence
  source: /note="Description of Artificial Sequence: Synthetic peptide"
GRNIKDTYIH

SEQ ID NO: 2143 - protein, 9 aa, Artificial Sequence
  source: /note="Description of Artificial Sequence: Synthetic peptide"
QQHYTTPPT

SEQ ID NO: 2144 - protein, 12 aa, Artificial Sequence
  source: /note="Description of Artificial Sequence: Synthetic peptide"
RASQDVNTAVAW

SEQ ID NO: 2145 - protein, 17 aa, Artificial Sequence
  source: /note="Description of Artificial Sequence: Synthetic peptide"
RIYPTNGYTRYADSVKG

SEQ ID NO: 2146 - protein, 7 aa, Artificial Sequence
  source: /note="Description of Artificial Sequence: Synthetic peptide"
SASFLYS

SEQ ID NO: 2147 - protein, 11 aa, Artificial Sequence
  source: /note="Description of Artificial Sequence: Synthetic peptide"
WGGDGFYAMDY

SEQ ID NO: 2148 - protein, 10 aa, Homo sapiens
AAWDASLRGV

SEQ ID NO: 2149 - protein, 10 aa, Artificial Sequence
  source: /note="Description of Artificial Sequence: Synthetic peptide"
AAWDERVRLM

SEQ ID NO: 2150 - protein, 10 aa, Artificial Sequence
  source: /note="Description of Artificial Sequence: Synthetic peptide"
AAWDNQVRLG

SEQ ID NO: 2151 - protein, 10 aa, Artificial Sequence
  source: /note="Description of Artificial Sequence: Synthetic peptide"
AAWDPQVRLA

SEQ ID NO: 2152 - protein, 10 aa, Artificial Sequence
  source: /note="Description of Artificial Sequence: Synthetic peptide"
AAWDQQVRKT

SEQ ID NO: 2153 - protein, 10 aa, Artificial Sequence
  source: /note="Description of Artificial Sequence: Synthetic peptide"
AAWDQQVRLD

SEQ ID NO: 2154 - protein, 20 aa, Homo sapiens
ALPRSGYLISPHYYYYALDV

SEQ ID NO: 2155 - protein, 20 aa, Artificial Sequence
  source: /note="Description of Artificial Sequence: Synthetic peptide"
ALPRSGYLMKKNYYYYALDV

SEQ ID NO: 2156 - protein, 20 aa, Artificial Sequence
  source: /note="Description of Artificial Sequence: Synthetic peptide"
ALPRSGYLMKPGYYYYALDV

SEQ ID NO: 2157 - protein, 20 aa, Artificial Sequence
  source: /note="Description of Artificial Sequence: Synthetic peptide"
ALPRSGYLMKTGYYYYALDV

SEQ ID NO: 2158 - protein, 20 aa, Artificial Sequence
  source: /note="Description of Artificial Sequence: Synthetic peptide"
ALPRSGYLVKHGYYYYALDV

SEQ ID NO: 2159 - protein, 20 aa, Artificial Sequence
  source: /note="Description of Artificial Sequence: Synthetic peptide"
ALPRSGYLVKKQYYYYALDV

SEQ ID NO: 2160 - protein, 20 aa, Artificial Sequence
  source: /note="Description of Artificial Sequence: Synthetic peptide"
  VARIANT (9)..(9): /replace="Met" or "Val"
  VARIANT (10)..(10): /replace="Lys"
  VARIANT (11)..(11): /replace="Lys" or "Thr" or "His"
  VARIANT (12)..(12): /replace="Asn" or "Gly" or "Gln"
  SITE (1)..(20): /note="Variant residues given in the sequence have no preference with respect to those in the annotations for variant positions"
ALPRSGYLASPHYYYYALDV

SEQ ID NO: 2161 - protein, 10 aa, Artificial Sequence
  source: /note="Description of Artificial Sequence: Synthetic peptide"
ASWEIPLRGV

SEQ ID NO: 2162 - protein, 10 aa, Artificial Sequence
  source: /note="Description of Artificial Sequence: Synthetic peptide"
ASWELPLRGV

SEQ ID NO: 2163 - protein, 10 aa, Artificial Sequence
  source: /note="Description of Artificial Sequence: Synthetic peptide"
ASWEVPLRGV

SEQ ID NO: 2164 - protein, 10 aa, Artificial Sequence
  source: /note="Description of Artificial Sequence: Synthetic peptide"
ASWSIPLRGV

SEQ ID NO: 2165 - protein, 10 aa, Artificial Sequence
  source: /note="Description of Artificial Sequence: Synthetic peptide"
ASWTNELRGV

SEQ ID NO: 2166 - protein, 10 aa, Artificial Sequence
  source: /note="Description of Artificial Sequence: Synthetic peptide"
ASWWNDLRGV

SEQ ID NO: 2167 - protein, 10 aa, Artificial Sequence
  source: /note="Description of Artificial Sequence: Synthetic peptide"
ASWYNDLRGV

SEQ ID NO: 2168 - protein, 10 aa, Artificial Sequence
  source: /note="Description of Artificial Sequence: Synthetic peptide"
  VARIANT (2)..(2): /replace="Ser"
  MOD_RES (4)..(6): Any amino acid
  VARIANT (7)..(7): /replace="Val"
  MOD_RES (9)..(10): Any amino acid
  SITE (1)..(10): /note="Variant residues given in the sequence have no preference with respect to those in the annotations for variant positions"
AAWXXXLRXX

SEQ ID NO: 2169 - protein, 17 aa, Artificial Sequence
  source: /note="Description of Artificial Sequence: Synthetic peptide"
GIDIPTKGTVYADSVKG

SEQ ID NO: 2170 - protein, 17 aa, Artificial Sequence
  source: /note="Description of Artificial Sequence: Synthetic peptide"
GIDMPTKGTVYADSVKG

SEQ ID NO: 2171 - protein, 17 aa, Artificial Sequence
  source: /note="Description of Artificial Sequence: Synthetic peptide"
GIDVPVRGTVYADSVKG

SEQ ID NO: 2172 - protein, 17 aa, Artificial Sequence
  source: /note="Description of Artificial Sequence: Synthetic peptide"
GINPATKTTVYADSVKG

SEQ ID NO: 2173 - protein, 17 aa, Artificial Sequence
  source: /note="Description of Artificial Sequence: Synthetic peptide"
GINPATMTTVYADSVKG

SEQ ID NO: 2174 - protein, 17 aa, Artificial Sequence
  source: /note="Description of Artificial Sequence: Synthetic peptide"
GINPATNTTVYADSVKG

SEQ ID NO: 2175 - protein, 17 aa, Artificial Sequence
  source: /note="Description of Artificial Sequence: Synthetic peptide"
GINPATRSTVYADSVKG

SEQ ID NO: 2176 - protein, 17 aa, Artificial Sequence
  source: /note="Description of Artificial Sequence: Synthetic peptide"
GINPATRTTVYADSVKG

SEQ ID NO: 2177 - protein, 17 aa, Artificial Sequence
  source: /note="Description of Artificial Sequence: Synthetic peptide"
GINVPLYGTVYADSVKG

SEQ ID NO: 2178 - protein, 17 aa, Artificial Sequence
  source: /note="Description of Artificial Sequence: Synthetic peptide"
GINVPVQGTVYADSVKG

SEQ ID NO: 2179 - protein, 17 aa, Homo sapiens
GIRPSGGTTVYADSVKG

SEQ ID NO: 2180 - protein, 17 aa, Artificial Sequence
  source: /note="Description of Artificial Sequence: Synthetic peptide"
  VARIANT (3)..(3): /replace="Asn" or "Asp"
  VARIANT (4)..(4): /replace="Val" or "Ile" or "Met"
  VARIANT (5)..(5): /replace="Pro" or "Ala"
  VARIANT (6)..(6): /replace="Leu" or "Val" or "Thr"
  VARIANT (7)..(7): /replace="Tyr" or "Gln" or "Lys" or "Arg" or "Asn" or "Met"
  VARIANT (8)..(8): /replace="Gly" or "Ser"
  SITE (1)..(17): /note="Variant residues given in the sequence have no preference with respect to those in the annotations for variant positions"
GIRPSGGTTVYADSVKG

SEQ ID NO: 2181 - protein, 5 aa, Homo sapiens
KYIMQ

SEQ ID NO: 2182 - protein, 13 aa, Artificial Sequence
  source: /note="Description of Artificial Sequence: Synthetic peptide"
SGSSDTNSHHYVY

SEQ ID NO: 2183 - protein, 13 aa, Artificial Sequence
  source: /note="Description of Artificial Sequence: Synthetic peptide"
SGSSEFVEYNYVY

SEQ ID NO: 2184 - protein, 13 aa, Artificial Sequence
  source: /note="Description of Artificial Sequence: Synthetic peptide"
SGSSEMTVHHYVY

SEQ ID NO: 2185 - protein, 13 aa, Artificial Sequence
  source: /note="Description of Artificial Sequence: Synthetic peptide"
SGSSFKVEETYVY

SEQ ID NO: 2186 - protein, 13 aa, Artificial Sequence
  source: /note="Description of Artificial Sequence: Synthetic peptide"
SGSSFSHPHHYVY

SEQ ID NO: 2187 - protein, 13 aa, Artificial Sequence
  source: /note="Description of Artificial Sequence: Synthetic peptide"
SGSSGMVEQNYVY

SEQ ID NO: 2188 - protein, 13 aa, Homo sapiens
SGSSSNIGRNYVY

SEQ ID NO: 2189 - protein, 13 aa, Artificial Sequence
  source: /note="Description of Artificial Sequence: Synthetic peptide"
SGSSVMVTNHYVY

SEQ ID NO: 2190 - protein, 13 aa, Artificial Sequence
  source: /note="Description of Artificial Sequence: Synthetic peptide"
SGSSWTEQHNYVY

SEQ ID NO: 2191 - protein, 7 aa, Homo sapiens
SNNQRPS

SEQ ID NO: 2192 - protein, 7 aa, Artificial Sequence
  source: /note="Description of Artificial Sequence: Synthetic peptide"
AASNLQS

SEQ ID NO: 2193 - protein, 7 aa, Artificial Sequence
  source: /note="Description of Artificial Sequence: Synthetic peptide"
AASSLQS

SEQ ID NO: 2194 - protein, 17 aa, Artificial Sequence
  source: /note="Description of Artificial Sequence: Synthetic peptide"
AISASGGSTYYADSVKG

SEQ ID NO: 2195 - protein, 17 aa, Artificial Sequence
  source: /note="Description of Artificial Sequence: Synthetic peptide"
AISGSGGSTYYADSVKG

SEQ ID NO: 2196 - protein, 18 aa, Artificial Sequence
  source: /note="Description of Artificial Sequence: Synthetic peptide"
AKDGVGYSYTYYYYGMDV

SEQ ID NO: 2197 - protein, 13 aa, Artificial Sequence
  source: /note="Description of Artificial Sequence: Synthetic peptide"
AKEGGTYSDDFDL

SEQ ID NO: 2198 - protein, 18 aa, Artificial Sequence
  source: /note="Description of Artificial Sequence: Synthetic peptide"
AKEGSNYGDYTIHYGMDV

SEQ ID NO: 2199 - protein, 14 aa, Artificial Sequence
  source: /note="Description of Artificial Sequence: Synthetic peptide"
AKGGYYYASSSLDV

SEQ ID NO: 2200 - protein, 13 aa, Artificial Sequence
  source: /note="Description of Artificial Sequence: Synthetic peptide"
AKGPRQEYGGLDL

SEQ ID NO: 2201 - protein, 14 aa, Artificial Sequence
  source: /note="Description of Artificial Sequence: Synthetic peptide"
AKGVGYDTGTDMDV

SEQ ID NO: 2202 - protein, 11 aa, Artificial Sequence
  source: /note="Description of Artificial Sequence: Synthetic peptide"
AKHDMESGLDV

SEQ ID NO: 2203 - protein, 16 aa, Artificial Sequence
  source: /note="Description of Artificial Sequence: Synthetic peptide"
AKHGGSPMLYYYGMDV

SEQ ID NO: 2204 - protein, 12 aa, Artificial Sequence
  source: /note="Description of Artificial Sequence: Synthetic peptide"
AKLGGSHASLDL

SEQ ID NO: 2205 - protein, 15 aa, Artificial Sequence
  source: /note="Description of Artificial Sequence: Synthetic peptide"
AKQGEYARWYHGMDV

SEQ ID NO: 2206 - protein, 11 aa, Artificial Sequence
  source: /note="Description of Artificial Sequence: Synthetic peptide"
AKSPSDGYFDY

SEQ ID NO: 2207 - protein, 13 aa, Artificial Sequence
  source: /note="Description of Artificial Sequence: Synthetic peptide"
AKSRYYYGDYFDY

SEQ ID NO: 2208 - protein, 14 aa, Artificial Sequence
  source: /note="Description of Artificial Sequence: Synthetic peptide"
ARAETYQLSSAFDI

SEQ ID NO: 2209 - protein, 13 aa, Artificial Sequence
  source: /note="Description of Artificial Sequence: Synthetic peptide"
ARAGYRSPSGFDY

SEQ ID NO: 2210 - protein, 18 aa, Artificial Sequence
  source: /note="Description of Artificial Sequence: Synthetic peptide"
ARDAPNSYDTGSINWFDP

SEQ ID NO: 2211 - protein, 17 aa, Artificial Sequence
  source: /note="Description of Artificial Sequence: Synthetic peptide"
ARDGPNYYDGVVNWFDP

SEQ ID NO: 2212 - protein, 14 aa, Artificial Sequence
  source: /note="Description of Artificial Sequence: Synthetic peptide"
ARDGQYYPAYGMDV

SEQ ID NO: 2213 - protein, 18 aa, Artificial Sequence
  source: /note="Description of Artificial Sequence: Synthetic peptide"
ARDGRYSSSGELYYGMDV

SEQ ID NO: 2214 - protein, 18 aa, Artificial Sequence
  source: /note="Description of Artificial Sequence: Synthetic peptide"
ARDGSRYSYGLVAYGMDV

SEQ ID NO: 2215 - protein, 15 aa, Artificial Sequence
  source: /note="Description of Artificial Sequence: Synthetic peptide"
ARDGYTDGATDYMDV

SEQ ID NO: 2216 - protein, 19 aa, Artificial Sequence
  source: /note="Description of Artificial Sequence: Synthetic peptide"
ARDGYYRSGSYWIGYGMDV

SEQ ID NO: 2217 - protein, 13 aa, Artificial Sequence
  source: /note="Description of Artificial Sequence: Synthetic peptide"
ARDHGATGPDFDL

SEQ ID NO: 2218 - protein, 16 aa, Artificial Sequence
  source: /note="Description of Artificial Sequence: Synthetic peptide"
ARDISSDFGSTGYLDP

SEQ ID NO: 2219 - protein, 14 aa, Artificial Sequence
  source: /note="Description of Artificial Sequence: Synthetic peptide"
ARDLGGQYYGSHHY

SEQ ID NO: 2220 - protein, 17 aa, Artificial Sequence
  source: /note="Description of Artificial Sequence: Synthetic peptide"
ARDLPNSGSPGSDYFDY

SEQ ID NO: 2221 - protein, 17 aa, Artificial Sequence
  source: /note="Description of Artificial Sequence: Synthetic peptide"
ARDLSHIADGATNYFDY

SEQ ID NO: 2222 - protein, 15 aa, Artificial Sequence
  source: /note="Description of Artificial Sequence: Synthetic peptide"
ARDPLYPLTPYGMDV

SEQ ID NO: 2223 - protein, 17 aa, Artificial Sequence
  source: /note="Description of Artificial Sequence: Synthetic peptide"
ARDRGGQESGSYYYMDV

SEQ ID NO: 2224 - protein, 14 aa, Artificial Sequence
  source: /note="Description of Artificial Sequence: Synthetic peptide"
ARDSGGEPVYGMDV

SEQ ID NO: 2225 - protein, 15 aa, Artificial Sequence
  source: /note="Description of Artificial Sequence: Synthetic peptide"
ARDTGTYVTGDGMDV

SEQ ID NO: 2226 - protein, 16 aa, Artificial Sequence
  source: /note="Description of Artificial Sequence: Synthetic peptide"
ARDVGGDYSGSDLASY

SEQ ID NO: 2227 - protein, 16 aa, Artificial Sequence
  source: /note="Description of Artificial Sequence: Synthetic peptide"
ARDVGYYYGSSGYVDY

SEQ ID NO: 2228 - protein, 14 aa, Artificial Sequence
  source: /note="Description of Artificial Sequence: Synthetic peptide"
ARDYGSVAGTPFDY

SEQ ID NO: 2229 - protein, 15 aa, Artificial Sequence
  source: /note="Description of Artificial Sequence: Synthetic peptide"
AREAGAVTGYRWFDP

SEQ ID NO: 2230 - protein, 15 aa, Artificial Sequence
  source: /note="Description of Artificial Sequence: Synthetic peptide"
AREATAAADHPGMDV

SEQ ID NO: 2231 - protein, 14 aa, Artificial Sequence
  source: /note="Description of Artificial Sequence: Synthetic peptide"
AREEAVAADLGVDV

SEQ ID NO: 2232 - protein, 14 aa, Artificial Sequence
  source: /note="Description of Artificial Sequence: Synthetic peptide"
AREGANYDSSGLDA

SEQ ID NO: 2233 - protein, 14 aa, Artificial Sequence
  source: /note="Description of Artificial Sequence: Synthetic peptide"
AREGFRDGINWFDP

SEQ ID NO: 2234 - protein, 10 aa, Artificial Sequence
  source: /note="Description of Artificial Sequence: Synthetic peptide"
AREGGKGMDV

SEQ ID NO: 2235 - protein, 13 aa, Artificial Sequence
  source: /note="Description of Artificial Sequence: Synthetic peptide"
AREGGYVGHGMDV

SEQ ID NO: 2236 - protein, 9 aa, Artificial Sequence
  source: /note="Description of Artificial Sequence: Synthetic peptide"
AREGPRFDP

SEQ ID NO: 2237 - protein, 15 aa, Artificial Sequence
  source: /note="Description of Artificial Sequence: Synthetic peptide"
AREGRPRLGYAAFDI

SEQ ID NO: 2238 - protein, 13 aa, Artificial Sequence
  source: /note="Description of Artificial Sequence: Synthetic peptide"
AREGRRTMNAFDI

SEQ ID NO: 2239 - protein, 12 aa, Artificial Sequence
  source: /note="Description of Artificial Sequence: Synthetic peptide"
AREGSDRHPFDY

SEQ ID NO: 2240 - protein, 10 aa, Artificial Sequence
  source: /note="Description of Artificial Sequence: Synthetic peptide"
AREGVRGMDV

SEQ ID NO: 2241 - protein, 13 aa, Artificial Sequence
  source: /note="Description of Artificial Sequence: Synthetic peptide"
AREGYVAAYGMDV

SEQ ID NO: 2242 - protein, 13 aa, Artificial Sequence
  source: /note="Description of Artificial Sequence: Synthetic peptide"
AREHRAADAGSNV

SEQ ID NO: 2243 - protein, 12 aa, Artificial Sequence
  source: /note="Description of Artificial Sequence: Synthetic peptide"
AREPIYRRGMDV

SEQ ID NO: 2244 - protein, 11 aa, Artificial Sequence
  source: /note="Description of Artificial Sequence: Synthetic peptide"
ARESGFAGLDP

SEQ ID NO: 2245 - protein, 14 aa, Artificial Sequence
  source: /note="Description of Artificial Sequence: Synthetic peptide"
ARESQYYDVHGMDV

SEQ ID NO: 2246 - protein, 15 aa, Artificial Sequence
  source: /note="Description of Artificial Sequence: Synthetic peptide"
AREVGVVGALPYFDY

SEQ ID NO: 2247 - protein, 12 aa, Artificial Sequence
  source: /note="Description of Artificial Sequence: Synthetic peptide"
AREVGYPYGMDV

SEQ ID NO: 2248 - protein, 13 aa, Artificial Sequence
  source: /note="Description of Artificial Sequence: Synthetic peptide"
AREVSGTRHGMDV

SEQ ID NO: 2249 - protein, 17 aa, Artificial Sequence
  source: /note="Description of Artificial Sequence: Synthetic peptide"
ARGAPHDYGGGVGWFDP

SEQ ID NO: 2250 - protein, 13 aa, Artificial Sequence
  source: /note="Description of Artificial Sequence: Synthetic peptide"
ARGGADRGYGMDV

SEQ ID NO: 2251 - protein, 12 aa, Artificial Sequence
  source: /note="Description of Artificial Sequence: Synthetic peptide"
ARGGEGRPYLDI

SEQ ID NO: 2252 - protein, 15 aa, Artificial Sequence
  source: /note="Description of Artificial Sequence: Synthetic peptide"
ARGPSEAAAAKDFDL

SEQ ID NO: 2253 - protein, 14 aa, Artificial Sequence
  source: /note="Description of Artificial Sequence: Synthetic peptide"
ARGPSYLASGAFDL

SEQ ID NO: 2254 - protein, 16 aa, Artificial Sequence
  source: /note="Description of Artificial Sequence: Synthetic peptide"
ARGPYYSYTDTAWFDP

SEQ ID NO: 2255 - protein, 14 aa, Artificial Sequence
  source: /note="Description of Artificial Sequence: Synthetic peptide"
ARGQHGTSRVDFDY

SEQ ID NO: 2256 - protein, 15 aa, Artificial Sequence
  source: /note="Description of Artificial Sequence: Synthetic peptide"
ARGQHSDSGHYGMDV

SEQ ID NO: 2257 - protein, 13 aa, Artificial Sequence
  source: /note="Description of Artificial Sequence: Synthetic peptide"
ARGTFYSDELFDY

SEQ ID NO: 2258 - protein, 15 aa, Artificial Sequence
  source: /note="Description of Artificial Sequence: Synthetic peptide"
ARGTNAYGTPRDFDL

SEQ ID NO: 2259 - protein, 17 aa, Artificial Sequence
  source: /note="Description of Artificial Sequence: Synthetic peptide"
ARLGATATTDYAYGMDV

SEQ ID NO: 2260 - protein, 13 aa, Artificial Sequence
  source: /note="Description of Artificial Sequence: Synthetic peptide"
ARLGYLSPYGMDV

SEQ ID NO: 2261 - protein, 15 aa, Artificial Sequence
  source: /note="Description of Artificial Sequence: Synthetic peptide"
ARLHMTGTASSGMDV

SEQ ID NO: 2262 - protein, 20 aa, Artificial Sequence
  source: /note="Description of Artificial Sequence: Synthetic peptide"
ARLPIYYDSSGYFDYHGMDV

SEQ ID NO: 2263 - protein, 20 aa, Artificial Sequence
  source: /note="Description of Artificial Sequence: Synthetic peptide"
ARSPVYYDSSGYFQYYGMDV

SEQ ID NO: 2264 - protein, 10 aa, Artificial Sequence
  source: /note="Description of Artificial Sequence: Synthetic peptide"
ARSTVDYFDY

SEQ ID NO: 2265 - protein, 15 aa, Artificial Sequence
  source: /note="Description of Artificial Sequence: Synthetic peptide"
ARVGGDDDWATAFDI

SEQ ID NO: 2266 - protein, 13 aa, Artificial Sequence
  source: /note="Description of Artificial Sequence: Synthetic peptide"
ARVGYTRPYGMDV

SEQ ID NO: 2267 - protein, 12 aa, Artificial Sequence
  source: /note="Description of Artificial Sequence: Synthetic peptide"
ARVSRQQHSMDV

SEQ ID NO: 2268 - protein, 7 aa, Artificial Sequence
  source: /note="Description of Artificial Sequence: Synthetic peptide"
DASKRAT

SEQ ID NO: 2269 - protein, 7 aa, Artificial Sequence
  source: /note="Description of Artificial Sequence: Synthetic peptide"
DASNLAT

SEQ ID NO: 2270 - protein, 7 aa, Artificial Sequence
  source: /note="Description of Artificial Sequence: Synthetic peptide"
DASNLET

SEQ ID NO: 2271 - protein, 7 aa, Artificial Sequence
  source: /note="Description of Artificial Sequence: Synthetic peptide"
DASNRAT

SEQ ID NO: 2272 - protein, 7 aa, Artificial Sequence
  source: /note="Description of Artificial Sequence: Synthetic peptide"
DASSLES

SEQ ID NO: 2273 - protein, 23 aa, Artificial Sequence
  source: /note="Description of Artificial Sequence: Synthetic peptide"
  MOD_RES (3)..(3): Any amino acid
DLXLTQSLASLVVCMGQRAAISF

SEQ ID NO: 2274 - protein, 7 aa, Artificial Sequence
  source: /note="Description of Artificial Sequence: Synthetic peptide"
DSSNRAT

SEQ ID NO: 2275 - protein, 5 aa, Artificial Sequence
  source: /note="Description of Artificial Sequence: Synthetic peptide"
DYNLH

SEQ ID NO: 2276 - protein, 9 aa, Artificial Sequence
  source: /note="Description of Artificial Sequence: Synthetic peptide"
EHSWEIPLT

SEQ ID NO: 2277 - protein, 35 aa, Artificial Sequence
  source: /note="Description of Artificial Sequence: Synthetic polypeptide"
EKFKSKATLTVDTSSGTAYMQLSSLTSEDSAVYYC

SEQ ID NO: 2278 - protein, 10 aa, Artificial Sequence
  source: /note="Description of Artificial Sequence: Synthetic peptide"
FIYPANGITG

SEQ ID NO: 2279 - protein, 10 aa, Artificial Sequence
  source: /note="Description of Artificial Sequence: Synthetic peptide"
FIYPSNGIRG

SEQ ID NO: 2280 - protein, 10 aa, Artificial Sequence
  source: /note="Description of Artificial Sequence: Synthetic peptide"
FIYPSNGITG

SEQ ID NO: 2281 - protein, 16 aa, Artificial Sequence
  source: /note="Description of Artificial Sequence: Synthetic peptide"
FIYPSNGITGYAQKFQ

SEQ ID NO: 2282 - protein, 10 aa, Artificial Sequence
  source: /note="Description of Artificial Sequence: Synthetic peptide"
FIYPSNQITG

SEQ ID NO: 2283 - protein, 16 aa, Artificial Sequence
  source: /note="Description of Artificial Sequence: Synthetic peptide"
FIYPSNQITGYAQKFQ

SEQ ID NO: 2284 - protein, 10 aa, Artificial Sequence
  source: /note="Description of Artificial Sequence: Synthetic peptide"
FIYPSNRITG

SEQ ID NO: 2285 - protein, 16 aa, Artificial Sequence
  source: /note="Description of Artificial Sequence: Synthetic peptide"
FIYPSNRITGYAQKFQ

SEQ ID NO: 2286 - protein, 10 aa, Artificial Sequence
  source: /note="Description of Artificial Sequence: Synthetic peptide"
FIYPSNVITG

SEQ ID NO: 2287 - protein, 10 aa, Artificial Sequence
  source: /note="Description of Artificial Sequence: Synthetic peptide"
  VARIANT (5)..(5): /replace="Ala"
  VARIANT (7)..(7): /replace="Gln" or "Arg" or "Val"
  VARIANT (9)..(9): /replace="Arg"
  SITE (1)..(10): /note="Variant residues given in the sequence have no preference with respect to those in the annotations for variant positions"
FIYPSNGITG

SEQ ID NO: 2288 - protein, 9 aa, Artificial Sequence
  source: /note="Description of Artificial Sequence: Synthetic peptide"
FTFSNYAMS

SEQ ID NO: 2289 - protein, 9 aa, Artificial Sequence
  source: /note="Description of Artificial Sequence: Synthetic peptide"
FTFSNYCMN

SEQ ID NO: 2290 - protein, 9 aa, Artificial Sequence
  source: /note="Description of Artificial Sequence: Synthetic peptide"
FTFSSSAMS

SEQ ID NO: 2291 - protein, 9 aa, Artificial Sequence
  source: /note="Description of Artificial Sequence: Synthetic peptide"
FTFSSYAMS

SEQ ID NO: 2292 - protein, 9 aa, Artificial Sequence
  source: /note="Description of Artificial Sequence: Synthetic peptide"
FTFSSYGMH

SEQ ID NO: 2293 - protein, 9 aa, Artificial Sequence
  source: /note="Description of Artificial Sequence: Synthetic peptide"
FTFSSYSMN

SEQ ID NO: 2294 - protein, 9 aa, Artificial Sequence
  source: /note="Description of Artificial Sequence: Synthetic peptide"
FTFSSYWMS

SEQ ID NO: 2295 - protein, 9 aa, Artificial Sequence
  source: /note="Description of Artificial Sequence: Synthetic peptide"
FTFSTYAMS

SEQ ID NO: 2296 - protein, 9 aa, Artificial Sequence
  source: /note="Description of Artificial Sequence: Synthetic peptide"
FTFSTYGMH

SEQ ID NO: 2297 - protein, 7 aa, Artificial Sequence
  source: /note="Description of Artificial Sequence: Synthetic peptide"
GASSLQS

SEQ ID NO: 2298 - protein, 7 aa, Artificial Sequence
  source: /note="Description of Artificial Sequence: Synthetic peptide"
GASSRAT

SEQ ID NO: 2299 - protein, 7 aa, Artificial Sequence
  source: /note="Description of Artificial Sequence: Synthetic peptide"
GASTRAT

SEQ ID NO: 2300 - protein, 10 aa, Artificial Sequence
  source: /note="Description of Artificial Sequence: Synthetic peptide"
GATFTDYNFH

SEQ ID NO: 2301 - protein, 10 aa, Artificial Sequence
  source: /note="Description of Artificial Sequence: Synthetic peptide"
GATFTDYNYH

SEQ ID NO: 2302 - protein, 17 aa, Artificial Sequence
  source: /note="Description of Artificial Sequence: Synthetic peptide"
GIIPIFGTANYAQKFQG

SEQ ID NO: 2303 - protein, 11 aa, Artificial Sequence
  source: /note="Description of Artificial Sequence: Synthetic peptide"
GSISSGGYYWS

SEQ ID NO: 2304 - protein, 11 aa, Artificial Sequence
  source: /note="Description of Artificial Sequence: Synthetic peptide"
GSISSNSYYWG

SEQ ID NO: 2305 - protein, 11 aa, Artificial Sequence
  source: /note="Description of Artificial Sequence: Synthetic peptide"
GSISSSSYAWG

SEQ ID NO: 2306 - protein, 11 aa, Artificial Sequence
  source: /note="Description of Artificial Sequence: Synthetic peptide"
GSISSSSYYWG

SEQ ID NO: 2307 - protein, 9 aa, Artificial Sequence
  source: /note="Description of Artificial Sequence: Synthetic peptide"
GTFSNYAIS

SEQ ID NO: 2308 - protein, 9 aa, Artificial Sequence
  source: /note="Description of Artificial Sequence: Synthetic peptide"
GTFSSLAIS

SEQ ID NO: 2309 - protein, 9 aa, Artificial Sequence
  source: /note="Description of Artificial Sequence: Synthetic peptide"
GTFSSYAIS

SEQ ID NO: 2310 - protein, 13 aa, Artificial Sequence
  source: /note="Description of Artificial Sequence: Synthetic peptide"
GVGDTIKEQFVYV

SEQ ID NO: 2311 - protein, 32 aa, Artificial Sequence
  source: /note="Description of Artificial Sequence: Synthetic polypeptide"
GVRARLSGRRWVTDFTLNIHPAEEEDGATYYC

SEQ ID NO: 2312 - protein, 10 aa, Artificial Sequence
  source: /note="Description of Artificial Sequence: Synthetic peptide"
GVTFTDYNYH

SEQ ID NO: 2313 - protein, 10 aa, Artificial Sequence
  source: /note="Description of Artificial Sequence: Synthetic peptide"
  VARIANT (2)..(2): /replace="Ala" or "Val"
  VARIANT (3)..(3): /replace="Ala"
  VARIANT (4)..(4): /replace="Glu" or "His"
  VARIANT (9)..(9): /replace="Phe" or "Tyr" or "Asn"
  SITE (1)..(10): /note="Variant residues given in the sequence have no preference with respect to those in the annotations for variant positions"
GYTFTDYNLH

SEQ ID NO: 2314 - protein, 10 aa, Artificial Sequence
  source: /note="Description of Artificial Sequence: Synthetic peptide"
GYAFTDYNLH

SEQ ID NO: 2315 - protein, 10 aa, Artificial Sequence
  source: /note="Description of Artificial Sequence: Synthetic peptide"
GYTETDYNLH

SEQ ID NO: 2316 - protein, 10 aa, Artificial Sequence
  source: /note="Description of Artificial Sequence: Synthetic peptide"
GYTFTDYNFH

SEQ ID NO: 2317 - protein, 10 aa, Artificial Sequence
  source: /note="Description of Artificial Sequence: Synthetic peptide"
GYTFTDYNLH

SEQ ID NO: 2318 - protein, 10 aa, Artificial Sequence
  source: /note="Description of Artificial Sequence: Synthetic peptide"
GYTFTDYNNH

SEQ ID NO: 2319 - protein, 10 aa, Artificial Sequence
  source: /note="Description of Artificial Sequence: Synthetic peptide"
GYTFTDYNYH

SEQ ID NO: 2320 - protein, 10 aa, Artificial Sequence
  source: /note="Description of Artificial Sequence: Synthetic peptide"
GYTHTDYNLH

SEQ ID NO: 2321 - protein, 14 aa, Artificial Sequence
  source: /note="Description of Artificial Sequence: Synthetic peptide"
IGEINPSTGGTSYN

SEQ ID NO: 2322 - protein, 14 aa, Artificial Sequence
  source: /note="Description of Artificial Sequence: Synthetic peptide"
IGFIYPSNGITGYN

SEQ ID NO: 2323 - protein, 14 aa, Artificial Sequence
  source: /note="Description of Artificial Sequence: Synthetic peptide"
IGNIYPGSGSTYYD

SEQ ID NO: 2324 - protein, 14 aa, Artificial Sequence
  source: /note="Description of Artificial Sequence: Synthetic peptide"
IGNIYPGSISSNYD

SEQ ID NO: 2325 - protein, 14 aa, Artificial Sequence
  source: /note="Description of Artificial Sequence: Synthetic peptide"
IGWIFPGDGSTKYN

SEQ ID NO: 2326 - protein, 17 aa, Artificial Sequence
  source: /note="Description of Artificial Sequence: Synthetic peptide"
IINPSGGSTSYAQKFQG

SEQ ID NO: 2327 - protein, 13 aa, Artificial Sequence
  source: /note="Description of Artificial Sequence: Synthetic peptide"
KASGYTFTDYNLH

SEQ ID NO: 2328 - protein, 11 aa, Artificial Sequence
  source: /note="Description of Artificial Sequence: Synthetic peptide"
KASQDINKYLS

SEQ ID NO: 2329 - protein, 15 aa, Artificial Sequence
  source: /note="Description of Artificial Sequence: Synthetic peptide"
KASQDVSTSTYSYMH

SEQ ID NO: 2330 - protein, 17 aa, Artificial Sequence
  source: /note="Description of Artificial Sequence: Synthetic peptide"
KSSQSVLYSSNNKNYLA

SEQ ID NO: 2331 - protein, 7 aa, Artificial Sequence
  source: /note="Description of Artificial Sequence: Synthetic peptide"
LASNRAS

SEQ ID NO: 2332 - protein, 7 aa, Artificial Sequence
  source: /note="Description of Artificial Sequence: Synthetic peptide"
LASSLES

SEQ ID NO: 2333 - protein, 7 aa, Artificial Sequence
  source: /note="Description of Artificial Sequence: Synthetic peptide"
LGSNRAS

SEQ ID NO: 2334 - protein, 7 aa, Artificial Sequence
  source: /note="Description of Artificial Sequence: Synthetic peptide"
LLIKYAS

SEQ ID NO: 2335 - protein, 9 aa, Artificial Sequence
  source: /note="Description of Artificial Sequence: Synthetic peptide"
LQALGPPLT

SEQ ID NO: 2336 - protein, 9 aa, Artificial Sequence
  source: /note="Description of Artificial Sequence: Synthetic peptide"
LQYDEFPLT

SEQ ID NO: 2337 - protein, 7 aa, Artificial Sequence
  source: /note="Description of Artificial Sequence: Synthetic peptide"
  MOD_RES (7)..(7): Any amino acid
LSCNLEX

SEQ ID NO: 2338 - protein, 7 aa, Artificial Sequence
  source: /note="Description of Artificial Sequence: Synthetic peptide"
LVSNLES

SEQ ID NO: 2339 - protein, 13 aa, Artificial Sequence
  source: /note="Description of Artificial Sequence: Synthetic peptide"
MELKKDGSHSTGD

SEQ ID NO: 2340 - protein, 9 aa, Artificial Sequence
  source: /note="Description of Artificial Sequence: Synthetic peptide"
MQAKQLPYT

SEQ ID NO: 2341 - protein, 10 aa, Artificial Sequence
  source: /note="Description of Artificial Sequence: Synthetic peptide"
MQKKQTPPIT

SEQ ID NO: 2342 - protein, 9 aa, Artificial Sequence
  source: /note="Description of Artificial Sequence: Synthetic peptide"
MQKLGLPPT

SEQ ID NO: 2343 - protein, 17 aa, Artificial Sequence
  source: /note="Description of Artificial Sequence: Synthetic peptide"
NIKQDGSEKYYVDSVKG

SEQ ID NO: 2344 - protein, 17 aa, Artificial Sequence
  source: /note="Description of Artificial Sequence: Synthetic peptide"
NIKSDGSEKYYVDSVKG

SEQ ID NO: 2345 - protein, 17 aa, Artificial Sequence
  source: /note="Description of Artificial Sequence: Synthetic peptide"
NINQDGSEKYYVDSVKG

SEQ ID NO: 2346 - protein, 16 aa, Artificial Sequence
  source: /note="Description of Artificial Sequence: Synthetic peptide"
NIYYSGSTYYNPSLKS

SEQ ID NO: 2347 - protein, 12 aa, Artificial Sequence
  source: /note="Description of Artificial Sequence: Synthetic peptide"
  MOD_RES (8)..(8): Any amino acid
NLLLSAHXGAYT

SEQ ID NO: 2348 - protein, 11 aa, Artificial Sequence
  source: /note="Description of Artificial Sequence: Synthetic peptide"
QASQDISNFLN

SEQ ID NO: 2349 - protein, 11 aa, Artificial Sequence
  source: /note="Description of Artificial Sequence: Synthetic peptide"
QASQDISNYLN

SEQ ID NO: 2350 - protein, 11 aa, Artificial Sequence
  source: /note="Description of Artificial Sequence: Synthetic peptide"
QASQDITNYLN

SEQ ID NO: 2351 - protein, 9 aa, Artificial Sequence
  source: /note="Description of Artificial Sequence: Synthetic peptide"
QEYGISPYT

SEQ ID NO: 2352 - protein, 9 aa, Artificial Sequence
  source: /note="Description of Artificial Sequence: Synthetic peptide"
QHSEEIPLT

SEQ ID NO: 2353 - protein, 9 aa, Artificial Sequence
  source: /note="Description of Artificial Sequence: Synthetic peptide"
QHSRELPLT

SEQ ID NO: 2354 - protein, 9 aa, Artificial Sequence
  source: /note="Description of Artificial Sequence: Synthetic peptide"
QHSREVPLT

SEQ ID NO: 2355 - protein, 9 aa, Artificial Sequence
  source: /note="Description of Artificial Sequence: Synthetic peptide"
QHSWAIPLT

SEQ ID NO: 2356 - protein, 9 aa, Artificial Sequence
  source: /note="Description of Artificial Sequence: Synthetic peptide"
QHSWEIPLE

SEQ ID NO: 2357 - protein, 9 aa, Artificial Sequence
  source: /note="Description of Artificial Sequence: Synthetic peptide"
QHSWEIPLT

SEQ ID NO: 2358 - protein, 9 aa, Artificial Sequence
  source: /note="Description of Artificial Sequence: Synthetic peptide"
QHSWELPLT

SEQ ID NO: 2359 - protein, 9 aa, Artificial Sequence
  source: /note="Description of Artificial Sequence: Synthetic peptide"
QQAFDFPIT

SEQ ID NO: 2360 - protein, 8 aa, Artificial Sequence
  source: /note="Description of Artificial Sequence: Synthetic peptide"
QQANYFPT

SEQ ID NO: 2361 - protein, 9 aa, Artificial Sequence
  source: /note="Description of Artificial Sequence: Synthetic peptide"
QQANYHPLT

SEQ ID NO: 2362 - protein, 9 aa, Artificial Sequence
  source: /note="Description of Artificial Sequence: Synthetic peptide"
QQARSYPPT

SEQ ID NO: 2363 - protein, 10 aa, Artificial Sequence
  source: /note="Description of Artificial Sequence: Synthetic peptide"
QQASAHPPWT

SEQ ID NO: 2364 - protein, 9 aa, Artificial Sequence
  source: /note="Description of Artificial Sequence: Synthetic peptide"
QQASSFPLT

SEQ ID NO: 2365 - protein, 9 aa, Artificial Sequence
  source: /note="Description of Artificial Sequence: Synthetic peptide"
QQASSSPPT

SEQ ID NO: 2366 - protein, 9 aa, Artificial Sequence
  source: /note="Description of Artificial Sequence: Synthetic peptide"
QQAYALPPT

SEQ ID NO: 2367 - protein, 9 aa, Artificial Sequence
  source: /note="Description of Artificial Sequence: Synthetic peptide"
QQAYLVPLT

SEQ ID NO: 2368 - protein, 8 aa, Artificial Sequence
  source: /note="Description of Artificial Sequence: Synthetic peptide"
QQAYSFPT

SEQ ID NO: 2369 - protein, 9 aa, Artificial Sequence
  source: /note="Description of Artificial Sequence: Synthetic peptide"
QQAYSVPIT

SEQ ID NO: 2370 - protein, 10 aa, Artificial Sequence
  source: /note="Description of Artificial Sequence: Synthetic peptide"
QQAYVVPPRT

SEQ ID NO: 2371 - protein, 9 aa, Artificial Sequence
  source: /note="Description of Artificial Sequence: Synthetic peptide"
QQAYYPPWT

SEQ ID NO: 2372 - protein, 9 aa, Artificial Sequence
  source: /note="Description of Artificial Sequence: Synthetic peptide"
QQDFSDPIT

SEQ ID NO: 2373 - protein, 9 aa, Artificial Sequence
  source: /note="Description of Artificial Sequence: Synthetic peptide"
QQDFVKPLT

SEQ ID NO: 2374 - protein, 9 aa, Artificial Sequence
  source: /note="Description of Artificial Sequence: Synthetic peptide"
QQDVNLPPT

SEQ ID NO: 2375 - protein, 9 aa, Artificial Sequence
  source: /note="Description of Artificial Sequence: Synthetic peptide"
QQDYLSPIT

SEQ ID NO: 2376 - protein, 9 aa, Artificial Sequence
  source: /note="Description of Artificial Sequence: Synthetic peptide"
QQDYNSPLT

SEQ ID NO: 2377 - protein, 9 aa, Artificial Sequence
  source: /note="Description of Artificial Sequence: Synthetic peptide"
QQDYSSPLT

SEQ ID NO: 2378 - protein, 9 aa, Artificial Sequence
  source: /note="Description of Artificial Sequence: Synthetic peptide"
QQDYVSPLT

SEQ ID NO: 2379 - protein, 9 aa, Artificial Sequence
  source: /note="Description of Artificial Sequence: Synthetic peptide"
QQENSYPLT

SEQ ID NO: 2380 - protein, 9 aa, Artificial Sequence
  source: /note="Description of Artificial Sequence: Synthetic peptide"
QQFAFLPPT

SEQ ID NO: 2381 - protein, 8 aa, Artificial Sequence
  source: /note="Description of Artificial Sequence: Synthetic peptide"
QQFGDLPT

SEQ ID NO: 2382 - protein, 9 aa, Artificial Sequence
  source: /note="Description of Artificial Sequence: Synthetic peptide"
QQFSNWPLT

SEQ ID NO: 2383 - protein, 8 aa, Artificial Sequence
  source: /note="Description of Artificial Sequence: Synthetic peptide"
QQFSNYPT

SEQ ID NO: 2384 - protein, 8 aa, Artificial Sequence
  source: /note="Description of Artificial Sequence: Synthetic peptide"
QQGNAHPT

SEQ ID NO: 2385 - protein, 9 aa, Artificial Sequence
  source: /note="Description of Artificial Sequence: Synthetic peptide"
QQGYDPPLT

SEQ ID NO: 2386 - protein, 9 aa, Artificial Sequence
  source: /note="Description of Artificial Sequence: Synthetic peptide"
QQGYDTPIT

SEQ ID NO: 2387 - protein, 9 aa, Artificial Sequence
  source: /note="Description of Artificial Sequence: Synthetic peptide"
QQGYDVPIT

SEQ ID NO: 2388 - protein, 9 aa, Artificial Sequence
  source: /note="Description of Artificial Sequence: Synthetic peptide"
QQHANHPPT

SEQ ID NO: 2389 - protein, 9 aa, Artificial Sequence
  source: /note="Description of Artificial Sequence: Synthetic peptide"
QQHYDIPLT

SEQ ID NO: 2390 - protein, 9 aa, Artificial Sequence
  source: /note="Description of Artificial Sequence: Synthetic peptide"
QQHYYHPPT

SEQ ID NO: 2391 - protein, 8 aa, Artificial Sequence
  source: /note="Description of Artificial Sequence: Synthetic peptide"
QQINAHPT

SEQ ID NO: 2392 - protein, 9 aa, Artificial Sequence
  source: /note="Description of Artificial Sequence: Synthetic peptide"
QQLSDTPIT

SEQ ID NO: 2393 - protein, 9 aa, Artificial Sequence
  source: /note="Description of Artificial Sequence: Synthetic peptide"
QQLSVFPPT

SEQ ID NO: 2394 - protein, 9 aa, Artificial Sequence
  source: /note="Description of Artificial Sequence: Synthetic peptide"
QQLYRSPPT

SEQ ID NO: 2395 - protein, 9 aa, Artificial Sequence
  source: /note="Description of Artificial Sequence: Synthetic peptide"
QQLYSDPPT

SEQ ID NO: 2396 - protein, 9 aa, Artificial Sequence
  source: /note="Description of Artificial Sequence: Synthetic peptide"
QQQFLTPIT

SEQ ID NO: 2397 - protein, 9 aa, Artificial Sequence
  source: /note="Description of Artificial Sequence: Synthetic peptide"
QQQYDLPIT

SEQ ID NO: 2398 - protein, 9 aa, Artificial Sequence
  source: /note="Description of Artificial Sequence: Synthetic peptide"
QQQYLTPLT

SEQ ID NO: 2399 - protein, 9 aa, Artificial Sequence
  source: /note="Description of Artificial Sequence: Synthetic peptide"
QQQYTLPPT

SEQ ID NO: 2400 - protein, 8 aa, Artificial Sequence
  source: /note="Description of Artificial Sequence: Synthetic peptide"
QQSDNLPT

SEQ ID NO: 2401 - protein, 8 aa, Artificial Sequence
  source: /note="Description of Artificial Sequence: Synthetic peptide"
QQSEDWPT

SEQ ID NO: 2402 - protein, 10 aa, Artificial Sequence
  source: /note="Description of Artificial Sequence: Synthetic peptide"
QQSIVWPPFT

SEQ ID NO: 2403 - protein, 8 aa, Artificial Sequence
  source: /note="Description of Artificial Sequence: Synthetic peptide"
QQSQLRPT

SEQ ID NO: 2404 - protein, 9 aa, Artificial Sequence
  source: /note="Description of Artificial Sequence: Synthetic peptide"
QQSRVFPWT

SEQ ID NO: 2405 - protein, 9 aa, Artificial Sequence
  source: /note="Description of Artificial Sequence: Synthetic peptide"
QQSVHVPIT

SEQ ID NO: 2406 - protein, 9 aa, Artificial Sequence
  source: /note="Description of Artificial Sequence: Synthetic peptide"
QQSVTPPLT

SEQ ID NO: 2407 - protein, 9 aa, Artificial Sequence
  source: /note="Description of Artificial Sequence: Synthetic peptide"
QQSYVHPPT

SEQ ID NO: 2408 - protein, 9 aa, Artificial Sequence
  source: /note="Description of Artificial Sequence: Synthetic peptide"
QQTYRTPLT

SEQ ID NO: 2409 - protein, 9 aa, Artificial Sequence
  source: /note="Description of Artificial Sequence: Synthetic peptide"
QQVASPPPT

SEQ ID NO: 2410 - protein, 9 aa, Artificial Sequence
  source: /note="Description of Artificial Sequence: Synthetic peptide"
QQVDSYPPT

SEQ ID NO: 2411 - protein, 9 aa, Artificial Sequence
  source: /note="Description of Artificial Sequence: Synthetic peptide"
QQVLHTPLT

SEQ ID NO: 2412 - protein, 9 aa, Artificial Sequence
  source: /note="Description of Artificial Sequence: Synthetic peptide"
QQVNRYPFT

SEQ ID NO: 2413 - protein, 9 aa, Artificial Sequence
  source: /note="Description of Artificial Sequence: Synthetic peptide"
QQVSSFPPT

SEQ ID NO: 2414 - protein, 9 aa, Artificial Sequence
  source: /note="Description of Artificial Sequence: Synthetic peptide"
QQVYHTPLT

SEQ ID NO: 2415 - protein, 8 aa, Artificial Sequence
  source: /note="Description of Artificial Sequence: Synthetic peptide"
QQYADFPT

SEQ ID NO: 2416 - protein, 8 aa, Artificial Sequence
  source: /note="Description of Artificial Sequence: Synthetic peptide"
QQYADLPT

SEQ ID NO: 2417 - protein, 9 aa, Artificial Sequence
  source: /note="Description of Artificial Sequence: Synthetic peptide"
QQYALLPLT

SEQ ID NO: 2418 - protein, 9 aa, Artificial Sequence
  source: /note="Description of Artificial Sequence: Synthetic peptide"
QQYDNYPPT

SEQ ID NO: 2419 - protein, 9 aa, Artificial Sequence
  source: /note="Description of Artificial Sequence: Synthetic peptide"
QQYDVWPIT

SEQ ID NO: 2420 - protein, 8 aa, Artificial Sequence
  source: /note="Description of Artificial Sequence: Synthetic peptide"
QQYFDLPT

SEQ ID NO: 2421 - protein, 9 aa, Artificial Sequence
  source: /note="Description of Artificial Sequence: Synthetic peptide"
QQYFIIPLT

SEQ ID NO: 2422 - protein, 8 aa, Artificial Sequence
  source: /note="Description of Artificial Sequence: Synthetic peptide"
QQYHDFPT

SEQ ID NO: 2423 - protein, 9 aa, Artificial Sequence
  source: /note="Description of Artificial Sequence: Synthetic peptide"
QQYIVLPIT

SEQ ID NO: 2424 - protein, 9 aa, Artificial Sequence
  source: /note="Description of Artificial Sequence: Synthetic peptide"
QQYNAWPLT

SEQ ID NO: 2425 - protein, 8 aa, Artificial Sequence
  source: /note="Description of Artificial Sequence: Synthetic peptide"
QQYSDLPT

SEQ ID NO: 2426 - protein, 9 aa, Artificial Sequence
  source: /note="Description of Artificial Sequence: Synthetic peptide"
QQYSTLPLT

SEQ ID NO: 2427 - protein, 8 aa, Artificial Sequence
  source: /note="Description of Artificial Sequence: Synthetic peptide"
QQYVDLPT

SEQ ID NO: 2428 - protein, 9 aa, Artificial Sequence
  source: /note="Description of Artificial Sequence: Synthetic peptide"
QQYVNLPIT

SEQ ID NO: 2429 - protein, 9 aa, Artificial Sequence
  source: /note="Description of Artificial Sequence: Synthetic peptide"
QQYVNLPLT

SEQ ID NO: 2430 - protein, 9 aa, Artificial Sequence
  source: /note="Description of Artificial Sequence: Synthetic peptide"
QQYYFWPLT

SEQ ID NO: 2431 - protein, 9 aa, Artificial Sequence
  source: /note="Description of Artificial Sequence: Synthetic peptide"
QQYYGLPLT

SEQ ID NO: 2432 - protein, 9 aa, Artificial Sequence
  source: /note="Description of Artificial Sequence: Synthetic peptide"
QRSWEIPLT

SEQ ID NO: 2433 - protein, 26 aa, Artificial Sequence
  source: /note="Description of Artificial Sequence: Synthetic peptide"
QVQLQQPGSELVRPGASVKLSCKASG

SEQ ID NO: 2434 - protein, 7 aa, Artificial Sequence
  source: /note="Description of Artificial Sequence: Synthetic peptide"
RANRLVD

SEQ ID NO: 2435 - protein, 15 aa, Artificial Sequence
  source: /note="Description of Artificial Sequence: Synthetic peptide"
RASKRVSTSVHSYMH

SEQ ID NO: 2436 - protein, 15 aa, Artificial Sequence
  source: /note="Description of Artificial Sequence: Synthetic peptide"
RASKSVSTSGHSYMH

SEQ ID NO: 2437 - protein, 15 aa, Artificial Sequence
  source: /note="Description of Artificial Sequence: Synthetic peptide"
RASKSVSTSGYSYMH

SEQ ID NO: 2438 - protein, 15 aa, Artificial Sequence
  source: /note="Description of Artificial Sequence: Synthetic peptide"
RASQDVSTSTYSYMH

SEQ ID NO: 2439 - protein, 11 aa, Artificial Sequence
  source: /note="Description of Artificial Sequence: Synthetic peptide"
RASQGIDSWLA

SEQ ID NO: 2440 - protein, 11 aa, Artificial Sequence
  source: /note="Description of Artificial Sequence: Synthetic peptide"
RASQGISSWLA

SEQ ID NO: 2441 - protein, 11 aa, Artificial Sequence
  source: /note="Description of Artificial Sequence: Synthetic peptide"
RASQSISRYLN

SEQ ID NO: 2442 - protein, 11 aa, Artificial Sequence
  source: /note="Description of Artificial Sequence: Synthetic peptide"
RASQSISSWLA

SEQ ID NO: 2443 - protein, 11 aa, Artificial Sequence
  source: /note="Description of Artificial Sequence: Synthetic peptide"
RASQSISSYLN

SEQ ID NO: 2444 - protein, 11 aa, Artificial Sequence
  source: /note="Description of Artificial Sequence: Synthetic peptide"
RASQSVGSNLA

SEQ ID NO: 2445 - protein, 15 aa, Artificial Sequence
  source: /note="Description of Artificial Sequence: Synthetic peptide"
RASQSVGTSTYSYMH

SEQ ID NO: 2446 - protein, 15 aa, Artificial Sequence
  source: /note="Description of Artificial Sequence: Synthetic peptide"
RASQSVHTSTYSYMH

SEQ ID NO: 2447 - protein, 15 aa, Artificial Sequence
  source: /note="Description of Artificial Sequence: Synthetic peptide"
RASQSVSASTYSYMH

SEQ ID NO: 2448 - protein, 11 aa, Artificial Sequence
  source: /note="Description of Artificial Sequence: Synthetic peptide"
RASQSVSSNLA

SEQ ID NO: 2449 - protein, 12 aa, Artificial Sequence
  source: /note="Description of Artificial Sequence: Synthetic peptide"
RASQSVSSSFLA

SEQ ID NO: 2450 - protein, 12 aa, Artificial Sequence
  source: /note="Description of Artificial Sequence: Synthetic peptide"
RASQSVSSSYLA

SEQ ID NO: 2451 - protein, 11 aa, Artificial Sequence
  source: /note="Description of Artificial Sequence: Synthetic peptide"
RASQSVSSYLA

SEQ ID NO: 2452 - protein, 15 aa, Artificial Sequence
  source: /note="Description of Artificial Sequence: Synthetic peptide"
RASQSVSTSTYSYMH

SEQ ID NO: 2453 - protein, 15 aa, Artificial Sequence
  source: /note="Description of Artificial Sequence: Synthetic peptide"
RGSQSVSTSTYSYMH

SEQ ID NO: 2454 - protein, 15 aa, Artificial Sequence
  source: /note="Description of Artificial Sequence: Synthetic peptide"
RPSKRISAYVFSYMH

SEQ ID NO: 2455 - protein, 16 aa, Artificial Sequence
  source: /note="Description of Artificial Sequence: Synthetic peptide"
RSSQSLLHSNGYNYLD

SEQ ID NO: 2456 - protein, 15 aa, Artificial Sequence
  source: /note="Description of Artificial Sequence: Synthetic peptide"
RVSQDVSTSTYSYMH

SEQ ID NO: 2457 - protein, 8 aa, Artificial Sequence
  source: /note="Description of Artificial Sequence: Synthetic peptide"
RYHYAMDS

SEQ ID NO: 2458 - protein, 7 aa, Artificial Sequence
  source: /note="Description of Artificial Sequence: Synthetic peptide"
SASTRAT

SEQ ID NO: 2459 - protein, 8 aa, Artificial Sequence
  source: /note="Description of Artificial Sequence: Synthetic peptide"
SDVDYFDL

SEQ ID NO: 2460 - protein, 8 aa, Artificial Sequence
  source: /note="Description of Artificial Sequence: Synthetic peptide"
SDVDYFDY

SEQ ID NO: 2461 - protein, 8 aa, Artificial Sequence
  source: /note="Description of Artificial Sequence: Synthetic peptide"
SFVDYFDY

SEQ ID NO: 2462 - protein, 17 aa, Artificial Sequence
  source: /note="Description of Artificial Sequence: Synthetic peptide"
SIIPIFGTANYAQKFQG

SEQ ID NO: 2463 - protein, 17 aa, Artificial Sequence
  source: /note="Description of Artificial Sequence: Synthetic peptide"
SISSSSSYIYYADSVKG

SEQ ID NO: 2464 - protein, 16 aa, Artificial Sequence
  source: /note="Description of Artificial Sequence: Synthetic peptide"
SISYSGSTYYNPSLKS

SEQ ID NO: 2465 - protein, 16 aa, Artificial Sequence
  source: /note="Description of Artificial Sequence: Synthetic peptide"
SIYHSGNTYYNPSLKS

SEQ ID NO: 2466 - protein, 16 aa, Artificial Sequence
  source: /note="Description of Artificial Sequence: Synthetic peptide"
SIYYSGSTYYNPSLKS

SEQ ID NO: 2467 - protein, 8 aa, Artificial Sequence
  source: /note="Description of Artificial Sequence: Synthetic peptide"
SSVDYFDY

SEQ ID NO: 2468 - protein, 8 aa, Artificial Sequence
  source: /note="Description of Artificial Sequence: Synthetic peptide"
STVDYFDD

SEQ ID NO: 2469 - protein, 8 aa, Artificial Sequence
  source: /note="Description of Artificial Sequence: Synthetic peptide"
STVDYFDY

SEQ ID NO: 2470 - protein, 8 aa, Artificial Sequence
  source: /note="Description of Artificial Sequence: Synthetic peptide"
  VARIANT (2)..(2): /replace="Asp" or "Phe" or "Ser"
  VARIANT (8)..(8): /replace="Asp" or "Asn"
  SITE (1)..(8): /note="Variant residues given in the sequence have no preference with respect to those in the annotations for variant positions"
STVDYFDY

SEQ ID NO: 2471 - protein, 17 aa, Artificial Sequence
  source: /note="Description of Artificial Sequence: Synthetic peptide"
TISGSGGSTYYADSVKG

SEQ ID NO: 2472 - protein, 16 aa, Artificial Sequence
  source: /note="Description of Artificial Sequence: Synthetic peptide"
TIYHSGSTYYNPSLKS

SEQ ID NO: 2473 - protein, 12 aa, Artificial Sequence
  source: /note="Description of Artificial Sequence: Synthetic peptide"
TLSSQHSTYTIE

SEQ ID NO: 2474 - protein, 11 aa, Artificial Sequence
  source: /note="Description of Artificial Sequence: Synthetic peptide"
TRDGYYVPFAY

SEQ ID NO: 2475 - protein, 13 aa, Artificial Sequence
  source: /note="Description of Artificial Sequence: Synthetic peptide"
TRGHYGNYLTFDY

SEQ ID NO: 2476 - protein, 13 aa, Artificial Sequence
  source: /note="Description of Artificial Sequence: Synthetic peptide"
TRGHYGSYLTFDY

SEQ ID NO: 2477 - protein, 13 aa, Artificial Sequence
  source: /note="Description of Artificial Sequence: Synthetic peptide"
VAEIRLKSNNYVT

SEQ ID NO: 2478 - protein, 16 aa, Artificial Sequence
  source: /note="Description of Artificial Sequence: Synthetic peptide"
VAEIRLKSNNYVTNYV

SEQ ID NO: 2479 - protein, 18 aa, Artificial Sequence
  source: /note="Description of Artificial Sequence: Synthetic peptide"
VAEIRLKSNNYVTNYVYC

SEQ ID NO: 2480 - protein, 13 aa, Artificial Sequence
  source: /note="Description of Artificial Sequence: Synthetic peptide"
VGSGFTFSNYCMN

SEQ ID NO: 2481 - protein, 17 aa, Artificial Sequence
  source: /note="Description of Artificial Sequence: Synthetic peptide"
VINPSGGSTSYAQKFQG

SEQ ID NO: 2482 - protein, 17 aa, Artificial Sequence
  source: /note="Description of Artificial Sequence: Synthetic peptide"
VISGSGGSTYYADSVKG

SEQ ID NO: 2483 - protein, 17 aa, Artificial Sequence
  source: /note="Description of Artificial Sequence: Synthetic peptide"
VISYDGSNKYYADSVKG

SEQ ID NO: 2484 - protein, 17 aa, Artificial Sequence
  source: /note="Description of Artificial Sequence: Synthetic peptide"
VIWYDGSNKYYADSVKG

SEQ ID NO: 2485 - protein, 9 aa, Artificial Sequence
  source: /note="Description of Artificial Sequence: Synthetic peptide"
VYYCQHSWE

SEQ ID NO: 2486 - protein, 7 aa, Artificial Sequence
  source: /note="Description of Artificial Sequence: Synthetic peptide"
WASTRES

SEQ ID NO: 2487 - protein, 17 aa, Artificial Sequence
  source: /note="Description of Artificial Sequence: Synthetic peptide"
WINPNSGGTKYAQKFQG

SEQ ID NO: 2488 - protein, 17 aa, Artificial Sequence
  source: /note="Description of Artificial Sequence: Synthetic peptide"
WINPNSGGTNYAQKFQG

SEQ ID NO: 2489 - protein, 17 aa, Artificial Sequence
  source: /note="Description of Artificial Sequence: Synthetic peptide"
WINPNSGGTSYAQKFQG

SEQ ID NO: 2490 - protein, 17 aa, Artificial Sequence
  source: /note="Description of Artificial Sequence: Synthetic peptide"
WINPSSGGTNYAQKFQG

SEQ ID NO: 2491 - protein, 9 aa, Artificial Sequence
  source: /note="Description of Artificial Sequence: Synthetic peptide"
  VARIANT (1)..(1): /replace="Glu"
  VARIANT (4)..(4): /replace="Glu"
  VARIANT (5)..(5): /replace="Ala"
  VARIANT (6)..(6): /replace="Leu"
  VARIANT (9)..(9): /replace="Glu"
  SITE (1)..(9): /note="Variant residues given in the sequence have no preference with respect to those in the annotations for variant positions"
QHSWEIPLT

SEQ ID NO: 2492 - protein, 15 aa, Artificial Sequence
  source: /note="Description of Artificial Sequence: Synthetic peptide"
  VARIANT (1)..(1): /replace="Lys"
  VARIANT (2)..(2): /replace="Gly" or "Val"
  VARIANT (5)..(5): /replace="Asp"
  VARIANT (7)..(7): /replace="Gly" or "His"
  VARIANT (8)..(8): /replace="Ala"
  SITE (1)..(15): /note="Variant residues given in the sequence have no preference with respect to those in the annotations for variant positions"
RASQSVSTSTYSYMH

SEQ ID NO: 2493 - protein, 15 aa, Artificial Sequence
  source: /note="Description of Artificial Sequence: Synthetic peptide"
  VARIANT (1)..(1): /replace="Lys"
  VARIANT (2)..(2): /replace="Gly" or "Val"
  VARIANT (5)..(5): /replace="Asp"
  VARIANT (7)..(7): /replace="Gly" or "His"
  VARIANT (8)..(8): /replace="Ala"
  SITE (1)..(15): /note="Variant residues given in the sequence have no preference with respect to those in the annotations for variant positions"
RASQSVSTSTYSYMH

SEQ ID NO: 2494 - protein, 7 aa, Artificial Sequence
  source: /note="Description of Artificial Sequence: Synthetic peptide"
YAFNLES

SEQ ID NO: 2495 - protein, 7 aa, Artificial Sequence
  source: /note="Description of Artificial Sequence: Synthetic peptide"
YASALES

SEQ ID NO: 2496 - protein, 7 aa, Artificial Sequence
  source: /note="Description of Artificial Sequence: Synthetic peptide"
YASFLES

SEQ ID NO: 2497 - protein, 7 aa, Artificial Sequence
  source: /note="Description of Artificial Sequence: Synthetic peptide"
YASNLES

SEQ ID NO: 2498 - protein, 7 aa, Artificial Sequence
  source: /note="Description of Artificial Sequence: Synthetic peptide"
YASNLGS

SEQ ID NO: 2499 - protein, 7 aa, Artificial Sequence
  source: /note="Description of Artificial Sequence: Synthetic peptide"
YASNLNS

SEQ ID NO: 2500 - protein, 7 aa, Artificial Sequence
  source: /note="Description of Artificial Sequence: Synthetic peptide"
YASNVES

SEQ ID NO: 2501 - protein, 7 aa, Artificial Sequence
  source: /note="Description of Artificial Sequence: Synthetic peptide"
YASYLES

SEQ ID NO: 2502 - protein, 7 aa, Artificial Sequence
  source: /note="Description of Artificial Sequence: Synthetic peptide"
YAVNLES

SEQ ID NO: 2503 - protein, 8 aa, Artificial Sequence
  source: /note="Description of Artificial Sequence: Synthetic peptide"
YCARSDVD

SEQ ID NO: 2504 - protein, 7 aa, Artificial Sequence
  source: /note="Description of Artificial Sequence: Synthetic peptide"
YESNLES

SEQ ID NO: 2505 - protein, 17 aa, Artificial Sequence
  source: /note="Description of Artificial Sequence: Synthetic peptide"
YISSSSSTIYYADSVKG

SEQ ID NO: 2506 - protein, 5 aa, Artificial Sequence
  source: /note="Description of Artificial Sequence: Synthetic peptide"
YNLEC

SEQ ID NO: 2507 - protein, 5 aa, Artificial Sequence
  source: /note="Description of Artificial Sequence: Synthetic peptide"
YNLES

SEQ ID NO: 2508 - protein, 9 aa, Artificial Sequence
  source: /note="Description of Artificial Sequence: Synthetic peptide"
YSFTGYYMH

SEQ ID NO: 2509 - protein, 10 aa, Artificial Sequence
  source: /note="Description of Artificial Sequence: Synthetic peptide"
YSISSGYYWG

SEQ ID NO: 2510 - protein, 9 aa, Artificial Sequence
  source: /note="Description of Artificial Sequence: Synthetic peptide"
YTFTDYNLH

SEQ ID NO: 2511 - protein, 9 aa, Artificial Sequence
  source: /note="Description of Artificial Sequence: Synthetic peptide"
YTFTGSYMH

SEQ ID NO: 2512 - protein, 9 aa, Artificial Sequence
  source: /note="Description of Artificial Sequence: Synthetic peptide"
YTFTGYYMH

SEQ ID NO: 2513 - protein, 9 aa, Artificial Sequence
  source: /note="Description of Artificial Sequence: Synthetic peptide"
YTFTRYYMH

SEQ ID NO: 2514 - protein, 9 aa, Artificial Sequence
  source: /note="Description of Artificial Sequence: Synthetic peptide"
YTFTSYDIN

SEQ ID NO: 2515 - protein, 9 aa, Artificial Sequence
  source: /note="Description of Artificial Sequence: Synthetic peptide"
YTFTSYWMH

SEQ ID NO: 2516 - protein, 9 aa, Artificial Sequence
  source: /note="Description of Artificial Sequence: Synthetic peptide"
YTFTSYYIH

SEQ ID NO: 2517 - protein, 9 aa, Artificial Sequence
  source: /note="Description of Artificial Sequence: Synthetic peptide"
YTFTSYYMH

SEQ ID NO: 2518 - protein, 7 aa, Artificial Sequence
  source: /note="Description of Artificial Sequence: Synthetic peptide"
YVSNLES

SEQ ID NO: 2519 - protein, 7 aa, Artificial Sequence
  source: /note="Description of Artificial Sequence: Synthetic peptide"
  VARIANT (2)..(2): /replace="Val" or "Glu"
  VARIANT (3)..(3): /replace="Val" or "Phe"
  VARIANT (4)..(4): /replace="Ala" or "Tyr" or "Phe"
  VARIANT (5)..(5): /replace="Val"
  VARIANT (6)..(6): /replace="Gly" or "Asn"
  SITE (1)..(7): /note="Variant residues given in the sequence have no preference with respect to those in the annotations for variant positions"
YASNLES

SEQ ID NO: 2520 - protein, 10 aa, Artificial Sequence
  source: /note="Description of Artificial Sequence: Synthetic peptide"
GFTFSSYGMH

SEQ ID NO: 2521 - protein, 9 aa, Artificial Sequence
  source: /note="Description of Artificial Sequence: Synthetic peptide"
QQYYSTPFT

SEQ ID NO: 2522 - protein, 11 aa, Artificial Sequence
  source: /note="Description of Artificial Sequence: Synthetic peptide"
RASQSINSYLD

SEQ ID NO: 2523 - protein, 24 aa, Artificial Sequence
  source: /note="Description of Artificial Sequence: Synthetic peptide"
TAVYYCARDPRGATLYYYYYGMDV

SEQ ID NO: 2524 - protein, 15 aa, Artificial Sequence
  source: /note="Description of Artificial Sequence: Synthetic peptide"
VIWYDGSNKYYADSV

SEQ ID NO: 2525 - protein, 7 aa, Artificial Sequence
  source: /note="Description of Artificial Sequence: Synthetic peptide"
  MOD_RES (6)..(7): Any amino acid
GYFMNXX

SEQ ID NO: 2526 - protein, 17 aa, Artificial Sequence
  source: /note="Description of Artificial Sequence: Synthetic peptide"
  MOD_RES (16)..(17): Any amino acid
KASQSVSFAGTSLMHXX

SEQ ID NO: 2527 - protein, 11 aa, Artificial Sequence
  source: /note="Description of Artificial Sequence: Synthetic peptide"
  MOD_RES (10)..(11): Any amino acid
QQSREYPYTXX

SEQ ID NO: 2528 - protein, 9 aa, Artificial Sequence
  source: /note="Description of Artificial Sequence: Synthetic peptide"
  MOD_RES (8)..(9): Any amino acid
RASNLEAXX

SEQ ID NO: 2529 - protein, 12 aa, Artificial Sequence
  source: /note="Description of Artificial Sequence: Synthetic peptide"
  MOD_RES (11)..(12): Any amino acid
RIHPYDGDTFXX

SEQ ID NO: 2530 - protein, 19 aa, Artificial Sequence
  source: /note="Description of Artificial Sequence: Synthetic peptide"
  MOD_RES (18)..(19): Any amino acid
RIHPYDGDTFYNQKFQGXX

SEQ ID NO: 2531 - protein, 12 aa, Artificial Sequence
  source: /note="Description of Artificial Sequence: Synthetic peptide"
  MOD_RES (10)..(12): Any amino acid
YDGSRAMDYXXX

SEQ ID NO: 2532 - protein, 17 aa, Artificial Sequence
  source: /note="Description of Artificial Sequence: Synthetic peptide"
DVNPNSGGSIYNQRFKG

SEQ ID NO: 2533 - protein, 10 aa, Artificial Sequence
  source: /note="Description of Artificial Sequence: Synthetic peptide"
  VARIANT (10)..(10): /replace="Ser"
  SITE (1)..(10): /note="Variant residues given in the sequence have no preference with respect to those in the annotations for variant positions"
GFTFTDYTMD

SEQ ID NO: 2534 - protein, 11 aa, Artificial Sequence
  source: /note="Description of Artificial Sequence: Synthetic peptide"
KASQDVSIGVA

SEQ ID NO: 2535 - protein, 10 aa, Artificial Sequence
  source: /note="Description of Artificial Sequence: Synthetic peptide"
NLGPSFYFDY

SEQ ID NO: 2536 - protein, 9 aa, Artificial Sequence
  source: /note="Description of Artificial Sequence: Synthetic peptide"
QQYYIYPYT

SEQ ID NO: 2537 - protein, 7 aa, Artificial Sequence
  source: /note="Description of Artificial Sequence: Synthetic peptide"
  VARIANT (5)..(5): /replace="Leu"
  VARIANT (6)..(6): /replace="Glu"
  VARIANT (7)..(7): /replace="Ser"
  SITE (1)..(7): /note="Variant residues given in the sequence have no preference with respect to those in the annotations for variant positions"
SASYRYT

SEQ ID NO: 2538 - protein, 19 aa, Artificial Sequence
  source: /note="Description of Artificial Sequence: Synthetic peptide"
  MOD_RES (18)..(19): Any amino acid
GINPSNGGTNFNEKFKNXX

SEQ ID NO: 2539 - protein, 9 aa, Artificial Sequence
  source: /note="Description of Artificial Sequence: Synthetic peptide"
  MOD_RES (8)..(9): Any amino acid
LASYLESXX

SEQ ID NO: 2540 - protein, 7 aa, Artificial Sequence
  source: /note="Description of Artificial Sequence: Synthetic peptide"
  MOD_RES (6)..(7): Any amino acid
NYYMYXX

SEQ ID NO: 2541 - protein, 12 aa, Artificial Sequence
  source: /note="Description of Artificial Sequence: Synthetic peptide"
  MOD_RES (10)..(12): Any amino acid
QHSRDLPLTXXX

SEQ ID NO: 2542 - protein, 17 aa, Artificial Sequence
  source: /note="Description of Artificial Sequence: Synthetic peptide"
  MOD_RES (16)..(17): Any amino acid
RASKGVSTSGYSYLHXX

SEQ ID NO: 2543 - protein, 13 aa, Artificial Sequence
  source: /note="Description of Artificial Sequence: Synthetic peptide"
  MOD_RES (12)..(13): Any amino acid
RDYRFDMGFDYXX

SEQ ID NO: 2544 - protein, 7 aa, Artificial Sequence
  source: /note="Description of Artificial Sequence: Synthetic peptide"
DASSRAT

SEQ ID NO: 2545 - protein, 12 aa, Artificial Sequence
  source: /note="Description of Artificial Sequence: Synthetic peptide"
EGGWFGELAFDY

SEQ ID NO: 2546 - protein, 9 aa, Artificial Sequence
  source: /note="Description of Artificial Sequence: Synthetic peptide"
QQYGSLPWT

SEQ ID NO: 2547 - protein, 12 aa, Artificial Sequence
  source: /note="Description of Artificial Sequence: Synthetic peptide"
RASQRVSSSYLA

SEQ ID NO: 2548 - protein, 5 aa, Artificial Sequence
  source: /note="Description of Artificial Sequence: Synthetic peptide"
RYWMS

SEQ ID NO: 2549 - protein, 9 aa, Artificial Sequence
  source: /note="Description of Artificial Sequence: Synthetic peptide"
ALWYSNHLV

SEQ ID NO: 2550 - protein, 10 aa, Artificial Sequence
  source: /note="Description of Artificial Sequence: Synthetic peptide"
DYAFTSYNIY

SEQ ID NO: 2551 - protein, 9 aa, Artificial Sequence
  source: /note="Description of Artificial Sequence: Synthetic peptide"
FQGSHVPWT

SEQ ID NO: 2552 - protein, 9 aa, Artificial Sequence
  source: /note="Description of Artificial Sequence: Synthetic peptide"
FYDYDGFPY

SEQ ID NO: 2553 - protein, 9 aa, Artificial Sequence
  source: /note="Description of Artificial Sequence: Synthetic peptide"
FYEYDGFPY

SEQ ID NO: 2554 - protein, 9 aa, Artificial Sequence
  source: /note="Description of Artificial Sequence: Synthetic peptide"
FYGFDGFAY

SEQ ID NO: 2555 - protein, 10 aa, Artificial Sequence
  source: /note="Description of Artificial Sequence: Synthetic peptide"
GYAFTSYNMY

SEQ ID NO: 2556 - protein, 10 aa, Artificial Sequence
  source: /note="Description of Artificial Sequence: Synthetic peptide"
GYIFTEYIIH

SEQ ID NO: 2557 - protein, 10 aa, Artificial Sequence
  source: /note="Description of Artificial Sequence: Synthetic peptide"
GYSFTDYNMY

SEQ ID NO: 2558 - protein, 10 aa, Artificial Sequence
  source: /note="Description of Artificial Sequence: Synthetic peptide"
GYSFTGYNMY

SEQ ID NO: 2559 - protein, 10 aa, Artificial Sequence
  source: /note="Description of Artificial Sequence: Synthetic peptide"
GYTFTEYIIH

SEQ ID NO: 2560 - protein, 10 aa, Artificial Sequence
  source: /note="Description of Artificial Sequence: Synthetic peptide"
GYTFTEYTIH

SEQ ID NO: 2561 - protein, 10 aa, Artificial Sequence
  source: /note="Description of Artificial Sequence: Synthetic peptide"
GYTFTEYTLH

SEQ ID NO: 2562 - protein, 10 aa, Artificial Sequence
  source: /note="Description of Artificial Sequence: Synthetic peptide"
HEGYDGAMDY

SEQ ID NO: 2563 - protein, 11 aa, Artificial Sequence
  source: /note="Description of Artificial Sequence: Synthetic peptide"
KASHNVGTSVA

SEQ ID NO: 2564 - protein, 11 aa, Artificial Sequence
  source: /note="Description of Artificial Sequence: Synthetic peptide"
KASQNVDTNVA

SEQ ID NO: 2565 - protein, 11 aa, Artificial Sequence
  source: /note="Description of Artificial Sequence: Synthetic peptide"
KASQNVGTNVA

SEQ ID NO: 2566 - protein, 11 aa, Artificial Sequence
  source: /note="Description of Artificial Sequence: Synthetic peptide"
KASQNVGTYVA

SEQ ID NO: 2567 - protein, 9 aa, Artificial Sequence
  source: /note="Description of Artificial Sequence: Synthetic peptide"
KVGYEAMDY

SEQ ID NO: 2568 - protein, 7 aa, Artificial Sequence
  source: /note="Description of Artificial Sequence: Synthetic peptide"
KVSIRFS

SEQ ID NO: 2569 - protein, 7 aa, Artificial Sequence
  source: /note="Description of Artificial Sequence: Synthetic peptide"
KVSNRFS

SEQ ID NO: 2570 - protein, 7 aa, Artificial Sequence
  source: /note="Description of Artificial Sequence: Synthetic peptide"
LTSNLAS

SEQ ID NO: 2571 - protein, 9 aa, Artificial Sequence
  source: /note="Description of Artificial Sequence: Synthetic peptide"
NDYDGAFAY

SEQ ID NO: 2572 - protein, 10 aa, Artificial Sequence
  source: /note="Description of Artificial Sequence: Synthetic peptide"
QDYDGLGFAY

SEQ ID NO: 2573 - protein, 10 aa, Artificial Sequence
  source: /note="Description of Artificial Sequence: Synthetic peptide"
QEEGGIGFDY

SEQ ID NO: 2574 - protein, 9 aa, Artificial Sequence
  source: /note="Description of Artificial Sequence: Synthetic peptide"
QQFNSYPYT

SEQ ID NO: 2575 - protein, 9 aa, Artificial Sequence
  source: /note="Description of Artificial Sequence: Synthetic peptide"
QQWSSNPLT

SEQ ID NO: 2576 - protein, 9 aa, Artificial Sequence
  source: /note="Description of Artificial Sequence: Synthetic peptide"
QQYNSFPLT

SEQ ID NO: 2577 - protein, 9 aa, Artificial Sequence
  source: /note="Description of Artificial Sequence: Synthetic peptide"
QQYNSYPLT

SEQ ID NO: 2578 - protein, 9 aa, Artificial Sequence
  source: /note="Description of Artificial Sequence: Synthetic peptide"
QQYNSYPYT

SEQ ID NO: 2579 - protein, 16 aa, Artificial Sequence
  source: /note="Description of Artificial Sequence: Synthetic peptide"
RCSQSIVHSNGNTYLE

SEQ ID NO: 2580 - protein, 16 aa, Artificial Sequence
  source: /note="Description of Artificial Sequence: Synthetic peptide"
RSSQSILHSNGNTYLE

SEQ ID NO: 2581 - protein, 16 aa, Artificial Sequence
  source: /note="Description of Artificial Sequence: Synthetic peptide"
RSSQSIVHSNGNTYLE

SEQ ID NO: 2582 - protein, 16 aa, Artificial Sequence
  source: /note="Description of Artificial Sequence: Synthetic peptide"
RSSQTIVHSNGNTYLE

SEQ ID NO: 2583 - protein, 14 aa, Artificial Sequence
  source: /note="Description of Artificial Sequence: Synthetic peptide"
RSSTGAVTTSNYAN

SEQ ID NO: 2584 - protein, 7 aa, Artificial Sequence
  source: /note="Description of Artificial Sequence: Synthetic peptide"
RVSNRFS

SEQ ID NO: 2585 - protein, 10 aa, Artificial Sequence
  source: /note="Description of Artificial Sequence: Synthetic peptide"
SASSSVSYMY

SEQ ID NO: 2586 - protein, 7 aa, Artificial Sequence
  source: /note="Description of Artificial Sequence: Synthetic peptide"
SASYRYN

SEQ ID NO: 2587 - protein, 7 aa, Artificial Sequence
  source: /note="Description of Artificial Sequence: Synthetic peptide"
SASYRYS

SEQ ID NO: 2588 - protein, 7 aa, Artificial Sequence
  source: /note="Description of Artificial Sequence: Synthetic peptide"
TTNNRAP

SEQ ID NO: 2589 - protein, 17 aa, Artificial Sequence
  source: /note="Description of Artificial Sequence: Synthetic peptide"
WFYPGIISIKYNEKFKD

SEQ ID NO: 2590 - protein, 17 aa, Artificial Sequence
  source: /note="Description of Artificial Sequence: Synthetic peptide"
WFYPGSGSIKYNEKFKA

SEQ ID NO: 2591 - protein, 17 aa, Artificial Sequence
  source: /note="Description of Artificial Sequence: Synthetic peptide"
WFYPGSGSIKYNEKFKD

SEQ ID NO: 2592 - protein, 17 aa, Artificial Sequence
  source: /note="Description of Artificial Sequence: Synthetic peptide"
YIDPYNGGPYYNQKFKG

SEQ ID NO: 2593 - protein, 17 aa, Artificial Sequence
  source: /note="Description of Artificial Sequence: Synthetic peptide"
YIDPYNGGTSYNQKFKG

SEQ ID NO: 2594 - protein, 17 aa, Artificial Sequence
  source: /note="Description of Artificial Sequence: Synthetic peptide"
YIDPYNGGTSYNQTFKG

SEQ ID NO: 2595 - protein, 17 aa, Artificial Sequence
  source: /note="Description of Artificial Sequence: Synthetic peptide"
YIDPYNGGTTYNQKFKG

SEQ ID NO: 2596 - protein, 17 aa, Artificial Sequence
  source: /note="Description of Artificial Sequence: Synthetic peptide"
YIDPYNGGTYYDQKFKG

SEQ ID NO: 2597 - protein, 17 aa, Artificial Sequence
  source: /note="Description of Artificial Sequence: Synthetic peptide"
YIDPYNGNTTYNQRFKG

SEQ ID NO: 2598 - protein, 17 aa, Artificial Sequence
  source: /note="Description of Artificial Sequence: Synthetic peptide"
YIDPYTGGTSYNQRFKG

SEQ ID NO: 2599 - protein, 9 aa, Artificial Sequence
  source: /note="Description of Artificial Sequence: Synthetic peptide"
YYDYDGIPY

SEQ ID NO: 2600 - protein, 9 aa, Artificial Sequence
  source: /note="Description of Artificial Sequence: Synthetic peptide"
YYGYYGVPY

SEQ ID NO: 2601 - protein, 7 aa, Artificial Sequence
  source: /note="Description of Artificial Sequence: Synthetic peptide"
AATSLAD

SEQ ID NO: 2602 - protein, 10 aa, Artificial Sequence
  source: /note="Description of Artificial Sequence: Synthetic peptide"
AKQGGTSFSY

SEQ ID NO: 2603 - protein, 11 aa, Artificial Sequence
  source: /note="Description of Artificial Sequence: Synthetic peptide"
ARDYSDYYFDY

SEQ ID NO: 2604 - protein, 10 aa, Artificial Sequence
  source: /note="Description of Artificial Sequence: Synthetic peptide"
AREGLRAMDY

SEQ ID NO: 2605 - protein, 9 aa, Artificial Sequence
  source: /note="Description of Artificial Sequence: Synthetic peptide"
AREGNPFTY

SEQ ID NO: 2606 - protein, 14 aa, Artificial Sequence
  source: /note="Description of Artificial Sequence: Synthetic peptide"
ARHGYGNYDWYFDV

SEQ ID NO: 2607 - protein, 10 aa, Artificial Sequence
  source: /note="Description of Artificial Sequence: Synthetic peptide"
ARSEGYLLAY

SEQ ID NO: 2608 - protein, 13 aa, Artificial Sequence
  source: /note="Description of Artificial Sequence: Synthetic peptide"
ARTEYSNPAWFAY

SEQ ID NO: 2609 - protein, 14 aa, Artificial Sequence
  source: /note="Description of Artificial Sequence: Synthetic peptide"
ASQSYGSSYWYFDV

SEQ ID NO: 2610 - protein, 7 aa, Artificial Sequence
  source: /note="Description of Artificial Sequence: Synthetic peptide"
DTSNLAS

SEQ ID NO: 2611 - protein, 9 aa, Artificial Sequence
  source: /note="Description of Artificial Sequence: Synthetic peptide"
DYSDYYFDY

SEQ ID NO: 2612 - protein, 7 aa, Artificial Sequence
  source: /note="Description of Artificial Sequence: Synthetic peptide"
FASQSIC

SEQ ID NO: 2613 - protein, 9 aa, Artificial Sequence
  source: /note="Description of Artificial Sequence: Synthetic peptide"
FIFSNYDMS

SEQ ID NO: 2614 - protein, 9 aa, Artificial Sequence
  source: /note="Description of Artificial Sequence: Synthetic peptide"
FNIKGSLLH

SEQ ID NO: 2615 - protein, 9 aa, Artificial Sequence
  source: /note="Description of Artificial Sequence: Synthetic peptide"
FSLSNYGVH

SEQ ID NO: 2616 - protein, 9 aa, Artificial Sequence
  source: /note="Description of Artificial Sequence: Synthetic peptide"
FTFSNYDMS

SEQ ID NO: 2617 - protein, 9 aa, Artificial Sequence
  source: /note="Description of Artificial Sequence: Synthetic peptide"
FTFSTYAMF

SEQ ID NO: 2618 - protein, 7 aa, Artificial Sequence
  source: /note="Description of Artificial Sequence: Synthetic peptide"
GATSLET

SEQ ID NO: 2619 - protein, 10 aa, Artificial Sequence
  source: /note="Description of Artificial Sequence: Synthetic peptide"
GYAFTNCWMN

SEQ ID NO: 2620 - protein, 9 aa, Artificial Sequence
  source: /note="Description of Artificial Sequence: Synthetic peptide"
HQGNSVQYT

SEQ ID NO: 2621 - protein, 9 aa, Artificial Sequence
  source: /note="Description of Artificial Sequence: Synthetic peptide"
HQYWNTPYT

SEQ ID NO: 2622 - protein, 14 aa, Artificial Sequence
  source: /note="Description of Artificial Sequence: Synthetic peptide"
IGDILPSIGRTMYG

SEQ ID NO: 2623 - protein, 14 aa, Artificial Sequence
  source: /note="Description of Artificial Sequence: Synthetic peptide"
IGEISPRSGETYFN

SEQ ID NO: 2624 - protein, 14 aa, Artificial Sequence
  source: /note="Description of Artificial Sequence: Synthetic peptide"
IGNIYSGSSRTNYN

SEQ ID NO: 2625 - protein, 14 aa, Artificial Sequence
  source: /note="Description of Artificial Sequence: Synthetic peptide"
IGRIFPGNGHTNYS

SEQ ID NO: 2626 - protein, 14 aa, Artificial Sequence
  source: /note="Description of Artificial Sequence: Synthetic peptide"
IGWIDPEDGETRFD

SEQ ID NO: 2627 - protein, 11 aa, Artificial Sequence
  source: /note="Description of Artificial Sequence: Synthetic peptide"
KASDHINNWLA

SEQ ID NO: 2628 - protein, 11 aa, Artificial Sequence
  source: /note="Description of Artificial Sequence: Synthetic peptide"
KASQKVGTNVA

SEQ ID NO: 2629 - protein, 7 aa, Artificial Sequence
  source: /note="Description of Artificial Sequence: Synthetic peptide"
KVSNRFC

SEQ ID NO: 2630 - protein, 7 aa, Artificial Sequence
  source: /note="Description of Artificial Sequence: Synthetic peptide"
  MOD_RES (7)..(7): Any amino acid
KVSNRFX

SEQ ID NO: 2631 - protein, 11 aa, Artificial Sequence
  source: /note="Description of Artificial Sequence: Synthetic peptide"
LASQTIGTWLA

SEQ ID NO: 2632 - protein, 13 aa, Artificial Sequence
  source: /note="Description of Artificial Sequence: Synthetic peptide"
LGVIWAGGITNYN

SEQ ID NO: 2633 - protein, 7 aa, Artificial Sequence
  source: /note="Description of Artificial Sequence: Synthetic peptide"
LSSRLHS

SEQ ID NO: 2634 - protein, 9 aa, Artificial Sequence
  source: /note="Description of Artificial Sequence: Synthetic peptide"
QKAHNFPYT

SEQ ID NO: 2635 - protein, 9 aa, Artificial Sequence
  source: /note="Description of Artificial Sequence: Synthetic peptide"
QKGLNFPLT

SEQ ID NO: 2636 - protein, 9 aa, Artificial Sequence
  source: /note="Description of Artificial Sequence: Synthetic peptide"
QNGHNFPYT

SEQ ID NO: 2637 - protein, 9 aa, Artificial Sequence
  source: /note="Description of Artificial Sequence: Synthetic peptide"
QQGHTGAWT

SEQ ID NO: 2638 - protein, 9 aa, Artificial Sequence
  source: /note="Description of Artificial Sequence: Synthetic peptide"
QQGNTLPWT

SEQ ID NO: 2639 - protein, 9 aa, Artificial Sequence
  source: /note="Description of Artificial Sequence: Synthetic peptide"
QQLYSTPYT

SEQ ID NO: 2640 - protein, 9 aa, Artificial Sequence
  source: /note="Description of Artificial Sequence: Synthetic peptide"
QQWSSSPLT

SEQ ID NO: 2641 - protein, 11 aa, Artificial Sequence
  source: /note="Description of Artificial Sequence: Synthetic peptide"
RASQDINTYLN

SEQ ID NO: 2642 - protein, 11 aa, Artificial Sequence
  source: /note="Description of Artificial Sequence: Synthetic peptide"
  MOD_RES (8)..(8): Any amino acid
RASQDISXYLN

SEQ ID NO: 2643 - protein, 11 aa, Artificial Sequence
  source: /note="Description of Artificial Sequence: Synthetic peptide"
RASQSIREYLH

SEQ ID NO: 2644 - protein, 11 aa, Artificial Sequence
  source: /note="Description of Artificial Sequence: Synthetic peptide"
RASQSISDYLH

SEQ ID NO: 2645 - protein, 11 aa, Artificial Sequence
  source: /note="Description of Artificial Sequence: Synthetic peptide"
RASQSISEYLH

SEQ ID NO: 2646 - protein, 10 aa, Artificial Sequence
  source: /note="Description of Artificial Sequence: Synthetic peptide"
RIFPGNGHTN

SEQ ID NO: 2647 - protein, 16 aa, Artificial Sequence
  source: /note="Description of Artificial Sequence: Synthetic peptide"
RSSQSLVHSTGNIYLH

SEQ ID NO: 2648 - protein, 16 aa, Artificial Sequence
  source: /note="Description of Artificial Sequence: Synthetic peptide"
RSSQSLVHSTGNTYLH

SEQ ID NO: 2649 - protein, 10 aa, Artificial Sequence
  source: /note="Description of Artificial Sequence: Synthetic peptide"
SANSSFIYMY

SEQ ID NO: 2650 - protein, 10 aa, Artificial Sequence
  source: /note="Description of Artificial Sequence: Synthetic peptide"
SANSSFTYMY

SEQ ID NO: 2651 - protein, 7 aa, Artificial Sequence
  source: /note="Description of Artificial Sequence: Synthetic peptide"
SASTRHR

SEQ ID NO: 2652 - protein, 10 aa, Artificial Sequence
  source: /note="Description of Artificial Sequence: Synthetic peptide"
SEVFPITYMN

SEQ ID NO: 2653 - protein, 9 aa, Artificial Sequence
  source: /note="Description of Artificial Sequence: Synthetic peptide"
SQNTHVPYT

SEQ ID NO: 2654 - protein, 14 aa, Artificial Sequence
  source: /note="Description of Artificial Sequence: Synthetic peptide"
TRHGYGNYDWYFDV

SEQ ID NO: 2655 - protein, 14 aa, Artificial Sequence
  source: /note="Description of Artificial Sequence: Synthetic peptide"
VASISSGGRYTYYP

SEQ ID NO: 2656 - protein, 14 aa, Artificial Sequence
  source: /note="Description of Artificial Sequence: Synthetic peptide"
VASISSGGSYNYYP

SEQ ID NO: 2657 - protein, 14 aa, Artificial Sequence
  source: /note="Description of Artificial Sequence: Synthetic peptide"
VATISSGGDYTYYP

SEQ ID NO: 2658 - protein, 14 aa, Artificial Sequence
  source: /note="Description of Artificial Sequence: Synthetic peptide"
VATISSGGGYTYYA

SEQ ID NO: 2659 - protein, 14 aa, Artificial Sequence
  source: /note="Description of Artificial Sequence: Synthetic peptide"
VATISSGGGYTYYP

SEQ ID NO: 2660 - protein, 14 aa, Artificial Sequence
  source: /note="Description of Artificial Sequence: Synthetic peptide"
VRHSYGSSYWYLDV

SEQ ID NO: 2661 - protein, 14 aa, Artificial Sequence
  source: /note="Description of Artificial Sequence: Synthetic peptide"
VSTISSGGGYTYYA

SEQ ID NO: 2662 - protein, 9 aa, Artificial Sequence
  source: /note="Description of Artificial Sequence: Synthetic peptide"
YAFTNCWMN

SEQ ID NO: 2663 - protein, 7 aa, Artificial Sequence
  source: /note="Description of Artificial Sequence: Synthetic peptide"
YASQSIS

SEQ ID NO: 2664 - protein, 9 aa, Artificial Sequence
  source: /note="Description of Artificial Sequence: Synthetic peptide"
YIFTDYGIT

SEQ ID NO: 2665 - protein, 9 aa, Artificial Sequence
  source: /note="Description of Artificial Sequence: Synthetic peptide"
YTFTNYWIN

SEQ ID NO: 2666 - protein, 7 aa, Artificial Sequence
  source: /note="Description of Artificial Sequence: Synthetic peptide"
YTSRLHS

SEQ ID NO: 2667 - protein, 11 aa, Artificial Sequence
  source: /note="Description of Artificial Sequence: Synthetic peptide"
AAYYSNYVRAY

SEQ ID NO: 2668 - protein, 9 aa, Artificial Sequence
  source: /note="Description of Artificial Sequence: Synthetic peptide"
AQFYQFPWT

SEQ ID NO: 2669 - protein, 9 aa, Artificial Sequence
  source: /note="Description of Artificial Sequence: Synthetic peptide"
ARWLLRFAY

SEQ ID NO: 2670 - protein, 7 aa, Artificial Sequence
  source: /note="Description of Artificial Sequence: Synthetic peptide"
CARNGEG

SEQ ID NO: 2671 - protein, 10 aa, Artificial Sequence
  source: /note="Description of Artificial Sequence: Synthetic peptide"
GFTFSNYGMS

SEQ ID NO: 2672 - protein, 11 aa, Artificial Sequence
  source: /note="Description of Artificial Sequence: Synthetic peptide"
GNYLYYYAMDY

SEQ ID NO: 2673 - protein, 10 aa, Artificial Sequence
  source: /note="Description of Artificial Sequence: Synthetic peptide"
GYTFTDYNIH

SEQ ID NO: 2674 - protein, 11 aa, Artificial Sequence
  source: /note="Description of Artificial Sequence: Synthetic peptide"
HTTRGIYWYKG

SEQ ID NO: 2675 - protein, 14 aa, Artificial Sequence
  source: /note="Description of Artificial Sequence: Synthetic peptide"
IGEIDPSDSYTYYN

SEQ ID NO: 2676 - protein, 14 aa, Artificial Sequence
  source: /note="Description of Artificial Sequence: Synthetic peptide"
IGEINPRDGVSNCN

SEQ ID NO: 2677 - protein, 14 aa, Artificial Sequence
  source: /note="Description of Artificial Sequence: Synthetic peptide"
IGRIYPRDGDTNYN

SEQ ID NO: 2678 - protein, 16 aa, Artificial Sequence
  source: /note="Description of Artificial Sequence: Synthetic peptide"
KSSQSLLDSDGKTYLN

SEQ ID NO: 2679 - protein, 16 aa, Artificial Sequence
  source: /note="Description of Artificial Sequence: Synthetic peptide"
KSSQSLLYTNGKTYLN

SEQ ID NO: 2680 - protein, 9 aa, Artificial Sequence
  source: /note="Description of Artificial Sequence: Synthetic peptide"
LQAPHFPLT

SEQ ID NO: 2681 - protein, 9 aa, Artificial Sequence
  source: /note="Description of Artificial Sequence: Synthetic peptide"
LQATHFPLT

SEQ ID NO: 2682 - protein, 9 aa, Artificial Sequence
  source: /note="Description of Artificial Sequence: Synthetic peptide"
LQYASYPPT

SEQ ID NO: 2683 - protein, 7 aa, Artificial Sequence
  source: /note="Description of Artificial Sequence: Synthetic peptide"
LVCKLDS

SEQ ID NO: 2684 - protein, 7 aa, Artificial Sequence
  source: /note="Description of Artificial Sequence: Synthetic peptide"
LVSKLES

SEQ ID NO: 2685 - protein, 9 aa, Artificial Sequence
  source: /note="Description of Artificial Sequence: Synthetic peptide"
QQSNEDPWT

SEQ ID NO: 2686 - protein, 15 aa, Artificial Sequence
  source: /note="Description of Artificial Sequence: Synthetic peptide"
RASENVDSYGISFMH

SEQ ID NO: 2687 - protein, 7 aa, Artificial Sequence
  source: /note="Description of Artificial Sequence: Synthetic peptide"
RASNLES

SEQ ID NO: 2688 - protein, 11 aa, Artificial Sequence
  source: /note="Description of Artificial Sequence: Synthetic peptide"
RASQEISGYLG

SEQ ID NO: 2689 - protein, 9 aa, Artificial Sequence
  source: /note="Description of Artificial Sequence: Synthetic peptide"
SQNTHVPLT

SEQ ID NO: 2690 - protein, 16 aa, Artificial Sequence
  source: /note="Description of Artificial Sequence: Synthetic peptide"
SSSQSLVHSNGNTYLH

SEQ ID NO: 2691 - protein, 7 aa, Artificial Sequence
  source: /note="Description of Artificial Sequence: Synthetic peptide"
STSTLDS

SEQ ID NO: 2692 - protein, 10 aa, Artificial Sequence
  source: /note="Description of Artificial Sequence: Synthetic peptide"
TINSNGGRTY

SEQ ID NO: 2693 - protein, 9 aa, Artificial Sequence
  source: /note="Description of Artificial Sequence: Synthetic peptide"
TIWEDYFDY

SEQ ID NO: 2694 - protein, 14 aa, Artificial Sequence
  source: /note="Description of Artificial Sequence: Synthetic peptide"
VATINNGGSYTYYS

SEQ ID NO: 2695 - protein, 12 aa, Artificial Sequence
  source: /note="Description of Artificial Sequence: Synthetic peptide"
VRRDYGTSDFDY

SEQ ID NO: 2696 - protein, 9 aa, Artificial Sequence
  source: /note="Description of Artificial Sequence: Synthetic peptide"
WQGTHFPQT

SEQ ID NO: 2697 - protein, 9 aa, Artificial Sequence
  source: /note="Description of Artificial Sequence: Synthetic peptide"
YAFSSYWMN

SEQ ID NO: 2698 - protein, 10 aa, Artificial Sequence
  source: /note="Description of Artificial Sequence: Synthetic peptide"
YIYPYNGDTG

SEQ ID NO: 2699 - protein, 11 aa, Artificial Sequence
  source: /note="Description of Artificial Sequence: Synthetic peptide"
YYRYDSYAMDY

SEQ ID NO: 2700 - protein, 11 aa, Artificial Sequence
  source: /note="Description of Artificial Sequence: Synthetic peptide"
  MOD_RES (10)..(11): Any amino acid
EGYDGVFDYXX

SEQ ID NO: 2701 - protein, 12 aa, Artificial Sequence
  source: /note="Description of Artificial Sequence: Synthetic peptide"
  MOD_RES (11)..(12): Any amino acid
GFTFSSYAMSXX

SEQ ID NO: 2702 - protein, 12 aa, Artificial Sequence
  source: /note="Description of Artificial Sequence: Synthetic peptide"
  MOD_RES (11)..(12): Any amino acid
GYSLTGYNMNXX

SEQ ID NO: 2703 - protein, 9 aa, Artificial Sequence
  source: /note="Description of Artificial Sequence: Synthetic peptide"
  MOD_RES (8)..(9): Any amino acid
LASNLESXX

SEQ ID NO: 2704 - protein, 12 aa, Artificial Sequence
  source: /note="Description of Artificial Sequence: Synthetic peptide"
  MOD_RES (11)..(12): Any amino acid
NINPHYGSSTXX

SEQ ID NO: 2705 - protein, 14 aa, Artificial Sequence
  source: /note="Description of Artificial Sequence: Synthetic peptide"
  MOD_RES (13)..(14): Any amino acid
PPYDDYYGGFAYXX

SEQ ID NO: 2706 - protein, 11 aa, Artificial Sequence
  source: /note="Description of Artificial Sequence: Synthetic peptide"
  MOD_RES (10)..(11): Any amino acid
QHNRELPCTXX

SEQ ID NO: 2707 - protein, 11 aa, Artificial Sequence
  source: /note="Description of Artificial Sequence: Synthetic peptide"
  MOD_RES (10)..(11): Any amino acid
QQWSSNPRTXX

SEQ ID NO: 2708 - protein, 17 aa, Artificial Sequence
  source: /note="Description of Artificial Sequence: Synthetic peptide"
  MOD_RES (16)..(17): Any amino acid
RASKSVSSSGYSYMHXX

SEQ ID NO: 2709 - protein, 12 aa, Artificial Sequence
  source: /note="Description of Artificial Sequence: Synthetic peptide"
  MOD_RES (11)..(12): Any amino acid
RASSSVSYMHXX

SEQ ID NO: 2710 - protein, 13 aa, Artificial Sequence
  source: /note="Description of Artificial Sequence: Synthetic peptide"
  MOD_RES (12)..(13): Any amino acid
TISDYGGSYTYXX

SEQ ID NO: 2711 - protein, 9 aa, Artificial Sequence
  source: /note="Description of Artificial Sequence: Synthetic peptide"
  MOD_RES (8)..(9): Any amino acid
VTSNLASXX

SEQ ID NO: 2712 - protein, 16 aa, Artificial Sequence
  source: /note="Description of Artificial Sequence: Synthetic peptide"
AIYPSGSTYYNPSLKS

SEQ ID NO: 2713 - protein, 22 aa, Artificial Sequence
  source: /note="Description of Artificial Sequence: Synthetic peptide"
AKGLEYYDSSRLYYPYYYYMDV

SEQ ID NO: 2714 - protein, 15 aa, Artificial Sequence
  source: /note="Description of Artificial Sequence: Synthetic peptide"
AKGVGQVPASVAFDI

SEQ ID NO: 2715 - protein, 12 aa, Artificial Sequence
  source: /note="Description of Artificial Sequence: Synthetic peptide"
AKLYQGTPDFDL

SEQ ID NO: 2716 - protein, 12 aa, Artificial Sequence
  source: /note="Description of Artificial Sequence: Synthetic peptide"
AKPLSSTGGGNI

SEQ ID NO: 2717 - protein, 12 aa, Artificial Sequence
  source: /note="Description of Artificial Sequence: Synthetic peptide"
AKPLYRGGPFDI

SEQ ID NO: 2718 - protein, 13 aa, Artificial Sequence
  source: /note="Description of Artificial Sequence: Synthetic peptide"
AKRGYPGYPAFDI

SEQ ID NO: 2719 - protein, 11 aa, Artificial Sequence
  source: /note="Description of Artificial Sequence: Synthetic peptide"
AKTGGTYGMDV

SEQ ID NO: 2720 - protein, 14 aa, Artificial Sequence
  source: /note="Description of Artificial Sequence: Synthetic peptide"
AKTPSSIYAAGMDV

SEQ ID NO: 2721 - protein, 18 aa, Artificial Sequence
  source: /note="Description of Artificial Sequence: Synthetic peptide"
AKVGGMYDGGVYYYGMDV

SEQ ID NO: 2722 - protein, 13 aa, Artificial Sequence
  source: /note="Description of Artificial Sequence: Synthetic peptide"
ARAEHRGPRYFDL

SEQ ID NO: 2723 - protein, 11 aa, Artificial Sequence
  source: /note="Description of Artificial Sequence: Synthetic peptide"
ARDAYEGRVDV

SEQ ID NO: 2724 - protein, 16 aa, Artificial Sequence
  source: /note="Description of Artificial Sequence: Synthetic peptide"
ARDKHGRRGYYYYMDV

SEQ ID NO: 2725 - protein, 14 aa, Artificial Sequence
  source: /note="Description of Artificial Sequence: Synthetic peptide"
ARDLPKYKWGWFDP

SEQ ID NO: 2726 - protein, 22 aa, Artificial Sequence
  source: /note="Description of Artificial Sequence: Synthetic peptide"
ARDPFGIALAGPASRYYYGMDV

SEQ ID NO: 2727 - protein, 22 aa, Artificial Sequence
  source: /note="Description of Artificial Sequence: Synthetic peptide"
ARDPGGAAAAGPASRYYYGMDV

SEQ ID NO: 2728 - protein, 19 aa, Artificial Sequence
  source: /note="Description of Artificial Sequence: Synthetic peptide"
ARDPGGYGPTLYYYYGMDV

SEQ ID NO: 2729 - protein, 18 aa, Artificial Sequence
  source: /note="Description of Artificial Sequence: Synthetic peptide"
ARDPSGGTTLHYYYGMDV

SEQ ID NO: 2730 - protein, 22 aa, Artificial Sequence
  source: /note="Description of Artificial Sequence: Synthetic peptide"
ARDPSGIAAAFPAGRYYYGMDV

SEQ ID NO: 2731 - protein, 22 aa, Artificial Sequence
  source: /note="Description of Artificial Sequence: Synthetic peptide"
ARDPSGIAAAFPASRSYYGMDV

SEQ ID NO: 2732 - protein, 22 aa, Artificial Sequence
  source: /note="Description of Artificial Sequence: Synthetic peptide"
ARDPSGIAAAGPAARHYYGMDV

SEQ ID NO: 2733 - protein, 22 aa, Artificial Sequence
  source: /note="Description of Artificial Sequence: Synthetic peptide"
ARDPSGIAAAGPAGRYYYGLDV

SEQ ID NO: 2734 - protein, 22 aa, Artificial Sequence
  source: /note="Description of Artificial Sequence: Synthetic peptide"
ARDPSGIAAAGPAGRYYYGMDV

SEQ ID NO: 2735 - protein, 22 aa, Artificial Sequence
  source: /note="Description of Artificial Sequence: Synthetic peptide"
ARDPSGIAAAGPASRHYYGMDV

SEQ ID NO: 2736 - protein, 22 aa, Artificial Sequence
  source: /note="Description of Artificial Sequence: Synthetic peptide"
ARDPSGIAAAGPASRYYYGMDV

SEQ ID NO: 2737 - protein, 22 aa, Artificial Sequence
  source: /note="Description of Artificial Sequence: Synthetic peptide"
ARDPSGIAAAYPASRYNYGMDV

SEQ ID NO: 2738 - protein, 22 aa, Artificial Sequence
  source: /note="Description of Artificial Sequence: Synthetic peptide"
ARDPSGIAAAYPASRYYRGMDV

SEQ ID NO: 2739 - protein, 22 aa, Artificial Sequence
  source: /note="Description of Artificial Sequence: Synthetic peptide"
ARDPSGIAAPGPASRGYYGMDV

SEQ ID NO: 2740 - protein, 22 aa, Artificial Sequence
  source: /note="Description of Artificial Sequence: Synthetic peptide"
ARDPSGIALAFPASRYYYGMDV

SEQ ID NO: 2741 - protein, 22 aa, Artificial Sequence
  source: /note="Description of Artificial Sequence: Synthetic peptide"
ARDPSGIALAGPAGRYYYGMDV

SEQ ID NO: 2742 - protein, 22 aa, Artificial Sequence
  source: /note="Description of Artificial Sequence: Synthetic peptide"
ARDPSGIALAGPASRGYQGMDV

SEQ ID NO: 2743 - protein, 22 aa, Artificial Sequence
  source: /note="Description of Artificial Sequence: Synthetic peptide"
ARDPSGIALAGPASRGYYGMDV

SEQ ID NO: 2744 - protein, 22 aa, Artificial Sequence
  source: /note="Description of Artificial Sequence: Synthetic peptide"
ARDPSGIALAGPASRPYYGMDV

SEQ ID NO: 2745 - protein, 22 aa, Artificial Sequence
  source: /note="Description of Artificial Sequence: Synthetic peptide"
ARDPSGIALAGPASRSYYGMDV

SEQ ID NO: 2746 - protein, 21 aa, Artificial Sequence
  source: /note="Description of Artificial Sequence: Synthetic peptide"
ARDPSGIALAGPASRYYGMDV

SEQ ID NO: 2747 - protein, 22 aa, Artificial Sequence
  source: /note="Description of Artificial Sequence: Synthetic peptide"
ARDPSGIALAGPASRYYLGMDV

SEQ ID NO: 2748 - protein, 22 aa, Artificial Sequence
  source: /note="Description of Artificial Sequence: Synthetic peptide"
ARDPSGIALAGPGSRYYRGMDV

SEQ ID NO: 2749 - protein, 22 aa, Artificial Sequence
  source: /note="Description of Artificial Sequence: Synthetic peptide"
ARDPSGIALLGPASRYYYGMDV

SEQ ID NO: 2750 - protein, 22 aa, Artificial Sequence
  source: /note="Description of Artificial Sequence: Synthetic peptide"
ARDPSGIAVAGPASRYYYGMDV

SEQ ID NO: 2751 - protein, 22 aa, Artificial Sequence
  source: /note="Description of Artificial Sequence: Synthetic peptide"
ARDPSGIGLAGPFSRYYYGMDV

SEQ ID NO: 2752 - protein, 20 aa, Artificial Sequence
  source: /note="Description of Artificial Sequence: Synthetic peptide"
ARDRGGTHFGADHYYYGMDV

SEQ ID NO: 2753 - protein, 19 aa, Artificial Sequence
  source: /note="Description of Artificial Sequence: Synthetic peptide"
ARDRGGYSSLLPYYYYMDV

SEQ ID NO: 2754 - protein, 18 aa, Artificial Sequence
  source: /note="Description of Artificial Sequence: Synthetic peptide"
ARDRGMGPKLYYYYGMDV

SEQ ID NO: 2755 - protein, 16 aa, Artificial Sequence
  source: /note="Description of Artificial Sequence: Synthetic peptide"
ARDRGRTESYYYGMDV

SEQ ID NO: 2756 - protein, 16 aa, Artificial Sequence
  source: /note="Description of Artificial Sequence: Synthetic peptide"
ARDRLGRGYKWNWFDP

SEQ ID NO: 2757 - protein, 16 aa, Artificial Sequence
  source: /note="Description of Artificial Sequence: Synthetic peptide"
ARDVGRTGPHYYGMDV

SEQ ID NO: 2758 - protein, 13 aa, Artificial Sequence
  source: /note="Description of Artificial Sequence: Synthetic peptide"
AREGQLPTGTFDY

SEQ ID NO: 2759 - protein, 17 aa, Artificial Sequence
  source: /note="Description of Artificial Sequence: Synthetic peptide"
AREGRMSGWYYAYGMDV

SEQ ID NO: 2760 - protein, 17 aa, Artificial Sequence
  source: /note="Description of Artificial Sequence: Synthetic peptide"
ARERRYDGYYYYYGMDV

SEQ ID NO: 2761 - protein, 13 aa, Artificial Sequence
  source: /note="Description of Artificial Sequence: Synthetic peptide"
ARERWDLGHGMDV

SEQ ID NO: 2762 - protein, 20 aa, Artificial Sequence
  source: /note="Description of Artificial Sequence: Synthetic peptide"
ARESGDRATLVYYYYYGMDV

SEQ ID NO: 2763 - protein, 19 aa, Artificial Sequence
  source: /note="Description of Artificial Sequence: Synthetic peptide"
ARESRIPGSGYYYYYGMDV

SEQ ID NO: 2764 - protein, 15 aa, Artificial Sequence
  source: /note="Description of Artificial Sequence: Synthetic peptide"
AREVMARARTYGMDV

SEQ ID NO: 2765 - protein, 8 aa, Artificial Sequence
  source: /note="Description of Artificial Sequence: Synthetic peptide"
ARGDGMDV

SEQ ID NO: 2766 - protein, 13 aa, Artificial Sequence
  source: /note="Description of Artificial Sequence: Synthetic peptide"
ARGGLDRWGSFDI

SEQ ID NO: 2767 - protein, 15 aa, Artificial Sequence
  source: /note="Description of Artificial Sequence: Synthetic peptide"
ARGGPQLRVAEYFQH

SEQ ID NO: 2768 - protein, 12 aa, Artificial Sequence
  source: /note="Description of Artificial Sequence: Synthetic peptide"
ARGGTTWLVADV

SEQ ID NO: 2769 - protein, 17 aa, Artificial Sequence
  source: /note="Description of Artificial Sequence: Synthetic peptide"
ARGKRSSGWYEGYGMDV

SEQ ID NO: 2770 - protein, 19 aa, Artificial Sequence
  source: /note="Description of Artificial Sequence: Synthetic peptide"
ARGPLKFYYGSGSYGFFDY

SEQ ID NO: 2771 - protein, 14 aa, Artificial Sequence
  source: /note="Description of Artificial Sequence: Synthetic peptide"
ARGPPELGKMYFQH

SEQ ID NO: 2772 - protein, 18 aa, Artificial Sequence
  source: /note="Description of Artificial Sequence: Synthetic peptide"
ARGRGRYSYGYHKAAFDI

SEQ ID NO: 2773 - protein, 15 aa, Artificial Sequence
  source: /note="Description of Artificial Sequence: Synthetic peptide"
ARGRPELGWDKYFQH

SEQ ID NO: 2774 - protein, 20 aa, Artificial Sequence
  source: /note="Description of Artificial Sequence: Synthetic peptide"
ARGSPRFYYGSGSYLDLFDI

SEQ ID NO: 2775 - protein, 15 aa, Artificial Sequence
  source: /note="Description of Artificial Sequence: Synthetic peptide"
ARGSPTWLRDYYMDV

SEQ ID NO: 2776 - protein, 16 aa, Artificial Sequence
  source: /note="Description of Artificial Sequence: Synthetic peptide"
ARGVGIQQQLVLGFDP

SEQ ID NO: 2777 - protein, 12 aa, Artificial Sequence
  source: /note="Description of Artificial Sequence: Synthetic peptide"
ARGVGRYRVADY

SEQ ID NO: 2778 - protein, 17 aa, Artificial Sequence
  source: /note="Description of Artificial Sequence: Synthetic peptide"
ARGVGSGYSYGYRYFDY

SEQ ID NO: 2779 - protein, 19 aa, Artificial Sequence
  source: /note="Description of Artificial Sequence: Synthetic peptide"
ARGVGSTVTLAYYYYGMDV

SEQ ID NO: 2780 - protein, 16 aa, Artificial Sequence
  source: /note="Description of Artificial Sequence: Synthetic peptide"
ARLHSDYSVLYYGMDV

SEQ ID NO: 2781 - protein, 13 aa, Artificial Sequence
  source: /note="Description of Artificial Sequence: Synthetic peptide"
ARLPGYPLGLFDI

SEQ ID NO: 2782 - protein, 20 aa, Artificial Sequence
  source: /note="Description of Artificial Sequence: Synthetic peptide"
ARQGGHDSPTLYYYYYGMDV

SEQ ID NO: 2783 - protein, 17 aa, Artificial Sequence
  source: /note="Description of Artificial Sequence: Synthetic peptide"
ARQGRKTGYYYYYGMDV

SEQ ID NO: 2784 - protein, 15 aa, Artificial Sequence
  source: /note="Description of Artificial Sequence: Synthetic peptide"
ARQGSIKQGYYGMDV

SEQ ID NO: 2785 - protein, 13 aa, Artificial Sequence
  source: /note="Description of Artificial Sequence: Synthetic peptide"
ARRHRSSTYGMDV

SEQ ID NO: 2786 - protein, 13 aa, Artificial Sequence
  source: /note="Description of Artificial Sequence: Synthetic peptide"
ARSLAMSGAYFDL

SEQ ID NO: 2787 - protein, 21 aa, Artificial Sequence
  source: /note="Description of Artificial Sequence: Synthetic peptide"
ARSPGGATDGLVYYYYYGMDV

SEQ ID NO: 2788 - protein, 13 aa, Artificial Sequence
  source: /note="Description of Artificial Sequence: Synthetic peptide"
ARSPYSGTRDFDL

SEQ ID NO: 2789 - protein, 14 aa, Artificial Sequence
  source: /note="Description of Artificial Sequence: Synthetic peptide"
ARVRGYGGSNYFDY

SEQ ID NO: 2790 - protein, 9 aa, Artificial Sequence
  source: /note="Description of Artificial Sequence: Synthetic peptide"
DQLGSSPRT

SEQ ID NO: 2791 - protein, 10 aa, Artificial Sequence
  source: /note="Description of Artificial Sequence: Synthetic peptide"
EQANSLPPIT

SEQ ID NO: 2792 - protein, 9 aa, Artificial Sequence
  source: /note="Description of Artificial Sequence: Synthetic peptide"
EQYASSPYT

SEQ ID NO: 2793 - protein, 9 aa, Artificial Sequence
  source: /note="Description of Artificial Sequence: Synthetic peptide"
EQYGGSPIT

SEQ ID NO: 2794 - protein, 9 aa, Artificial Sequence
  source: /note="Description of Artificial Sequence: Synthetic peptide"
FTFDDYAMH

SEQ ID NO: 2795 - protein, 9 aa, Artificial Sequence
  source: /note="Description of Artificial Sequence: Synthetic peptide"
FTFGDYAMH

SEQ ID NO: 2796 - protein, 17 aa, Artificial Sequence
  source: /note="Description of Artificial Sequence: Synthetic peptide"
GIIPAFGTAWYAQKFQG

SEQ ID NO: 2797 - protein, 17 aa, Artificial Sequence
  source: /note="Description of Artificial Sequence: Synthetic peptide"
GIIPGFGRANYAQKFQG

SEQ ID NO: 2798 - protein, 17 aa, Artificial Sequence
  source: /note="Description of Artificial Sequence: Synthetic peptide"
GIIPGFGTAQYAQKFQG

SEQ ID NO: 2799 - protein, 17 aa, Artificial Sequence
  source: /note="Description of Artificial Sequence: Synthetic peptide"
GIIPGFGTAWYAQKFQG

SEQ ID NO: 2800 - protein, 17 aa, Artificial Sequence
  source: /note="Description of Artificial Sequence: Synthetic peptide"
GIIPIFGTASYAQKFQG

SEQ ID NO: 2801 - protein, 17 aa, Artificial Sequence
  source: /note="Description of Artificial Sequence: Synthetic peptide"
GIIPIGGWANYAQKFQG

SEQ ID NO: 2802 - protein, 17 aa, Artificial Sequence
  source: /note="Description of Artificial Sequence: Synthetic peptide"
GIIPQFGTANYAQKFQG

SEQ ID NO: 2803 - protein, 17 aa, Artificial Sequence
  source: /note="Description of Artificial Sequence: Synthetic peptide"
GIIPSFGTASYAQKFQG

SEQ ID NO: 2804 - protein, 17 aa, Artificial Sequence
  source: /note="Description of Artificial Sequence: Synthetic peptide"
GIIPTFGTAWYAQKFQG

SEQ ID NO: 2805 - protein, 17 aa, Artificial Sequence
  source: /note="Description of Artificial Sequence: Synthetic peptide"
GILPSGGRTSYAQKFQG

SEQ ID NO: 2806 - protein, 17 aa, Artificial Sequence
  source: /note="Description of Artificial Sequence: Synthetic peptide"
GISWNSGSIGYADSVKG

SEQ ID NO: 2807 - protein, 17 aa, Artificial Sequence
  source: /note="Description of Artificial Sequence: Synthetic peptide"
GIVPRFGTANYAQKFQG

SEQ ID NO: 2808 - protein, 17 aa, Artificial Sequence
  source: /note="Description of Artificial Sequence: Synthetic peptide"
  VARIANT (3)..(3): /replace="Val"
  VARIANT (5)..(5): /replace="Arg" or "Gly" or "Ala" or "Ser" or "Thr" or "Gln"
  VARIANT (6)..(6): /replace="Gly"
  VARIANT (8)..(8): /replace="Arg" or "Trp"
  VARIANT (10)..(10): /replace="Asn" or "Gln" or "Trp"
  SITE (1)..(17): /note="Variant residues given in the sequence have no preference with respect to those in the annotations for variant positions"
GIIPIFGTASYAQKFQG

SEQ ID NO: 2809 - protein, 16 aa, Artificial Sequence
  source: /note="Description of Artificial Sequence: Synthetic peptide"
GIYYRGSTYYNPSLKS

SEQ ID NO: 2810 - protein, 11 aa, Artificial Sequence
  source: /note="Description of Artificial Sequence: Synthetic peptide"
GSIKSSEYYWG

SEQ ID NO: 2811 - protein, 11 aa, Artificial Sequence
  source: /note="Description of Artificial Sequence: Synthetic peptide"
GSISSGTYYWS

SEQ ID NO: 2812 - protein, 11 aa, Artificial Sequence
  source: /note="Description of Artificial Sequence: Synthetic peptide"
GSISSREYYWG

SEQ ID NO: 2813 - protein, 11 aa, Artificial Sequence
  source: /note="Description of Artificial Sequence: Synthetic peptide"
GSISSSDYYWG

SEQ ID NO: 2814 - protein, 11 aa, Artificial Sequence
  source: /note="Description of Artificial Sequence: Synthetic peptide"
GSISSSEYYWG

SEQ ID NO: 2815 - protein, 11 aa, Artificial Sequence
  source: /note="Description of Artificial Sequence: Synthetic peptide"
GSIVSSDYYWG

SEQ ID NO: 2816 - protein, 11 aa, Artificial Sequence
  source: /note="Description of Artificial Sequence: Synthetic peptide"
GSIYSSDYYWG

SEQ ID NO: 2817 - protein, 9 aa, Artificial Sequence
  source: /note="Description of Artificial Sequence: Synthetic peptide"
GTFGSYAIS

SEQ ID NO: 2818 - protein, 9 aa, Artificial Sequence
  source: /note="Description of Artificial Sequence: Synthetic peptide"
GTFRNYAIS

SEQ ID NO: 2819 - protein, 9 aa, Artificial Sequence
  source: /note="Description of Artificial Sequence: Synthetic peptide"
GTFRSYAIS

SEQ ID NO: 2820 - protein, 17 aa, Artificial Sequence
  source: /note="Description of Artificial Sequence: Synthetic peptide"
IIGPSGGYTSYAQKFQG

SEQ ID NO: 2821 - protein, 17 aa, Artificial Sequence
  source: /note="Description of Artificial Sequence: Synthetic peptide"
IINPIGGSASYAQKFQG

SEQ ID NO: 2822 - protein, 17 aa, Artificial Sequence
  source: /note="Description of Artificial Sequence: Synthetic peptide"
IINPIGGSISYAQKFQG

SEQ ID NO: 2823 - protein, 17 aa, Artificial Sequence
  source: /note="Description of Artificial Sequence: Synthetic peptide"
IINPIGGSTSYAQKFQG

SEQ ID NO: 2824 - protein, 17 aa, Artificial Sequence
  source: /note="Description of Artificial Sequence: Synthetic peptide"
IINPIGGSTSYAQKFRG

SEQ ID NO: 2825 - protein, 17 aa, Artificial Sequence
  source: /note="Description of Artificial Sequence: Synthetic peptide"
IINPIGGSTSYARKFQG

SEQ ID NO: 2826 - protein, 17 aa, Artificial Sequence
  source: /note="Description of Artificial Sequence: Synthetic peptide"
IINPLGGSTSYAQKFQG

SEQ ID NO: 2827 - protein, 17 aa, Artificial Sequence
  source: /note="Description of Artificial Sequence: Synthetic peptide"
IINPVGGSASYARKFQG

SEQ ID NO: 2828 - protein, 17 aa, Artificial Sequence
  source: /note="Description of Artificial Sequence: Synthetic peptide"
IINPVGGSTSYAQKFQG

SEQ ID NO: 2829 - protein, 17 aa, Artificial Sequence
  source: /note="Description of Artificial Sequence: Synthetic peptide"
IINPVGGSTSYAQKFRG

SEQ ID NO: 2830 - protein, 17 aa, Artificial Sequence
  source: /note="Description of Artificial Sequence: Synthetic peptide"
IINPWGGTTSYAQKFQG

SEQ ID NO: 2831 - protein, 17 aa, Artificial Sequence
  source: /note="Description of Artificial Sequence: Synthetic peptide"
IINPYGGSTSYAQKFQG

SEQ ID NO: 2832 - protein, 17 aa, Artificial Sequence
  source: /note="Description of Artificial Sequence: Synthetic peptide"
IINPYGGTTSYAQKFQG

SEQ ID NO: 2833 - protein, 17 aa, Artificial Sequence
  source: /note="Description of Artificial Sequence: Synthetic peptide"
IIYPGDSDTTYSPSFQG

SEQ ID NO: 2834 - protein, 17 aa, Artificial Sequence
  source: /note="Description of Artificial Sequence: Synthetic peptide"
IVNPIGGSTSYAQRFQG

SEQ ID NO: 2835 - protein, 7 aa, Artificial Sequence
  source: /note="Description of Artificial Sequence: Synthetic peptide"
KASSLES

SEQ ID NO: 2836 - protein, 7 aa, Artificial Sequence
  source: /note="Description of Artificial Sequence: Synthetic peptide"
LGSHRAS

SEQ ID NO: 2837 - protein, 7 aa, Artificial Sequence
  source: /note="Description of Artificial Sequence: Synthetic peptide"
LGSNRVS

SEQ ID NO: 2838 - protein, 7 aa, Artificial Sequence
  source: /note="Description of Artificial Sequence: Synthetic peptide"
  VARIANT (6)..(6): /replace="Val"
  SITE (1)..(7): /note="Variant residues given in the sequence have no preference with respect to those in the annotations for variant positions"
LGSNRAS

SEQ ID NO: 2839 - protein, 16 aa, Artificial Sequence
  source: /note="Description of Artificial Sequence: Synthetic peptide"
LIYYRGSTYYNPSLKS

SEQ ID NO: 2840 - protein, 9 aa, Artificial Sequence
  source: /note="Description of Artificial Sequence: Synthetic peptide"
MQAIDTPPT

SEQ ID NO: 2841 - protein, 9 aa, Artificial Sequence
  source: /note="Description of Artificial Sequence: Synthetic peptide"
MQAIQGPIT

SEQ ID NO: 2842 - protein, 9 aa, Artificial Sequence
  source: /note="Description of Artificial Sequence: Synthetic peptide"
MQALDVPLT

SEQ ID NO: 2843 - protein, 9 aa, Artificial Sequence
  source: /note="Description of Artificial Sequence: Synthetic peptide"
MQALERPPT

SEQ ID NO: 2844 - protein, 9 aa, Artificial Sequence
  source: /note="Description of Artificial Sequence: Synthetic peptide"
MQALGPPIT

SEQ ID NO: 2845 - protein, 9 aa, Artificial Sequence
  source: /note="Description of Artificial Sequence: Synthetic peptide"
MQARDGPIT

SEQ ID NO: 2846 - protein, 9 aa, Artificial Sequence
  source: /note="Description of Artificial Sequence: Synthetic peptide"
MQGIETPPT

SEQ ID NO: 2847 - protein, 9 aa, Artificial Sequence
  source: /note="Description of Artificial Sequence: Synthetic peptide"
MQQQETPLT

SEQ ID NO: 2848 - protein, 10 aa, Artificial Sequence
  source: /note="Description of Artificial Sequence: Synthetic peptide"
MQRIQGPPRT

SEQ ID NO: 2849 - protein, 9 aa, Artificial Sequence
  source: /note="Description of Artificial Sequence: Synthetic peptide"
MQRLEAPLT

SEQ ID NO: 2850 - protein, 10 aa, Artificial Sequence
  source: /note="Description of Artificial Sequence: Synthetic peptide"
MQRLQSPLRT

SEQ ID NO: 2851 - protein, 9 aa, Artificial Sequence
  source: /note="Description of Artificial Sequence: Synthetic peptide"
MQVSTEPPT

SEQ ID NO: 2852 - protein, 9 aa, Artificial Sequence
  source: /note="Description of Artificial Sequence: Synthetic peptide"
QEYLNYPIT

SEQ ID NO: 2853 - protein, 16 aa, Artificial Sequence
  source: /note="Description of Artificial Sequence: Synthetic peptide"
QIYYKGSTYYNPSLKS

SEQ ID NO: 2854 - protein, 9 aa, Artificial Sequence
  source: /note="Description of Artificial Sequence: Synthetic peptide"
QQAADWPIT

SEQ ID NO: 2855 - protein, 9 aa, Artificial Sequence
  source: /note="Description of Artificial Sequence: Synthetic peptide"
QQAASSPIT

SEQ ID NO: 2856 - protein, 8 aa, Artificial Sequence
  source: /note="Description of Artificial Sequence: Synthetic peptide"
QQADGHIT

SEQ ID NO: 2857 - protein, 9 aa, Artificial Sequence
  source: /note="Description of Artificial Sequence: Synthetic peptide"
QQAGDYPPT

SEQ ID NO: 2858 - protein, 9 aa, Artificial Sequence
  source: /note="Description of Artificial Sequence: Synthetic peptide"
QQAKVWPYT

SEQ ID NO: 2859 - protein, 9 aa, Artificial Sequence
  source: /note="Description of Artificial Sequence: Synthetic peptide"
QQALRSPLT

SEQ ID NO: 2860 - protein, 8 aa, Artificial Sequence
  source: /note="Description of Artificial Sequence: Synthetic peptide"
QQANALPT

SEQ ID NO: 2861 - protein, 10 aa, Artificial Sequence
  source: /note="Description of Artificial Sequence: Synthetic peptide"
QQAPSVPPIT

SEQ ID NO: 2862 - protein, 9 aa, Artificial Sequence
  source: /note="Description of Artificial Sequence: Synthetic peptide"
QQARLGPWT

SEQ ID NO: 2863 - protein, 10 aa, Artificial Sequence
  source: /note="Description of Artificial Sequence: Synthetic peptide"
QQASVYPPIT

SEQ ID NO: 2864 - protein, 9 aa, Artificial Sequence
  source: /note="Description of Artificial Sequence: Synthetic peptide"
QQDRKGPLT

SEQ ID NO: 2865 - protein, 10 aa, Artificial Sequence
  source: /note="Description of Artificial Sequence: Synthetic peptide"
QQETNMPPIT

SEQ ID NO: 2866 - protein, 9 aa, Artificial Sequence
  source: /note="Description of Artificial Sequence: Synthetic peptide"
QQFRVLPPT

SEQ ID NO: 2867 - protein, 10 aa, Artificial Sequence
  source: /note="Description of Artificial Sequence: Synthetic peptide"
QQGANAPPRT

SEQ ID NO: 2868 - protein, 10 aa, Artificial Sequence
  source: /note="Description of Artificial Sequence: Synthetic peptide"
QQGNSLPPIT

SEQ ID NO: 2869 - protein, 9 aa, Artificial Sequence
  source: /note="Description of Artificial Sequence: Synthetic peptide"
QQGNSYPIT

SEQ ID NO: 2870 - protein, 10 aa, Artificial Sequence
  source: /note="Description of Artificial Sequence: Synthetic peptide"
QQHGRLPPWT

SEQ ID NO: 2871 - protein, 9 aa, Artificial Sequence
  source: /note="Description of Artificial Sequence: Synthetic peptide"
QQHYVGPFT

SEQ ID NO: 2872 - protein, 9 aa, Artificial Sequence
  source: /note="Description of Artificial Sequence: Synthetic peptide"
QQKASLPFT

SEQ ID NO: 2873 - protein, 9 aa, Artificial Sequence
  source: /note="Description of Artificial Sequence: Synthetic peptide"
QQLDSSPIT

SEQ ID NO: 2874 - protein, 9 aa, Artificial Sequence
  source: /note="Description of Artificial Sequence: Synthetic peptide"
QQLDSTPIT

SEQ ID NO: 2875 - protein, 9 aa, Artificial Sequence
  source: /note="Description of Artificial Sequence: Synthetic peptide"
QQLGIAPIT

SEQ ID NO: 2876 - protein, 9 aa, Artificial Sequence
  source: /note="Description of Artificial Sequence: Synthetic peptide"
QQLGSHPPT

SEQ ID NO: 2877 - protein, 9 aa, Artificial Sequence
  source: /note="Description of Artificial Sequence: Synthetic peptide"
QQRSALPFT

SEQ ID NO: 2878 - protein, 9 aa, Artificial Sequence
  source: /note="Description of Artificial Sequence: Synthetic peptide"
QQRSNYPIT

SEQ ID NO: 2879 - protein, 9 aa, Artificial Sequence
  source: /note="Description of Artificial Sequence: Synthetic peptide"
QQSDVSPIT

SEQ ID NO: 2880 - protein, 10 aa, Artificial Sequence
  source: /note="Description of Artificial Sequence: Synthetic peptide"
QQSGSVPPIT

SEQ ID NO: 2881 - protein, 9 aa, Artificial Sequence
  source: /note="Description of Artificial Sequence: Synthetic peptide"
QQSHVSPWT

SEQ ID NO: 2882 - protein, 6 aa, Artificial Sequence
  source: /note="Description of Artificial Sequence: Synthetic peptide"
QQSPWT

SEQ ID NO: 2883 - protein, 9 aa, Artificial Sequence
  source: /note="Description of Artificial Sequence: Synthetic peptide"
QQSYREPIT

SEQ ID NO: 2884 - protein, 9 aa, Artificial Sequence
  source: /note="Description of Artificial Sequence: Synthetic peptide"
QQTDGKPPT

SEQ ID NO: 2885 - protein, 9 aa, Artificial Sequence
  source: /note="Description of Artificial Sequence: Synthetic peptide"
QQVANYPRT

SEQ ID NO: 2886 - protein, 9 aa, Artificial Sequence
  source: /note="Description of Artificial Sequence: Synthetic peptide"
QQVAVSPIT

SEQ ID NO: 2887 - protein, 10 aa, Artificial Sequence
  source: /note="Description of Artificial Sequence: Synthetic peptide"
QQYADWPPIT

SEQ ID NO: 2888 - protein, 9 aa, Artificial Sequence
  source: /note="Description of Artificial Sequence: Synthetic peptide"
QQYANAPIT

SEQ ID NO: 2889 - protein, 9 aa, Artificial Sequence
  source: /note="Description of Artificial Sequence: Synthetic peptide"
QQYDGFPIT

SEQ ID NO: 2890 - protein, 9 aa, Artificial Sequence
  source: /note="Description of Artificial Sequence: Synthetic peptide"
QQYDSAPIT

SEQ ID NO: 2891 - protein, 9 aa, Artificial Sequence
  source: /note="Description of Artificial Sequence: Synthetic peptide"
QQYGSPPLT

SEQ ID NO: 2892 - protein, 9 aa, Artificial Sequence
  source: /note="Description of Artificial Sequence: Synthetic peptide"
QQYKSYPIT

SEQ ID NO: 2893 - protein, 9 aa, Artificial Sequence
  source: /note="Description of Artificial Sequence: Synthetic peptide"
QQYNAFPPT

SEQ ID NO: 2894 - protein, 9 aa, Artificial Sequence
  source: /note="Description of Artificial Sequence: Synthetic peptide"
QQYNALPRT

SEQ ID NO: 2895 - protein, 9 aa, Artificial Sequence
  source: /note="Description of Artificial Sequence: Synthetic peptide"
QQYNIYPLT

SEQ ID NO: 2896 - protein, 9 aa, Artificial Sequence
  source: /note="Description of Artificial Sequence: Synthetic peptide"
QQYNNHPPT

SEQ ID NO: 2897 - protein, 9 aa, Artificial Sequence
  source: /note="Description of Artificial Sequence: Synthetic peptide"
QQYNSWPIT

SEQ ID NO: 2898 - protein, 11 aa, Artificial Sequence
  source: /note="Description of Artificial Sequence: Synthetic peptide"
RASQDISSWLA

SEQ ID NO: 2899 - protein, 11 aa, Artificial Sequence
  source: /note="Description of Artificial Sequence: Synthetic peptide"
RASQGISRWLA

SEQ ID NO: 2900 - protein, 11 aa, Artificial Sequence
  source: /note="Description of Artificial Sequence: Synthetic peptide"
RASQSINSYLN

SEQ ID NO: 2901 - protein, 11 aa, Artificial Sequence
  source: /note="Description of Artificial Sequence: Synthetic peptide"
RASQSISSFLN

SEQ ID NO: 2902 - protein, 12 aa, Artificial Sequence
  source: /note="Description of Artificial Sequence: Synthetic peptide"
RASQSVRSSYLA

SEQ ID NO: 2903 - protein, 11 aa, Artificial Sequence
  source: /note="Description of Artificial Sequence: Synthetic peptide"
RASQSVSSSLA

SEQ ID NO: 2904 - protein, 11 aa, Artificial Sequence
  source: /note="Description of Artificial Sequence: Synthetic peptide"
  VARIANT (6)..(6): /replace="Ile"
  VARIANT (7)..(7): /replace="Gly"
  SITE (1)..(11): /note="Variant residues given in the sequence have no preference with respect to those in the annotations for variant positions"
RASQSVSSNLA

SEQ ID NO: 2905 - protein, 16 aa, Artificial Sequence
  source: /note="Description of Artificial Sequence: Synthetic peptide"
RSSQGLLRSNGYNYLD

SEQ ID NO: 2906 - protein, 16 aa, Artificial Sequence
  source: /note="Description of Artificial Sequence: Synthetic peptide"
RSSQSLLRSNGYNYLD

SEQ ID NO: 2907 - protein, 16 aa, Artificial Sequence
  source: /note="Description of Artificial Sequence: Synthetic peptide"
  VARIANT (5)..(5): /replace="Gly"
  VARIANT (8)..(8): /replace="Arg"
  SITE (1)..(16): /note="Variant residues given in the sequence have no preference with respect to those in the annotations for variant positions"
RSSQSLLHSNGYNYLD

SEQ ID NO: 2908 - protein, 7 aa, Artificial Sequence
  source: /note="Description of Artificial Sequence: Synthetic peptide"
SASSLQS

SEQ ID NO: 2909 - protein, 17 aa, Artificial Sequence
  source: /note="Description of Artificial Sequence: Synthetic peptide"
SINPNSGGTNYAQKFQG

SEQ ID NO: 2910 - protein, 17 aa, Artificial Sequence
  source: /note="Description of Artificial Sequence: Synthetic peptide"
SISAYNGNTNYAQKLQG

SEQ ID NO: 2911 - protein, 17 aa, Artificial Sequence
  source: /note="Description of Artificial Sequence: Synthetic peptide"
SISGSGGSTYYADSVKG

SEQ ID NO: 2912 - protein, 17 aa, Artificial Sequence
  source: /note="Description of Artificial Sequence: Synthetic peptide"
SISSSSNYIYYADSVKG

SEQ ID NO: 2913 - protein, 16 aa, Artificial Sequence
  source: /note="Description of Artificial Sequence: Synthetic peptide"
SIYHSGSTYYNPSLKS

SEQ ID NO: 2914 - protein, 16 aa, Artificial Sequence
  source: /note="Description of Artificial Sequence: Synthetic peptide"
SIYRAGSTYYNPSLKS

SEQ ID NO: 2915 - protein, 16 aa, Artificial Sequence
  source: /note="Description of Artificial Sequence: Synthetic peptide"
SIYRSGSTYYNPSLKS

SEQ ID NO: 2916 - protein, 16 aa, Artificial Sequence
  source: /note="Description of Artificial Sequence: Synthetic peptide"
SIYWRGSTYYNPSLKS

SEQ ID NO: 2917 - protein, 16 aa, Artificial Sequence
  source: /note="Description of Artificial Sequence: Synthetic peptide"
SIYYRGSTVYNPSLKS

SEQ ID NO: 2918 - protein, 22 aa, Artificial Sequence
  source: /note="Description of Artificial Sequence: Synthetic peptide"
TRDPSGIAAAGPASRYYYGMDV

SEQ ID NO: 2919 - protein, 17 aa, Artificial Sequence
  source: /note="Description of Artificial Sequence: Synthetic peptide"
VINPFGGSTSYAQKFQG

SEQ ID NO: 2920 - protein, 17 aa, Artificial Sequence
  source: /note="Description of Artificial Sequence: Synthetic peptide"
VINPVGGSTSYAQKFQG

SEQ ID NO: 2921 - protein, 22 aa, Artificial Sequence
  source: /note="Description of Artificial Sequence: Synthetic peptide"
VRDPSGIAAAGPASRYYYGMDV

SEQ ID NO: 2922 - protein, 17 aa, Artificial Sequence
  source: /note="Description of Artificial Sequence: Synthetic peptide"
WINPMSGGTRYAQKFQG

SEQ ID NO: 2923 - protein, 17 aa, Artificial Sequence
  source: /note="Description of Artificial Sequence: Synthetic peptide"
WINPNSGATRYAQKFQG

SEQ ID NO: 2924 - protein, 17 aa, Artificial Sequence
  source: /note="Description of Artificial Sequence: Synthetic peptide"
WINPNSGFTRYAQKFQG

SEQ ID NO: 2925 - protein, 17 aa, Artificial Sequence
  source: /note="Description of Artificial Sequence: Synthetic peptide"
WINPNSGGTRYAQKFQG

SEQ ID NO: 2926 - protein, 17 aa, Artificial Sequence
  source: /note="Description of Artificial Sequence: Synthetic peptide"
WINPSGGNTRYAQKFQG

SEQ ID NO: 2927 - protein, 17 aa, Artificial Sequence
  source: /note="Description of Artificial Sequence: Synthetic peptide"
WINPSGGSTSYAQKFQG

SEQ ID NO: 2928 - protein, 17 aa, Artificial Sequence
  source: /note="Description of Artificial Sequence: Synthetic peptide"
WINPSQGSTSYAQKFQG

SEQ ID NO: 2929 - protein, 17 aa, Artificial Sequence
  source: /note="Description of Artificial Sequence: Synthetic peptide"
WINPSWGSTSYAQKFQG

SEQ ID NO: 2930 - protein, 17 aa, Artificial Sequence
  source: /note="Description of Artificial Sequence: Synthetic peptide"
WINPVSGSTNYAQKFQG

SEQ ID NO: 2931 - protein, 17 aa, Artificial Sequence
  source: /note="Description of Artificial Sequence: Synthetic peptide"
WISAYNGNTNYAQKLQG

SEQ ID NO: 2932 - protein, 17 aa, Artificial Sequence
  source: /note="Description of Artificial Sequence: Synthetic peptide"
WTNPNSGGTRYAQKFQG

SEQ ID NO: 2933 - protein, 17 aa, Artificial Sequence
  source: /note="Description of Artificial Sequence: Synthetic peptide"
WVNPNSGGTMYAQKFQG

SEQ ID NO: 2934 - protein, 17 aa, Artificial Sequence
  source: /note="Description of Artificial Sequence: Synthetic peptide"
WVNPNSGGTNYAQKFQG

SEQ ID NO: 2935 - protein, 17 aa, Artificial Sequence
  source: /note="Description of Artificial Sequence: Synthetic peptide"
WVNPNSGGTRYAQKFQG

SEQ ID NO: 2936 - protein, 17 aa, Artificial Sequence
  source: /note="Description of Artificial Sequence: Synthetic peptide"
  VARIANT (1)..(1): /replace="Val"
  VARIANT (5)..(5): /replace="Trp" or "Tyr" or "Val" or "Phe" or "Leu" or "Ile"
  VARIANT (8)..(8): /replace="Thr"
  VARIANT (9)..(9): /replace="Ala"
  VARIANT (13)..(13): /replace="Arg"
  VARIANT (14)..(14): /replace="Arg"
  VARIANT (16)..(16): /replace="Arg"
  SITE (1)..(17): /note="Variant residues given in the sequence have no preference with respect to those in the annotations for variant positions"
IINPSGGSTSYAQKFQG

SEQ ID NO: 2937 - protein, 16 aa, Artificial Sequence
  source: /note="Description of Artificial Sequence: Synthetic peptide"
  VARIANT (1)..(1): /replace="Ser" or "Ala"
  VARIANT (4)..(4): /replace="Pro"
  SITE (1)..(16): /note="Variant residues given in the sequence have no preference with respect to those in the annotations for variant positions"
TIYHSGSTYYNPSLKS

SEQ ID NO: 2938 - protein, 16 aa, Artificial Sequence
  source: /note="Description of Artificial Sequence: Synthetic peptide"
  VARIANT (1)..(1): /replace="Gly" or "Gln" or "Leu"
  VARIANT (4)..(4): /replace="Trp" or "Arg"
  VARIANT (5)..(5): /replace="Arg" or "Lys" or "Ala"
  VARIANT (9)..(9): /replace="Val"
  SITE (1)..(16): /note="Variant residues given in the sequence have no preference with respect to those in the annotations for variant positions"
SIYYSGSTYYNPSLKS

SEQ ID NO: 2939 - protein, 22 aa, Artificial Sequence
  source: /note="Description of Artificial Sequence: Synthetic peptide"
  VARIANT (1)..(1): /replace="Val" or "Thr"
  VARIANT (5)..(5): /replace="Phe" or "Gly"
  VARIANT (7)..(7): /replace="Ala"
  VARIANT (8)..(8): /replace="Gly"
  VARIANT (9)..(9): /replace="Leu" or "Val"
  VARIANT (10)..(10): /replace="Leu" or "Pro"
  VARIANT (11)..(11): /replace="Phe" or "Tyr"
  VARIANT (13)..(13): /replace="Gly" or "Phe"
  VARIANT (14)..(14): /replace="Gly" or "Ala"
  VARIANT (16)..(16): /replace="Gly" or "Pro" or "His" or "Ser"
  VARIANT (17)..(17): /replace="Asn"
  VARIANT (18)..(18): /replace="Leu" or "Gln" or "Arg"
  VARIANT (20)..(20): /replace="Leu"
  SITE (1)..(22): /note="Variant residues given in the sequence have no preference with respect to those in the annotations for variant positions"
ARDPSGIAAAGPASRYYYGMDV

SEQ ID NO: 2940 - protein, 11 aa, Artificial Sequence
  source: /note="Description of Artificial Sequence: Synthetic peptide"
  VARIANT (1)..(1): /replace="Tyr"
  VARIANT (4)..(4): /replace="Val" or "Tyr" or "Lys" or "Pro"
  VARIANT (6)..(6): /replace="Arg"
  VARIANT (7)..(7): /replace="Glu"
  SITE (1)..(11): /note="Variant residues given in the sequence have no preference with respect to those in the annotations for variant positions"
GSISSSDYYWG

SEQ ID NO: 2941 - protein, 9 aa, Artificial Sequence
  source: /note="Description of Artificial Sequence: Synthetic peptide"
  VARIANT (1)..(1): /replace="Tyr"
  VARIANT (4)..(4): /replace="Arg" or "Gly" or "Thr"
  VARIANT (5)..(5): /replace="Gly" or "Asn"
  VARIANT (8)..(8): /replace="Met"
  VARIANT (9)..(9): /replace="Ala"
  SITE (1)..(9): /note="Variant residues given in the sequence have no preference with respect to those in the annotations for variant positions"
GTFSSYAIS

SEQ ID NO: 2942 - protein, 17 aa, Artificial Sequence
  source: /note="Description of Artificial Sequence: Synthetic peptide"
  VARIANT (1)..(1): /replace="Ile" or "Gly"
  VARIANT (2)..(2): /replace="Val" or "Thr"
  VARIANT (3)..(3): /replace="Gly" or "Leu"
  VARIANT (5)..(5): /replace="Ser" or "Val" or "Met"
  VARIANT (6)..(6): /replace="Gly" or "Trp" or "Gln"
  VARIANT (8)..(8): /replace="Phe" or "Ala" or "Tyr" or "Ser" or "Asn" or "Arg"
  VARIANT (10)..(10): /replace="Arg" or "Ser" or "Met"
  SITE (1)..(17): /note="Variant residues given in the sequence have no preference with respect to those in the annotations for variant positions"
WINPNSGGTNYAQKFQG

SEQ ID NO: 2943 - protein, 16 aa, Artificial Sequence
  source: /note="Description of Artificial Sequence: Synthetic peptide"
YIYYSGSTVYNPSLKS

SEQ ID NO: 2944 - protein, 16 aa, Artificial Sequence
  source: /note="Description of Artificial Sequence: Synthetic peptide"
YIYYSGSTYYNPSLKS

SEQ ID NO: 2945 - protein, 9 aa, Artificial Sequence
  source: /note="Description of Artificial Sequence: Synthetic peptide"
YSFTSYWIG

SEQ ID NO: 2946 - protein, 10 aa, Artificial Sequence
  source: /note="Description of Artificial Sequence: Synthetic peptide"
YSIPSDYYWG

SEQ ID NO: 2947 - protein, 10 aa, Artificial Sequence
  source: /note="Description of Artificial Sequence: Synthetic peptide"
YSISSVRYWG

SEQ ID NO: 2948 - protein, 10 aa, Artificial Sequence
  source: /note="Description of Artificial Sequence: Synthetic peptide"
  VARIANT (6)..(6): /replace="Val"
  VARIANT (7)..(7): /replace="Arg"
  SITE (1)..(10): /note="Variant residues given in the sequence have no preference with respect to those in the annotations for variant positions"
YSISSGYYWG

SEQ ID NO: 2949 - protein, 9 aa, Artificial Sequence
  source: /note="Description of Artificial Sequence: Synthetic peptide"
YTFASRYMS

SEQ ID NO: 2950 - protein, 9 aa, Artificial Sequence
  source: /note="Description of Artificial Sequence: Synthetic peptide"
YTFASYYMW

SEQ ID NO: 2951 - protein, 9 aa, Artificial Sequence
  source: /note="Description of Artificial Sequence: Synthetic peptide"
YTFFSYYMH

SEQ ID NO: 2952 - protein, 9 aa, Artificial Sequence
  source: /note="Description of Artificial Sequence: Synthetic peptide"
YTFGAYYMH

SEQ ID NO: 2953 - protein, 9 aa, Artificial Sequence
  source: /note="Description of Artificial Sequence: Synthetic peptide"
YTFGGYLMH

SEQ ID NO: 2954 - protein, 9 aa, Artificial Sequence
  source: /note="Description of Artificial Sequence: Synthetic peptide"
YTFLAYYMH

SEQ ID NO: 2955 - protein, 9 aa, Artificial Sequence
  source: /note="Description of Artificial Sequence: Synthetic peptide"
YTFPGYLMH

SEQ ID NO: 2956 - protein, 9 aa, Artificial Sequence
  source: /note="Description of Artificial Sequence: Synthetic peptide"
YTFRAYYMH

SEQ ID NO: 2957 - protein, 9 aa, Artificial Sequence
  source: /note="Description of Artificial Sequence: Synthetic peptide"
YTFTAYLMH

SEQ ID NO: 2958 - protein, 9 aa, Artificial Sequence
  source: /note="Description of Artificial Sequence: Synthetic peptide"
YTFTAYYMH

SEQ ID NO: 2959 - protein, 9 aa, Artificial Sequence
  source: /note="Description of Artificial Sequence: Synthetic peptide"
YTFTGYAMA

SEQ ID NO: 2960 - protein, 9 aa, Artificial Sequence
  source: /note="Description of Artificial Sequence: Synthetic peptide"
YTFTKYYMS

SEQ ID NO: 2961 - protein, 9 aa, Artificial Sequence
  source: /note="Description of Artificial Sequence: Synthetic peptide"
YTFTSGYMS

SEQ ID NO: 2962 - protein, 9 aa, Artificial Sequence
  source: /note="Description of Artificial Sequence: Synthetic peptide"
YTFTSHYMS

SEQ ID NO: 2963 - protein, 9 aa, Artificial Sequence
  source: /note="Description of Artificial Sequence: Synthetic peptide"
YTFTSLYIS

SEQ ID NO: 2964 - protein, 9 aa, Artificial Sequence
  source: /note="Description of Artificial Sequence: Synthetic peptide"
YTFTSLYMS

SEQ ID NO: 2965 - protein, 9 aa, Artificial Sequence
  source: /note="Description of Artificial Sequence: Synthetic peptide"
YTFTSQYMS

SEQ ID NO: 2966 - protein, 9 aa, Artificial Sequence
  source: /note="Description of Artificial Sequence: Synthetic peptide"
YTFTSRYMS

SEQ ID NO: 2967 - protein, 9 aa, Artificial Sequence
  source: /note="Description of Artificial Sequence: Synthetic peptide"
YTFTSTYMS

SEQ ID NO: 2968 - protein, 9 aa, Artificial Sequence
  source: /note="Description of Artificial Sequence: Synthetic peptide"
YTFTSYGIS

SEQ ID NO: 2969 - protein, 9 aa, Artificial Sequence
  source: /note="Description of Artificial Sequence: Synthetic peptide"
YTFTSYLMS

SEQ ID NO: 2970 - protein, 9 aa, Artificial Sequence
  source: /note="Description of Artificial Sequence: Synthetic peptide"
YTFTSYMMH

SEQ ID NO: 2971 - protein, 9 aa, Artificial Sequence
  source: /note="Description of Artificial Sequence: Synthetic peptide"
YTFTSYTMS

SEQ ID NO: 2972 - protein, 9 aa, Artificial Sequence
  source: /note="Description of Artificial Sequence: Synthetic peptide"
YTFTSYYMS

SEQ ID NO: 2973 - protein, 9 aa, Artificial Sequence
  source: /note="Description of Artificial Sequence: Synthetic peptide"
YTFVAYYMH

SEQ ID NO: 2974 - protein, 9 aa, Artificial Sequence
  source: /note="Description of Artificial Sequence: Synthetic peptide"
  VARIANT (4)..(4): /replace="Gly" or "Val" or "Pro" or "Leu" or "Phe" or "Ala" or "Arg"
  VARIANT (5)..(5): /replace="Ala" or "Ser"
  VARIANT (7)..(7): /replace="Met" or "Leu"
  VARIANT (9)..(9): /replace="Trp"
  SITE (1)..(9): /note="Variant residues given in the sequence have no preference with respect to those in the annotations for variant positions"
YTFTGYYMH

SEQ ID NO: 2975 - protein, 9 aa, Artificial Sequence
  source: /note="Description of Artificial Sequence: Synthetic peptide"
YTLTSRYMS

SEQ ID NO: 2976 - protein, 9 aa, Artificial Sequence
  source: /note="Description of Artificial Sequence: Synthetic peptide"
  VARIANT (3)..(3): /replace="Leu"
  VARIANT (4)..(4): /replace="Ala"
  VARIANT (5)..(5): /replace="Lys"
  VARIANT (6)..(6): /replace="Thr" or "Arg" or "Leu" or "Gly" or "Gln" or "His"
  VARIANT (7)..(7): /replace="Thr" or "Leu"
  VARIANT (8)..(8): /replace="Ile"
  SITE (1)..(9): /note="Variant residues given in the sequence have no preference with respect to those in the annotations for variant positions"
YTFTSYYMS

SEQ ID NO: 2977 - protein, 7 aa, Artificial Sequence
  source: /note="Description of Artificial Sequence: Synthetic peptide"
AASTLQS

SEQ ID NO: 2978 - protein, 17 aa, Artificial Sequence
  source: /note="Description of Artificial Sequence: Synthetic peptide"
AITWNSGHIDYADSVEG

SEQ ID NO: 2979 - protein, 5 aa, Artificial Sequence
  source: /note="Description of Artificial Sequence: Synthetic peptide"
DYAMH

SEQ ID NO: 2980 - protein, 9 aa, Artificial Sequence
  source: /note="Description of Artificial Sequence: Synthetic peptide"
QRYNRAPYT

SEQ ID NO: 2981 - protein, 11 aa, Artificial Sequence
  source: /note="Description of Artificial Sequence: Synthetic peptide"
RASQGIRNYLA

SEQ ID NO: 2982 - protein, 12 aa, Artificial Sequence
  source: /note="Description of Artificial Sequence: Synthetic peptide"
VSYLSTASSLDY

SEQ ID NO: 2983 - protein, 12 aa, Artificial Sequence
  source: /note="Description of Artificial Sequence: Synthetic peptide"
ASFLSTSSSLEY

SEQ ID NO: 2984 - protein, 12 aa, Artificial Sequence
  source: /note="Description of Artificial Sequence: Synthetic peptide"
ASYLSTASSLEY

SEQ ID NO: 2985 - protein, 12 aa, Artificial Sequence
  source: /note="Description of Artificial Sequence: Synthetic peptide"
ASYLSTSFSLDY

SEQ ID NO: 2986 - protein, 12 aa, Artificial Sequence
  source: /note="Description of Artificial Sequence: Synthetic peptide"
ASYLSTSSSLDD

SEQ ID NO: 2987 - protein, 12 aa, Artificial Sequence
  source: /note="Description of Artificial Sequence: Synthetic peptide"
ASYLSTSSSLDK

SEQ ID NO: 2988 - protein, 12 aa, Artificial Sequence
  source: /note="Description of Artificial Sequence: Synthetic peptide"
ASYLSTSSSLDN

SEQ ID NO: 2989 - protein, 12 aa, Artificial Sequence
  source: /note="Description of Artificial Sequence: Synthetic peptide"
ASYLSTSSSLDY

SEQ ID NO: 2990 - protein, 12 aa, Artificial Sequence
  source: /note="Description of Artificial Sequence: Synthetic peptide"
ASYLSTSSSLHY

SEQ ID NO: 2991 - protein, 17 aa, Homo sapiens
  VARIANT (4)..(4): /replace="Val"
  VARIANT (5)..(5): /replace="Ala" or "Gly"
  VARIANT (9)..(9): /replace="Tyr"
  SITE (1)..(17): /note="Variant residues given in the sequence have no preference with respect to those in the annotations for variant positions"
DRGISAGGNYYYYGMDV

SEQ ID NO: 2992 - protein, 9 aa, Artificial Sequence
  source: /note="Description of Artificial Sequence: Synthetic peptide"
QKYISAPYT

SEQ ID NO: 2993 - protein, 9 aa, Artificial Sequence
  source: /note="Description of Artificial Sequence: Synthetic peptide"
QKYNRAPYA

SEQ ID NO: 2994 - protein, 9 aa, Artificial Sequence
  source: /note="Description of Artificial Sequence: Synthetic peptide"
QKYNRAPYN

SEQ ID NO: 2995 - protein, 9 aa, Artificial Sequence
  source: /note="Description of Artificial Sequence: Synthetic peptide"
QKYNRAPYT

SEQ ID NO: 2996 - protein, 9 aa, Artificial Sequence
  source: /note="Description of Artificial Sequence: Synthetic peptide"
QKYNRPPYT

SEQ ID NO: 2997 - protein, 9 aa, Artificial Sequence
  source: /note="Description of Artificial Sequence: Synthetic peptide"
QKYNSAAYS

SEQ ID NO: 2998 - protein, 9 aa, Artificial Sequence
  source: /note="Description of Artificial Sequence: Synthetic peptide"
QKYNSAPYA

SEQ ID NO: 2999 - protein, 9 aa, Artificial Sequence
  source: /note="Description of Artificial Sequence: Synthetic peptide"
QKYNSAPYN

SEQ ID NO: 3000 - protein, 9 aa, Artificial Sequence
  source: /note="Description of Artificial Sequence: Synthetic peptide"
QKYNSAPYT

SEQ ID NO: 3001 - protein, 9 aa, Artificial Sequence
  source: /note="Description of Artificial Sequence: Synthetic peptide"
QKYNSAPYY

SEQ ID NO: 3002 - protein, 9 aa, Artificial Sequence
  source: /note="Description of Artificial Sequence: Synthetic peptide"
QKYNSDPYT

SEQ ID NO: 3003 - protein, 9 aa, Artificial Sequence
  source: /note="Description of Artificial Sequence: Synthetic peptide"
QKYQRAPYT

SEQ ID NO: 3004 - protein, 9 aa, Artificial Sequence
  source: /note="Description of Artificial Sequence: Synthetic peptide"
QKYSSAPYT

SEQ ID NO: 3005 - protein, 9 aa, Artificial Sequence
  source: /note="Description of Artificial Sequence: Synthetic peptide"
QKYTSAPYT

SEQ ID NO: 3006 - protein, 12 aa, Homo sapiens
  MOD_RES (11)..(12): Any amino acid
QQRSNWPPFTXX

SEQ ID NO: 3007 - protein, 9 aa, Artificial Sequence
  source: /note="Description of Artificial Sequence: Synthetic peptide"
QQYNSAPDT

SEQ ID NO: 3008 - protein, 9 aa, Artificial Sequence
  source: /note="Description of Artificial Sequence: Synthetic peptide"
QRYNRAPYA

SEQ ID NO: 3009 - protein, 9 aa, Artificial Sequence
  source: /note="Description of Artificial Sequence: Synthetic peptide"
  VARIANT (9)..(9): /replace="Ala"
  SITE (1)..(9): /note="Variant residues given in the sequence have no preference with respect to those in the annotations for variant positions"
QRYNRAPYT

SEQ ID NO: 3010 - protein, 11 aa, Homo sapiens
  VARIANT (7)..(7): /replace="Tyr"
  SITE (1)..(11): /note="Variant residues given in the sequence have no preference with respect to those in the annotations for variant positions"
RASQSVSSYLA

SEQ ID NO: 3011 - protein, 5 aa, Homo sapiens
SYAMH

SEQ ID NO: 3012 - protein, 12 aa, Artificial Sequence
  source: /note="Description of Artificial Sequence: Synthetic peptide"
VSYLSTASSLDN

SEQ ID NO: 3013 - protein, 12 aa, Artificial Sequence
  source: /note="Description of Artificial Sequence: Synthetic peptide"
  VARIANT (12)..(12): /replace="Asn"
  SITE (1)..(12): /note="Variant residues given in the sequence have no preference with respect to those in the annotations for variant positions"
VSYLSTASSLDY

SEQ ID NO: 3014 - protein, 17 aa, Homo sapiens
  VARIANT (1)..(1): /replace="Phe" or "Val"
  VARIANT (2)..(2): /replace="Met"
  VARIANT (3)..(3): /replace="Leu"
  VARIANT (4)..(4): /replace="Phe"
  VARIANT (10)..(10): /replace="Tyr"
  VARIANT (11)..(11): /replace="Tyr"
  VARIANT (17)..(17): /replace="Gly"
  SITE (1)..(17): /note="Variant residues given in the sequence have no preference with respect to those in the annotations for variant positions"
IISYDGSNKKSADSVKD

SEQ ID NO: 3015 - protein, 7 aa, Artificial Sequence
  source: /note="Description of Artificial Sequence: Synthetic peptide"
AASNVES

SEQ ID NO: 3016 - protein, 7 aa, Artificial Sequence
  source: /note="Description of Artificial Sequence: Synthetic peptide"
AATNLAD

SEQ ID NO: 3017 - protein, 15 aa, Artificial Sequence
  source: /note="Description of Artificial Sequence: Synthetic peptide"
AKDGVYYGLGNWFDP

SEQ ID NO: 3018 - protein, 17 aa, Artificial Sequence
  source: /note="Description of Artificial Sequence: Synthetic peptide"
AKDLGGYYGGAAYGMDV

SEQ ID NO: 3019 - protein, 10 aa, Artificial Sequence
  source: /note="Description of Artificial Sequence: Synthetic peptide"
AKDQYSVLDY

SEQ ID NO: 3020 - protein, 10 aa, Artificial Sequence
  source: /note="Description of Artificial Sequence: Synthetic peptide"
AKEGRTITMD

SEQ ID NO: 3021 - protein, 11 aa, Artificial Sequence
  source: /note="Description of Artificial Sequence: Synthetic peptide"
AKGTPTLLFQH

SEQ ID NO: 3022 - protein, 12 aa, Artificial Sequence
  source: /note="Description of Artificial Sequence: Synthetic peptide"
AKHYHVGIAFDI

SEQ ID NO: 3023 - protein, 13 aa, Artificial Sequence
  source: /note="Description of Artificial Sequence: Synthetic peptide"
AKKYSSRGVYFDY

SEQ ID NO: 3024 - protein, 10 aa, Artificial Sequence
  source: /note="Description of Artificial Sequence: Synthetic peptide"
AKLGGHSMDV

SEQ ID NO: 3025 - protein, 9 aa, Artificial Sequence
  source: /note="Description of Artificial Sequence: Synthetic peptide"
AKPGSMTDY

SEQ ID NO: 3026 - protein, 11 aa, Artificial Sequence
  source: /note="Description of Artificial Sequence: Synthetic peptide"
AKPLKRGRGFY

SEQ ID NO: 3027 - protein, 14 aa, Artificial Sequence
  source: /note="Description of Artificial Sequence: Synthetic peptide"
AKSPAVAGIYRADY

SEQ ID NO: 3028 - protein, 21 aa, Artificial Sequence
  source: /note="Description of Artificial Sequence: Synthetic peptide"
AKVPSYDYWSGYSNYYYYMDV

SEQ ID NO: 3029 - protein, 14 aa, Artificial Sequence
  source: /note="Description of Artificial Sequence: Synthetic peptide"
AKVPSYQRGTAFDP

SEQ ID NO: 3030 - protein, 10 aa, Artificial Sequence
  source: /note="Description of Artificial Sequence: Synthetic peptide"
ARAGGHLFDY

SEQ ID NO: 3031 - protein, 10 aa, Artificial Sequence
  source: /note="Description of Artificial Sequence: Synthetic peptide"
ARAGHKTHDY

SEQ ID NO: 3032 - protein, 16 aa, Artificial Sequence
  source: /note="Description of Artificial Sequence: Synthetic peptide"
ARAGHYDDWSGLGLDV

SEQ ID NO: 3033 - protein, 15 aa, Artificial Sequence
  source: /note="Description of Artificial Sequence: Synthetic peptide"
ARAGHYDGGHLGMDV

SEQ ID NO: 3034 - protein, 14 aa, Artificial Sequence
  source: /note="Description of Artificial Sequence: Synthetic peptide"
ARAKMLDDGYAFDI

SEQ ID NO: 3035 - protein, 10 aa, Artificial Sequence
  source: /note="Description of Artificial Sequence: Synthetic peptide"
ARAKSVDHDY

SEQ ID NO: 3036 - protein, 13 aa, Artificial Sequence
  source: /note="Description of Artificial Sequence: Synthetic peptide"
ARAMARKSVAFDI

SEQ ID NO: 3037 - protein, 13 aa, Artificial Sequence
  source: /note="Description of Artificial Sequence: Synthetic peptide"
ARAPQESPYVFDI

SEQ ID NO: 3038 - protein, 9 aa, Artificial Sequence
  source: /note="Description of Artificial Sequence: Synthetic peptide"
ARASKMGDD

SEQ ID NO: 3039 - protein, 8 aa, Artificial Sequence
  source: /note="Description of Artificial Sequence: Synthetic peptide"
ARASSVDN

SEQ ID NO: 3040 - protein, 16 aa, Artificial Sequence
  source: /note="Description of Artificial Sequence: Synthetic peptide"
ARDGGGEYPSGTPFDI

SEQ ID NO: 3041 - protein, 15 aa, Artificial Sequence
  source: /note="Description of Artificial Sequence: Synthetic peptide"
ARDISTHDYDLAFDI

SEQ ID NO: 3042 - protein, 14 aa, Artificial Sequence
  source: /note="Description of Artificial Sequence: Synthetic peptide"
ARDLGYSSLLALDI

SEQ ID NO: 3043 - protein, 15 aa, Artificial Sequence
  source: /note="Description of Artificial Sequence: Synthetic peptide"
ARDRGGEYVDFAFDI

SEQ ID NO: 3044 - protein, 16 aa, Artificial Sequence
  source: /note="Description of Artificial Sequence: Synthetic peptide"
ARDSGNYDYWSGALRY

SEQ ID NO: 3045 - protein, 16 aa, Artificial Sequence
  source: /note="Description of Artificial Sequence: Synthetic peptide"
AREADDSSGYPLGLDV

SEQ ID NO: 3046 - protein, 15 aa, Artificial Sequence
  source: /note="Description of Artificial Sequence: Synthetic peptide"
AREAGYDYGELAFDI

SEQ ID NO: 3047 - protein, 13 aa, Artificial Sequence
  source: /note="Description of Artificial Sequence: Synthetic peptide"
AREAYYTNPGFAY

SEQ ID NO: 3048 - protein, 16 aa, Artificial Sequence
  source: /note="Description of Artificial Sequence: Synthetic peptide"
AREPYSYGSSPWYFLV

SEQ ID NO: 3049 - protein, 11 aa, Artificial Sequence
  source: /note="Description of Artificial Sequence: Synthetic peptide"
AREQYHVGMDV

SEQ ID NO: 3050 - protein, 18 aa, Artificial Sequence
  source: /note="Description of Artificial Sequence: Synthetic peptide"
ARGAPVDYGGIEPEYFQH

SEQ ID NO: 3051 - protein, 15 aa, Artificial Sequence
  source: /note="Description of Artificial Sequence: Synthetic peptide"
ARGGGRRGDNNWFDP

SEQ ID NO: 3052 - protein, 15 aa, Artificial Sequence
  source: /note="Description of Artificial Sequence: Synthetic peptide"
ARGGGTFWSGSWALY

SEQ ID NO: 3053 - protein, 13 aa, Artificial Sequence
  source: /note="Description of Artificial Sequence: Synthetic peptide"
ARGGRRHYGGMDV

SEQ ID NO: 3054 - protein, 12 aa, Artificial Sequence
  source: /note="Description of Artificial Sequence: Synthetic peptide"
ARGGSHYYAMDY

SEQ ID NO: 3055 - protein, 13 aa, Artificial Sequence
  source: /note="Description of Artificial Sequence: Synthetic peptide"
ARGGVPRVSYFQH

SEQ ID NO: 3056 - protein, 12 aa, Artificial Sequence
  source: /note="Description of Artificial Sequence: Synthetic peptide"
ARGGVWYSLFDI

SEQ ID NO: 3057 - protein, 12 aa, Artificial Sequence
  source: /note="Description of Artificial Sequence: Synthetic peptide"
ARGLYGYGVLDV

SEQ ID NO: 3058 - protein, 17 aa, Artificial Sequence
  source: /note="Description of Artificial Sequence: Synthetic peptide"
ARGPGYTTALDYYYMDV

SEQ ID NO: 3059 - protein, 13 aa, Artificial Sequence
  source: /note="Description of Artificial Sequence: Synthetic peptide"
ARGPLYHPMIFDY

SEQ ID NO: 3060 - protein, 10 aa, Artificial Sequence
  source: /note="Description of Artificial Sequence: Synthetic peptide"
ARGPPHEMDY

SEQ ID NO: 3061 - protein, 11 aa, Artificial Sequence
  source: /note="Description of Artificial Sequence: Synthetic peptide"
ARGPSHYYDLA

SEQ ID NO: 3062 - protein, 19 aa, Artificial Sequence
  source: /note="Description of Artificial Sequence: Synthetic peptide"
ARGPTKAYYGSGSYVVFDP

SEQ ID NO: 3063 - protein, 13 aa, Artificial Sequence
  source: /note="Description of Artificial Sequence: Synthetic peptide"
ARGPYRLLLGMDV

SEQ ID NO: 3064 - protein, 14 aa, Artificial Sequence
  source: /note="Description of Artificial Sequence: Synthetic peptide"
ARGQYYGGSGWFDP

SEQ ID NO: 3065 - protein, 13 aa, Artificial Sequence
  source: /note="Description of Artificial Sequence: Synthetic peptide"
ARGSGSGYDSWYD

SEQ ID NO: 3066 - protein, 13 aa, Artificial Sequence
  source: /note="Description of Artificial Sequence: Synthetic peptide"
ARGSPTYGYLYDP

SEQ ID NO: 3067 - protein, 15 aa, Artificial Sequence
  source: /note="Description of Artificial Sequence: Synthetic peptide"
ARGTGAAAASPAFDI

SEQ ID NO: 3068 - protein, 10 aa, Artificial Sequence
  source: /note="Description of Artificial Sequence: Synthetic peptide"
ARGVDSIMDY

SEQ ID NO: 3069 - protein, 14 aa, Artificial Sequence
  source: /note="Description of Artificial Sequence: Synthetic peptide"
ARGVGGQDYYYMDV

SEQ ID NO: 3070 - protein, 12 aa, Artificial Sequence
  source: /note="Description of Artificial Sequence: Synthetic peptide"
ARGVLGYGVFDY

SEQ ID NO: 3071 - protein, 13 aa, Artificial Sequence
  source: /note="Description of Artificial Sequence: Synthetic peptide"
ARHGWDRVGWFDP

SEQ ID NO: 3072 - protein, 10 aa, Artificial Sequence
  source: /note="Description of Artificial Sequence: Synthetic peptide"
ARHYDGYLDY

SEQ ID NO: 3073 - protein, 17 aa, Artificial Sequence
  source: /note="Description of Artificial Sequence: Synthetic peptide"
ARLGGAVGARHVTYFDY

SEQ ID NO: 3074 - protein, 17 aa, Artificial Sequence
  source: /note="Description of Artificial Sequence: Synthetic peptide"
ARLGHYSGTVSSYGMDV

SEQ ID NO: 3075 - protein, 15 aa, Artificial Sequence
  source: /note="Description of Artificial Sequence: Synthetic peptide"
ARLGIYSTGATAFDI

SEQ ID NO: 3076 - protein, 12 aa, Artificial Sequence
  source: /note="Description of Artificial Sequence: Synthetic peptide"
ARLGQEYAYFQH

SEQ ID NO: 3077 - protein, 15 aa, Artificial Sequence
  source: /note="Description of Artificial Sequence: Synthetic peptide"
ARLGRKPSGSVAFDI

SEQ ID NO: 3078 - protein, 15 aa, Artificial Sequence
  source: /note="Description of Artificial Sequence: Synthetic peptide"
ARLGRWSSGSTAFDI

SEQ ID NO: 3079 - protein, 14 aa, Artificial Sequence
  source: /note="Description of Artificial Sequence: Synthetic peptide"
ARLHISGEVNWFDP

SEQ ID NO: 3080 - protein, 16 aa, Artificial Sequence
  source: /note="Description of Artificial Sequence: Synthetic peptide"
ARLLRNKPGESYAMDY

SEQ ID NO: 3081 - protein, 16 aa, Artificial Sequence
  source: /note="Description of Artificial Sequence: Synthetic peptide"
ARLLRNQPGASYAMDY

SEQ ID NO: 3082 - protein, 16 aa, Artificial Sequence
  source: /note="Description of Artificial Sequence: Synthetic peptide"
ARLLRNQPGESYAHDY

SEQ ID NO: 3083 - protein, 16 aa, Artificial Sequence
  source: /note="Description of Artificial Sequence: Synthetic peptide"
ARLLRNQPGESYAMDY

SEQ ID NO: 3084 - protein, 16 aa, Artificial Sequence
  source: /note="Description of Artificial Sequence: Synthetic peptide"
ARLLRNQPGSSYAMDY

SEQ ID NO: 3085 - protein, 16 aa, Artificial Sequence
  source: /note="Description of Artificial Sequence: Synthetic peptide"
  VARIANT (7)..(7): /replace="Lys"
  VARIANT (10)..(10): /replace="Ser" or "Ala"
  VARIANT (14)..(14): /replace="His"
  SITE (1)..(16): /note="Variant residues given in the sequence have no preference with respect to those in the annotations for variant positions"
ARLLRNQPGESYAMDY

SEQ ID NO: 3086 - protein, 9 aa, Artificial Sequence
  source: /note="Description of Artificial Sequence: Synthetic peptide"
ARPAKTADY

SEQ ID NO: 3087 - protein, 9 aa, Artificial Sequence
  source: /note="Description of Artificial Sequence: Synthetic peptide"
ARPGKSMDV

SEQ ID NO: 3088 - protein, 12 aa, Artificial Sequence
  source: /note="Description of Artificial Sequence: Synthetic peptide"
ARRGYYGGSYDY

SEQ ID NO: 3089 - protein, 14 aa, Artificial Sequence
  source: /note="Description of Artificial Sequence: Synthetic peptide"
ARRRDGYYDEVFDI

SEQ ID NO: 3090 - protein, 11 aa, Artificial Sequence
  source: /note="Description of Artificial Sequence: Synthetic peptide"
ARSGMASFFDY

SEQ ID NO: 3091 - protein, 11 aa, Artificial Sequence
  source: /note="Description of Artificial Sequence: Synthetic peptide"
ARSGTETLFDY

SEQ ID NO: 3092 - protein, 12 aa, Artificial Sequence
  source: /note="Description of Artificial Sequence: Synthetic peptide"
ARTPYPWIYFDL

SEQ ID NO: 3093 - protein, 15 aa, Artificial Sequence
  source: /note="Description of Artificial Sequence: Synthetic peptide"
ARTRSGYGASNYFDY

SEQ ID NO: 3094 - protein, 10 aa, Artificial Sequence
  source: /note="Description of Artificial Sequence: Synthetic peptide"
ARTSSKERDY

SEQ ID NO: 3095 - protein, 12 aa, Artificial Sequence
  source: /note="Description of Artificial Sequence: Synthetic peptide"
ARVGQYMLGMDV

SEQ ID NO: 3096 - protein, 17 aa, Artificial Sequence
  source: /note="Description of Artificial Sequence: Synthetic peptide"
ARVGVVVGRPGYSAFDI

SEQ ID NO: 3097 - protein, 12 aa, Artificial Sequence
  source: /note="Description of Artificial Sequence: Synthetic peptide"
ARVPKHYVVLDY

SEQ ID NO: 3098 - protein, 10 aa, Artificial Sequence
  source: /note="Description of Artificial Sequence: Synthetic peptide"
ARVSSSWYKA

SEQ ID NO: 3099 - protein, 16 aa, Artificial Sequence
  source: /note="Description of Artificial Sequence: Synthetic peptide"
ARWGIDGNYGGGFFDV

SEQ ID NO: 3100 - protein, 13 aa, Artificial Sequence
  source: /note="Description of Artificial Sequence: Synthetic peptide"
ATHYYRSTYAFSY

SEQ ID NO: 3101 - protein, 9 aa, Artificial Sequence
  source: /note="Description of Artificial Sequence: Synthetic peptide"
ATTYVSFSY

SEQ ID NO: 3102 - protein, 13 aa, Artificial Sequence
  source: /note="Description of Artificial Sequence: Synthetic peptide"
ATYSNYVTGAMDS

SEQ ID NO: 3103 - protein, 16 aa, Artificial Sequence
  source: /note="Description of Artificial Sequence: Synthetic peptide"
EGVIRRKSSNFATLYA

SEQ ID NO: 3104 - protein, 16 aa, Artificial Sequence
  source: /note="Description of Artificial Sequence: Synthetic peptide"
EIDHSGSTKYNPSLKS

SEQ ID NO: 3105 - protein, 16 aa, Artificial Sequence
  source: /note="Description of Artificial Sequence: Synthetic peptide"
ESVIRSKSNNFSTLYA

SEQ ID NO: 3106 - protein, 7 aa, Artificial Sequence
  source: /note="Description of Artificial Sequence: Synthetic peptide"
FASESIS

SEQ ID NO: 3107 - protein, 9 aa, Artificial Sequence
  source: /note="Description of Artificial Sequence: Synthetic peptide"
FNFNTYAMK

SEQ ID NO: 3108 - protein, 9 aa, Artificial Sequence
  source: /note="Description of Artificial Sequence: Synthetic peptide"
FNFNTYAMN

SEQ ID NO: 3109 - protein, 9 aa, Artificial Sequence
  source: /note="Description of Artificial Sequence: Synthetic peptide"
FQGSHVPFT

SEQ ID NO: 3110 - protein, 9 aa, Artificial Sequence
  source: /note="Description of Artificial Sequence: Synthetic peptide"
FQGSHVPYT

SEQ ID NO: 3111 - protein, 9 aa, Artificial Sequence
  source: /note="Description of Artificial Sequence: Synthetic peptide"
FRFNTYAMT

SEQ ID NO: 3112 - protein, 9 aa, Artificial Sequence
  source: /note="Description of Artificial Sequence: Synthetic peptide"
FSFNTYAMN

SEQ ID NO: 3113 - protein, 9 aa, Artificial Sequence
  source: /note="Description of Artificial Sequence: Synthetic peptide"
FTFNTYSMN

SEQ ID NO: 3114 - protein, 9 aa, Artificial Sequence
  source: /note="Description of Artificial Sequence: Synthetic peptide"
FTFSDAWMD

SEQ ID NO: 3115 - protein, 9 aa, Artificial Sequence
  source: /note="Description of Artificial Sequence: Synthetic peptide"
FTFSDAWMG

SEQ ID NO: 3116 - protein, 9 aa, Artificial Sequence
  source: /note="Description of Artificial Sequence: Synthetic peptide"
  VARIANT (9)..(9): /replace="Gly"
  SITE (1)..(9): /note="Variant residues given in the sequence have no preference with respect to those in the annotations for variant positions"
FTFSDAWMD

SEQ ID NO: 3117 - protein, 9 aa, Artificial Sequence
  source: /note="Description of Artificial Sequence: Synthetic peptide"
FTLSNYWMN

SEQ ID NO: 3118 - protein, 9 aa, Artificial Sequence
  source: /note="Description of Artificial Sequence: Synthetic peptide"
FTLSSYAMS

SEQ ID NO: 3119 - protein, 7 aa, Artificial Sequence
  source: /note="Description of Artificial Sequence: Synthetic peptide"
FTSNLPS

SEQ ID NO: 3120 - protein, 9 aa, Artificial Sequence
  source: /note="Description of Artificial Sequence: Synthetic peptide"
  MOD_RES (2)..(2): Any amino acid
FXFNTYAMN

SEQ ID NO: 3121 - protein, 9 aa, Artificial Sequence
  source: /note="Description of Artificial Sequence: Synthetic peptide"
  MOD_RES (2)..(2): Any amino acid
  VARIANT (3)..(3): /replace="Leu"
  VARIANT (4)..(4): /replace="Ser"
  VARIANT (5)..(5): /replace="Asn"
  VARIANT (7)..(7): /replace="Ser" or "Trp"
  VARIANT (9)..(9): /replace="Lys" or "Thr"
  SITE (1)..(9): /note="Variant residues given in the sequence have no preference with respect to those in the annotations for variant positions"
FXFNTYAMN

SEQ ID NO: 3122 - protein, 7 aa, Artificial Sequence
  source: /note="Description of Artificial Sequence: Synthetic peptide"
GASNRAT

SEQ ID NO: 3123 - protein, 7 aa, Artificial Sequence
  source: /note="Description of Artificial Sequence: Synthetic peptide"
GASNRYT

SEQ ID NO: 3124 - protein, 9 aa, Artificial Sequence
  source: /note="Description of Artificial Sequence: Synthetic peptide"
GQGYSYPYT

SEQ ID NO: 3125 - protein, 9 aa, Artificial Sequence
  source: /note="Description of Artificial Sequence: Synthetic peptide"
GSFSGYYWS

SEQ ID NO: 3126 - protein, 9 aa, Artificial Sequence
  source: /note="Description of Artificial Sequence: Synthetic peptide"
GSISSYYWS

SEQ ID NO: 3127 - protein, 9 aa, Artificial Sequence
  source: /note="Description of Artificial Sequence: Synthetic peptide"
HHFWGTPYT

SEQ ID NO: 3128 - protein, 8 aa, Artificial Sequence
  source: /note="Description of Artificial Sequence: Synthetic peptide"
HQHYSTYT

SEQ ID NO: 3129 - protein, 8 aa, Artificial Sequence
  source: /note="Description of Artificial Sequence: Synthetic peptide"
HQYLSSLT

SEQ ID NO: 3130 - protein, 16 aa, Artificial Sequence
  source: /note="Description of Artificial Sequence: Synthetic peptide"
IARIRSKSNNYATYYA

SEQ ID NO: 3131 - protein, 16 aa, Artificial Sequence
  source: /note="Description of Artificial Sequence: Synthetic peptide"
IARIRSNSNDYATNYS

SEQ ID NO: 3132 - protein, 14 aa, Artificial Sequence
  source: /note="Description of Artificial Sequence: Synthetic peptide"
IGDINPNNGHTTYN

SEQ ID NO: 3133 - protein, 14 aa, Artificial Sequence
  source: /note="Description of Artificial Sequence: Synthetic peptide"
IGDIYPGSDNRNFN

SEQ ID NO: 3134 - protein, 14 aa, Artificial Sequence
  source: /note="Description of Artificial Sequence: Synthetic peptide"
IGDIYPGSDNSNYN

SEQ ID NO: 3135 - protein, 14 aa, Artificial Sequence
  source: /note="Description of Artificial Sequence: Synthetic peptide"
IGGINPNNGGTSYK

SEQ ID NO: 3136 - protein, 14 aa, Artificial Sequence
  source: /note="Description of Artificial Sequence: Synthetic peptide"
IGGINPNNGGTSYS

SEQ ID NO: 3137 - protein, 14 aa, Artificial Sequence
  source: /note="Description of Artificial Sequence: Synthetic peptide"
IGQIYPGDGDTKYN

SEQ ID NO: 3138 - protein, 14 aa, Artificial Sequence
  source: /note="Description of Artificial Sequence: Synthetic peptide"
IGRIDPAIGNTNYA

SEQ ID NO: 3139 - protein, 14 aa, Artificial Sequence
  source: /note="Description of Artificial Sequence: Synthetic peptide"
IGRIDPNNGDTNYN

SEQ ID NO: 3140 - protein, 14 aa, Artificial Sequence
  source: /note="Description of Artificial Sequence: Synthetic peptide"
IGRIDPNSGGTKYN

SEQ ID NO: 3141 - protein, 14 aa, Artificial Sequence
  source: /note="Description of Artificial Sequence: Synthetic peptide"
IGRIHPSDSDINYN

SEQ ID NO: 3142 - protein, 14 aa, Artificial Sequence
  source: /note="Description of Artificial Sequence: Synthetic peptide"
IGRIYPGDGDTNYN

SEQ ID NO: 3143 - protein, 14 aa, Artificial Sequence
  source: /note="Description of Artificial Sequence: Synthetic peptide"
IGRNDPNSGGSNYN

SEQ ID NO: 3144 - protein, 14 aa, Artificial Sequence
  source: /note="Description of Artificial Sequence: Synthetic peptide"
IGRTHPSDSDTNYN

SEQ ID NO: 3145 - protein, 14 aa, Artificial Sequence
  source: /note="Description of Artificial Sequence: Synthetic peptide"
IGRVNPNNGGTSYN

SEQ ID NO: 3146 - protein, 14 aa, Artificial Sequence
  source: /note="Description of Artificial Sequence: Synthetic peptide"
IGVIDPETGGTAYN

SEQ ID NO: 3147 - protein, 14 aa, Artificial Sequence
  source: /note="Description of Artificial Sequence: Synthetic peptide"
  MOD_RES (3)..(3): Any amino acid
  VARIANT (5)..(5): /replace="Asp"
  VARIANT (7)..(7): /replace="Asn"
  MOD_RES (8)..(8): Any amino acid
  VARIANT (9)..(9): /replace="Asp"
  VARIANT (10)..(10): /replace="Asp"
  VARIANT (11)..(11): /replace="Arg" or "Ser"
  VARIANT (12)..(12): /replace="Lys"
  VARIANT (13)..(13): /replace="Phe"
  SITE (1)..(14): /note="Variant residues given in the sequence have no preference with respect to those in the annotations for variant positions"
IGXIYPGXGNTNYN

SEQ ID NO: 3148 - protein, 14 aa, Artificial Sequence
  source: /note="Description of Artificial Sequence: Synthetic peptide"
  MOD_RES (3)..(3): Any amino acid
  MOD_RES (8)..(8): Any amino acid
IGXIYPGXGDTNYN

SEQ ID NO: 3149 - protein, 14 aa, Artificial Sequence
  source: /note="Description of Artificial Sequence: Synthetic peptide"
  MOD_RES (3)..(5): Any amino acid
  MOD_RES (12)..(12): Any amino acid
IGXXXPNNGGTXYN

SEQ ID NO: 3150 - protein, 14 aa, Artificial Sequence
  source: /note="Description of Artificial Sequence: Synthetic peptide"
  MOD_RES (3)..(5): Any amino acid
  VARIANT (7)..(7): /replace="Glu"
  VARIANT (8)..(8): /replace="Ser" or "Thr"
  VARIANT (9)..(9): /replace="Asp"
  VARIANT (10)..(10): /replace="Asp" or "Asn"
  VARIANT (11)..(11): /replace="Ser" or "Asn"
  MOD_RES (12)..(12): Any amino acid
  VARIANT (14)..(14): /replace="Ser" or "Lys" or "Ile"
  SITE (1)..(14): /note="Variant residues given in the sequence have no preference with respect to those in the annotations for variant positions"
IGXXXPNNGGTXYN

SEQ ID NO: 3151 - protein, 14 aa, Artificial Sequence
  source: /note="Description of Artificial Sequence: Synthetic peptide"
IGYINPNNGGTTYN

SEQ ID NO: 3152 - protein, 14 aa, Artificial Sequence
  source: /note="Description of Artificial Sequence: Synthetic peptide"
IGYINPNSDNTRYI

SEQ ID NO: 3153 - protein, 14 aa, Artificial Sequence
  source: /note="Description of Artificial Sequence: Synthetic peptide"
IGYINPNSGYSKYN

SEQ ID NO: 3154 - protein, 14 aa, Artificial Sequence
  source: /note="Description of Artificial Sequence: Synthetic peptide"
IGYIYPNNGDNGYN

SEQ ID NO: 3155 - protein, 17 aa, Artificial Sequence
  source: /note="Description of Artificial Sequence: Synthetic peptide"
IINPGGGSTSYAQKFQG

SEQ ID NO: 3156 - protein, 17 aa, Artificial Sequence
  source: /note="Description of Artificial Sequence: Synthetic peptide"
IINPSGGSTTYAQKFQG

SEQ ID NO: 3157 - protein, 17 aa, Artificial Sequence
  source: /note="Description of Artificial Sequence: Synthetic peptide"
IIYPGDSDTRYSPSFQG

SEQ ID NO: 3158 - protein, 7 aa, Artificial Sequence
  source: /note="Description of Artificial Sequence: Synthetic peptide"
KAKTLAE

SEQ ID NO: 3159 - protein, 10 aa, Artificial Sequence
  source: /note="Description of Artificial Sequence: Synthetic peptide"
KASSNVNYMS

SEQ ID NO: 3160 - protein, 9 aa, Artificial Sequence
  source: /note="Description of Artificial Sequence: Synthetic peptide"
KQAYDVPWT

SEQ ID NO: 3161 - protein, 17 aa, Artificial Sequence
  source: /note="Description of Artificial Sequence: Synthetic peptide"
KSSQSLLNSGNQKKYLT

SEQ ID NO: 3162 - protein, 17 aa, Artificial Sequence
  source: /note="Description of Artificial Sequence: Synthetic peptide"
KSSQSLLYSGNQKNFLA

SEQ ID NO: 3163 - protein, 16 aa, Artificial Sequence
  source: /note="Description of Artificial Sequence: Synthetic peptide"
KSSQSLLYSNGKTFLS

SEQ ID NO: 3164 - protein, 17 aa, Artificial Sequence
  source: /note="Description of Artificial Sequence: Synthetic peptide"
KSSQSLLYSSDQKNYLA

SEQ ID NO: 3165 - protein, 17 aa, Artificial Sequence
  source: /note="Description of Artificial Sequence: Synthetic peptide"
KSSQSLLYSSNQKNCLA

SEQ ID NO: 3166 - protein, 17 aa, Artificial Sequence
  source: /note="Description of Artificial Sequence: Synthetic peptide"
KSSQSVFYSSNQKNYLA

SEQ ID NO: 3167 - protein, 17 aa, Artificial Sequence
  source: /note="Description of Artificial Sequence: Synthetic peptide"
  MOD_RES (6)..(8): Any amino acid
  MOD_RES (10)..(11): Any amino acid
  MOD_RES (14)..(15): Any amino acid
  MOD_RES (17)..(17): Any amino acid
KSSQSXXXSXXQKXXLX

SEQ ID NO: 3168 - protein, 7 aa, Artificial Sequence
  source: /note="Description of Artificial Sequence: Synthetic peptide"
KVSDRFS

SEQ ID NO: 3169 - protein, 7 aa, Artificial Sequence
  source: /note="Description of Artificial Sequence: Synthetic peptide"
KVSNRKS

SEQ ID NO: 3170 - protein, 7 aa, Artificial Sequence
  source: /note="Description of Artificial Sequence: Synthetic peptide"
KVSNRRS

SEQ ID NO: 3171 - protein, 7 aa, Artificial Sequence
  source: /note="Description of Artificial Sequence: Synthetic peptide"
KVSNRVS

SEQ ID NO: 3172 - protein, 7 aa, Artificial Sequence
  source: /note="Description of Artificial Sequence: Synthetic peptide"
  VARIANT (6)..(6): /replace="Arg" or "Val" or "Lys"
  SITE (1)..(7): /note="Variant residues given in the sequence have no preference with respect to those in the annotations for variant positions"
KVSNRFS

SEQ ID NO: 3173 - protein, 10 aa, Artificial Sequence
  source: /note="Description of Artificial Sequence: Synthetic peptide"
LDYNSYSPIT

SEQ ID NO: 3174 - protein, 13 aa, Artificial Sequence
  source: /note="Description of Artificial Sequence: Synthetic peptide"
LGVIWSGGSTAFN

SEQ ID NO: 3175 - protein, 17 aa, Artificial Sequence
  source: /note="Description of Artificial Sequence: Synthetic peptide"
LIWYDGSNKYYADSVKG

SEQ ID NO: 3176 - protein, 14 aa, Artificial Sequence
  source: /note="Description of Artificial Sequence: Synthetic peptide"
LLRNKPGESYAMDY

SEQ ID NO: 3177 - protein, 14 aa, Artificial Sequence
  source: /note="Description of Artificial Sequence: Synthetic peptide"
LLRNQPGESYAMDY

SEQ ID NO: 3178 - protein, 7 aa, Artificial Sequence
  source: /note="Description of Artificial Sequence: Synthetic peptide"
LTSILAS

SEQ ID NO: 3179 - protein, 9 aa, Artificial Sequence
  source: /note="Description of Artificial Sequence: Synthetic peptide"
LTSNTYTQT

SEQ ID NO: 3180 - protein, 7 aa, Artificial Sequence
  source: /note="Description of Artificial Sequence: Synthetic peptide"
LVSKLDS

SEQ ID NO: 3181 - protein, 9 aa, Artificial Sequence
  source: /note="Description of Artificial Sequence: Synthetic peptide"
MQALESPRT

SEQ ID NO: 3182 - protein, 9 aa, Artificial Sequence
  source: /note="Description of Artificial Sequence: Synthetic peptide"
MQGTHFPLT

SEQ ID NO: 3183 - protein, 7 aa, Artificial Sequence
  source: /note="Description of Artificial Sequence: Synthetic peptide"
NANSLED

SEQ ID NO: 3184 - protein, 16 aa, Artificial Sequence
  source: /note="Description of Artificial Sequence: Synthetic peptide"
NIYYSGSTVYNPSLKS

SEQ ID NO: 3185 - protein, 7 aa, Artificial Sequence
  source: /note="Description of Artificial Sequence: Synthetic peptide"
NSKTFAE

SEQ ID NO: 3186 - protein, 9 aa, Artificial Sequence
  source: /note="Description of Artificial Sequence: Synthetic peptide"
QHHYGTPFT

SEQ ID NO: 3187 - protein, 10 aa, Artificial Sequence
  source: /note="Description of Artificial Sequence: Synthetic peptide"
QHHYGTPPWT

SEQ ID NO: 3188 - protein, 9 aa, Artificial Sequence
  source: /note="Description of Artificial Sequence: Synthetic peptide"
QNDYGFPLT

SEQ ID NO: 3189 - protein, 9 aa, Artificial Sequence
  source: /note="Description of Artificial Sequence: Synthetic peptide"
QQADNWPFT

SEQ ID NO: 3190 - protein, 9 aa, Artificial Sequence
  source: /note="Description of Artificial Sequence: Synthetic peptide"
QQAFNRPPT

SEQ ID NO: 3191 - protein, 10 aa, Artificial Sequence
  source: /note="Description of Artificial Sequence: Synthetic peptide"
QQAFSPPPWT

SEQ ID NO: 3192 - protein, 9 aa, Artificial Sequence
  source: /note="Description of Artificial Sequence: Synthetic peptide"
QQAGSHPFT

SEQ ID NO: 3193 - protein, 9 aa, Artificial Sequence
  source: /note="Description of Artificial Sequence: Synthetic peptide"
QQASTFPIT

SEQ ID NO: 3194 - protein, 9 aa, Artificial Sequence
  source: /note="Description of Artificial Sequence: Synthetic peptide"
QQAYLPPIT

SEQ ID NO: 3195 - protein, 9 aa, Artificial Sequence
  source: /note="Description of Artificial Sequence: Synthetic peptide"
QQAYSLPPT

SEQ ID NO: 3196 - protein, 9 aa, Artificial Sequence
  source: /note="Description of Artificial Sequence: Synthetic peptide"
QQAYVVPPT

SEQ ID NO: 3197 - protein, 8 aa, Artificial Sequence
  source: /note="Description of Artificial Sequence: Synthetic peptide"
QQDDDGYT

SEQ ID NO: 3198 - protein, 9 aa, Artificial Sequence
  source: /note="Description of Artificial Sequence: Synthetic peptide"
QQDDNYPYT

SEQ ID NO: 3199 - protein, 8 aa, Artificial Sequence
  source: /note="Description of Artificial Sequence: Synthetic peptide"
QQDDRSPT

SEQ ID NO: 3200 - protein, 9 aa, Artificial Sequence
  source: /note="Description of Artificial Sequence: Synthetic peptide"
QQDDRSPYT

SEQ ID NO: 3201 - protein, 9 aa, Artificial Sequence
  source: /note="Description of Artificial Sequence: Synthetic peptide"
QQDDSAPYT

SEQ ID NO: 3202 - protein, 9 aa, Artificial Sequence
  source: /note="Description of Artificial Sequence: Synthetic peptide"
QQDHDYPFT

SEQ ID NO: 3203 - protein, 9 aa, Artificial Sequence
  source: /note="Description of Artificial Sequence: Synthetic peptide"
QQDSSFPPT

SEQ ID NO: 3204 - protein, 9 aa, Artificial Sequence
  source: /note="Description of Artificial Sequence: Synthetic peptide"
QQDVNYPPT

SEQ ID NO: 3205 - protein, 9 aa, Artificial Sequence
  source: /note="Description of Artificial Sequence: Synthetic peptide"
QQDYSWPYT

SEQ ID NO: 3206 - protein, 9 aa, Artificial Sequence
  source: /note="Description of Artificial Sequence: Synthetic peptide"
QQDYSYPWT

SEQ ID NO: 3207 - protein, 9 aa, Artificial Sequence
  source: /note="Description of Artificial Sequence: Synthetic peptide"
QQEFDLPFT

SEQ ID NO: 3208 - protein, 10 aa, Artificial Sequence
  source: /note="Description of Artificial Sequence: Synthetic peptide"
QQEVDYPPLT

SEQ ID NO: 3209 - protein, 9 aa, Artificial Sequence
  source: /note="Description of Artificial Sequence: Synthetic peptide"
QQEYAVPYT

SEQ ID NO: 3210 - protein, 8 aa, Artificial Sequence
  source: /note="Description of Artificial Sequence: Synthetic peptide"
QQFDDVFT

SEQ ID NO: 3211 - protein, 8 aa, Artificial Sequence
  source: /note="Description of Artificial Sequence: Synthetic peptide"
QQFDTYPT

SEQ ID NO: 3212 - protein, 8 aa, Artificial Sequence
  source: /note="Description of Artificial Sequence: Synthetic peptide"
QQFFNFPT

SEQ ID NO: 3213 - protein, 9 aa, Artificial Sequence
  source: /note="Description of Artificial Sequence: Synthetic peptide"
QQFIDLPFT

SEQ ID NO: 3214 - protein, 8 aa, Artificial Sequence
  source: /note="Description of Artificial Sequence: Synthetic peptide"
QQFLNFPT

SEQ ID NO: 3215 - protein, 9 aa, Artificial Sequence
  source: /note="Description of Artificial Sequence: Synthetic peptide"
QQFSSHPFT

SEQ ID NO: 3216 - protein, 9 aa, Artificial Sequence
  source: /note="Description of Artificial Sequence: Synthetic peptide"
QQFSYWPWT

SEQ ID NO: 3217 - protein, 9 aa, Artificial Sequence
  source: /note="Description of Artificial Sequence: Synthetic peptide"
QQGYAAPIT

SEQ ID NO: 3218 - protein, 9 aa, Artificial Sequence
  source: /note="Description of Artificial Sequence: Synthetic peptide"
QQGYSAPIT

SEQ ID NO: 3219 - protein, 9 aa, Artificial Sequence
  source: /note="Description of Artificial Sequence: Synthetic peptide"
QQHDSSPPT

SEQ ID NO: 3220 - protein, 9 aa, Artificial Sequence
  source: /note="Description of Artificial Sequence: Synthetic peptide"
QQHIALPFT

SEQ ID NO: 3221 - protein, 10 aa, Artificial Sequence
  source: /note="Description of Artificial Sequence: Synthetic peptide"
QQHYGTPPWT

SEQ ID NO: 3222 - protein, 9 aa, Artificial Sequence
  source: /note="Description of Artificial Sequence: Synthetic peptide"
QQHYSTPPT

SEQ ID NO: 3223 - protein, 9 aa, Artificial Sequence
  source: /note="Description of Artificial Sequence: Synthetic peptide"
QQIDDTPIT

SEQ ID NO: 3224 - protein, 9 aa, Artificial Sequence
  source: /note="Description of Artificial Sequence: Synthetic peptide"
QQIDFLPYT

SEQ ID NO: 3225 - protein, 8 aa, Artificial Sequence
  source: /note="Description of Artificial Sequence: Synthetic peptide"
QQLDDWFT

SEQ ID NO: 3226 - protein, 8 aa, Artificial Sequence
  source: /note="Description of Artificial Sequence: Synthetic peptide"
QQLFDWPT

SEQ ID NO: 3227 - protein, 9 aa, Artificial Sequence
  source: /note="Description of Artificial Sequence: Synthetic peptide"
QQLNSYSPT

SEQ ID NO: 3228 - protein, 9 aa, Artificial Sequence
  source: /note="Description of Artificial Sequence: Synthetic peptide"
QQLPYWPPT

SEQ ID NO: 3229 - protein, 9 aa, Artificial Sequence
  source: /note="Description of Artificial Sequence: Synthetic peptide"
QQLSTYPLT

SEQ ID NO: 3230 - protein, 8 aa, Artificial Sequence
  source: /note="Description of Artificial Sequence: Synthetic peptide"
QQLVHWPT

SEQ ID NO: 3231 - protein, 9 aa, Artificial Sequence
  source: /note="Description of Artificial Sequence: Synthetic peptide"
QQNRKILWT

SEQ ID NO: 3232 - protein, 9 aa, Artificial Sequence
  source: /note="Description of Artificial Sequence: Synthetic peptide"
QQPFNFPYT

SEQ ID NO: 3233 - protein, 8 aa, Artificial Sequence
  source: /note="Description of Artificial Sequence: Synthetic peptide"
QQPGAVPT

SEQ ID NO: 3234 - protein, 9 aa, Artificial Sequence
  source: /note="Description of Artificial Sequence: Synthetic peptide"
QQPVDLPFT

SEQ ID NO: 3235 - protein, 9 aa, Artificial Sequence
  source: /note="Description of Artificial Sequence: Synthetic peptide"
QQRAAYPIT

SEQ ID NO: 3236 - protein, 9 aa, Artificial Sequence
  source: /note="Description of Artificial Sequence: Synthetic peptide"
QQRADYPIT

SEQ ID NO: 3237 - protein, 8 aa, Artificial Sequence
  source: /note="Description of Artificial Sequence: Synthetic peptide"
QQRAFLFT

SEQ ID NO: 3238 - protein, 9 aa, Artificial Sequence
  source: /note="Description of Artificial Sequence: Synthetic peptide"
QQRANYPIT

SEQ ID NO: 3239 - protein, 9 aa, Artificial Sequence
  source: /note="Description of Artificial Sequence: Synthetic peptide"
QQRASMPIT

SEQ ID NO: 3240 - protein, 9 aa, Artificial Sequence
  source: /note="Description of Artificial Sequence: Synthetic peptide"
QQRILYPIT

SEQ ID NO: 3241 - protein, 9 aa, Artificial Sequence
  source: /note="Description of Artificial Sequence: Synthetic peptide"
QQRISYPIT

SEQ ID NO: 3242 - protein, 9 aa, Artificial Sequence
  source: /note="Description of Artificial Sequence: Synthetic peptide"
QQRNSLPLT

SEQ ID NO: 3243 - protein, 9 aa, Artificial Sequence
  source: /note="Description of Artificial Sequence: Synthetic peptide"
QQRSAYPIT

SEQ ID NO: 3244 - protein, 9 aa, Artificial Sequence
  source: /note="Description of Artificial Sequence: Synthetic peptide"
QQRSHFPIT

SEQ ID NO: 3245 - protein, 9 aa, Artificial Sequence
  source: /note="Description of Artificial Sequence: Synthetic peptide"
QQRSTFPIT

SEQ ID NO: 3246 - protein, 9 aa, Artificial Sequence
  source: /note="Description of Artificial Sequence: Synthetic peptide"
QQRSVYPIT

SEQ ID NO: 3247 - protein, 9 aa, Artificial Sequence
  source: /note="Description of Artificial Sequence: Synthetic peptide"
QQRTSHPIT

SEQ ID NO: 3248 - protein, 9 aa, Artificial Sequence
  source: /note="Description of Artificial Sequence: Synthetic peptide"
QQRVNLPPT

SEQ ID NO: 3249 - protein, 9 aa, Artificial Sequence
  source: /note="Description of Artificial Sequence: Synthetic peptide"
QQRYALPIT

SEQ ID NO: 3250 - protein, 9 aa, Artificial Sequence
  source: /note="Description of Artificial Sequence: Synthetic peptide"
QQRYLRPIT

SEQ ID NO: 3251 - protein, 9 aa, Artificial Sequence
  source: /note="Description of Artificial Sequence: Synthetic peptide"
QQSDDDPFT

SEQ ID NO: 3252 - protein, 9 aa, Artificial Sequence
  source: /note="Description of Artificial Sequence: Synthetic peptide"
QQSDFPPWT

SEQ ID NO: 3253 - protein, 9 aa, Artificial Sequence
  source: /note="Description of Artificial Sequence: Synthetic peptide"
QQSSNWPWT

SEQ ID NO: 3254 - protein, 9 aa, Artificial Sequence
  source: /note="Description of Artificial Sequence: Synthetic peptide"
QQSSVHPYT

SEQ ID NO: 3255 - protein, 9 aa, Artificial Sequence
  source: /note="Description of Artificial Sequence: Synthetic peptide"
QQSYDFPIT

SEQ ID NO: 3256 - protein, 9 aa, Artificial Sequence
  source: /note="Description of Artificial Sequence: Synthetic peptide"
QQTNTWPIT

SEQ ID NO: 3257 - protein, 9 aa, Artificial Sequence
  source: /note="Description of Artificial Sequence: Synthetic peptide"
QQVDNIPPT

SEQ ID NO: 3258 - protein, 9 aa, Artificial Sequence
  source: /note="Description of Artificial Sequence: Synthetic peptide"
QQVNSLPPT

SEQ ID NO: 3259 - protein, 9 aa, Artificial Sequence
  source: /note="Description of Artificial Sequence: Synthetic peptide"
QQVSLFPLT

SEQ ID NO: 3260 - protein, 9 aa, Artificial Sequence
  source: /note="Description of Artificial Sequence: Synthetic peptide"
QQVSNYPFT

SEQ ID NO: 3261 - protein, 9 aa, Artificial Sequence
  source: /note="Description of Artificial Sequence: Synthetic peptide"
QQVSNYPIT

SEQ ID NO: 3262 - protein, 9 aa, Artificial Sequence
  source: /note="Description of Artificial Sequence: Synthetic peptide"
QQVYITPIT

SEQ ID NO: 3263 - protein, 9 aa, Artificial Sequence
  source: /note="Description of Artificial Sequence: Synthetic peptide"
QQVYSPPIT

SEQ ID NO: 3264 - protein, 9 aa, Artificial Sequence
  source: /note="Description of Artificial Sequence: Synthetic peptide"
QQVYSTPIT

SEQ ID NO: 3265 - protein, 9 aa, Artificial Sequence
  source: /note="Description of Artificial Sequence: Synthetic peptide"
QQWSFNPYT

SEQ ID NO: 3266 - protein, 9 aa, Artificial Sequence
  source: /note="Description of Artificial Sequence: Synthetic peptide"
QQYAGSPFT

SEQ ID NO: 3267 - protein, 9 aa, Artificial Sequence
  source: /note="Description of Artificial Sequence: Synthetic peptide"
QQYASPPIT

SEQ ID NO: 3268 - protein, 9 aa, Artificial Sequence
  source: /note="Description of Artificial Sequence: Synthetic peptide"
QQYFFYPPT

SEQ ID NO: 3269 - protein, 9 aa, Artificial Sequence
  source: /note="Description of Artificial Sequence: Synthetic peptide"
QQYFSSPFT

SEQ ID NO: 3270 - protein, 9 aa, Artificial Sequence
  source: /note="Description of Artificial Sequence: Synthetic peptide"
QQYHDAPIT

SEQ ID NO: 3271 - protein, 9 aa, Artificial Sequence
  source: /note="Description of Artificial Sequence: Synthetic peptide"
QQYIFWPPT

SEQ ID NO: 3272 - protein, 9 aa, Artificial Sequence
  source: /note="Description of Artificial Sequence: Synthetic peptide"
QQYNNFPPT

SEQ ID NO: 3273 - protein, 9 aa, Artificial Sequence
  source: /note="Description of Artificial Sequence: Synthetic peptide"
QQYSFFPPT

SEQ ID NO: 3274 - protein, 9 aa, Artificial Sequence
  source: /note="Description of Artificial Sequence: Synthetic peptide"
QQYVNSPFT

SEQ ID NO: 3275 - protein, 9 aa, Artificial Sequence
  source: /note="Description of Artificial Sequence: Synthetic peptide"
QQYVNWPFT

SEQ ID NO: 3276 - protein, 9 aa, Artificial Sequence
  source: /note="Description of Artificial Sequence: Synthetic peptide"
QQYYDLPFT

SEQ ID NO: 3277 - protein, 9 aa, Artificial Sequence
  source: /note="Description of Artificial Sequence: Synthetic peptide"
QQYYSYPFT

SEQ ID NO: 3278 - protein, 9 aa, Artificial Sequence
  source: /note="Description of Artificial Sequence: Synthetic peptide"
QQYYSYPLT

SEQ ID NO: 3279 - protein, 11 aa, Artificial Sequence
  source: /note="Description of Artificial Sequence: Synthetic peptide"
RASENIYSFLA

SEQ ID NO: 3280 - protein, 11 aa, Artificial Sequence
  source: /note="Description of Artificial Sequence: Synthetic peptide"
RASENIYSYLA

SEQ ID NO: 3281 - protein, 11 aa, Artificial Sequence
  source: /note="Description of Artificial Sequence: Synthetic peptide"
RASQSIGTSIH

SEQ ID NO: 3282 - protein, 11 aa, Artificial Sequence
  source: /note="Description of Artificial Sequence: Synthetic peptide"
RASQSVSRYLA

SEQ ID NO: 3283 - protein, 12 aa, Artificial Sequence
  source: /note="Description of Artificial Sequence: Synthetic peptide"
RASQSVSSDYLA

SEQ ID NO: 3284 - protein, 16 aa, Artificial Sequence
  source: /note="Description of Artificial Sequence: Synthetic peptide"
RFSQSLVHSNGNTYLH

SEQ ID NO: 3285 - protein, 17 aa, Artificial Sequence
  source: /note="Description of Artificial Sequence: Synthetic peptide"
RIYPGDGDTNYAHKFQG

SEQ ID NO: 3286 - protein, 17 aa, Artificial Sequence
  source: /note="Description of Artificial Sequence: Synthetic peptide"
RIYPGDGDTNYAQKFKG

SEQ ID NO: 3287 - protein, 17 aa, Artificial Sequence
  source: /note="Description of Artificial Sequence: Synthetic peptide"
RIYPGDGDTNYAQKFQG

SEQ ID NO: 3288 - protein, 17 aa, Artificial Sequence
  source: /note="Description of Artificial Sequence: Synthetic peptide"
RIYPGDGDTNYAQKFRG

SEQ ID NO: 3289 - protein, 17 aa, Artificial Sequence
  source: /note="Description of Artificial Sequence: Synthetic peptide"
RIYPGDGDTNYAQKRQG

SEQ ID NO: 3290 - protein, 17 aa, Artificial Sequence
  source: /note="Description of Artificial Sequence: Synthetic peptide"
RIYPGDGDTNYAQKWQG

SEQ ID NO: 3291 - protein, 17 aa, Artificial Sequence
  source: /note="Description of Artificial Sequence: Synthetic peptide"
RIYPGDGDTNYARKFQG

SEQ ID NO: 3292 - protein, 17 aa, Artificial Sequence
  source: /note="Description of Artificial Sequence: Synthetic peptide"
RIYPGDGDTNYAWKFQG

SEQ ID NO: 3293 - protein, 17 aa, Artificial Sequence
  source: /note="Description of Artificial Sequence: Synthetic peptide"
RIYPGDGDTNYAYKFQG

SEQ ID NO: 3294 - protein, 17 aa, Artificial Sequence
  source: /note="Description of Artificial Sequence: Synthetic peptide"
RIYPGDGDTNYNGEFRV

SEQ ID NO: 3295 - protein, 17 aa, Artificial Sequence
  source: /note="Description of Artificial Sequence: Synthetic peptide"
RIYPGDGQTNYAQKRQG

SEQ ID NO: 3296 - protein, 17 aa, Artificial Sequence
  source: /note="Description of Artificial Sequence: Synthetic peptide"
RIYPGEGDTNYAGKFQG

SEQ ID NO: 3297 - protein, 17 aa, Artificial Sequence
  source: /note="Description of Artificial Sequence: Synthetic peptide"
RIYPGEGDTNYAQKFHG

SEQ ID NO: 3298 - protein, 17 aa, Artificial Sequence
  source: /note="Description of Artificial Sequence: Synthetic peptide"
RIYPGEGDTNYAQKFQG

SEQ ID NO: 3299 - protein, 17 aa, Artificial Sequence
  source: /note="Description of Artificial Sequence: Synthetic peptide"
RIYPGEGDTNYAQKFRG

SEQ ID NO: 3300 - protein, 17 aa, Artificial Sequence
  source: /note="Description of Artificial Sequence: Synthetic peptide"
RIYPGEGDTNYARKFHG

SEQ ID NO: 3301 - protein, 17 aa, Artificial Sequence
  source: /note="Description of Artificial Sequence: Synthetic peptide"
RIYPGEGDTNYARKFQG

SEQ ID NO: 3302 - protein, 17 aa, Artificial Sequence
  source: /note="Description of Artificial Sequence: Synthetic peptide"
RIYPGEGQTNYAQKRQG

SEQ ID NO: 3303 - protein, 17 aa, Artificial Sequence
  source: /note="Description of Artificial Sequence: Synthetic peptide"
RIYPGGGDTNYAGKFQG

SEQ ID NO: 3304 - protein, 17 aa, Artificial Sequence
  source: /note="Description of Artificial Sequence: Synthetic peptide"
RIYPGGGDTNYAQKFQG

SEQ ID NO: 3305 - protein, 17 aa, Artificial Sequence
  source: /note="Description of Artificial Sequence: Synthetic peptide"
RIYPGGGDTNYAQKFRG

SEQ ID NO: 3306 - protein, 17 aa, Artificial Sequence
  source: /note="Description of Artificial Sequence: Synthetic peptide"
RIYPGGGDTNYAQKRQG

SEQ ID NO: 3307 - protein, 17 aa, Artificial Sequence
  source: /note="Description of Artificial Sequence: Synthetic peptide"
RIYPGGGDTNYARKFQG

SEQ ID NO: 3308 - protein, 17 aa, Artificial Sequence
  source: /note="Description of Artificial Sequence: Synthetic peptide"
RIYPGGGDTNYARKFRG

SEQ ID NO: 3309 - protein, 17 aa, Artificial Sequence
  source: /note="Description of Artificial Sequence: Synthetic peptide"
RIYPGQGDTNYAQKFQG

SEQ ID NO: 3310 - protein, 17 aa, Artificial Sequence
  source: /note="Description of Artificial Sequence: Synthetic peptide"
RIYPGVGDTNYAQKFQG

SEQ ID NO: 3311 - protein, 17 aa, Artificial Sequence
  source: /note="Description of Artificial Sequence: Synthetic peptide"
  VARIANT (6)..(6): /replace="Gly" or "Glu" or "Gln" or "Val"
  VARIANT (8)..(8): /replace="Gln"
  VARIANT (13)..(13): /replace="Arg" or "His" or "Trp" or "Tyr" or "Gly"
  VARIANT (15)..(15): /replace="Arg" or "Trp"
  VARIANT (16)..(16): /replace="Arg" or "Lys" or "His"
  SITE (1)..(17): /note="Variant residues given in the sequence have no preference with respect to those in the annotations for variant positions"
RIYPGDGDTNYAQKFQG

SEQ ID NO: 3312 - protein, 7 aa, Artificial Sequence
  source: /note="Description of Artificial Sequence: Synthetic peptide"
RLGVFDY

SEQ ID NO: 3313 - protein, 16 aa, Artificial Sequence
  source: /note="Description of Artificial Sequence: Synthetic peptide"
RSSQSLIHSNGYTYLH

SEQ ID NO: 3314 - protein, 16 aa, Artificial Sequence
  source: /note="Description of Artificial Sequence: Synthetic peptide"
RSSQSLVHSNGNTYLH

SEQ ID NO: 3315 - protein, 16 aa, Artificial Sequence
  source: /note="Description of Artificial Sequence: Synthetic peptide"
RSSQSLVHSNGYTYLH

SEQ ID NO: 3316 - protein, 16 aa, Artificial Sequence
  source: /note="Description of Artificial Sequence: Synthetic peptide"
RSSQSLVHSNQYTYLH

SEQ ID NO: 3317 - protein, 16 aa, Artificial Sequence
  source: /note="Description of Artificial Sequence: Synthetic peptide"
RSSQSLVHSNRYTYLH

SEQ ID NO: 3318 - protein, 16 aa, Artificial Sequence
  source: /note="Description of Artificial Sequence: Synthetic peptide"
RSSQSLVHSNWYTYLH

SEQ ID NO: 3319 - protein, 16 aa, Artificial Sequence
  source: /note="Description of Artificial Sequence: Synthetic peptide"
RSSQTIIHSNGNTYLE

SEQ ID NO: 3320 - protein, 16 aa, Artificial Sequence
  source: /note="Description of Artificial Sequence: Synthetic peptide"
  MOD_RES (5)..(7): Any amino acid
  MOD_RES (12)..(12): Any amino acid
  MOD_RES (16)..(16): Any amino acid
RSSQXXXHSNGXTYLX

SEQ ID NO: 3321 - protein, 16 aa, Artificial Sequence
  source: /note="Description of Artificial Sequence: Synthetic peptide"
RSSRSLVHSNGYTYLH

SEQ ID NO: 3322 - protein, 16 aa, Artificial Sequence
  source: /note="Description of Artificial Sequence: Synthetic peptide"
RSSRSLVHSNQYTYLH

SEQ ID NO: 3323 - protein, 16 aa, Artificial Sequence
  source: /note="Description of Artificial Sequence: Synthetic peptide"
RSSRSLVHSNRYTYLH

SEQ ID NO: 3324 - protein, 16 aa, Artificial Sequence
  source: /note="Description of Artificial Sequence: Synthetic peptide"
RSSSSLVHSNGYTYLH

SEQ ID NO: 3325 - protein, 11 aa, Artificial Sequence
  source: /note="Description of Artificial Sequence: Synthetic peptide"
RTSENVYSNLA

SEQ ID NO: 3326 - protein, 16 aa, Artificial Sequence
  source: /note="Description of Artificial Sequence: Synthetic peptide"
RTSQSLVHSNAYTYLH

SEQ ID NO: 3327 - protein, 16 aa, Artificial Sequence
  source: /note="Description of Artificial Sequence: Synthetic peptide"
RTSQSLVHSNGYTYLH

SEQ ID NO: 3328 - protein, 16 aa, Artificial Sequence
  source: /note="Description of Artificial Sequence: Synthetic peptide"
RTSQSLVHSNQYTYLH

SEQ ID NO: 3329 - protein, 16 aa, Artificial Sequence
  source: /note="Description of Artificial Sequence: Synthetic peptide"
RTSRSLVHSNRYTYLH

SEQ ID NO: 3330 - protein, 11 aa, Artificial Sequence
  source: /note="Description of Artificial Sequence: Synthetic peptide"
  MOD_RES (2)..(2): Any amino acid
  MOD_RES (6)..(6): Any amino acid
  MOD_RES (9)..(9): Any amino acid
RXSENXYSXLA

SEQ ID NO: 3331 - protein, 16 aa, Artificial Sequence
  source: /note="Description of Artificial Sequence: Synthetic peptide"
  VARIANT (2)..(2): /replace="Thr"
  VARIANT (4)..(4): /replace="Arg" or "Ser"
  VARIANT (7)..(7): /replace="Ile"
  VARIANT (11)..(11): /replace="Arg" or "Trp" or "Gln" or "Ala"
  SITE (1)..(16): /note="Variant residues given in the sequence have no preference with respect to those in the annotations for variant positions"
RSSQSLVHSNGYTYLH

SEQ ID NO: 3332 - protein, 11 aa, Artificial Sequence
  source: /note="Description of Artificial Sequence: Synthetic peptide"
SAFSLTNYAVH

SEQ ID NO: 3333 - protein, 7 aa, Artificial Sequence
  source: /note="Description of Artificial Sequence: Synthetic peptide"
SASYRYT

SEQ ID NO: 3334 - protein, 5 aa, Artificial Sequence
  source: /note="Description of Artificial Sequence: Synthetic peptide"
SDWMN

SEQ ID NO: 3335 - protein, 9 aa, Artificial Sequence
  source: /note="Description of Artificial Sequence: Synthetic peptide"
  VARIANT (5)..(5): /replace="Gln"
  SITE (1)..(9): /note="Variant residues given in the sequence have no preference with respect to those in the annotations for variant positions"
SENIEYSLA

SEQ ID NO: 3336 - protein, 9 aa, Artificial Sequence
  source: /note="Description of Artificial Sequence: Synthetic peptide"
SENVVTYVS

SEQ ID NO: 3337 - protein, 13 aa, Artificial Sequence
  source: /note="Description of Artificial Sequence: Synthetic peptide"
SESVDYHGTSLMQ

SEQ ID NO: 3338 - protein, 8 aa, Artificial Sequence
  source: /note="Description of Artificial Sequence: Synthetic peptide"
SGEVTQFT

SEQ ID NO: 3339 - protein, 11 aa, Artificial Sequence
  source: /note="Description of Artificial Sequence: Synthetic peptide"
SGFNIKNTYIH

SEQ ID NO: 3340 - protein, 11 aa, Artificial Sequence
  source: /note="Description of Artificial Sequence: Synthetic peptide"
SGYTFTAYWMH

SEQ ID NO: 3341 - protein, 11 aa, Artificial Sequence
  source: /note="Description of Artificial Sequence: Synthetic peptide"
SGYTFTDFYMN

SEQ ID NO: 3342 - protein, 11 aa, Artificial Sequence
  source: /note="Description of Artificial Sequence: Synthetic peptide"
SGYTFTNYWIH

SEQ ID NO: 3343 - protein, 11 aa, Artificial Sequence
  source: /note="Description of Artificial Sequence: Synthetic peptide"
SGYTFTSATMH

SEQ ID NO: 3344 - protein, 16 aa, Artificial Sequence
  source: /note="Description of Artificial Sequence: Synthetic peptide"
SIYYSGSTNYNPSLKS

SEQ ID NO: 3345 - protein, 9 aa, Artificial Sequence
  source: /note="Description of Artificial Sequence: Synthetic peptide"
SQDVRTAVA

SEQ ID NO: 3346 - protein, 9 aa, Artificial Sequence
  source: /note="Description of Artificial Sequence: Synthetic peptide"
SQDVSTTVA

SEQ ID NO: 3347 - protein, 9 aa, Artificial Sequence
  source: /note="Description of Artificial Sequence: Synthetic peptide"
SQGVSTAVA

SEQ ID NO: 3348 - protein, 14 aa, Artificial Sequence
  source: /note="Description of Artificial Sequence: Synthetic peptide"
SQSIVHSNGNTYLE

SEQ ID NO: 3349 - protein, 14 aa, Artificial Sequence
  source: /note="Description of Artificial Sequence: Synthetic peptide"
SQSLVHSNGDTYLH

SEQ ID NO: 3350 - protein, 14 aa, Artificial Sequence
  source: /note="Description of Artificial Sequence: Synthetic peptide"
SQSLVHSNGNTYLH

SEQ ID NO: 3351 - protein, 9 aa, Artificial Sequence
  source: /note="Description of Artificial Sequence: Synthetic peptide"
SQSTHVPLT

SEQ ID NO: 3352 - protein, 9 aa, Artificial Sequence
  source: /note="Description of Artificial Sequence: Synthetic peptide"
SQSTHVPPT

SEQ ID NO: 3353 - protein, 9 aa, Artificial Sequence
  source: /note="Description of Artificial Sequence: Synthetic peptide"
SQSTRVPPT

SEQ ID NO: 3354 - protein, 9 aa, Artificial Sequence
  source: /note="Description of Artificial Sequence: Synthetic peptide"
SQSTRVPYT

SEQ ID NO: 3355 - protein, 5 aa, Artificial Sequence
  source: /note="Description of Artificial Sequence: Synthetic peptide"
SQWMN

SEQ ID NO: 3356 - protein, 19 aa, Artificial Sequence
  source: /note="Description of Artificial Sequence: Synthetic peptide"
SREKGADYYGSTYSAWFSY

SEQ ID NO: 3357 - protein, 11 aa, Artificial Sequence
  source: /note="Description of Artificial Sequence: Synthetic peptide"
SRFTFSSYAMS

SEQ ID NO: 3358 - protein, 11 aa, Artificial Sequence
  source: /note="Description of Artificial Sequence: Synthetic peptide"
SRFTFSSYAVS

SEQ ID NO: 3359 - protein, 10 aa, Artificial Sequence
  source: /note="Description of Artificial Sequence: Synthetic peptide"
TGAGGNHENY

SEQ ID NO: 3360 - protein, 12 aa, Artificial Sequence
  source: /note="Description of Artificial Sequence: Synthetic peptide"
TRGFSNLGAMDY

SEQ ID NO: 3361 - protein, 13 aa, Artificial Sequence
  source: /note="Description of Artificial Sequence: Synthetic peptide"
TRGYGYYRTPFAN

SEQ ID NO: 3362 - protein, 13 aa, Artificial Sequence
  source: /note="Description of Artificial Sequence: Synthetic peptide"
TSLYDGSYLRFAY

SEQ ID NO: 3363 - protein, 13 aa, Artificial Sequence
  source: /note="Description of Artificial Sequence: Synthetic peptide"
TSLYDGYYLRFAY

SEQ ID NO: 3364 - protein, 18 aa, Artificial Sequence
  source: /note="Description of Artificial Sequence: Synthetic peptide"
TSPDYYGSSYPLYYAMDY

SEQ ID NO: 3365 - protein, 14 aa, Artificial Sequence
  source: /note="Description of Artificial Sequence: Synthetic peptide"
VAAISGGGRYTYYP

SEQ ID NO: 3366 - protein, 16 aa, Artificial Sequence
  source: /note="Description of Artificial Sequence: Synthetic peptide"
VAEIRDKVKNHATYYA

SEQ ID NO: 3367 - protein, 16 aa, Artificial Sequence
  source: /note="Description of Artificial Sequence: Synthetic peptide"
VAEIRNKINNHATYYA

SEQ ID NO: 3368 - protein, 16 aa, Artificial Sequence
  source: /note="Description of Artificial Sequence: Synthetic peptide"
VAEIRNKVNNHATYYA

SEQ ID NO: 3369 - protein, 16 aa, Artificial Sequence
  source: /note="Description of Artificial Sequence: Synthetic peptide"
  VARIANT (6)..(6): /replace="Asp"
  VARIANT (8)..(8): /replace="Ile"
  VARIANT (9)..(9): /replace="Lys"
  SITE (1)..(16): /note="Variant residues given in the sequence have no preference with respect to those in the annotations for variant positions"
VAEIRNKVNNHATYYA

SEQ ID NO: 3370 - protein, 16 aa, Artificial Sequence
  source: /note="Description of Artificial Sequence: Synthetic peptide"
  VARIANT (8)..(8): /replace="Gln"
  SITE (1)..(16): /note="Variant residues given in the sequence have no preference with respect to those in the annotations for variant positions"
VAHIKTKENNFATFYA

SEQ ID NO: 3371 - protein, 16 aa, Artificial Sequence
  source: /note="Description of Artificial Sequence: Synthetic peptide"
VAQIRLKSDNYATHYA

SEQ ID NO: 3372 - protein, 16 aa, Artificial Sequence
  source: /note="Description of Artificial Sequence: Synthetic peptide"
VARIRSKSNNYATYYA

SEQ ID NO: 3373 - protein, 13 aa, Artificial Sequence
  source: /note="Description of Artificial Sequence: Synthetic peptide"
VASISRGGSTYYP

SEQ ID NO: 3374 - protein, 14 aa, Artificial Sequence
  source: /note="Description of Artificial Sequence: Synthetic peptide"
VATISGGGRYTYYP

SEQ ID NO: 3375 - protein, 12 aa, Artificial Sequence
  source: /note="Description of Artificial Sequence: Synthetic peptide"
VGHKINNYPFAH

SEQ ID NO: 3376 - protein, 9 aa, Artificial Sequence
  source: /note="Description of Artificial Sequence: Synthetic peptide"
VKTGTSFAS

SEQ ID NO: 3377 - protein, 9 aa, Artificial Sequence
  source: /note="Description of Artificial Sequence: Synthetic peptide"
VLTGGYFDY

SEQ ID NO: 3378 - protein, 9 aa, Artificial Sequence
  source: /note="Description of Artificial Sequence: Synthetic peptide"
VLTGTDFDY

SEQ ID NO: 3379 - protein, 9 aa, Artificial Sequence
  source: /note="Description of Artificial Sequence: Synthetic peptide"
VMTGTDFDY

SEQ ID NO: 3380 - protein, 13 aa, Artificial Sequence
  source: /note="Description of Artificial Sequence: Synthetic peptide"
VRHGDGNLWYIDV

SEQ ID NO: 3381 - protein, 12 aa, Artificial Sequence
  source: /note="Description of Artificial Sequence: Synthetic peptide"
VRHKSNKYPFVY

SEQ ID NO: 3382 - protein, 12 aa, Artificial Sequence
  source: /note="Description of Artificial Sequence: Synthetic peptide"
VRHKSNRYPGVY

SEQ ID NO: 3383 - protein, 13 aa, Artificial Sequence
  source: /note="Description of Artificial Sequence: Synthetic peptide"
VRHYSNYGWGFAY

SEQ ID NO: 3384 - protein, 9 aa, Artificial Sequence
  source: /note="Description of Artificial Sequence: Synthetic peptide"
VRTNWDGDF

SEQ ID NO: 3385 - protein, 7 aa, Artificial Sequence
  source: /note="Description of Artificial Sequence: Synthetic peptide"
VSPGMDY

SEQ ID NO: 3386 - protein, 12 aa, Artificial Sequence
  source: /note="Description of Artificial Sequence: Synthetic peptide"
  VARIANT (2)..(2): /replace="Gln"
  VARIANT (4)..(4): /replace="Gln"
  SITE (1)..(12): /note="Variant residues given in the sequence have no preference with respect to those in the annotations for variant positions"
VEHESNNYPFAY

SEQ ID NO: 3387 - protein, 7 aa, Artificial Sequence
  source: /note="Description of Artificial Sequence: Synthetic peptide"
WAFTRES

SEQ ID NO: 3388 - protein, 7 aa, Artificial Sequence
  source: /note="Description of Artificial Sequence: Synthetic peptide"
WASTRHT

SEQ ID NO: 3389 - protein, 17 aa, Artificial Sequence
  source: /note="Description of Artificial Sequence: Synthetic peptide"
WISTYNGNTNYAQKLQG

SEQ ID NO: 3390 - protein, 9 aa, Artificial Sequence
  source: /note="Description of Artificial Sequence: Synthetic peptide"
WQGTHFPYT

SEQ ID NO: 3391 - protein, 16 aa, Artificial Sequence
  source: /note="Description of Artificial Sequence: Synthetic peptide"
  MOD_RES (1)..(1): Any amino acid
  MOD_RES (3)..(3): Any amino acid
  MOD_RES (14)..(14): Any amino acid
XAXIRSKSNNYATXYA

SEQ ID NO: 3392 - protein, 16 aa, Artificial Sequence
  source: /note="Description of Artificial Sequence: Synthetic peptide"
  MOD_RES (1)..(1): Any amino acid
  VARIANT (2)..(2): /replace="Gly"
  MOD_RES (3)..(3): Any amino acid
  VARIANT (5)..(5): /replace="Lys"
  VARIANT (6)..(6): /replace="Thr" or "Arg" or "Leu"
  VARIANT (7)..(7): /replace="Asn"
  VARIANT (8)..(8): /replace="Glu" or "Gln"
  VARIANT (9)..(9): /replace="Ser" or "Asp"
  VARIANT (10)..(10): /replace="Asp"
  VARIANT (11)..(11): /replace="Phe"
  MOD_RES (14)..(14): Any amino acid
  VARIANT (16)..(16): /replace="Ser"
  SITE (1)..(16): /note="Variant residues given in the sequence have no preference with respect to those in the annotations for variant positions"
XAXIRSKSNNYATXYA

SEQ ID NO: 3393 - protein, 9 aa, Artificial Sequence
  source: /note="Description of Artificial Sequence: Synthetic peptide"
YAFSLSWMN

SEQ ID NO: 3394 - protein, 9 aa, Artificial Sequence
  source: /note="Description of Artificial Sequence: Synthetic peptide"
YAFSNYWMS

SEQ ID NO: 3395 - protein, 9 aa, Artificial Sequence
  source: /note="Description of Artificial Sequence: Synthetic peptide"
YAFSRSWMN

SEQ ID NO: 3396 - protein, 9 aa, Artificial Sequence
  source: /note="Description of Artificial Sequence: Synthetic peptide"
YAFSSDWMN

SEQ ID NO: 3397 - protein, 9 aa, Artificial Sequence
  source: /note="Description of Artificial Sequence: Synthetic peptide"
YAFSSEWMN

SEQ ID NO: 3398 - protein, 9 aa, Artificial Sequence
  source: /note="Description of Artificial Sequence: Synthetic peptide"
YAFSSHWMN

SEQ ID NO: 3399 - protein, 9 aa, Artificial Sequence
  source: /note="Description of Artificial Sequence: Synthetic peptide"
YAFSSQWMN

SEQ ID NO: 3400 - protein, 9 aa, Artificial Sequence
  source: /note="Description of Artificial Sequence: Synthetic peptide"
YAFSSSWMN

SEQ ID NO: 3401 - protein, 9 aa, Artificial Sequence
  source: /note="Description of Artificial Sequence: Synthetic peptide"
YAFWSSWMN

SEQ ID NO: 3402 - protein, 9 aa, Artificial Sequence
  source: /note="Description of Artificial Sequence: Synthetic peptide"
  VARIANT (4)..(4): /replace="Trp"
  VARIANT (5)..(5): /replace="Leu" or "Arg"
  VARIANT (6)..(6): /replace="Asp" or "His" or "Gln" or "Glu"
  SITE (1)..(9): /note="Variant residues given in the sequence have no preference with respect to those in the annotations for variant positions"
YAFSSSWMN

SEQ ID NO: 3403 - protein, 9 aa, Artificial Sequence
  source: /note="Description of Artificial Sequence: Synthetic peptide"
YIFTTYWIH

SEQ ID NO: 3404 - protein, 17 aa, Artificial Sequence
  source: /note="Description of Artificial Sequence: Synthetic peptide"
YISGSSSTIYYADSVKG

SEQ ID NO: 3405 - protein, 9 aa, Artificial Sequence
  source: /note="Description of Artificial Sequence: Synthetic peptide"
YPFSNFWIT

SEQ ID NO: 3406 - protein, 9 aa, Artificial Sequence
  source: /note="Description of Artificial Sequence: Synthetic peptide"
YSFTDYNIH

SEQ ID NO: 3407 - protein, 9 aa, Artificial Sequence
  source: /note="Description of Artificial Sequence: Synthetic peptide"
YSFTSNWIG

SEQ ID NO: 3408 - protein, 9 aa, Artificial Sequence
  source: /note="Description of Artificial Sequence: Synthetic peptide"
YSFTTYWIG

SEQ ID NO: 3409 - protein, 9 aa, Artificial Sequence
  source: /note="Description of Artificial Sequence: Synthetic peptide"
YTFSDYYIH

SEQ ID NO: 3410 - protein, 9 aa, Artificial Sequence
  source: /note="Description of Artificial Sequence: Synthetic peptide"
YTFTDYEMH

SEQ ID NO: 3411 - protein, 9 aa, Artificial Sequence
  source: /note="Description of Artificial Sequence: Synthetic peptide"
YTFTDYNIH

SEQ ID NO: 3412 - protein, 9 aa, Artificial Sequence
  source: /note="Description of Artificial Sequence: Synthetic peptide"
YTFTEYTMH

SEQ ID NO: 3413 - protein, 9 aa, Artificial Sequence
  source: /note="Description of Artificial Sequence: Synthetic peptide"
YTFTNYGIS

SEQ ID NO: 3414 - protein, 9 aa, Artificial Sequence
  source: /note="Description of Artificial Sequence: Synthetic peptide"
YTFTSYGIH

SEQ ID NO: 3415 - protein, 9 aa, Artificial Sequence
  source: /note="Description of Artificial Sequence: Synthetic peptide"
YTFTTYWIH

SEQ ID NO: 3416 - protein, 9 aa, Artificial Sequence
  source: /note="Description of Artificial Sequence: Synthetic peptide"
  MOD_RES (5)..(5): Any amino acid
  MOD_RES (7)..(8): Any amino acid
YTFTXYXXH

SEQ ID NO: 3417 - protein, 9 aa, Artificial Sequence
  source: /note="Description of Artificial Sequence: Synthetic peptide"
YTVSRYWMH

SEQ ID NO: 3418 - protein, 9 aa, Artificial Sequence
  source: /note="Description of Artificial Sequence: Synthetic peptide"
  MOD_RES (2)..(2): Any amino acid
  MOD_RES (6)..(6): Any amino acid
  MOD_RES (9)..(9): Any amino acid
YXFSNXWIX

SEQ ID NO: 3419 - protein, 9 aa, Artificial Sequence
  source: /note="Description of Artificial Sequence: Synthetic peptide"
  MOD_RES (2)..(2): Any amino acid
  VARIANT (4)..(4): /replace="Thr"
  VARIANT (5)..(5): /replace="Ser" or "Thr"
  MOD_RES (6)..(6): Any amino acid
  VARIANT (8)..(8): /replace="Met"
  MOD_RES (9)..(9): Any amino acid
  SITE (1)..(9): /note="Variant residues given in the sequence have no preference with respect to those in the annotations for variant positions"
YXFSNXWIX

SEQ ID NO: 3420 - protein, 9 aa, Artificial Sequence
  source: /note="Description of Artificial Sequence: Synthetic peptide"
  VARIANT (2)..(2): /replace="Ser"
  VARIANT (3)..(3): /replace="Val"
  VARIANT (4)..(4): /replace="Ser"
  MOD_RES (5)..(5): Any amino acid
  MOD_RES (7)..(8): Any amino acid
  SITE (1)..(9): /note="Variant residues given in the sequence have no preference with respect to those in the annotations for variant positions"
YTFTXYXXH

SEQ ID NO: 3421 - protein, 7 aa, Artificial Sequence
  source: /note="Description of Artificial Sequence: Synthetic peptide"
FTSSLHS

SEQ ID NO: 3422 - protein, 10 aa, Artificial Sequence
  source: /note="Description of Artificial Sequence: Synthetic peptide"
GYTFTNYGMN

SEQ ID NO: 3423 - protein, 9 aa, Artificial Sequence
  source: /note="Description of Artificial Sequence: Synthetic peptide"
QQYSTVPWT

SEQ ID NO: 3424 - protein, 11 aa, Artificial Sequence
  source: /note="Description of Artificial Sequence: Synthetic peptide"
SASQDISNYLN

SEQ ID NO: 3425 - protein, 17 aa, Artificial Sequence
  source: /note="Description of Artificial Sequence: Synthetic peptide"
WINTYTGEPTYAADFKR

SEQ ID NO: 3426 - protein, 14 aa, Artificial Sequence
  source: /note="Description of Artificial Sequence: Synthetic peptide"
YPHYYGSSHWYFDV

SEQ ID NO: 3427 - protein, 7 aa, Artificial Sequence
  source: /note="Description of Artificial Sequence: Synthetic peptide"
  MOD_RES (6)..(7): Any amino acid
DTYIHXX

SEQ ID NO: 3428 - protein, 16 aa, Artificial Sequence
  source: /note="Description of Artificial Sequence: Synthetic peptide"
  MOD_RES (15)..(16): Any amino acid
EGYYGNYGVYAMDYXX

SEQ ID NO: 3429 - protein, 19 aa, Artificial Sequence
  source: /note="Description of Artificial Sequence: Synthetic peptide"
  MOD_RES (18)..(19): Any amino acid
EIDPSESNTNYNQKFKGXX

SEQ ID NO: 3430 - protein, 14 aa, Artificial Sequence
  source: /note="Description of Artificial Sequence: Synthetic peptide"
  MOD_RES (13)..(14): Any amino acid
GGYDGWDYAIDYXX

SEQ ID NO: 3431 - protein, 9 aa, Artificial Sequence
  source: /note="Description of Artificial Sequence: Synthetic peptide"
  MOD_RES (8)..(9): Any amino acid
GISNRFSXX

SEQ ID NO: 3432 - protein, 13 aa, Artificial Sequence
  source: /note="Description of Artificial Sequence: Synthetic peptide"
  MOD_RES (12)..(13): Any amino acid
KTSQDINKYMAXX

SEQ ID NO: 3433 - protein, 12 aa, Artificial Sequence
  source: /note="Description of Artificial Sequence: Synthetic peptide"
  MOD_RES (10)..(12): Any amino acid
LQGTHQPYTXXX

SEQ ID NO: 3434 - protein, 11 aa, Artificial Sequence
  source: /note="Description of Artificial Sequence: Synthetic peptide"
  MOD_RES (9)..(11): Any amino acid
LQYDNLWTXXX

SEQ ID NO: 3435 - protein, 19 aa, Artificial Sequence
  source: /note="Description of Artificial Sequence: Synthetic peptide"
  MOD_RES (18)..(19): Any amino acid
RIDPANGYTKYDPKFQGXX

SEQ ID NO: 3436 - protein, 18 aa, Artificial Sequence
  source: /note="Description of Artificial Sequence: Synthetic peptide"
  MOD_RES (17)..(18): Any amino acid
RSSQSLAKSYGNTYLSXX

SEQ ID NO: 3437 - protein, 7 aa, Artificial Sequence
  source: /note="Description of Artificial Sequence: Synthetic peptide"
  MOD_RES (6)..(7): Any amino acid
SYWMHXX

SEQ ID NO: 3438 - protein, 9 aa, Artificial Sequence
  source: /note="Description of Artificial Sequence: Synthetic peptide"
  MOD_RES (8)..(9): Any amino acid
YTSALQPXX

SEQ ID NO: 3439 - protein, 7 aa, Artificial Sequence
  source: /note="Description of Artificial Sequence: Synthetic peptide"
DVSNRPS

SEQ ID NO: 3440 - protein, 450 aa, Artificial Sequence
  source: /note="Description of Artificial Sequence: Synthetic polypeptide"
  SITE (1)..(450): /note="A092462 complete heavy chain"
  SITE (1)..(30): /note="A092462 heavy chain framework region 1"
  SITE (1)..(120): /note="A092462 heavy chain variable region"
  SITE (31)..(35): /note="A092462 heavy chain complementarity determining region 1"
  SITE (36)..(49): /note="A092462 heavy chain framework region 2"
  SITE (50)..(66): /note="A092462 heavy chain complementarity determining region 2"
  SITE (67)..(98): /note="A092462 heavy chain framework region 3"
  SITE (99)..(109): /note="A092462 heavy chain complementarity determining region 3"
  SITE (110)..(120): /note="A092462 heavy chain framework region 4"
  SITE (121)..(218): /note="A092462 heavy chain constant domain 1"
  SITE (219)..(233): /note="A092462 hinge region"
  SITE (234)..(450): /note="A092462 heavy chain constant domain 2 and 3"
EVQLLESGGGLVQPGGSLRLSCAASGFTFSSYIMMWVRQAPGKGLEWVSSIYPSGGITFYADTVKGRFTISRDNSKNTLYLQMNSLRAEDTAVYYCARIKLGTVTTVDYWGQGTLVTVSSASTKGPSVFPLAPSSKSTSGGTAALGCLVKDYFPEPVTVSWNSGALTSGVHTFPAVLQSSGLYSLSSVVTVPSSSLGTQTYICNVNHKPSNTKVDKKVEPKSCDKTHTCPPCPAPELLGGPSVFLFPPKPKDTLMISRTPEVTCVVVDVSHEDPEVKFNWYVDGVEVHNAKTKPREEQYNSTYRVVSVLTVLHQDWLNGKEYKCKVSNKALPAPIEKTISKAKGQPREPQVYTLPPSRDELTKNQVSLTCLVKGFYPSDIAVEWESNGQPENNYKTTPPVLDSDGSFFLYSKLTVDKSRWQQGNVFSCSVMHEALHNHYTQKSLSLSPGK

SEQ ID NO: 3441 - protein, 216 aa, Artificial Sequence
  source: /note="Description of Artificial Sequence: Synthetic polypeptide"
  SITE (1)..(216): /note="A092462 complete light chain"
  SITE (1)..(22): /note="A092462 light chain framework region 1"
  SITE (1)..(110): /note="A092462 light chain variable region"
  SITE (23)..(36): /note="A092462 light chain complementarity determining region 1"
  SITE (37)..(51): /note="A092462 light chain framework region 2"
  SITE (52)..(58): /note="A092462 light chain complementarity determining region 2"
  SITE (59)..(90): /note="A092462 light chain framework region 3"
  SITE (91)..(100): /note="A092462 light chain complementarity determining region 3"
  SITE (101)..(110): /note="A092462 light chain framework region 4"
  SITE (111)..(216): /note="A092462 light chain constant domain"
QSALTQPASVSGSPGQSITISCTGTSSDVGGYNYVSWYQQHPGKAPKLMIYDVSNRPSGVSNRFSGSKSGNTASLTISGLQAEDEADYYCSSYTSSSTRVFGTGTKVTVLGQPKANPTVTLFPPSSEELQANKATLVCLISDFYPGAVTVAWKADGSPVKAGVETTKPSKQSNNKYAASSYLSLTPEQWKSHRSYSCQVTHEGSTVEKTVAPTECS

SEQ ID NO: 3442 - protein, 14 aa, Artificial Sequence
  source: /note="Description of Artificial Sequence: Synthetic peptide"
TGTSSDVGGYNYVS

SEQ ID NO: 3443 - protein, 326 aa, Homo sapiens
ASTKGPSVFPLAPCSRSTSESTAALGCLVKDYFPEPVTVSWNSGALTSGVHTFPAVLQSSGLYSLSSVVTVPSSNFGTQTYTCNVDHKPSNTKVDKTVERKCCVECPPCPAPPVAGPSVFLFPPKPKDTLMISRTPEVTCVVVDVSHEDPEVQFNWYVDGVEVHNAKTKPREEQFNSTFRVVSVLTVVHQDWLNGKEYKCKVSNKGLPAPIEKTISKTKGQPREPQVYTLPPSREEMTKNQVSLTCLVKGFYPSDIAVEWESNGQPENNYKTTPPMLDSDGSFFLYSKLTVDKSRWQQGNVFSCSVMHEALHNHYTQKSLSLSPGK

SEQ ID NO: 3444 - protein, 326 aa, Artificial Sequence
  source: /note="Description of Artificial Sequence: Synthetic polypeptide"
ASTKGPSVFPLAPCSRSTSESTAALGCLVKDYFPEPVTVSWNSGALTSGVHTFPAVLQSSGLYSLSSVVTVPSSNFGTQTYTCNVDHKPSNTKVDKTVERKCCVECPPCPAPPVAGPSVFLFPPKPKDTLMISRTPEVTCVVVDVSHEDPEVQFNWYVDGVEVHNAKTKPREEQFNSTFRVVSVLTVVHQDWLNGKEYKCKVSNKGLPAPIEKTISKTKGQPREPQVYTLPPSREEMTKNQVSLTCLVKGFYPSDIAVEWESNGQPENNYKTTPPMLDSDGSFFLYSKLTVDKSRWQQGNVFSCSVMHGALHNHYTQKSLSLSPGK

SEQ ID NO: 3445 - protein, 326 aa, Artificial Sequence
  source: /note="Description of Artificial Sequence: Synthetic polypeptide"
ASTKGPSVFPLAPCSRSTSESTAALGCLVKDYFPEPVTVSWNSGALTSGVHTFPAVLQSSGLYSLSSVVTVPSSNFGTQTYTCNVDHKPSNTKVDKTVERKCCVECPPCPAPPVAGPSVFLFPPKPKDTLMISRTPEVTCVVVDVSHEDPEVQFNWYVDGVEVHNAKTKPREEQFNSTFRVVSVLTVVHQDWLNGKEYKCKVSNKGLPSSIEKTISKTKGQPREPQVYTLPPSREEMTKNQVSLTCLVKGFYPSDIAVEWESNGQPENNYKTTPPMLDSDGSFFLYSKLTVDKSRWQQGNVFSCSVMHGALHNHYTQKSLSLSPGK

SEQ ID NO: 3446 - protein, 330 aa, Artificial Sequence
  source: /note="Description of Artificial Sequence: Synthetic polypeptide"
ASTKGPSVFPLAPSSKSTSGGTAALGCLVKDYFPEPVTVSWNSGALTSGVHTFPAVLQSSGLYSLSSVVTVPSSSLGTQTYICNVNHKPSNTKVDKKVEPKSCDKTHTCPPCPAPEAAGGPSVFLFPPKPKDTLMISRTPEVTCVVVDVSHEDPEVKFNWYVDGVEVHNAKTKPREEQYNSTYRVVSVLTVLHQDWLNGKEYKCKVSNKALPASIEKTISKAKGQPREPQVYTLPPSRDELTKNQVSLTCLVKGFYPSDIAVEWESNGQPENNYKTTPPVLDSDGSFFLYSKLTVDKSRWQQGNVFSCSVMHEALHNHYTQKSLSLSPGK

SEQ ID NO: 3447 - protein, 330 aa, Artificial Sequence
  source: /note="Description of Artificial Sequence: Synthetic polypeptide"
ASTKGPSVFPLAPSSKSTSGGTAALGCLVKDYFPEPVTVSWNSGALTSGVHTFPAVLQSSGLYSLSSVVTVPSSSLGTQTYICNVNHKPSNTKVDKKVEPKSCDKTHTCPPCPAPEAAGGPSVFLFPPKPKDTLMISRTPEVTCVVVDVSHEDPEVKFNWYVDGVEVHNAKTKPREEQYNSTYRVVSVLTVLHQDWLNGKEYKCKVSNKALPASIEKTISKAKGQPREPQVYTLPPSRDELTKNQVSLTCLVKGFYPSDIAVEWESNGQPENNYKTTPPVLDSDGSFFLYSKLTVDKSRWQQGNVFSCSVMHGALHNHYTQKSLSLSPGK

SEQ ID NO: 3448 - protein, 330 aa, Artificial Sequence
  source: /note="Description of Artificial Sequence: Synthetic polypeptide"
ASTKGPSVFPLAPSSKSTSGGTAALGCLVKDYFPEPVTVSWNSGALTSGVHTFPAVLQSSGLYSLSSVVTVPSSSLGTQTYICNVNHKPSNTKVDKKVEPKSCDKTHTCPPCPAPELLGGPSVFLFPPKPKDTLMISRTPEVTCVVVDVSHEDPEVKFNWYVDGVEVHNAKTKPREEQYNSTYRVVSVLTVLHQDWLNGKEYKCAVSNKALPAPIEKTISKAKGQPREPQVYTLPPSRDELTKNQVSLTCLVKGFYPSDIAVEWESNGQPENNYKTTPPVLDSDGSFFLYSKLTVDKSRWQQGNVFSCSVMHGALHNHYTQKSLSLSPGK

SEQ ID NO: 3449 - protein, 330 aa, Artificial Sequence
  source: /note="Description of Artificial Sequence: Synthetic polypeptide"
ASTKGPSVFPLAPSSKSTSGGTAALGCLVKDYFPEPVTVSWNSGALTSGVHTFPAVLQSSGLYSLSSVVTVPSSSLGTQTYICNVNHKPSNTKVDKKVEPKSCDKTHTCPPCPAPELLGGPSVFLFPPKPKDTLMISRTPEVTCVVVDVSHEDPEVKFNWYVDGVEVHNAKTKPREEQYNSTYRVVSVLTVLHQDWLNGKEYKCAVSNKALPASIEKTISKAKGQPREPQVYTLPPSRDELTKNQVSLTCLVKGFYPSDIAVEWESNGQPENNYKTTPPVLDSDGSFFLYSKLTVDKSRWQQGNVFSCSVMHGALHNHYTQKSLSLSPGK

SEQ ID NO: 3450 - protein, 330 aa, Homo sapiens [sequence omitted]

SEQ ID NO: 3451 - protein, 330 aa, Artificial Sequence
  source: /note="Description of Artificial Sequence: Synthetic polypeptide"
ASTKGPSVFPLAPSSKSTSGGTAALGCLVKDYFPEPVTVSWNSGALTSGVHTFPAVLQSSGLYSLSSVVTVPSSSLGTQTYICNVNHKPSNTKVDKKVEPKSCDKTHTCPPCPAPELLGGPSVFLFPPKPKDTLMISRTPEVTCVVVDVSHEDPEVKFNWYVDGVEVHNAKTKPREEQYNSTYRVVSVLTVLHQDWLNGKEYKCKVSNKALPAPIEKTISKAKGQPREPQVYTLPPSRDELTKNQVSLTCLVKGFYPSDIAVEWESNGQPENNYKTTPPVLDSDGSFFLYSKLTVDKSRWQQGNVFSCSVMHGALHNHYTQKSLSLSPGK

SEQ ID NO: 3452 - protein, 330 aa, Artificial Sequence
  source: /note="Description of Artificial Sequence: Synthetic polypeptide"
ASTKGPSVFPLAPSSKSTSGGTAALGCLVKDYFPEPVTVSWNSGALTSGVHTFPAVLQSSGLYSLSSVVTVPSSSLGTQTYICNVNHKPSNTKVDKKVEPKSCDKTHTCPPCPAPELLGGPSVFLFPPKPKDTLMISRTPEVTCVVVDVSHEDPEVKFNWYVDGVEVHNAKTKPREEQYNSTYRVVSVLTVLHQDWLNGKEYKCKVSNKALPASIEKTISKAKGQPREPQVYTLPPSRDELTKNQVSLTCLVKGFYPSDIAVEWESNGQPENNYKTTPPVLDSDGSFFLYSKLTVDKSRWQQGNVFSCSVMHGALHNHYTQKSLSLSPGK

SEQ ID NO: 3453 - protein, 330 aa, Artificial Sequence
  source: /note="Description of Artificial Sequence: Synthetic polypeptide"
ASTKGPSVFPLAPSSKSTSGGTAALGCLVKDYFPEPVTVSWNSGALTSGVHTFPAVLQSSGLYSLSSVVTVPSSSLGTQTYICNVNHKPSNTKVDKKVEPKSCDKTHTCPPCPAPELLGGPSVFLFPPKPKDTLMISRTPEVTCVVVDVSHEDPEVKFNWYVDGVEVHNAKTKPREEQYNSTYRVVSVLTVLHQDWLNGKEYKCKVSNKALPSSIEKTISKAKGQPREPQVYTLPPSRDELTKNQVSLTCLVKGFYPSDIAVEWESNGQPENNYKTTPPVLDSDGSFFLYSKLTVDKSRWQQGNVFSCSVMHGALHNHYTQKSLSLSPGK

SEQ ID NO: 3454 - protein, 228 aa, Artificial Sequence
  source: /note="Description of Artificial Sequence: Synthetic polypeptide"
ESKYGPPCPSCPAPEFLGGPSVFLFPPKPKDTLMISRTPEVTCVVVDVSQEDPEVQFNWYVDGVEVHNAKTKPREEQFNSTYRVVSVLTVLHQDWLNGKEYKCKVSNKGLPSSIEKTISKAKGQPREPQVYTLPPSQEEMTKNQVSLTCLVKGFYPSDIAVEWESNGQPENNYKTTPPVLDSDGSFFLYSRLTVDKSRWQEGNVFSCSVMHEALHNHYTQKSLSLSLG

SEQ ID NO: 3455 - protein, 24 aa, Artificial Sequence
  source: /note="Description of Artificial Sequence: Synthetic peptide"
CDIKMTQSPSSMYESLGERVTITC

SEQ ID NO: 3456 - protein, 23 aa, Artificial Sequence
  source: /note="Description of Artificial Sequence: Synthetic peptide"
DFQIQQSLASLVVSMGQRAAISF

SEQ ID NO: 3457 - protein, 23 aa, Artificial Sequence
  source: /note="Description of Artificial Sequence: Synthetic peptide"
DIQLTQSPSSLSASVGDRVTITC

SEQ ID NO: 3458 - protein, 23 aa, Artificial Sequence
  source: /note="Description of Artificial Sequence: Synthetic peptide"
DIQLTQSPSSVSASVGDRVTITC

SEQ ID NO: 3459 - protein, 23 aa, Artificial Sequence
  source: /note="Description of Artificial Sequence: Synthetic peptide"
DIQMTQSPSSLSASVGDRVTITC

SEQ ID NO: 3460 - protein, 23 aa, Artificial Sequence
  source: /note="Description of Artificial Sequence: Synthetic peptide"
DIQMTQSPSSVSASVGDRVTITC

SEQ ID NO: 3461 - protein, 23 aa, Artificial Sequence
  source: /note="Description of Artificial Sequence: Synthetic peptide"
DIQMTQSPSTLSASVGDRVTITC

SEQ ID NO: 3462 - protein, 23 aa, Artificial Sequence
  source: /note="Description of Artificial Sequence: Synthetic peptide"
DIVLTQSPASLAVSLGQRATISY

SEQ ID NO: 3463 - protein, 23 aa, Artificial Sequence
  source: /note="Description of Artificial Sequence: Synthetic peptide"
DIVLTQSPASLAVSLGQRATMSC

SEQ ID NO: 3464 - protein, 23 aa, Artificial Sequence
  source: /note="Description of Artificial Sequence: Synthetic peptide"
DIVLTQSPDSLAVSLGERATINC

SEQ ID NO: 3465 - protein, 23 aa, Artificial Sequence
  source: /note="Description of Artificial Sequence: Synthetic peptide"
DIVMTQSPDSLAVSLGERATINC

SEQ ID NO: 3466 - protein, 23 aa, Artificial Sequence
  source: /note="Description of Artificial Sequence: Synthetic peptide"
DIVMTQSPLSLPVTPGEPASISC

SEQ ID NO: 3467 - protein, 23 aa, Artificial Sequence
  source: /note="Description of Artificial Sequence: Synthetic peptide"
EIVLTQSPATLSLSPGERATLSC

SEQ ID NO: 3468 - protein, 23 aa, Artificial Sequence
  source: /note="Description of Artificial Sequence: Synthetic peptide"
EIVLTQSPATLSVSPGERATLSC

SEQ ID NO: 3469 - protein, 23 aa, Artificial Sequence
  source: /note="Description of Artificial Sequence: Synthetic peptide"
EIVLTQSPGTLSLSPGERATLSC

SEQ ID NO: 3470 - protein, 23 aa, Artificial Sequence
  source: /note="Description of Artificial Sequence: Synthetic peptide"
EIVMTQSPATLSLSPGERATLSC

SEQ ID NO: 3471 - protein, 23 aa, Artificial Sequence
  source: /note="Description of Artificial Sequence: Synthetic peptide"
EIVMTQSPATLSVSPGERATLSC

SEQ ID NO: 3472 - protein, 35 aa, Artificial Sequence
  source: /note="Description of Artificial Sequence: Synthetic polypeptide"
EKFKGKATLTTDKSSNTTYMQLSRLTSEDSAVYFC

SEQ ID NO: 3473 - protein, 35 aa, Artificial Sequence
  source: /note="Description of Artificial Sequence: Synthetic polypeptide"
EKFKNKATLTVDTSSSTAYMQLSSLTSEDSAVYFC

SEQ ID NO: 3474 - protein, 35 aa, Artificial Sequence
  source: /note="Description of Artificial Sequence: Synthetic polypeptide"
ESVKGRFTISRDDSKSRVYLQMNNLRGEDTGFYYC

SEQ ID NO: 3475 - protein, 22 aa, Artificial Sequence
  source: /note="Description of Artificial Sequence: Synthetic peptide"
EVKLEESGGGLVQPGGSMKLSC

SEQ ID NO: 3476 - protein, 26 aa, Artificial Sequence
  source: /note="Description of Artificial Sequence: Synthetic peptide"
EVKLEESGGGLVQPGGSMKLSCVGSG

SEQ ID NO: 3477 - protein, 26 aa, Artificial Sequence
  source: /note="Description of Artificial Sequence: Synthetic peptide"
EVQLLESGGGLVQPGGSLRLSCAASG

SEQ ID NO: 3478 - protein, 22 aa, Artificial Sequence
  source: /note="Description of Artificial Sequence: Synthetic peptide"
EVQLQQSGPELVKPGASVKISC

SEQ ID NO: 3479 - protein, 26 aa, Artificial Sequence
  source: /note="Description of Artificial Sequence: Synthetic peptide"
EVQLQQSGPELVKPGASVKISCKASG

SEQ ID NO: 3480 - protein, 26 aa, Artificial Sequence
  source: /note="Description of Artificial Sequence: Synthetic peptide"
EVQLVESGGGLVKPGGSLRLSCAASG

SEQ ID NO: 3481 - protein, 26 aa, Artificial Sequence
  source: /note="Description of Artificial Sequence: Synthetic peptide"
EVQLVESGGGLVQPGGSLRLSCAASG

SEQ ID NO: 3482 - protein, 10 aa, Artificial Sequence
  source: /note="Description of Artificial Sequence: Synthetic peptide"
FGAGTKLELK

SEQ ID NO: 3483 - protein, 10 aa, Artificial Sequence
  source: /note="Description of Artificial Sequence: Synthetic peptide"
FGGGTKLEIK

SEQ ID NO: 3484 - protein, 10 aa, Artificial Sequence
  source: /note="Description of Artificial Sequence: Synthetic peptide"
FGGGTKLEMK

SEQ ID NO: 3485 - protein, 10 aa, Artificial Sequence
  source: /note="Description of Artificial Sequence: Synthetic peptide"
FGGGTKVEIK

SEQ ID NO: 3486 - protein, 10 aa, Artificial Sequence
  source: /note="Description of Artificial Sequence: Synthetic peptide"
FGGGTKVTVL

SEQ ID NO: 3487 - protein, 20 aa, Artificial Sequence
  source: /note="Description of Artificial Sequence: Synthetic peptide"
  VARIANT (10)..(10): /replace="Glu"
  MOD_RES (11)..(20): Any amino acid
  SITE (1)..(20): /note="Variant residues given in the sequence have no preference with respect to those in the annotations for variant positions"
FGQGTKLEIKXXXXXXXXXX

SEQ ID NO: 3488 - protein, 32 aa, Artificial Sequence
  source: /note="Description of Artificial Sequence: Synthetic polypeptide"
GIPARFSGSGSGTDFTLTISSLEPEDFAVYYC

SEQ ID NO: 3489 - protein, 32 aa, Artificial Sequence
  source: /note="Description of Artificial Sequence: Synthetic polypeptide"
GIPARFSGSGSGTEFTLTISSLQSEDFAVYYC

SEQ ID NO: 3490 - protein, 32 aa, Artificial Sequence
  source: /note="Description of Artificial Sequence: Synthetic polypeptide"
GIPDRFSGSGSGTDFTLTISRLEPEDFAVYYC

SEQ ID NO: 3491 - protein, 32 aa, Artificial Sequence
  source: /note="Description of Artificial Sequence: Synthetic polypeptide"
GIPDRFSGSSSGADRYLSISNIQPEDEAIYIC

SEQ ID NO: 3492 - protein, 32 aa, Artificial Sequence
  source: /note="Description of Artificial Sequence: Synthetic polypeptide"
GVPARFSGSGSGTDFTLNIHPVEEEDTATYYC

SEQ ID NO: 3493 - protein, 32 aa, Artificial Sequence
  source: /note="Description of Artificial Sequence: Synthetic polypeptide"
  MOD_RES (11)..(11): Any amino acid
GVPARFSGSGXGTDFTLNIHPVEEEDSATYYC

SEQ ID NO: 3494 - protein, 28 aa, Artificial Sequence
  source: /note="Description of Artificial Sequence: Synthetic peptide"
  MOD_RES (11)..(11): Any amino acid
GVPARFSGSGXWDRLHPQHPSCGGGGCC

SEQ ID NO: 3495 - protein, 32 aa, Artificial Sequence
  source: /note="Description of Artificial Sequence: Synthetic polypeptide"
GVPDRFSGSGSGTDFTLKISRVEAEDVGVYYC

SEQ ID NO: 3496 - protein, 32 aa, Artificial Sequence
  source: /note="Description of Artificial Sequence: Synthetic polypeptide"
GVPDRFSGSGSGTDFTLTISRLEPEDFAVYYC

SEQ ID NO: 3497 - protein, 32 aa, Artificial Sequence
  source: /note="Description of Artificial Sequence: Synthetic polypeptide"
GVPDRFSGSGSGTDFTLTISSLQAEDVAVYYC

SEQ ID NO: 3498 - protein, 32 aa, Artificial Sequence
  source: /note="Description of Artificial Sequence: Synthetic polypeptide"
GVPSRFSGSGSGQDYSLTISSLEYEDMGIYHC

SEQ ID NO: 3499 - protein, 32 aa, Artificial Sequence
  source: /note="Description of Artificial Sequence: Synthetic polypeptide"
GVPSRFSGSGSGTDFTFTISSLQPEDIATYYC

SEQ ID NO: 3500 - protein, 32 aa, Artificial Sequence
  source: /note="Description of Artificial Sequence: Synthetic polypeptide"
GVPSRFSGSGSGTDFTLTISSLQPEDFATYYC

SEQ ID NO: 3501 - protein, 32 aa, Artificial Sequence
  source: /note="Description of Artificial Sequence: Synthetic polypeptide"
GVPSRFSGSGSGTEFTLTISSLQPDDFATYYC

SEQ ID NO: 3502 - protein, 32 aa, Artificial Sequence
  source: /note="Description of Artificial Sequence: Synthetic polypeptide"
GVPSRFSGSRSGTDFTFTISSLQPEDIATYYC

SEQ ID NO: 3503 - protein, 32 aa, Artificial Sequence
  source: /note="Description of Artificial Sequence: Synthetic polypeptide"
  MOD_RES (9)..(9): Any amino acid
GVRARFSGXGWGTDFTLNIHPVEEEDGATYYC

SEQ ID NO: 3504 - protein, 18 aa, Artificial Sequence
  source: /note="Description of Artificial Sequence: Synthetic peptide"
PELVKPGASVKISCKASG

SEQ ID NO: 3505 - protein, 35 aa, Artificial Sequence
  source: /note="Description of Artificial Sequence: Synthetic polypeptide"
QKFKNKATLTVDNSSSTAYMELRSLTSEDSAVYYC

SEQ ID NO: 3506 - protein, 26 aa, Artificial Sequence
  source: /note="Description of Artificial Sequence: Synthetic peptide"
QLQLQESGPGLVKPSETLSLTCTVSG

SEQ ID NO: 3507 - protein, 22 aa, Artificial Sequence
  source: /note="Description of Artificial Sequence: Synthetic peptide"
QLVLTQSSSASFSLGASAKLTC

SEQ ID NO: 3508 - protein, 26 aa, Artificial Sequence
  source: /note="Description of Artificial Sequence: Synthetic peptide"
QVQLQESGPGLVKPSETLSLTCAVSG

SEQ ID NO: 3509 - protein, 26 aa, Artificial Sequence
  source: /note="Description of Artificial Sequence: Synthetic peptide"
QVQLQESGPGLVKPSQTLSLTCTVSG

SEQ ID NO: 3510 - protein, 26 aa, Artificial Sequence
  source: /note="Description of Artificial Sequence: Synthetic peptide"
QVQLQQSGAELVKPGASVKLSCKASG

SEQ ID NO: 3511 - protein, 26 aa, Artificial Sequence
  source: /note="Description of Artificial Sequence: Synthetic peptide"
QVQLQQSGSELVRPGASVKLSCKASG

SEQ ID NO: 3512 - protein, 26 aa, Artificial Sequence
  source: /note="Description of Artificial Sequence: Synthetic peptide"
QVQLVESGGGVVQPGRSLRLSCAASG

SEQ ID NO: 3513 - protein, 26 aa, Artificial Sequence
  source: /note="Description of Artificial Sequence: Synthetic peptide"
QVQLVQSGAEVKKPGASVKVSCKASG

SEQ ID NO: 3514 - protein, 26 aa, Artificial Sequence
  source: /note="Description of Artificial Sequence: Synthetic peptide"
QVQLVQSGAEVKKPGSSVKVSCKASG

SEQ ID NO: 3515 - protein, 30 aa, Artificial Sequence
  source: /note="Description of Artificial Sequence: Synthetic polypeptide"
RFTISRDNAKNSLYLQMNSLRAEDTAVYYC

SEQ ID NO: 3516 - protein, 30 aa, Artificial Sequence
  source: /note="Description of Artificial Sequence: Synthetic polypeptide"
RFTISRDNSKNTLYLQMNSLRAEDTAVYYC

SEQ ID NO: 3517 - protein, 30 aa, Artificial Sequence
  source: /note="Description of Artificial Sequence: Synthetic polypeptide"
RVTISVDTSKNQFSLKLSSVTAADTAVYYC

SEQ ID NO: 3518 - protein, 30 aa, Artificial Sequence
  source: /note="Description of Artificial Sequence: Synthetic polypeptide"
RVTITADESTSTAYMELSSLRSEDTAVYYC

SEQ ID NO: 3519 - protein, 30 aa, Artificial Sequence
  source: /note="Description of Artificial Sequence: Synthetic polypeptide"
RVTMTRDTSISTAYMELSRLRSDDTAVYYC

SEQ ID NO: 3520 - protein, 30 aa, Artificial Sequence
  source: /note="Description of Artificial Sequence: Synthetic polypeptide"
RVTMTRDTSTSTVYMELSSLRSEDTAVYYC

SEQ ID NO: 3521 - protein, 26 aa, Artificial Sequence
  source: /note="Description of Artificial Sequence: Synthetic peptide"
STGDIVLTQSPASLAVSLGQRATMSC

SEQ ID NO: 3522 - protein, 11 aa, Artificial Sequence
  source: /note="Description of Artificial Sequence: Synthetic peptide"
WGGGTLVTVSS

SEQ ID NO: 3523 - protein, 11 aa, Artificial Sequence
  source: /note="Description of Artificial Sequence: Synthetic peptide"
WGHGTTLTVSS

SEQ ID NO: 3524 - protein, 11 aa, Artificial Sequence
  source: /note="Description of Artificial Sequence: Synthetic peptide"
WGKGTTVTVSS

SEQ ID NO: 3525 - protein, 11 aa, Artificial Sequence
  source: /note="Description of Artificial Sequence: Synthetic peptide"
WGQGTLVTVSA

SEQ ID NO: 3526 - protein, 11 aa, Artificial Sequence
  source: /note="Description of Artificial Sequence: Synthetic peptide"
WGQGTLVTVSS

SEQ ID NO: 3527 - protein, 11 aa, Artificial Sequence
  source: /note="Description of Artificial Sequence: Synthetic peptide"
WGQGTMVTVSS

SEQ ID NO: 3528 - protein, 11 aa, Artificial Sequence
  source: /note="Description of Artificial Sequence: Synthetic peptide"
WGQGTSVTVSS

SEQ ID NO: 3529 - protein, 11 aa, Artificial Sequence
  source: /note="Description of Artificial Sequence: Synthetic peptide"
WGQGTTLTVSS

SEQ ID NO: 3530 - protein, 11 aa, Artificial Sequence
  source: /note="Description of Artificial Sequence: Synthetic peptide"
WGQGTTVTVSS

SEQ ID NO: 3531 - protein, 11 aa, Artificial Sequence
  source: /note="Description of Artificial Sequence: Synthetic peptide"
WGRGTLVTVSS

SEQ ID NO: 3532 - protein, 14 aa, Artificial Sequence
  source: /note="Description of Artificial Sequence: Synthetic peptide"
WIRQHPGKGLEWIG

SEQ ID NO: 3533 - protein, 14 aa, Artificial Sequence
  source: /note="Description of Artificial Sequence: Synthetic peptide"
WIRQPPGKGLEWIG

SEQ ID NO: 3534 - protein, 15 aa, Artificial Sequence
  source: /note="Description of Artificial Sequence: Synthetic peptide"
WLQQKPGKSPKTLIY

SEQ ID NO: 3535 - protein, 15 aa, Artificial Sequence
  source: /note="Description of Artificial Sequence: Synthetic peptide"
WNQQKPGQPPRLLIY

SEQ ID NO: 3536 - protein, 12 aa, Artificial Sequence
  source: /note="Description of Artificial Sequence: Synthetic peptide"
WVKLSHGKSLEW

SEQ ID NO: 3537 - protein, 12 aa, Artificial Sequence
  source: /note="Description of Artificial Sequence: Synthetic peptide"
WVKQRPGQGLEW

SEQ ID NO: 3538 - protein, 14 aa, Artificial Sequence
  source: /note="Description of Artificial Sequence: Synthetic peptide"
WVRQAPGKGLEWVA

SEQ ID NO: 3539 - protein, 14 aa, Artificial Sequence
  source: /note="Description of Artificial Sequence: Synthetic peptide"
WVRQAPGKGLEWVS

SEQ ID NO: 3540 - protein, 14 aa, Artificial Sequence
  source: /note="Description of Artificial Sequence: Synthetic peptide"
WVRQAPGQGLEWMG

SEQ ID NO: 3541 - protein, 12 aa, Artificial Sequence
  source: /note="Description of Artificial Sequence: Synthetic peptide"
WVRQRPEQGLEW

SEQ ID NO: 3542 - protein, 12 aa, Artificial Sequence
  source: /note="Description of Artificial Sequence: Synthetic peptide"
WVRQSPEKGLEW

SEQ ID NO: 3543 - protein, 15 aa, Artificial Sequence
  source: /note="Description of Artificial Sequence: Synthetic peptide"
WYLQKPGQSPQLLIY

SEQ ID NO: 3544 - protein, 15 aa, Artificial Sequence
  source: /note="Description of Artificial Sequence: Synthetic peptide"
WYQQKPGKAPKLLIY

SEQ ID NO: 3545 - protein, 15 aa, Artificial Sequence
  source: /note="Description of Artificial Sequence: Synthetic peptide"
WYQQKPGQAPRLLIY

SEQ ID NO: 3546 - protein, 15 aa, Artificial Sequence
  source: /note="Description of Artificial Sequence: Synthetic peptide"
WYQQKPGQPPKLIIY

SEQ ID NO: 3547 - protein, 15 aa, Artificial Sequence
  source: /note="Description of Artificial Sequence: Synthetic peptide"
WYQQKPGQPPKLLIK

SEQ ID NO: 3548 - protein, 15 aa, Artificial Sequence
  source: /note="Description of Artificial Sequence: Synthetic peptide"
WYQQKPGQPPKLLIY

SEQ ID NO: 3549 - protein, 13 aa, Artificial Sequence
  source: /note="Description of Artificial Sequence: Synthetic peptide"
WYQQQPLKPPKYV

SEQ ID NO: 3550 - protein, 20 aa, Artificial Sequence
  source: /note="Description of Artificial Sequence: Synthetic peptide"
  MOD_RES (1)..(1): Any amino acid
XTQSLASLAVSLGQRATMSC

SEQ ID NO: 3551 - protein, 23 aa, Artificial Sequence
  source: /note="Description of Artificial Sequence: Synthetic peptide"
DIQMTQSQKFMSTSVGDRVSVTC

SEQ ID NO: 3552 - protein, 23 aa, Artificial Sequence
  source: /note="Description of Artificial Sequence: Synthetic peptide"
DIVLTQSPTLMSASPGEKVTMTC

SEQ ID NO: 3553 - protein, 23 aa, Artificial Sequence
  source: /note="Description of Artificial Sequence: Synthetic peptide"
DIVMIQSQKFMSTSVGDRVSVTC

SEQ ID NO: 3554 - protein, 23 aa, Artificial Sequence
  source: /note="Description of Artificial Sequence: Synthetic peptide"
DIVMTQSQKFMSTSVGDRVSVTC

SEQ ID NO: 3555 - protein, 23 aa, Artificial Sequence
  source: /note="Description of Artificial Sequence: Synthetic peptide"
DVLMTQTPLSLLVSLGDQASISC

SEQ ID NO: 3556 - protein, 23 aa, Artificial Sequence
  source: /note="Description of Artificial Sequence: Synthetic peptide"
DVLMTQTPLSLPVSLGDQASISC

SEQ ID NO: 3557 - protein, 25 aa, Artificial Sequence
  source: /note="Description of Artificial Sequence: Synthetic peptide"
EIQLQQSGPELVKPGASVKVSCKAS

SEQ ID NO: 3558 - protein, 25 aa, Artificial Sequence
  source: /note="Description of Artificial Sequence: Synthetic peptide"
EVQLQQSGPELVKPGASVKVSCKAS

SEQ ID NO: 3559 - protein, 11 aa, Artificial Sequence
  source: /note="Description of Artificial Sequence: Synthetic peptide"
FGGGTKLTVLG

SEQ ID NO: 3560 - protein, 10 aa, Artificial Sequence
  source: /note="Description of Artificial Sequence: Synthetic peptide"
FGSGTKLEIK

SEQ ID NO: 3561 - protein, 32 aa, Artificial Sequence
  source: /note="Description of Artificial Sequence: Synthetic polypeptide"
GVPARFSGSGSGTSYSLTISSMEAEDAATYYC

SEQ ID NO: 3562 - protein, 32 aa, Artificial Sequence
  source: /note="Description of Artificial Sequence: Synthetic polypeptide"
GVPARFSGSLIGDKAALTITGAQTEDEAIYFC

SEQ ID NO: 3563 - protein, 32 aa, Artificial Sequence
  source: /note="Description of Artificial Sequence: Synthetic polypeptide"
GVPDRFSGCGSGTDFTLKISRVEPEDLGVYYC

SEQ ID NO: 3564 - protein, 32 aa, Artificial Sequence
  source: /note="Description of Artificial Sequence: Synthetic polypeptide"
GVPDRFSGSGSGTDFTLKISRVEAEDLGVYYC

SEQ ID NO: 3565 - protein, 32 aa, Artificial Sequence
  source: /note="Description of Artificial Sequence: Synthetic polypeptide"
GVPDRFTGSGSGTDFTLNISNVQSEDLAEYFC

SEQ ID NO: 3566 - protein, 32 aa, Artificial Sequence
  source: /note="Description of Artificial Sequence: Synthetic polypeptide"
GVPDRFTGSGSGTDFTLTISNVQSEDLAEYFC

SEQ ID NO: 3567 - protein, 32 aa, Artificial Sequence
  source: /note="Description of Artificial Sequence: Synthetic polypeptide"
KATLTADKSSSTVYMELSGLTSEDSAVYFCAR

SEQ ID NO: 3568 - protein, 32 aa, Artificial Sequence
  source: /note="Description of Artificial Sequence: Synthetic polypeptide"
KATLTADKSSSTVYMELSRLTSEDSAVYFCAG

SEQ ID NO: 3569 - protein, 32 aa, Artificial Sequence
  source: /note="Description of Artificial Sequence: Synthetic polypeptide"
KATLTADKSSSTVYMELSRLTSEDSAVYFCAR

SEQ ID NO: 3570 - protein, 32 aa, Artificial Sequence
  source: /note="Description of Artificial Sequence: Synthetic polypeptide"
KATLTADKSSSTVYMELSRLTSEDSAVYFCAY

SEQ ID NO: 3571 - protein, 32 aa, Artificial Sequence
  source: /note="Description of Artificial Sequence: Synthetic polypeptide"
KATLTAVKSSSTVYMEFSRLTSEDSAVYFCAR

SEQ ID NO: 3572 - protein, 32 aa, Artificial Sequence
  source: /note="Description of Artificial Sequence: Synthetic polypeptide"
KATLTVDKSSSTAFMHLNSLTSEDAAVYYCAT

SEQ ID NO: 3573 - protein, 32 aa, Artificial Sequence
  source: /note="Description of Artificial Sequence: Synthetic polypeptide"
KATLTVDKSSSTAFMHLNSLTSEDSAIYYCAL

SEQ ID NO: 3574 - protein, 32 aa, Artificial Sequence
  source: /note="Description of Artificial Sequence: Synthetic polypeptide"
KATLTVDKSSSTAFMHLNSLTSEDSAVFYCAF

SEQ ID NO: 3575 - protein, 32 aa, Artificial Sequence
  source: /note="Description of Artificial Sequence: Synthetic polypeptide"
KATLTVDKSSSTAFMHLNSLTSEDSAVYYCAF

SEQ ID NO: 3576 - protein, 32 aa, Artificial Sequence
  source: /note="Description of Artificial Sequence: Synthetic polypeptide"
KATLTVDKSSSTAFMLLNSLTSEDSAVYYCAL

SEQ ID NO: 3577 - protein, 32 aa, Artificial Sequence
  source: /note="Description of Artificial Sequence: Synthetic polypeptide"
KATLTVDKSSSTAYMHLNSLTSEDSAVYYCAM

SEQ ID NO: 3578 - protein, 22 aa, Artificial Sequence
  source: /note="Description of Artificial Sequence: Synthetic peptide"
QAVVTQESALTTSPGETVTLTC

SEQ ID NO: 3579 - protein, 25 aa, Artificial Sequence
  source: /note="Description of Artificial Sequence: Synthetic peptide"
QVQLQQSGAELVKPGASVKLSCKAS

SEQ ID NO: 3580 - protein, 25 aa, Artificial Sequence
  source: /note="Description of Artificial Sequence: Synthetic peptide"
QVQLQQSGGGLVKPGTSVKLSCKAS

SEQ ID NO: 3581 - protein, 25 aa, Artificial Sequence
  source: /note="Description of Artificial Sequence: Synthetic peptide"
QVQLQQSGPELVEPGASVKVSCKAS

SEQ ID NO: 3582 - protein, 25 aa, Artificial Sequence
  source: /note="Description of Artificial Sequence: Synthetic peptide"
QVQLQQSGPELVKPGASVKVSCKAS

SEQ ID NO: 3583 - protein, 32 aa, Artificial Sequence
  source: /note="Description of Artificial Sequence: Synthetic polypeptide"
RATLTVDKSSSTAHMHLNSLTSEDSAVYYCVF

SEQ ID NO: 3584 - protein, 11 aa, Artificial Sequence
  source: /note="Description of Artificial Sequence: Synthetic peptide"
WGQGSLVAVSA

SEQ ID NO: 3585 - protein, 14 aa, Artificial Sequence
  source: /note="Description of Artificial Sequence: Synthetic peptide"
WVKQRSGQGLEWIG

SEQ ID NO: 3586 - protein, 14 aa, Artificial Sequence
  source: /note="Description of Artificial Sequence: Synthetic peptide"
WVKQSHGKSFEWIG

SEQ ID NO: 3587 - protein, 14 aa, Artificial Sequence
  source: /note="Description of Artificial Sequence: Synthetic peptide"
WVKQSHGKSLECFG

SEQ ID NO: 3588 - protein, 14 aa, Artificial Sequence
  source: /note="Description of Artificial Sequence: Synthetic peptide"
WVKQSHGKSLEWIG

SEQ ID NO: 3589 - protein, 15 aa, Artificial Sequence
  source: /note="Description of Artificial Sequence: Synthetic peptide"
WVQEKPDHLFTGLIG

SEQ ID NO: 3590 - protein, 15 aa, Artificial Sequence
  source: /note="Description of Artificial Sequence: Synthetic peptide"
WYLQKPGQSPKLLIY

SEQ ID NO: 3591 - protein, 15 aa, Artificial Sequence
  source: /note="Description of Artificial Sequence: Synthetic peptide"
WYQQKPGQSPKALIY

SEQ ID NO: 3592 - protein, 15 aa, Artificial Sequence
  source: /note="Description of Artificial Sequence: Synthetic peptide"
WYQQKPGQSPKSLIY

SEQ ID NO: 3593 - protein, 15 aa, Artificial Sequence
  source: /note="Description of Artificial Sequence: Synthetic peptide"
WYQQKPRSSPKPLIY

SEQ ID NO: 3594 - protein, 15 aa, Artificial Sequence
  source: /note="Description of Artificial Sequence: Synthetic peptide"
WYRQKPGQSPKALIY

SEQ ID NO: 3595 - protein, 35 aa, Artificial Sequence
  source: /note="Description of Artificial Sequence: Synthetic polypeptide"
DIFKGRFTISRDDAKNALYLQMSSLRSEDTALYYC

SEQ ID NO: 3596 - protein, 23 aa, Artificial Sequence
  source: /note="Description of Artificial Sequence: Synthetic peptide"
  MOD_RES (20)..(20): Any amino acid
DIQMTQFPATLSGTPGDRVXLSR

SEQ ID NO: 3597 - protein, 23 aa, Artificial Sequence
  source: /note="Description of Artificial Sequence: Synthetic peptide"
DIQMTQFPATLSVTPGDRVSLSC

SEQ ID NO: 3598 - protein, 23 aa, Artificial Sequence
  source: /note="Description of Artificial Sequence: Synthetic peptide"
DIQMTQSLSYLSVSLGGRVTITC

SEQ ID NO: 3599 - protein, 23 aa, Artificial Sequence
  source: /note="Description of Artificial Sequence: Synthetic peptide"
DIQMTQSPASQSASLGESVTITC

SEQ ID NO: 3600 - protein, 23 aa, Artificial Sequence
  source: /note="Description of Artificial Sequence: Synthetic peptide"
  MOD_RES (7)..(7): Any amino acid
DIQMTQXPATLSVTPGDRVSLSC

SEQ ID NO: 3601 - protein, 35 aa, Artificial Sequence
  source: /note="Description of Artificial Sequence: Synthetic polypeptide"
DSAKDRHPIFRDNARNTLYLQMSSLRSKDTAMYYC

SEQ ID NO: 3602 - protein, 35 aa, Artificial Sequence
  source: /note="Description of Artificial Sequence: Synthetic polypeptide"
DSVKGRFTISRDNAKNALYLQMSSLRSEDTALYYC

SEQ ID NO: 3603 - protein, 35 aa, Artificial Sequence
  source: /note="Description of Artificial Sequence: Synthetic polypeptide"
DSVKGRFTISRDNARNTLYLQMSSLRSKDTAMYYC

SEQ ID NO: 3604 - protein, 23 aa, Artificial Sequence
  source: /note="Description of Artificial Sequence: Synthetic peptide"
DVVMTQTPLSLPVSLGDQASISC

SEQ ID NO: 3605 - protein, 23 aa, Artificial Sequence
  source: /note="Description of Artificial Sequence: Synthetic peptide"
  MOD_RES (3)..(3): Any amino acid
DVXMTQTPLSLPVSLGDQASISC

SEQ ID NO: 3606 - protein, 35 aa, Artificial Sequence
  source: /note="Description of Artificial Sequence: Synthetic polypeptide"
EKFEDKATLDADTVSNTAYLELNSLTSEDSAIYYC

SEQ ID NO: 3607 - protein, 35 aa, Artificial Sequence
  source: /note="Description of Artificial Sequence: Synthetic polypeptide"
EKFKSKATLTVDTSSSTAYMQLSSLTSDDSAVYYC

SEQ ID NO: 3608 - protein, 35 aa, Artificial Sequence
  source: /note="Description of Artificial Sequence: Synthetic polypeptide"
ENYRVKATLTADKSSSTAYMQLFSLTSEDSAVYFC

SEQ ID NO: 3609 - protein, 26 aa, Artificial Sequence
  source: /note="Description of Artificial Sequence: Synthetic peptide"
EVKLADSGGALVNPGGSLKISCAVSG

SEQ ID NO: 3610 - protein, 26 aa, Artificial Sequence
  source: /note="Description of Artificial Sequence: Synthetic peptide"
EVKLVEFGGALVKPGGSLKLSCAALG

SEQ ID NO: 3611 - protein, 26 aa, Artificial Sequence
  source: /note="Description of Artificial Sequence: Synthetic peptide"
EVKLVESGGTLVKPGGSLKISCAASG

SEQ ID NO: 3612 - protein, 10 aa, Artificial Sequence
  source: /note="Description of Artificial Sequence: Synthetic peptide"
FGGGTKLELK

SEQ ID NO: 3613 - protein, 10 aa, Artificial Sequence
  source: /note="Description of Artificial Sequence: Synthetic peptide"
FGGGTRLEIK

SEQ ID NO: 3614 - protein, 32 aa, Artificial Sequence
  source: /note="Description of Artificial Sequence: Synthetic polypeptide"
GFPSRFSGSGSGKDYTLSITSLQTEDVATYYC

SEQ ID NO: 3615 - protein, 15 aa, Artificial Sequence
  source: /note="Description of Artificial Sequence: Synthetic peptide"
GFQQKPGHSPKAGIY

SEQ ID NO: 3616 - protein, 32 aa, Artificial Sequence
  source: /note="Description of Artificial Sequence: Synthetic polypeptide"
GIPSRFSGSGSGSDFTLSINTVEPEDVGVYYC

SEQ ID NO: 3617 - protein, 32 aa, Artificial Sequence
  source: /note="Description of Artificial Sequence: Synthetic polypeptide"
GIPSRFSGSGSGSDFTLTINSVEPEDVGVYYC

SEQ ID NO: 3618 - protein, 32 aa, Artificial Sequence
  source: /note="Description of Artificial Sequence: Synthetic polypeptide"
GIPSRFSGSGSGWDFTLSINSVEPEDVGIYYC

SEQ ID NO: 3619 - protein, 35 aa, Artificial Sequence
  source: /note="Description of Artificial Sequence: Synthetic polypeptide"
GKFKDKATLTEDKSSSTAYMQLSSLTSEDSAVYFC

SEQ ID NO: 3620 - protein, 32 aa, Artificial Sequence
  source: /note="Description of Artificial Sequence: Synthetic polypeptide"
GVPDRFSGSGAGTDFTLKISRVEAEDLGVYFC

SEQ ID NO: 3621 - protein, 32 aa, Artificial Sequence
  source: /note="Description of Artificial Sequence: Synthetic polypeptide"
GVPDRFSGSGSGTDFTLKISRVEAEDLGVYFC

SEQ ID NO: 3622 - protein, 32 aa, Artificial Sequence
  source: /note="Description of Artificial Sequence: Synthetic polypeptide"
GVPIRFSGSGSGTSYSLTISRMEAEDTATYYC

SEQ ID NO: 3623 - protein, 32 aa, Artificial Sequence
  source: /note="Description of Artificial Sequence: Synthetic polypeptide"
GVPSRFSGSGSGTKFSFKISSLQAEDFVSYYC

SEQ ID NO: 3624 - protein, 32 aa, Artificial Sequence
  source: /note="Description of Artificial Sequence: Synthetic polypeptide"
  MOD_RES (22)..(22): Any amino acid
  MOD_RES (31)..(31): Any amino acid
GVQDRFTARGLGSDFILPITTXQLEDLAEYXC

SEQ ID NO: 3625 - protein, 32 aa, Artificial Sequence
  source: /note="Description of Artificial Sequence: Synthetic polypeptide"
  MOD_RES (2)..(2): Any amino acid
  MOD_RES (9)..(9): Any amino acid
GXPSRLSGXGWVTDYFLPIHTSEQEDRGSYFC

SEQ ID NO: 3626 - protein, 25 aa, Artificial Sequence
  source: /note="Description of Artificial Sequence: Synthetic peptide"
  MOD_RES (2)..(2): Any amino acid
GXQNVLTQSPAILSASPGEKVTMTC

SEQ ID NO: 3627 - protein, 23 aa, Artificial Sequence
  source: /note="Description of Artificial Sequence: Synthetic peptide"
  MOD_RES (3)..(3): Any amino acid
LVXSGGALVKPGGSLKLSCAASG

SEQ ID NO: 3628 - protein, 22 aa, Artificial Sequence
  source: /note="Description of Artificial Sequence: Synthetic peptide"
  MOD_RES (2)..(2): Any amino acid
NXMTQFQKFMSTSVGDRVSLTC

SEQ ID NO: 3629 - protein, 35 aa, Artificial Sequence
  source: /note="Description of Artificial Sequence: Synthetic polypeptide"
PKFQDKAFLTADTSSTTAYLQLSSLTSEDTAIYYC

SEQ ID NO: 3630 - protein, 26 aa, Artificial Sequence
  source: /note="Description of Artificial Sequence: Synthetic peptide"
QVQLKQSGPVLVAPSQSLSITCTVSG

SEQ ID NO: 3631 - protein, 26 aa, Artificial Sequence
  source: /note="Description of Artificial Sequence: Synthetic peptide"
QVQLQQSGAELARPGASVKLSCKASG

SEQ ID NO: 3632 - protein, 26 aa, Artificial Sequence
  source: /note="Description of Artificial Sequence: Synthetic peptide"
QVQLQQSGAELVKPGASVKLSCKTSG

SEQ ID NO: 3633 - protein, 26 aa, Artificial Sequence
  source: /note="Description of Artificial Sequence: Synthetic peptide"
QVQLQQSGAELVRPGASVKLSCSASG

SEQ ID NO: 3634 - protein, 26 aa, Artificial Sequence
  source: /note="Description of Artificial Sequence: Synthetic peptide"
QVQLQQSGPELVKPGASVKISCKASG

SEQ ID NO: 3635 - protein, 26 aa, Artificial Sequence
  source: /note="Description of Artificial Sequence: Synthetic peptide"
QVQLQQSGSELRSPGSSVKLSCKDFD

SEQ ID NO: 3636 - protein, 12 aa, Artificial Sequence
  source: /note="Description of Artificial Sequence: Synthetic peptide"
RVRQTPEKREEG

SEQ ID NO: 3637 - protein, 35 aa, Artificial Sequence
  source: /note="Description of Artificial Sequence: Synthetic polypeptide"
SVLMSRLSISKDNSKSQVFLKMNSLQTDDTAMYYC

SEQ ID NO: 3638 - protein, 21 aa, Artificial Sequence
  source: /note="Description of Artificial Sequence: Synthetic peptide"
VLTQSPAIMSASPGEKVTMTC

SEQ ID NO: 3639 - protein, 11 aa, Artificial Sequence
  source: /note="Description of Artificial Sequence: Synthetic peptide"
WGAGATVTVSS

SEQ ID NO: 3640 - protein, 11 aa, Artificial Sequence
  source: /note="Description of Artificial Sequence: Synthetic peptide"
WGAGTTVTVSS

SEQ ID NO: 3641 - protein, 11 aa, Artificial Sequence
  source: /note="Description of Artificial Sequence: Synthetic peptide"
WGHGTLVTVSA

SEQ ID NO: 3642 - protein, 12 aa, Artificial Sequence
  source: /note="Description of Artificial Sequence: Synthetic peptide"
WIKQRPLQGLEW

SEQ ID NO: 3643 - protein, 12 aa, Artificial Sequence
  source: /note="Description of Artificial Sequence: Synthetic peptide"
WVKQRTGQGLEW

SEQ ID NO: 3644 - protein, 12 aa, Artificial Sequence
  source: /note="Description of Artificial Sequence: Synthetic peptide"
WVRQFPGKGLEW

SEQ ID NO: 3645 - protein, 12 aa, Artificial Sequence
  source: /note="Description of Artificial Sequence: Synthetic peptide"
WVRQKPGHGFEW

SEQ ID NO: 3646 - protein, 12 aa, Artificial Sequence
  source: /note="Description of Artificial Sequence: Synthetic peptide"
WVRQNPEKRLEW

SEQ ID NO: 3647 - protein, 12 aa, Artificial Sequence
  source: /note="Description of Artificial Sequence: Synthetic peptide"
WVRQRPGKGLDW

SEQ ID NO: 3648 - protein, 12 aa, Artificial Sequence
  source: /note="Description of Artificial Sequence: Synthetic peptide"
WVRQTPEKRLEW

SEQ ID NO: 3649 - protein, 15 aa, Artificial Sequence
  source: /note="Description of Artificial Sequence: Synthetic peptide"
WYEQKADGTANLIIY

SEQ ID NO: 3650 - protein, 15 aa, Artificial Sequence
  source: /note="Description of Artificial Sequence: Synthetic peptide"
WYHQKSHESPRLLIK

SEQ ID NO: 3651 - protein, 15 aa, Artificial Sequence
  source: /note="Description of Artificial Sequence: Synthetic peptide"
WYQHKSHESPRLLIK

SEQ ID NO: 3652 - protein, 15 aa, Artificial Sequence
  source: /note="Description of Artificial Sequence: Synthetic peptide"
WYQQKPGKSPQLLIY

SEQ ID NO: 3653 - protein, 15 aa, Artificial Sequence
  source: /note="Description of Artificial Sequence: Synthetic peptide"
WYQQKPGNAPRLLIS

SEQ ID NO: 3654 - protein, 15 aa, Artificial Sequence
  source: /note="Description of Artificial Sequence: Synthetic peptide"
WYQQKPGSSPRLLIF

SEQ ID NO: 3655 - protein, 15 aa, Artificial Sequence
  source: /note="Description of Artificial Sequence: Synthetic peptide"
  MOD_RES (13)..(13): Any amino acid
WYQQKSHESPRLXIK

SEQ ID NO: 3656 - protein, 21 aa, Artificial Sequence
  source: /note="Description of Artificial Sequence: Synthetic peptide"
  MOD_RES (1)..(1): Any amino acid
XMTQFTSSMSGSEGDRVTISH

SEQ ID NO: 3657 - protein, 110 aa, Artificial Sequence
  source: /note="Description of Artificial Sequence: Synthetic polypeptide"
ASTKGPSVFPLAPCSRSTSESTAALGCLVKDYFPEPVTVSWNSGALTSGVHTFPAVLQSSGLYSLSSVVTVPSSNFGTQTYTCNVDHKPSNTKVDKTVERKCCVECPPCP

SEQ ID NO: 3658 - protein, 23 aa, Artificial Sequence
  source: /note="Description of Artificial Sequence: Synthetic peptide"
DIQKPQSPFYMCVSGGETISISS

SEQ ID NO: 3659 - protein, 23 aa, Artificial Sequence
  source: /note="Description of Artificial Sequence: Synthetic peptide"
DIQMTQSPSSLSASLGERVSLTC

SEQ ID NO: 3660 - protein, 23 aa, Artificial Sequence
  source: /note="Description of Artificial Sequence: Synthetic peptide"
DIVLTQSPASLAVSLGQRATISC

SEQ ID NO: 3661 - protein, 35 aa, Artificial Sequence
  source: /note="Description of Artificial Sequence: Synthetic polypeptide"
DSVKGRFAISRDNAKNTLYLQMSNLRSEDTALYYC

SEQ ID NO: 3662 - protein, 23 aa, Artificial Sequence
  source: /note="Description of Artificial Sequence: Synthetic peptide"
DVVMTQTPLSLPVSLGDQVSISC

SEQ ID NO: 3663 - protein, 23 aa, Artificial Sequence
  source: /note="Description of Artificial Sequence: Synthetic peptide"
DVVMTQTPLTLSVTIGQPASISC

SEQ ID NO: 3664 - protein, 35 aa, Artificial Sequence
  source: /note="Description of Artificial Sequence: Synthetic polypeptide"
EKFTSKATLTVDTSSNTAYMQLNNLTSEDSAVYYC

SEQ ID NO: 3665 - protein, 26 aa, Artificial Sequence
  source: /note="Description of Artificial Sequence: Synthetic peptide"
EVKLVESGGALVKPGGSLKLSCAASG

SEQ ID NO: 3666 - protein, 25 aa, Artificial Sequence
  source: /note="Description of Artificial Sequence: Synthetic peptide"
EVQLQQSGPELVKPGASVRISCKAS

SEQ ID NO: 3667 - protein, 25 aa, Artificial Sequence
  source: /note="Description of Artificial Sequence: Synthetic peptide"
EVQLVESGGGLVQPGGSLKLSCAAS

SEQ ID NO: 3668 - protein, 32 aa, Artificial Sequence
  source: /note="Description of Artificial Sequence: Synthetic polypeptide"
GAPSRFSGRGSGTDFSLTINRGESEDCAEYYC

SEQ ID NO: 3669 - protein, 32 aa, Artificial Sequence
  source: /note="Description of Artificial Sequence: Synthetic polypeptide"
GIPARFSGSGSRTDFTLTINPVEADDVATYYC

SEQ ID NO: 3670 - protein, 35 aa, Artificial Sequence
  source: /note="Description of Artificial Sequence: Synthetic polypeptide"
GKFKGKATLTADKSSSTAYMQLSSLTSEDSAVYFC

SEQ ID NO: 3671 - protein, 15 aa, Artificial Sequence
  source: /note="Description of Artificial Sequence: Synthetic peptide"
GSAEKPEKPFKLEIY

SEQ ID NO: 3672 - protein, 32 aa, Artificial Sequence
  source: /note="Description of Artificial Sequence: Synthetic polypeptide"
GVPDRFRGSGSGTDFTLKISRVEAEDLGVYFC

SEQ ID NO: 3673 - protein, 32 aa, Artificial Sequence
  source: /note="Description of Artificial Sequence: Synthetic polypeptide"
GVPDRFSGSGSGTDFTLKINRVEAEDLGVYFC

SEQ ID NO: 3674 - protein, 32 aa, Artificial Sequence
  source: /note="Description of Artificial Sequence: Synthetic polypeptide"
GVPDRFSGSGSGTDFTLKINRVEAEDLGVYYC

SEQ ID NO: 3675 - protein, 32 aa, Artificial Sequence
  source: /note="Description of Artificial Sequence: Synthetic polypeptide"
GVPDRFTGSGSGTDFTLKISRVEAEDLGVYYC

SEQ ID NO: 3676 - protein, 32 aa, Artificial Sequence
  source: /note="Description of Artificial Sequence: Synthetic polypeptide"
GVPKRFSGSRSGSDYSLTISSLESEDFADYYC

SEQ ID NO: 3677 - protein, 23 aa, Artificial Sequence
  source: /note="Description of Artificial Sequence: Synthetic peptide"
NVVMTQTPLTLSVTLGQPASISC

SEQ ID NO: 3678 - protein, 23 aa, Artificial Sequence
  source: /note="Description of Artificial Sequence: Synthetic peptide"
  MOD_RES (3)..(3): Any amino acid
NVXMTQTPLTLSVTLGQPASISC

SEQ ID NO: 3679 - protein, 35 aa, Artificial Sequence
  source: /note="Description of Artificial Sequence: Synthetic polypeptide"
QKFKGKATLTVDKSSSTAYMQLSSLTSEDSAVYYC

SEQ ID NO: 3680 - protein, 26 aa, Artificial Sequence
  source: /note="Description of Artificial Sequence: Synthetic peptide"
QVQLQQSGAEVVKPGASVKLSCKAFG

SEQ ID NO: 3681 - protein, 25 aa, Artificial Sequence
  source: /note="Description of Artificial Sequence: Synthetic peptide"
VQLQQSGAELVKPGASVKLSCKASG

SEQ ID NO: 3682 - protein, 11 aa, Artificial Sequence
  source: /note="Description of Artificial Sequence: Synthetic peptide"
WGQGTTLTVST

SEQ ID NO: 3683 - protein, 15 aa, Artificial Sequence
  source: /note="Description of Artificial Sequence: Synthetic peptide"
WLLQRPGQSPKLLIY

SEQ ID NO: 3684 - protein, 15 aa, Artificial Sequence
  source: /note="Description of Artificial Sequence: Synthetic peptide"
WLLQRPGQSPKRLIY

SEQ ID NO: 3685 - protein, 15 aa, Artificial Sequence
  source: /note="Description of Artificial Sequence: Synthetic peptide"
WLQQKPDGTIKRLIF

SEQ ID NO: 3686 - protein, 12 aa, Artificial Sequence
  source: /note="Description of Artificial Sequence: Synthetic peptide"
WVKQRPGKGLEW

SEQ ID NO: 3687 - protein, 14 aa, Artificial Sequence
  source: /note="Description of Artificial Sequence: Synthetic peptide"
WVKQSQGKSLEWIG

SEQ ID NO: 3688 - protein, 14 aa, Artificial Sequence
  source: /note="Description of Artificial Sequence: Synthetic peptide"
WVRQILDKRLELVA

SEQ ID NO: 3689 - protein, 15 aa, Artificial Sequence
  source: /note="Description of Artificial Sequence: Synthetic peptide"
WYLQKSGQSPKLLIY

SEQ ID NO: 3690 - protein, 39 aa, Artificial Sequence
  source: /note="Description of Artificial Sequence: Synthetic polypeptide"
YNQKFQNKATLTVDNSSSTAYMELRSLTSEDSAVYYCAN

SEQ ID NO: 3691 - protein, 39 aa, Artificial Sequence
  source: /note="Description of Artificial Sequence: Synthetic polypeptide"
YPDSVKGRFTISRDNAKNTLYLQMSSLRSEDTAIYYCVT

SEQ ID NO: 3692 - protein, 25 aa, Artificial Sequence
  source: /note="Description of Artificial Sequence: Synthetic peptide"
  MOD_RES (24)..(25): Any amino acid
DIVLTQSPASLAVSLGQRATISCXX

SEQ ID NO: 3693 - protein, 27 aa, Artificial Sequence
  source: /note="Description of Artificial Sequence: Synthetic peptide"
  MOD_RES (26)..(27): Any amino acid
EFQLQQSGAELVKPGASVKISCKASXX

SEQ ID NO: 3694 - protein, 27 aa, Artificial Sequence
  source: /note="Description of Artificial Sequence: Synthetic peptide"
  MOD_RES (26)..(27): Any amino acid
EVKLVESGGGLVKPGGSLKLSCAASXX

SEQ ID NO: 3695 - protein, 12 aa, Artificial Sequence
  source: /note="Description of Artificial Sequence: Synthetic peptide"
  MOD_RES (11)..(12): Any amino acid
FGGGTKLEIKXX

SEQ ID NO: 3696 - protein, 13 aa, Artificial Sequence
  source: /note="Description of Artificial Sequence: Synthetic peptide"
  MOD_RES (11)..(13): Any amino acid
FGGGTKLEIKXXX

SEQ ID NO: 3697 - protein, 34 aa, Artificial Sequence
  source: /note="Description of Artificial Sequence: Synthetic polypeptide"
  MOD_RES (33)..(34): Any amino acid
GVPARFSGSGSGTDFTLNIHPVEEEDAATYYCXX

SEQ ID NO: 3698 - protein, 34 aa, Artificial Sequence
  source: /note="Description of Artificial Sequence: Synthetic polypeptide"
  MOD_RES (33)..(34): Any amino acid
GVPTRFSGSGSGTSYSLTISRVEAEDAATYYCXX

SEQ ID NO: 3699 - protein, 25 aa, Artificial Sequence
  source: /note="Description of Artificial Sequence: Synthetic peptide"
  MOD_RES (24)..(25): Any amino acid
QIVLSQSPAILSASPGEKVTMTCXX

SEQ ID NO: 3700 - protein, 13 aa, Artificial Sequence
  source: /note="Description of Artificial Sequence: Synthetic peptide"
  MOD_RES (12)..(13): Any amino acid
WGQGTLVTVSAXX

SEQ ID NO: 3701 - protein, 13 aa, Artificial Sequence
  source: /note="Description of Artificial Sequence: Synthetic peptide"
  MOD_RES (12)..(13): Any amino acid
WGQGTTLTVSSXX

SEQ ID NO: 3702 - protein, 17 aa, Artificial Sequence
  source: /note="Description of Artificial Sequence: Synthetic peptide"
  MOD_RES (15)..(17): Any amino acid
WVKQSRGKSLEWIGXXX

SEQ ID NO: 3703 - protein, 17 aa, Artificial Sequence
  source: /note="Description of Artificial Sequence: Synthetic peptide"
  MOD_RES (15)..(17): Any amino acid
WVRQTPEKRLEWVAXXX

SEQ ID NO: 3704 - protein, 18 aa, Artificial Sequence
  source: /note="Description of Artificial Sequence: Synthetic peptide"
  MOD_RES (16)..(18): Any amino acid
WYQQKPGQPPKLLIYXXX

SEQ ID NO: 3705 - protein, 18 aa, Artificial Sequence
  source: /note="Description of Artificial Sequence: Synthetic peptide"
  MOD_RES (16)..(18): Any amino acid
WYQQKPGSSPKPWIYXXX

SEQ ID NO: 3706 - protein, 41 aa, Artificial Sequence
  source: /note="Description of Artificial Sequence: Synthetic polypeptide"
  MOD_RES (40)..(41): Any amino acid
YNQNFKDKATLTVDKSSSAAYMQFNSLTSEDSAVYYCARXX

SEQ ID NO: 3707 - protein, 41 aa, Artificial Sequence
  source: /note="Description of Artificial Sequence: Synthetic polypeptide"
  MOD_RES (40)..(41): Any amino acid
YPDSVKGRFTISRDNAKYTLYLQMSSLRSEDTALYYCARXX

SEQ ID NO: 3708 - protein, 23 aa, Artificial Sequence
  source: /note="Description of Artificial Sequence: Synthetic peptide"
EIVMTQSPGTLSLSPGERATLSC

SEQ ID NO: 3709 - protein, 26 aa, Artificial Sequence
  source: /note="Description of Artificial Sequence: Synthetic peptide"
EVQLVESGGGLVQPGRSLRLSCAASG

SEQ ID NO: 3710 - protein, 26 aa, Artificial Sequence
  source: /note="Description of Artificial Sequence: Synthetic peptide"
EVQLVQSGAEVKKPGESLKISCKGSG

SEQ ID NO: 3711 - protein, 30 aa, Artificial Sequence
  source: /note="Description of Artificial Sequence: Synthetic polypeptide"
QVTISADKSISTAYLQWSSLKASDTAMYYC

SEQ ID NO: 3712 - protein, 30 aa, Artificial Sequence
  source: /note="Description of Artificial Sequence: Synthetic polypeptide"
RFTISRDNAKNSLYLQMNSLRAEDTALYYC

SEQ ID NO: 3713 - protein, 30 aa, Artificial Sequence
  source: /note="Description of Artificial Sequence: Synthetic polypeptide"
RVTMTTDTSTSTAYMELRSLRSDDTAVYYC

SEQ ID NO: 3714 - protein, 14 aa, Artificial Sequence
  source: /note="Description of Artificial Sequence: Synthetic peptide"
WVRQMPGKGLEWMG

SEQ ID NO: 3715 - protein, 15 aa, Artificial Sequence
  source: /note="Description of Artificial Sequence: Synthetic peptide"
WYLQKPGQSPQLLIF

SEQ ID NO: 3716 - protein, 15 aa, Artificial Sequence
  source: /note="Description of Artificial Sequence: Synthetic peptide"
WYLQKPGQSPQVLIY

SEQ ID NO: 3717 - protein, 15 aa, Artificial Sequence
  source: /note="Description of Artificial Sequence: Synthetic peptide"
WYQQKPGKAPKLLIS

SEQ ID NO: 3718 - protein, 35 aa, Artificial Sequence
  source: /note="Description of Artificial Sequence: Synthetic polypeptide"
AAFISRLNISKDNSKSQVFFKMNSLQSDDTAIYYC

SEQ ID NO: 3719 - protein, 25 aa, Artificial Sequence
  source: /note="Description of Artificial Sequence: Synthetic peptide"
  VARIANT (14)..(14): /replace="Gln"
  SITE (1)..(25): /note="Variant residues given in the sequence have no preference with respect to those in the annotations for variant positions"
DIQMTQFPASLAAEVGESVTITCRA

SEQ ID NO: 3720 - protein, 23 aa, Artificial Sequence
  source: /note="Description of Artificial Sequence: Synthetic peptide"
DIQMTQSPASLSVSVGETVTITC

SEQ ID NO: 3721 - protein, 25 aa, Artificial Sequence
  source: /note="Description of Artificial Sequence: Synthetic peptide"
DIVLTQSPASLAVSLGQRATISCRA

SEQ ID NO: 3722 - protein, 23 aa, Artificial Sequence
  source: /note="Description of Artificial Sequence: Synthetic peptide"
DIVMSQSPSSLAVSVGEKVTMSC

SEQ ID NO: 3723 - protein, 25 aa, Artificial Sequence
  source: /note="Description of Artificial Sequence: Synthetic peptide"
DIVMTQSHKFMSTSIGARVSITCKA

SEQ ID NO: 3724 - protein, 25 aa, Artificial Sequence
  source: /note="Description of Artificial Sequence: Synthetic peptide"
DIVMTQSHKFMSTSVGDRVSITCKA

SEQ ID NO: 3725 - protein, 25 aa, Artificial Sequence
  source: /note="Description of Artificial Sequence: Synthetic peptide"
DIVMTQSPKSMSMSVGERVTLTCKA

SEQ ID NO: 3726 - protein, 23 aa, Artificial Sequence
  source: /note="Description of Artificial Sequence: Synthetic peptide"
  VARIANT (3)..(3): /replace="Gln"
  SITE (1)..(23): /note="Variant residues given in the sequence have no preference with respect to those in the annotations for variant positions"
DIEMTQSPSSLTVTAGEKVTMSC

SEQ ID NO: 3727 - protein, 23 aa, Artificial Sequence
  source: /note="Description of Artificial Sequence: Synthetic peptide"
  VARIANT (3)..(3): /replace="Gln"
  SITE (1)..(23): /note="Variant residues given in the sequence have no preference with respect to those in the annotations for variant positions"
DIEVTQSPASLSASVGETVTITC

SEQ ID NO: 3728 - protein, 35 aa, Artificial Sequence
  source: /note="Description of Artificial Sequence: Synthetic polypeptide"
DSMKGRFTISRDNAKNFLYLQMSSLRSEDTAMYYC

SEQ ID NO: 3729 - protein, 35 aa, Artificial Sequence
  source: /note="Description of Artificial Sequence: Synthetic polypeptide"
DSVKDRFRASRDDSESMLYVQMSNWKQEDTAMYYG

SEQ ID NO: 3730 - protein, 35 aa, Artificial Sequence
  source: /note="Description of Artificial Sequence: Synthetic polypeptide"
DSVKDRFTCSRDDSENMFYLQLSSLKTEDTAIYYC

SEQ ID NO: 3731 - protein, 35 aa, Artificial Sequence
  source: /note="Description of Artificial Sequence: Synthetic polypeptide"
DSVKDRFTCSRDDSENMFYLQLSSLKTEDTAMYYC

SEQ ID NO: 3732 - protein, 35 aa, Artificial Sequence
  source: /note="Description of Artificial Sequence: Synthetic polypeptide"
DSVKDRFTISRDDSESIVYVQMNNLKTEDTGMYSC

SEQ ID NO: 3733 - protein, 35 aa, Artificial Sequence
  source: /note="Description of Artificial Sequence: Synthetic polypeptide"
DSVKDRFTISRDDSESMLYLQMNNLKTEDTAMYYC

SEQ ID NO: 3734 - protein, 35 aa, Artificial Sequence
  source: /note="Description of Artificial Sequence: Synthetic polypeptide"
  VARIANT (23)..(23): /replace="Gln"
  SITE (1)..(35): /note="Variant residues given in the sequence have no preference with respect to those in the annotations for variant positions"
DSVKDRFTISRDDSESMLYLQMENLKTEDTAMYYC

SEQ ID NO: 3735 - protein, 35 aa, Artificial Sequence
  source: /note="Description of Artificial Sequence: Synthetic polypeptide"
  VARIANT (9)..(9): /replace="Gln"
  VARIANT (20)..(20): /replace="Gln"
  VARIANT (24)..(25): /replace="Gln"
  VARIANT (27)..(27): /replace="Gln"
  VARIANT (35)..(35): /replace="Gln"
  SITE (1)..(35): /note="Variant residues given in the sequence have no preference with respect to those in the annotations for variant positions"
DSVKDRFTESRDDSESLFYEQMSEEKEEDTAMYYE

SEQ ID NO: 3736 - protein, 35 aa, Artificial Sequence
  source: /note="Description of Artificial Sequence: Synthetic polypeptide"
DSVKDRITCSRDDSENMFYLQLSSLKTEDTAMYYC

SEQ ID NO: 3737 - protein, 35 aa, Artificial Sequence
  source: /note="Description of Artificial Sequence: Synthetic polypeptide"
DSVQGRFTFSRDNARNILYLQMSSLRSEDTAMYYC

SEQ ID NO: 3738 - protein, 25 aa, Artificial Sequence
  source: /note="Description of Artificial Sequence: Synthetic peptide"
DVLMTQTPLSLPVSLGDQASISCRS

SEQ ID NO: 3739 - protein, 25 aa, Artificial Sequence
  source: /note="Description of Artificial Sequence: Synthetic peptide"
DVVMTQTPLSLPVSLGDQASISCRS

SEQ ID NO: 3740 - protein, 23 aa, Artificial Sequence
  source: /note="Description of Artificial Sequence: Synthetic peptide"
  VARIANT (3)..(3): /replace="Gln"
  SITE (1)..(23): /note="Variant residues given in the sequence have no preference with respect to those in the annotations for variant positions"
DVEMTQNPLSLPVSLGDQASISC

SEQ ID NO: 3741 - protein, 23 aa, Artificial Sequence
  source: /note="Description of Artificial Sequence: Synthetic peptide"
  VARIANT (3)..(3): /replace="Gln"
  SITE (1)..(23): /note="Variant residues given in the sequence have no preference with respect to those in the annotations for variant positions"
DVEMTQTPLTLSVTIGQPASISC

SEQ ID NO: 3742 - protein, 35 aa, Artificial Sequence
  source: /note="Description of Artificial Sequence: Synthetic polypeptide"
EKFKTKATLTVDKPSSTADMQLSSLTSEDSAVYYC

SEQ ID NO: 3743 - protein, 35 aa, Artificial Sequence
  source: /note="Description of Artificial Sequence: Synthetic polypeptide"
EKFKTKATLTVDKPSSTAYMQVSSLTSEDSAVYYC

SEQ ID NO: 3744 - protein, 35 aa, Artificial Sequence
  source: /note="Description of Artificial Sequence: Synthetic polypeptide"
EKFKTKATLTVDTSSSTAYMHLSSLTSEDSAVYFC

SEQ ID NO: 3745 - protein, 35 aa, Artificial Sequence
  source: /note="Description of Artificial Sequence: Synthetic polypeptide"
  VARIANT (30)..(30): /replace="Gln"
  SITE (1)..(35): /note="Variant residues given in the sequence have no preference with respect to those in the annotations for variant positions"
EKFRNKAILTVDKPSSTAYMQLNSLTSEDEAVYYC

SEQ ID NO: 3746 - protein, 35 aa, Artificial Sequence
  source: /note="Description of Artificial Sequence: Synthetic polypeptide"
ERFKTKATLTVDTSSSTAYMHLSSLTSEDSAVYFC

SEQ ID NO: 3747 - protein, 35 aa, Artificial Sequence
  source: /note="Description of Artificial Sequence: Synthetic polypeptide"
ESVKGRFTISRDDSKSSVSLQMNSLRTEDTGIYYC

SEQ ID NO: 3748 - protein, 35 aa, Artificial Sequence
  source: /note="Description of Artificial Sequence: Synthetic polypeptide"
ESVKGRFTISRDDSKSSVYLQMNNLRAVDTGIYYC

SEQ ID NO: 3749 - protein, 35 aa, Artificial Sequence
  source: /note="Description of Artificial Sequence: Synthetic polypeptide"
ESVKGRFTISRDDSKSTVYLQMNSLRTEDTGIYYC

SEQ ID NO: 3750 - protein, 35 aa, Artificial Sequence
  source: /note="Description of Artificial Sequence: Synthetic polypeptide"
ESVKGRFTISRDDSKSTVYLQMNTLRADDTGIYYC

SEQ ID NO: 3751 - protein, 26 aa, Artificial Sequence
  source: /note="Description of Artificial Sequence: Synthetic peptide"
EVKLEESGGGLVQPGGSMKLSCAASG

SEQ ID NO: 3752 - protein, 26 aa, Artificial Sequence
  source: /note="Description of Artificial Sequence: Synthetic peptide"
EVKLEESGGGLVQPGGSMKLSCTASG

SEQ ID NO: 3753 - protein, 26 aa, Artificial Sequence
  source: /note="Description of Artificial Sequence: Synthetic peptide"
EVKLVESGGGLVKPGGSLKLSCAASG

SEQ ID NO: 3754 - protein, 26 aa, Artificial Sequence
  source: /note="Description of Artificial Sequence: Synthetic peptide"
EVQLQQSGAELVKPGASVKISCKASG

SEQ ID NO: 3755 - protein, 26 aa, Artificial Sequence
  source: /note="Description of Artificial Sequence: Synthetic peptide"
EVQLQQSGPELVKPGTSVKISCKTSG

SEQ ID NO: 3756 - protein, 24 aa, Artificial Sequence
  source: /note="Description of Artificial Sequence: Synthetic peptide"
EVQLVESGGGLVKPGGSLKLSCEA

SEQ ID NO: 3757 - protein, 26 aa, Artificial Sequence
  source: /note="Description of Artificial Sequence: Synthetic peptide"
EVQLVESGGGLVQPKGSLKLSCAAFG

SEQ ID NO: 3758 - protein, 26 aa, Artificial Sequence
  source: /note="Description of Artificial Sequence: Synthetic peptide"
EVQLVESGGGLVQPKGSLKLSCAASG

SEQ ID NO: 3759 - protein, 26 aa, Artificial Sequence
  source: /note="Description of Artificial Sequence: Synthetic peptide"
EVQLVESGGRLVQPKGSLKLSCAASG

SEQ ID NO: 3760 - protein, 26 aa, Artificial Sequence
  source: /note="Description of Artificial Sequence: Synthetic peptide"
  VARIANT (6)..(7): /replace="Gln"
  VARIANT (11)..(11): /replace="Gln"
  MOD_RES (18)..(18): Any amino acid
  VARIANT (19)..(19): /replace="Gln"
  VARIANT (20)..(20): /replace="Gln"
  VARIANT (24)..(24): /replace="Gln"
  SITE (1)..(26): /note="Variant residues given in the sequence have no preference with respect to those in the annotations for variant positions"
EVQLVEEGRGESQGKGSXEEGRAERC

SEQ ID NO: 3761 - protein, 24 aa, Artificial Sequence
  source: /note="Description of Artificial Sequence: Synthetic peptide"
  VARIANT (4)..(4): /replace="Gln"
  SITE (1)..(24): /note="Variant residues given in the sequence have no preference with respect to those in the annotations for variant positions"
EVQEQQSGPELVKPGASVKISCKA

SEQ ID NO: 3762 - protein, 10 aa, Artificial Sequence
  source: /note="Description of Artificial Sequence: Synthetic peptide"
FGGGTELEIK

SEQ ID NO: 3763 - protein, 10 aa, Artificial Sequence
  source: /note="Description of Artificial Sequence: Synthetic peptide"
FGGGTKLEMN

SEQ ID NO: 3764 - protein, 10 aa, Artificial Sequence
  source: /note="Description of Artificial Sequence: Synthetic peptide"
FGGGTKLVIK

SEQ ID NO: 3765 - protein, 35 aa, Artificial Sequence
  source: /note="Description of Artificial Sequence: Synthetic polypeptide"
GEFRVRATLTADTSSTTAYMQLSSLTSEDSAVYFC

SEQ ID NO: 3766 - protein, 32 aa, Artificial Sequence
  source: /note="Description of Artificial Sequence: Synthetic polypeptide"
GIPSRFSGSGSGTDFTLNINSVESEDIADYYC

SEQ ID NO: 3767 - protein, 35 aa, Artificial Sequence
  source: /note="Description of Artificial Sequence: Synthetic polypeptide"
GKFEGKATLTADKSSSTAYMQLSSLTSEDSAVYFC

SEQ ID NO: 3768 - protein, 32 aa, Artificial Sequence
  source: /note="Description of Artificial Sequence: Synthetic polypeptide"
GVPARFSGSGSGTDFSLNIHPVEEDDIAMYFC

SEQ ID NO: 3769 - protein, 32 aa, Artificial Sequence
  source: /note="Description of Artificial Sequence: Synthetic polypeptide"
GVPARFSGSGSGTSYSLTINNMEAEDAATYYC

SEQ ID NO: 3770 - protein, 32 aa, Artificial Sequence
  source: /note="Description of Artificial Sequence: Synthetic polypeptide"
GVPDRFAGSGSGTDFTLKISRLEADDLGIYYC

SEQ ID NO: 3771 - protein, 32 aa, Artificial Sequence
  source: /note="Description of Artificial Sequence: Synthetic polypeptide"
  VARIANT (17)..(17): /replace="Gln"
  SITE (1)..(32): /note="Variant residues given in the sequence have no preference with respect to those in the annotations for variant positions"
GVPDRFAGSGSGTDFTEKISRLEADDLGIYYC

SEQ ID NO: 3772 - protein, 32 aa, Artificial Sequence
  source: /note="Description of Artificial Sequence: Synthetic polypeptide"
GVPDRFSGSGSGTDFTLKISRVEADDLGVYFC

SEQ ID NO: 3773 - protein, 32 aa, Artificial Sequence
  source: /note="Description of Artificial Sequence: Synthetic polypeptide"
GVPDRFSGSGSGTDFTLKISRVEADDLGVYLC

SEQ ID NO: 3774 - protein, 32 aa, Artificial Sequence
  source: /note="Description of Artificial Sequence: Synthetic polypeptide"
GVPDRFSGSGSGTDFTLKISRVEGEDLGVYYC

SEQ ID NO: 3775 - protein, 32 aa, Artificial Sequence
  source: /note="Description of Artificial Sequence: Synthetic polypeptide"
GVPDRFSGSGSGTDFTLRISGVEAEDLGVYFC

SEQ ID NO: 3776 - protein, 32 aa, Artificial Sequence
  source: /note="Description of Artificial Sequence: Synthetic polypeptide"
GVPDRFSGSGSGTDFTLRISRVEAEDLGVYFC

SEQ ID NO: 3777 - protein, 32 aa, Artificial Sequence
  source: /note="Description of Artificial Sequence: Synthetic polypeptide"
GVPDRFTGSGFGTDFTFTISSVQAEDLAVYYC

SEQ ID NO: 3778 - protein, 32 aa, Artificial Sequence
  source: /note="Description of Artificial Sequence: Synthetic polypeptide"
GVPDRFTGSGFGTDFTLTISSVQGEDLAVYYC

SEQ ID NO: 3779 - protein, 32 aa, Artificial Sequence
  source: /note="Description of Artificial Sequence: Synthetic polypeptide"
GVPDRFTGSGSATDFTLTISSVQAEDLADYHC

SEQ ID NO: 3780 - protein, 32 aa, Artificial Sequence
  source: /note="Description of Artificial Sequence: Synthetic polypeptide"
GVPDRFTGSGSGTDFTFTISSVQAEDLAVYYC

SEQ ID NO: 3781 - protein, 32 aa, Artificial Sequence
  source: /note="Description of Artificial Sequence: Synthetic polypeptide"
GVPDRFTGSGSGTDFTLTINSVQAEDLAVYYC

SEQ ID NO: 3782 - protein, 32 aa, Artificial Sequence
  source: /note="Description of Artificial Sequence: Synthetic polypeptide"
GVPDRFTGSGSGTDFTLTISSVKAEDLAVYCC

SEQ ID NO: 3783 - protein, 32 aa, Artificial Sequence
  source: /note="Description of Artificial Sequence: Synthetic polypeptide"
GVPDRFTGSGSGTDFTLTISSVKAEDLAVYYC

SEQ ID NO: 3784 - protein, 32 aa, Artificial Sequence
  source: /note="Description of Artificial Sequence: Synthetic polypeptide"
GVPDRFTGSGSGTDFTLTISTVKAEDLAVYYC

SEQ ID NO: 3785 - protein, 32 aa, Artificial Sequence
  source: /note="Description of Artificial Sequence: Synthetic polypeptide"
GVPDRFTGSGSGTDYTLTISSVQAEDLALYYC

SEQ ID NO: 3786 - protein, 33 aa, Artificial Sequence
  source: /note="Description of Artificial Sequence: Synthetic polypeptide"
  MOD_RES (15)..(15): Any amino acid
GVPGRFSGSGSGTYXSFKISSMEGKMGPLIIFC

SEQ ID NO: 3787 - protein, 12 aa, Artificial Sequence
  source: /note="Description of Artificial Sequence: Synthetic peptide"
GVPQGPGKGREW

SEQ ID NO: 3788 - protein, 32 aa, Artificial Sequence
  source: /note="Description of Artificial Sequence: Synthetic polypeptide"
GVPSRFSASGSATQFSLKINSLQSADFGSYYC

SEQ ID NO: 3789 - protein, 32 aa, Artificial Sequence
  source: /note="Description of Artificial Sequence: Synthetic polypeptide"
  VARIANT (22)..(22): /replace="Gln"
  SITE (1)..(32): /note="Variant residues given in the sequence have no preference with respect to those in the annotations for variant positions"
GVPSRFSGRGSGTQFFLKINSEQREDFGSYYC

SEQ ID NO: 3790 - protein, 32 aa, Artificial Sequence
  source: /note="Description of Artificial Sequence: Synthetic polypeptide"
GVPSRFSGSGSGTQFSLRINSLQPEDFGSYYC

SEQ ID NO: 3791 - protein, 32 aa, Artificial Sequence
  source: /note="Description of Artificial Sequence: Synthetic polypeptide"
GVPSRFSGSGSGTQYSMKINSMQPEDTAIYFC

SEQ ID NO: 3792 - protein, 30 aa, Artificial Sequence
  source: /note="Description of Artificial Sequence: Synthetic polypeptide"
GVQSEVKFEESGGGLVQPGGSMKLSCTASG

SEQ ID NO: 3793 - protein, 32 aa, Artificial Sequence
  source: /note="Description of Artificial Sequence: Synthetic polypeptide"
  VARIANT (11)..(11): /replace="Gln"
  SITE (1)..(32): /note="Variant residues given in the sequence have no preference with respect to those in the annotations for variant positions"
GVRDRFTGSGEGTDFTLTISSVQGEDLAIYYC

SEQ ID NO: 3794 - protein, 35 aa, Artificial Sequence
  source: /note="Description of Artificial Sequence: Synthetic polypeptide"
HNFKGKATLTVDKSSSTAYMQLNSLTSEDSAVYYC

SEQ ID NO: 3795 - protein, 22 aa, Artificial Sequence
  source: /note="Description of Artificial Sequence: Synthetic peptide"
ILLTQSPAILSVSPGERVSFSC

SEQ ID NO: 3796 - protein, 22 aa, Artificial Sequence
  source: /note="Description of Artificial Sequence: Synthetic peptide"
ITMSQSPSSLAVSVGEKVTMSC

SEQ ID NO: 3797 - protein, 7 aa, Artificial Sequence
  source: /note="Description of Artificial Sequence: Synthetic peptide"
LSCAASG

SEQ ID NO: 3798 - protein, 25 aa, Artificial Sequence
  source: /note="Description of Artificial Sequence: Synthetic peptide"
NIVMTQSPKSMSMSVGERVTLTCKA

SEQ ID NO: 3799 - protein, 22 aa, Artificial Sequence
  source: /note="Description of Artificial Sequence: Synthetic peptide"
  VARIANT (13)..(13): /replace="Gln"
  SITE (1)..(22): /note="Variant residues given in the sequence have no preference with respect to those in the annotations for variant positions"
NVLTQSPALIWAEPGEKVTMTC

SEQ ID NO: 3800 - protein, 22 aa, Artificial Sequence
  source: /note="Description of Artificial Sequence: Synthetic peptide"
NVLTQSPALMSASPGEKVTMTC

SEQ ID NO: 3801 - protein, 35 aa, Artificial Sequence
  source: /note="Description of Artificial Sequence: Synthetic polypeptide"
PKFQATATITVATSSNSAYLQLSSLASEDTAIYYC

SEQ ID NO: 3802 - protein, 35 aa, Artificial Sequence
  source: /note="Description of Artificial Sequence: Synthetic polypeptide"
  VARIANT (34)..(34): /replace="Gln"
  SITE (1)..(35): /note="Variant residues given in the sequence have no preference with respect to those in the annotations for variant positions"
QEFKGKATLTVDKSSSTAYMELRSLTFEDSAVYEC

SEQ ID NO: 3803 - protein, 35 aa, Artificial Sequence
  source: /note="Description of Artificial Sequence: Synthetic polypeptide"
QKFKDKATLTADKSSSTAYMQLSSLTSEESAVYYC

SEQ ID NO: 3804 - protein, 35 aa, Artificial Sequence
  source: /note="Description of Artificial Sequence: Synthetic polypeptide"
QKFKGKAILTADKSSSTAYMELRSLTSEDSAVYYC

SEQ ID NO: 3805 - protein, 35 aa, Artificial Sequence
  source: /note="Description of Artificial Sequence: Synthetic polypeptide"
QKFKGKAILTVDKSSSTAYMELRSLTSEDSAVYYC

SEQ ID NO: 3806 - protein, 35 aa, Artificial Sequence
  source: /note="Description of Artificial Sequence: Synthetic polypeptide"
QKFKGKASLTVDKSSSTAYMELHSLASDDSAVYYC

SEQ ID NO: 3807 - protein, 35 aa, Artificial Sequence
  source: /note="Description of Artificial Sequence: Synthetic polypeptide"
  VARIANT (27)..(27): /replace="Gln"
  SITE (1)..(35): /note="Variant residues given in the sequence have no preference with respect to those in the annotations for variant positions"
QKFKGKATLTVDKSSSTAYMELRSLTEEESAVYYC

SEQ ID NO: 3808 - protein, 36 aa, Artificial Sequence
  source: /note="Description of Artificial Sequence: Synthetic polypeptide"
QKFKGKATLTVDKSSSTAYMQILSSLTSEDSAVYYC

SEQ ID NO: 3809 - protein, 35 aa, Artificial Sequence
  source: /note="Description of Artificial Sequence: Synthetic polypeptide"
QKFKGKATLTVDRSSSTAYMELRSLTSEDSAVYYC

SEQ ID NO: 3810 - protein, 35 aa, Artificial Sequence
  source: /note="Description of Artificial Sequence: Synthetic polypeptide"
QKFKGKATLTVNKSSSTAYIELRSLTSEDSAVYHC

SEQ ID NO: 3811 - protein, 35 aa, Artificial Sequence
  source: /note="Description of Artificial Sequence: Synthetic polypeptide"
QKFKGKATLTVNKSSSTAYMELRSLTSEDSAVYYC

SEQ ID NO: 3812 - protein, 21 aa, Artificial Sequence
  source: /note="Description of Artificial Sequence: Synthetic peptide"
  VARIANT (10)..(10): /replace="Gln"
  VARIANT (12)..(12): /replace="Gln"
  SITE (1)..(21): /note="Variant residues given in the sequence have no preference with respect to those in the annotations for variant positions"
QMSQSPACLEAEVGESVTITC

SEQ ID NO: 3813 - protein, 20 aa, Artificial Sequence
  source: /note="Description of Artificial Sequence: Synthetic peptide"
QTQSPSSLAVSAGEKVTLSC

SEQ ID NO: 3814 - protein, 40 aa, Artificial Sequence
  source: /note="Description of Artificial Sequence: Synthetic polypeptide"
QTQVFLSLLLWVSGTCGNIMLTQSPSSLAVSAGEKVTLSC

SEQ ID NO: 3815 - protein, 26 aa, Artificial Sequence
  source: /note="Description of Artificial Sequence: Synthetic peptide"
QVKLEESGGGLVQPGGSMKLSCVASG

SEQ ID NO: 3816 - protein, 24 aa, Artificial Sequence
  source: /note="Description of Artificial Sequence: Synthetic peptide"
QVQLQESGPGLVQPSQSLSIICTV

SEQ ID NO: 3817 - protein, 24 aa, Artificial Sequence
  source: /note="Description of Artificial Sequence: Synthetic peptide"
QVQLQQPGAELVKPGASVKVSCKA

SEQ ID NO: 3818 - protein, 26 aa, Artificial Sequence
  source: /note="Description of Artificial Sequence: Synthetic peptide"
QVQLQQSGAELVKPGASVKMSCKTSG

SEQ ID NO: 3819 - protein, 24 aa, Artificial Sequence
  source: /note="Description of Artificial Sequence: Synthetic peptide"
QVQLQQSGAELVKPGASVKVSCKA

SEQ ID NO: 3820 - protein, 26 aa, Artificial Sequence
  source: /note="Description of Artificial Sequence: Synthetic peptide"
QVQLQQSGAELVRPGASVTLSCKASG

SEQ ID NO: 3821 - protein, 26 aa, Artificial Sequence
  source: /note="Description of Artificial Sequence: Synthetic peptide"
QVQLQQSGAEVVKPGASVKMSCKTSG

SEQ ID NO: 3822 - protein, 26 aa, Artificial Sequence
  source: /note="Description of Artificial Sequence: Synthetic peptide"
QVQLQQSGAVLVKPGASVKLSCKASG

SEQ ID NO: 3823 - protein, 26 aa, Artificial Sequence
  source: /note="Description of Artificial Sequence: Synthetic peptide"
QVQLQQSGPDLVKPGASVKISCKASG

SEQ ID NO: 3824 - protein, 26 aa, Artificial Sequence
  source: /note="Description of Artificial Sequence: Synthetic peptide"
QVQLQQSGPELVKPGASLKISCKASG

SEQ ID NO: 3825 - protein, 26 aa, Artificial Sequence
  source: /note="Description of Artificial Sequence: Synthetic peptide"
QVQLQQSGPELVKPGASVKISCKTSG

SEQ ID NO: 3826 - protein, 26 aa, Artificial Sequence
  source: /note="Description of Artificial Sequence: Synthetic peptide"
QVQLQQSGPELVKPGASVQMSCEASG

SEQ ID NO: 3827 - protein, 26 aa, Artificial Sequence
  source: /note="Description of Artificial Sequence: Synthetic peptide"
QVQLQQSGRELVKPGASVKMSCMSSG

SEQ ID NO: 3828 - protein, 24 aa, Artificial Sequence
  source: /note="Description of Artificial Sequence: Synthetic peptide"
QVQLQQSVAELVRPGASVKLSCTA

SEQ ID NO: 3829 - protein, 26 aa, Artificial Sequence
  source: /note="Description of Artificial Sequence: Synthetic peptide"
QVQLQQYGPELVKPGASVKMSCKVSG

SEQ ID NO: 3830 - protein, 9 aa, Artificial Sequence
  source: /note="Description of Artificial Sequence: Synthetic peptide"
RGTGTTVTV

SEQ ID NO: 3831 - protein, 12 aa, Artificial Sequence
  source: /note="Description of Artificial Sequence: Synthetic peptide"
RVRQGPGKGREW

SEQ ID NO: 3832 - protein, 21 aa, Artificial Sequence
  source: /note="Description of Artificial Sequence: Synthetic peptide"
TMSQSPSSLAVSVGEKVTMSC

SEQ ID NO: 3833 - protein, 19 aa, Artificial Sequence
  source: /note="Description of Artificial Sequence: Synthetic peptide"
TQSPSSLAVSVGEKVTMTC

SEQ ID NO: 3834 - protein, 21 aa, Artificial Sequence
  source: /note="Description of Artificial Sequence: Synthetic peptide"
  VARIANT (10)..(10): /replace="Gln"
  SITE (1)..(21): /note="Variant residues given in the sequence have no preference with respect to those in the annotations for variant positions"
VLTQSPAIMEASPGEKVTMTC

SEQ ID NO: 3835 - protein, 21 aa, Artificial Sequence
  source: /note="Description of Artificial Sequence: Synthetic peptide"
VLTQSPALMSASPGEKVTMTC

SEQ ID NO: 3836 - protein, 15 aa, Artificial Sequence
  source: /note="Description of Artificial Sequence: Synthetic peptide"
WFLQKPGQSPKLLIF

SEQ ID NO: 3837 - protein, 11 aa, Artificial Sequence
  source: /note="Description of Artificial Sequence: Synthetic peptide"
WGHGTSVTVSS

SEQ ID NO: 3838 - protein, 11 aa, Artificial Sequence
  source: /note="Description of Artificial Sequence: Synthetic peptide"
WGQGASVTVSS

SEQ ID NO: 3839 - protein, 5 aa, Artificial Sequence
  source: /note="Description of Artificial Sequence: Synthetic peptide"
WGQGT

SEQ ID NO: 3840 - protein, 10 aa, Artificial Sequence
  source: /note="Description of Artificial Sequence: Synthetic peptide"
WGQGTIVTVS

SEQ ID NO: 3841 - protein, 11 aa, Artificial Sequence
  source: /note="Description of Artificial Sequence: Synthetic peptide"
WGQGTLVTVST

SEQ ID NO: 3842 - protein, 7 aa, Artificial Sequence
  source: /note="Description of Artificial Sequence: Synthetic peptide"
WGRGTLV

SEQ ID NO: 3843 - protein, 11 aa, Artificial Sequence
  source: /note="Description of Artificial Sequence: Synthetic peptide"
WGTGTTVTVSS

SEQ ID NO: 3844 - protein, 11 aa, Artificial Sequence
  source: /note="Description of Artificial Sequence: Synthetic peptide"
WGTGTTVTVST

SEQ ID NO: 3845 - protein, 12 aa, Artificial Sequence
  source: /note="Description of Artificial Sequence: Synthetic peptide"
WIRQSPGKGLEW

SEQ ID NO: 3846 - protein, 12 aa, Artificial Sequence
  source: /note="Description of Artificial Sequence: Synthetic peptide"
WMKQSHGKSLEW

SEQ ID NO: 3847 - protein, 18 aa, Artificial Sequence
  source: /note="Description of Artificial Sequence: Synthetic peptide"
WRIGQGKGSLKLARAARG

SEQ ID NO: 3848 - protein, 10 aa, Artificial Sequence
  source: /note="Description of Artificial Sequence: Synthetic peptide"
WSQGTLVTVS

SEQ ID NO: 3849 - protein, 12 aa, Artificial Sequence
  source: /note="Description of Artificial Sequence: Synthetic peptide"
WVIQSHGESLEW

SEQ ID NO: 3850 - protein, 12 aa, Artificial Sequence
  source: /note="Description of Artificial Sequence: Synthetic peptide"
WVKEKPGQGLEW

SEQ ID NO: 3851 - protein, 12 aa, Artificial Sequence
  source: /note="Description of Artificial Sequence: Synthetic peptide"
WVKQRPEQGLEW

SEQ ID NO: 3852 - protein, 12 aa, Artificial Sequence
  source: /note="Description of Artificial Sequence: Synthetic peptide"
WVKQRPGQGLVW

SEQ ID NO: 3853 - protein, 12 aa, Artificial Sequence
  source: /note="Description of Artificial Sequence: Synthetic peptide"
WVKQRPGRGLEW

SEQ ID NO: 3854 - protein, 12 aa, Artificial Sequence
  source: /note="Description of Artificial Sequence: Synthetic peptide"
WVKQRPGRGPEW

SEQ ID NO: 3855 - protein, 12 aa, Artificial Sequence
  source: /note="Description of Artificial Sequence: Synthetic peptide"
WVKQSHGKSLEW

SEQ ID NO: 3856 - protein, 12 aa, Artificial Sequence
  source: /note="Description of Artificial Sequence: Synthetic peptide"
WVKQSLGKSLEW

SEQ ID NO: 3857 - protein, 12 aa, Artificial Sequence
  source: /note="Description of Artificial Sequence: Synthetic peptide"
WVKQTPVHGLEW

SEQ ID NO: 3858 - protein, 12 aa, Artificial Sequence
  source: /note="Description of Artificial Sequence: Synthetic peptide"
WVRQAPGKGLEW

SEQ ID NO: 3859 - protein, 12 aa, Artificial Sequence
  source: /note="Description of Artificial Sequence: Synthetic peptide"
WVRQTPGKGLEW

SEQ ID NO: 3860 - protein, 15 aa, Artificial Sequence
  source: /note="Description of Artificial Sequence: Synthetic peptide"
  MOD_RES (2)..(4): Any amino acid
WXXXKPRSSPKPGIY

SEQ ID NO: 3861 - protein, 15 aa, Artificial Sequence
  source: /note="Description of Artificial Sequence: Synthetic peptide"
WYLRKPGQSPKLLIY

SEQ ID NO: 3862 - protein, 15 aa, Artificial Sequence
  source: /note="Description of Artificial Sequence: Synthetic peptide"
WYQLKQGKSPQLLVY

SEQ ID NO: 3863 - protein, 15 aa, Artificial Sequence
  source: /note="Description of Artificial Sequence: Synthetic peptide"
  VARIANT (10)..(10): /replace="Gln"
  SITE (1)..(15): /note="Variant residues given in the sequence have no preference with respect to those in the annotations for variant positions"
WYQQKPGQPEKLLIY

SEQ ID NO: 3864 - protein, 15 aa, Artificial Sequence
  source: /note="Description of Artificial Sequence: Synthetic peptide"
WYQQKPGQSPKLLIS

SEQ ID NO: 3865 - protein, 15 aa, Artificial Sequence
  source: /note="Description of Artificial Sequence: Synthetic peptide"
WYQQKPGQSPKLLIY

SEQ ID NO: 3866 - protein, 15 aa, Artificial Sequence
  source: /note="Description of Artificial Sequence: Synthetic peptide"
WYQQKPRSSPKPWIY

SEQ ID NO: 3867 - protein, 15 aa, Artificial Sequence
  source: /note="Description of Artificial Sequence: Synthetic peptide"
WYQQKQGKSPKLVVY

SEQ ID NO: 3868 - protein, 15 aa, Artificial Sequence
  source: /note="Description of Artificial Sequence: Synthetic peptide"
WYQQKQGKSPQLLIY

SEQ ID NO: 3869 - protein, 15 aa, Artificial Sequence
  source: /note="Description of Artificial Sequence: Synthetic peptide"
WYQQKQGKSPQLLVY

SEQ ID NO: 3870 - protein, 15 aa, Artificial Sequence
  source: /note="Description of Artificial Sequence: Synthetic peptide"
WYQQRTNGSPRLLIK

SEQ ID NO: 3871 - protein, 26 aa, Artificial Sequence
  source: /note="Description of Artificial Sequence: Synthetic peptide"
  VARIANT (1)..(1): /replace="Gln"
  SITE (1)..(26): /note="Variant residues given in the sequence have no preference with respect to those in the annotations for variant positions"
EVQLVESGGGLVQPKGSLKLSCAASG

SEQ ID NO: 3872 - protein, 25 aa, Artificial Sequence
  source: /note="Description of Artificial Sequence: Synthetic peptide"
  VARIANT (1)..(1): /replace="Gln"
  VARIANT (4)..(4): /replace="Gln"
  SITE (1)..(25): /note="Variant residues given in the sequence have no preference with respect to those in the annotations for variant positions"
EVVETQTPLSLPVSLGDQASFSCRS

SEQ ID NO: 3873 - protein, 24 aa, Artificial Sequence
  source: /note="Description of Artificial Sequence: Synthetic peptide"
  MOD_RES (1)..(5): Any amino acid
XXXXXQSGTELARPGASVKMPCKA

SEQ ID NO: 3874 - protein, 268 aa, Artificial Sequence
  source: /note="Description of Artificial Sequence: Synthetic polypeptide"
  MOD_RES (249)..(268): Any amino acid
MADIQMTQSPSSLSASVGDRVTITCGASENIYGALNWYQRKPGKAPKLLIYGATNLADGVPSRFSGSGSGTDFTLTISSLQPEDFATYYCQNVLNTPLTFGQGTKVEIKRTGGGGSGGGGSGGGGSQVQLVQSGAEVKKPGASVKVSCKASGYIFSNYWIQWVRQAPGQGLEWMGEILPGSGSTEYTENFKDRVTMTRDTSTSTVYMELSSLRSEDTAVYYCARYFFGSSPNWYFDVWGQGTLVTVSSXXXXXXXXXXXXXXXXXXXX

SEQ ID NO: 3875 - protein, 111 aa, Artificial Sequence
  source: /note="Description of Artificial Sequence: Synthetic polypeptide"
DIQLTQSPSSLSASVGDRATITCRASENVDSYGISFMHWYQQKPGKAPKLLIYRASNLESGIPSRFSGSGSGTDFTLTISSVQPEDFATYYCQQSNEDPWTFGQGTKLEIK

SEQ ID NO: 3876 - protein, 111 aa, Artificial Sequence
  source: /note="Description of Artificial Sequence: Synthetic polypeptide"
DIQLTQSPSSLSASVGDRVTITCRASENVDSYGISFMHWYQQKPGKAPKLLIYRASNLESGIPSRFSGSGSGTDFTLTISSLQPEDFATYYCQQSNEDPWTFGQGTKLEIK

SEQ ID NO: 3877 - protein, 111 aa, Artificial Sequence
  source: /note="Description of Artificial Sequence: Synthetic polypeptide"
DIQMTQSPSSLSASVGDRVTITCRASENVDSYGISFMHWYQQKPGKAPKLLIYRASNLESGVPSRFSGSGSGTDFTLTISSLQPEDFATYYCQQSNEDPWTFGQGTKLEIK

SEQ ID NO: 3878 - protein, 96 aa, Artificial Sequence
  source: /note="Description of Artificial Sequence: Synthetic polypeptide"
DIQMTQSPSSLSASVGDRVTITCRASQSISSYLNWYQQKPGKAPKLLIYAASSLQSGVPSRFSGSGSGTDFTLTISSLQPEDFATYYCQQSYSTPP

SEQ ID NO: 3879 - protein, 106 aa, Artificial Sequence
  source: /note="Description of Artificial Sequence: Synthetic polypeptide"
DIQMTQSPSSLSASVGDRVTITCRASQSISSYLNWYQQKPGKAPKLLIYAASSLQSGVPSRFSGSGSGTDFTLTISSLQPEDFATYYCQQSYSTPPFGQGTKLEIK

SEQ ID NO: 3880 - protein, 111 aa, Artificial Sequence
  source: /note="Description of Artificial Sequence: Synthetic polypeptide"
DIVLTQSPASLAVSLGQRATISCRASENVDSYGISFMHWYQQKPGQPPKLLIYRASNLESGIPARFSGSGSRTDFTLTINPVEADDVATYYCQQSNEDPWTFGGGTKLEIK

SEQ ID NO: 3881 - protein, 101 aa, Artificial Sequence
  source: /note="Description of Artificial Sequence: Synthetic polypeptide"
DVVMTQSPLSLPVTLGQPASISCRSSQSLVYSDGNTYLNWFQQRPGQSPRRLIYKVSNRDSGVPDRFSGSGSGTDFTLKISRVEAEDVGVYYCMQGTHWPP

SEQ ID NO: 3882 - protein, 111 aa, Artificial Sequence
  source: /note="Description of Artificial Sequence: Synthetic polypeptide"
DVVMTQSPLSLPVTLGQPASISCRSSQSLVYSDGNTYLNWFQQRPGQSPRRLIYKVSNRDSGVPDRFSGSGSGTDFTLKISRVEAEDVGVYYCMQGTHWPPFGQGTKLEIK

SEQ ID NO: 3883 - protein, 112 aa, Artificial Sequence
  source: /note="Description of Artificial Sequence: Synthetic polypeptide"
DVVMTQSPLSLPVTLGQPASISCSSSQSLVHSNGNTYLHWFQQRPGQSPRRLIYKVSNRFSGVPDRFSGSGSGTDFTLKISRVEAEDVGVYYCSQNTHVPLTFGQGTKLEIK

SEQ ID NO: 3884 - protein, 112 aa, Artificial Sequence
  source: /note="Description of Artificial Sequence: Synthetic polypeptide"
DVVMTQSPLSLPVTLGQPVSISCSSSQSLVHSNGNTYLHWYQQRPGQSPRLLIYKVSNRFSGVPDRFSGSGSGTDFTLKISRVEAEDLGVYYCSQNTHVPLTFGQGTKLELK

SEQ ID NO: 3885 - protein, 112 aa, Artificial Sequence
  source: /note="Description of Artificial Sequence: Synthetic polypeptide"
DVVMTQSPLSLPVTLGQPVSISCSSSQSLVHSNGNTYLHWYQQRPGQSPRLLIYKVSNRFSGVPDRFSGSGSGTDFTLKISRVEAEDVGVYYCSQNTHVPLTFGQGTKLEIK

SEQ ID NO: 3886 - protein, 112 aa, Artificial Sequence
  source: /note="Description of Artificial Sequence: Synthetic polypeptide"
DVVMTQTPLSLPVSLGDQVSISCSSSQSLVHSNGNTYLHWYLQKSGQSPKLLIYKVSNRFSGVPDRFRGSGSGTDFTLKISRVEAEDLGVYFCSQNTHVPLTFGAGTKLELK

SEQ ID NO: 3887 - protein, 120 aa, Artificial Sequence
  source: /note="Description of Artificial Sequence: Synthetic polypeptide"
EVQLQQSGPELVKPGASVRISCKASGYTFTDYNIHWVKQSQGKSLEWIGYIYPYNGDTGYNQKFQNKATLTVDNSSSTAYMELRSLTSEDSAVYYCANGNYLYYYAMDYWGQGTSVTVSS

SEQ ID NO: 3888 - protein, 120 aa, Artificial Sequence
  source: /note="Description of Artificial Sequence: Synthetic polypeptide"
EVQLVESGGGLVQPGGSLKLSCAASGFTFSNYGMSWVRQILDKRLELVATINSNGGRTYYPDSVKGRFTISRDNAKNTLYLQMSSLRSEDTAIYYCVTYYRYDSYAMDYWGQGTSVTVSS

SEQ ID NO: 3889 - protein, 120 aa, Artificial Sequence
  source: /note="Description of Artificial Sequence: Synthetic polypeptide"
EVQLVESGGGLVQPGGSLRLSCAASGFTFSNYGMSWVRQAPGKGLELVATINSNGGRTYYADSVKGRFTISRDNSKNTLYLQMNSLRAEDTAVYYCVTYYRYDSYAMDYWGQGTLVTVSS

SEQ ID NO: 3890 - protein, 120 aa, Artificial Sequence
  source: /note="Description of Artificial Sequence: Synthetic polypeptide"
EVQLVESGGGLVQPGGSLRLSCAASGFTFSNYGMSWVRQAPGKGLEWVSTINSNGGRTYYADSVKGRFTISRDNSKNTLYLQMNSLRAEDTAVYYCAKYYRYDSYAMDYWGQGTLVTVSS

SEQ ID NO: 3891 - protein, 98 aa, Artificial Sequence
  source: /note="Description of Artificial Sequence: Synthetic polypeptide"
EVQLVESGGGLVQPGGSLRLSCAASGFTFSSYAMSWVRQAPGKGLEWVSAISGSGGSTYYADSVKGRFTISRDNSKNTLYLQMNSLRAEDTAVYYCAK

SEQ ID NO: 3892 - protein, 109 aa, Artificial Sequence
  source: /note="Description of Artificial Sequence: Synthetic polypeptide"
EVQLVESGGGLVQPGGSLRLSCAASGFTFSSYAMSWVRQAPGKGLEWVSAISGSGGSTYYADSVKGRFTISRDNSKNTLYLQMNSLRAEDTAVYYCAKWGQGTLVTVSS

SEQ ID NO: 3893 - protein, 120 aa, Artificial Sequence
  source: /note="Description of Artificial Sequence: Synthetic polypeptide"
QVQLVQSGAEVKKPGASVKISCKASGYTFTDYNIHWVRQAPGQGLEWIGYIYPYNGDTGYAQKFQGRATMTVDNSTSTAYMELRSLRSDDTAVYYCANGNYLYYYAMDYWGQGTLVTVSS

SEQ ID NO: 3894 - protein, 120 aa, Artificial Sequence
  source: /note="Description of Artificial Sequence: Synthetic polypeptide"
QVQLVQSGAEVKKPGASVKISCKASGYTFTDYNIHWVRQAPGQGLEWIGYIYPYNGDTGYAQKFQGRATMTVDTSTSTAYMELRSLRSDDTAVYYCANGNYLYYYAMDYWGQGTLVTVSS

SEQ ID NO: 3895 - protein, 120 aa, Artificial Sequence
  source: /note="Description of Artificial Sequence: Synthetic polypeptide"
QVQLVQSGAEVKKPGASVKVSCKASGYTFTDYNIHWVRQAPGQGLEWMGYIYPYNGDTGYAQKLQGRVTMTTDTSTSTAYMELRSLRSDDTAVYYCARGNYLYYYAMDYWGQGTLVTVSS

SEQ ID NO: 3896 - protein, 120 aa, Artificial Sequence
  source: /note="Description of Artificial Sequence: Synthetic polypeptide"
QVQLVQSGAEVKKPGASVKVSCKASGYTFTDYNIHWVRQAPGQGLEWMGYIYPYNGDTGYAQKLQGRVTMTVDTSTSTAYMELRSLRSDDTAVYYCANGNYLYYYAMDYWGQGTLVTVSS

SEQ ID NO: 3897 - protein, 98 aa, Artificial Sequence
  source: /note="Description of Artificial Sequence: Synthetic polypeptide"
QVQLVQSGAEVKKPGASVKVSCKASGYTFTSYGISWVRQAPGQGLEWMGWISAYNGNTNYAQKLQGRVTMTTDTSTSTAYMELRSLRSDDTAVYYCAR

SEQ ID NO: 3898 - protein, 109 aa, Artificial Sequence
  source: /note="Description of Artificial Sequence: Synthetic polypeptide"
QVQLVQSGAEVKKPGASVKVSCKASGYTFTSYGISWVRQAPGQGLEWMGWISAYNGNTNYAQKLQGRVTMTTDTSTSTAYMELRSLRSDDTAVYYCARWGQGTLVTVSS

SEQ ID NO: 3899 - protein, 113 aa, Artificial Sequence
  source: /note="Description of Artificial Sequence: Synthetic polypeptide"
  MOD_RES (111)..(113): Any amino acid
ASTKGPSVFPLAPCSRSTSESTAALGCLVKDYFPEPVTVSWNSGALTSGVHTFPAVLQSSGLYSLSSVVTVPSSNFGTQTYTCNVDHKPSNTKVDKTVERKCCVECPPCPXXX

SEQ ID NO: 3900 - protein, 101 aa, Artificial Sequence
  source: /note="Description of Artificial Sequence: Synthetic polypeptide"
DIVMTQTPLSLSVTPGQPASISCKSSQSLLHSDGKTYLYWYLQKPGQSPQLLIYEVSNRFSGVPDRFSGSGSGTDFTLKISRVEAEDVGVYYCMQSIQLPP

SEQ ID NO: 3901 - protein, 111 aa, Artificial Sequence
  source: /note="Description of Artificial Sequence: Synthetic polypeptide"
DIVMTQTPLSLSVTPGQPASISCKSSQSLLHSDGKTYLYWYLQKPGQSPQLLIYEVSNRFSGVPDRFSGSGSGTDFTLKISRVEAEDVGVYYCMQSIQLPPFGQGTKLEIK

SEQ ID NO: 3902 - protein, 112 aa, Artificial Sequence
  source: /note="Description of Artificial Sequence: Synthetic polypeptide"
DIVMTQTPLSLSVTPGQPASISCRSSQSLVHSNGYTYLHWYLQKPGQSPQLLIYKVSNRFSGVPDRFSGSGSGTDFTLKISRVEAEDVGVYYCSQSTRVPYTFGQGTKLEIK

SEQ ID NO: 3903 - protein, 112 aa, Artificial Sequence
  source: /note="Description of Artificial Sequence: Synthetic polypeptide"
DVVMTQTPLSLPVSLGDQASISCRSSQSLVHSNGYTYLHWYLQKPGQSPKLLIYKVSNRFSGVPDRFSGSGSGTDFTLKISRVEADDLGVYFCSQSTRVPYTFGGGTKLEIK

SEQ ID NO: 3904 - protein, 112 aa, Artificial Sequence
  source: /note="Description of Artificial Sequence: Synthetic polypeptide"
DVVMTQTPLSLSVTPGQPASISCRSSQSLVHSNGYTYLHWYLQKPGQSPQLLIYKVSNRFSGVPDRFSGSGSGTDFTLKISRVEAEDVGVYYCSQSTRVPYTFGQGTKLEIK

SEQ ID NO: 3905 - protein, 123 aa, Artificial Sequence
  source: /note="Description of Artificial Sequence: Synthetic polypeptide"
QVQLQQSGPELVKPGASLKISCKASGYAFSSSWMNWVKQRPGKGLEWIGRIYPGDGDTNYNGEFRVRATLTADTSSTTAYMQLSSLTSEDSAVYFCARLLRNQPGESYAMDYWGQGASVTVSS

SEQ ID NO: 3906 - protein, 133 aa, Artificial Sequence
  source: /note="Description of Artificial Sequence: Synthetic polypeptide"
  MOD_RES (124)..(133): Any amino acid
QVQLVQSGAEVKKPGASLKISCKASGYAFSSSWMNWVRQAPGQGLEWIGRIYPGDGDTNYAQKFQGRATLTADTSTSTAYMELSSLRSEDTAVYYCARLLRNQPGESYAMDYWGQGALVTVSSXXXXXXXXXX

SEQ ID NO: 3907 - protein, 123 aa, Artificial Sequence
  source: /note="Description of Artificial Sequence: Synthetic polypeptide"
QVQLVQSGAEVKKPGASVKVSCKASGYAFSSSWMNWVRQAPGQGLEWIGRIYPGDGDTNYAQKFQGRVTMTADTSTSTVYMELSSLRSEDTAVYYCARLLRNQPGESYAMDYWGQGTLVTVSS

SEQ ID NO: 3908 - protein, 123 aa, Artificial Sequence
  source: /note="Description of Artificial Sequence: Synthetic polypeptide"
QVQLVQSGAEVKKPGASVKVSCKASGYAFSSSWMNWVRQAPGQGLEWMGRIYPGDGDTNYAQKFQGRVTMTRDTSTSTVYMELSSLRSEDTAVYYCARLLRNQPGESYAMDYWGQGTLVTVSS

SEQ ID NO: 3909 - protein, 98 aa, Artificial Sequence
  source: /note="Description of Artificial Sequence: Synthetic polypeptide"
QVQLVQSGAEVKKPGASVKVSCKASGYTFTSYYMHWVRQAPGQGLEWMGIINPSGGSTSYAQKFQGRVTMTRDTSTSTVYMELSSLRSEDTAVYYCAR

SEQ ID NO: 3910 - protein, 109 aa, Artificial Sequence
  source: /note="Description of Artificial Sequence: Synthetic polypeptide"
QVQLVQSGAEVKKPGASVKVSCKASGYTFTSYYMHWVRQAPGQGLEWMGIINPSGGSTSYAQKFQGRVTMTRDTSTSTVYMELSSLRSEDTAVYYCARWGQGTLVTVSS

SEQ ID NO: 3911 - protein, 446 aa, Artificial Sequence
  source: /note="Description of Artificial Sequence: Synthetic polypeptide"
EVQLVQSGAEVKKPGSSVKVSCKASGYTITDSNIHWVRQAPGQSLEWIGYIYPYNGGTDYNQKFKNRATLTVDNPTNTAYMELSSLRSEDTAFYYCVNGNPWLAYWGQGTLVTVSSASTKGPSVFPLAPSSKSTSGGTAALGCLVKDYFPEPVTVSWNSGALTSGVHTFPAVLQSSGLYSLSSVVTVPSSSLGTQTYICNVNHKPSNTKVDKKVEPKSCDKTHTCPPCPAPELLGGPSVFLFPPKPKDTLMISRTPEVTCVVVDVSHEDPEVKFNWYVDGVEVHNAKTKPREEQYNSTYRVVSVLTVLHQDWLNGKEYKCKVSNKALPAPIEKTISKAKGQPREPQVYTLPPSRDELTKNQVSLTCLVKGFYPSDIAVEWESNGQPENNYKTTPPVLDSDGSFFLYSKLTVDKSRWQQGNVFSCSVMHEALHNHYTQKSLSLSPGK

SEQ ID NO: 3912 - DNA, 1407 bp, Artificial Sequence
  source: /note="Description of Artificial Sequence: Synthetic polynucleotide"
atggagttgcctgttaggctgttggtgctgatgttctggattcctgctagctccagcgaggtgcagctgctggaatccggcggaggactggtgcagcctggcggctccctgagactgtcttgcgccgcctccggcttcaccttctccagctacatcatgatgtgggtgcgacaggcccctggcaagggcctggaatgggtgtcctccatctacccctccggcggcatcaccttctacgccgacaccgtgaagggccggttcaccatctcccgggacaactccaagaacaccctgtacctgcagatgaactccctgcgggccgaggacaccgccgtgtactactgcgcccggatcaagctgggcaccgtgaccaccgtggactactggggccagggcaccctggtgacagtgtcctccgcctccaccaagggcccatcggtcttccccctggcaccctcctccaagagcacctctgggggcacagcggccctgggctgcctggtcaaggactacttccccgaaccggtgacggtgtcgtggaactcaggcgccctgaccagcggcgtgcacaccttcccggctgtcctacagtcctcaggactctactccctcagcagcgtggtgaccgtgccctccagcagcttgggcacccagacctacatctgcaacgtgaatcacaagcccagcaacaccaaggtggacaagaaagttgagcccaaatcttgtgacaaaactcacacatgcccaccgtgcccagcacctgaactcctggggggaccgtcagtcttcctcttccccccaaaacccaaggacaccctcatgatctcccggacccctgaggtcacatgcgtggtggtggacgtgagccacgaagaccctgaggtcaagttcaactggtacgtggacggcgtggaggtgcataatgccaagacaaagccgcgggaggagcagtacaacagcacgtaccgtgtggtcagcgtcctcaccgtcctgcaccaggactggctgaatggcaaggagtacaagtgcaaggtctccaacaaagccctcccagcccccatcgagaaaaccatctccaaagccaaagggcagccccgagaaccacaggtgtacaccctgcccccatcacgggatgagctgaccaagaaccaggtcagcctgacctgcctggtcaaaggcttctatcccagcgacatcgccgtggagtgggagagcaatgggcagccggagaacaactacaagaccacgcctcccgtgctggactccgacggctccttcttcctctatagcaagctcaccgtggacaagagcaggtggcagcaggggaacgtcttctcatgctccgtgatgcatgaggctctgcacaaccactacacgcagaagagcctctccctgtccccgggtaaa

SEQ ID NO: 3913 - DNA, 1445 bp, Artificial Sequence
  source: /note="Description of Artificial Sequence: Synthetic polynucleotide"
gaattctcgagatcgatctcaccatgggatggagctgtatcatcctcttcttggtagcaacagctacaggtgtccactcccaggtgcaattggtgcagtctggggctgaggttaagaagcctggggcttcagtgaaggtgtcctgcaagggttctggctacaccttcaccagctactggatgcattgggtgaggcaggcgcctggccaacgtctagagtggatcggagagattgatccttctgagagtaatactaactacaatcaaaaattcaagggacgcgtcacattgactgtagacatttccgctagcacagcctacatggagctctccagcctgagatctgaggacactgcggtctactattgtgcaagagggggttacgacggatgggactatgctattgactactggggtcaaggcaccctggtcaccgtcagctcagcctccaccaagggcccatcggtcttccccctggcaccctcctccaagagcacctctgggggcacagcggccctgggctgcctggtcaaggactacttccccgaaccggtgacggtgtcgtggaactcaggcgccctgaccagcggcgtgcacaccttcccggctgtcctacagtcctcaggactctactccctcagcagcgtggtgaccgtgccctccagcagcttgggcacccagacctacatctgcaacgtgaatcacaagcccagcaacaccaaggtggacaagaaagttgagcccaaatcttgtgacaaaactcacacatgcccaccgtgcccagcacctgaactcgcgggggcaccgtcagtcttcctcttccccccaaaacccaaggacaccctcatgatctcccggacccctgaggtcacatgcgtggtggtggacgtgagccacgaagaccctgaggtcaagttcaactggtacgtggacggcgtggaggtgcataatgccaagacaaagccgcgggaggagcagtacaacagcacgtaccgtgtggtcagcgtcctcaccgtcctgcaccaggactggctgaatggcaaggagtacaagtgcaaggtctccaacaaagccctcccagcccccatcgagaaaaccatctccaaagccaaagggcagccccgagaaccacaggtgtacaccctgcccccatcccgggatgagctgaccaagaaccaggtcagcctgacctgcctggtcaaaggcttctatcccagcgacatcgccgtggagtgggagagcaatgggcagccggagaacaactacaagaccacgcctcccgtgctggactccgacggctccttcttcctctacagcaagctcaccgtggacaagagcaggtggcagcaggggaacgtcttctcatgctccgtgatgcatgaggctctgcacaaccactacacgcagaagagcctctccctgtctccgggtaaataatctagagca

SEQ ID NO: 3914 - protein, 23 aa, Homo sapiens
MDAMKRGLCCVLLLCGAVFVSPS

SEQ ID NO: 3915 - protein, 23 aa, Artificial Sequence
  source: /note="Description of Artificial Sequence: Synthetic peptide"
DIQMTQSPSSLPASVGDRVTITC

SEQ ID NO: 3916 - protein, 23 aa, Artificial Sequence
  source: /note="Description of Artificial Sequence: Synthetic peptide"
DIVLTQSPDSLAVSLGERATIDC

SEQ ID NO: 3917 - protein, 117 aa, Artificial Sequence
  source: /note="Description of Artificial Sequence: Synthetic polypeptide"
EVQLQQSGPELVKPGASVKISCKASGYTFTDYNLHWVKLSHGKSLEWIGFIYPSNGITGYNQKFKNKATLTVDTSSSTAYMELRSLTSEDSAVYYCARSTVDYFDYWGQGTTLTVSS

SEQ ID NO: 3918 - protein, 23 aa, Artificial Sequence
  source: /note="Description of Artificial Sequence: Synthetic peptide"
GIQMTQSPSSLSASVGDRVTITC

SEQ ID NO: 3919 - protein, 25 aa, Artificial Sequence
  source: /note="Description of Artificial Sequence: Synthetic peptide"
QVQLVQSGAEVKKPGASVKISCKAS

SEQ ID NO: 3920 - protein, 443 aa, Artificial Sequence
  source: /note="Description of Artificial Sequence: Synthetic polypeptide"
QVQLVQSGAEVKKPGASVKISCKASGYTFTDYNLHWVRQAPGQGLEWIGFIYPSNGITGYAQKFQGRATLTVDNSTSTAYMELSSLRSEDTAVYYCARSDVDYFDYWGQGTLLTVSSASTKGPSVFPLAPCSRSTSESTAALGCLVKDYFPEPVTVSWNSGALTSGVHTFPAVLQSSGLYSLSSVVTVPSSNFGTQTYTCNVDHKPSNTKVDKTVERKCCVECPPCPAPPVAGPSVFLFPPKPKDTLMISRTPEVTCVVVDVSHEDPEVQFNWYVDGVEVHNAKTKPREEQFNSTFRVVSVLTVVHQDWLNGKEYKCKVSNKGLPAPIEKTISKTKGQPREPQVYTLPPSREEMTKNQVSLTCLVKGFYPSDIAVEWESNGQPENNYKTTPPMLDSDGSFFLYSKLTVDKSRWQQGNVFSCSVMHEALHNHYTQKSLSLSPGK

SEQ ID NO: 3921 - protein, 442 aa, Artificial Sequence
  source: /note="Description of Artificial Sequence: Synthetic polypeptide"
QVQLVQSGAEVKKPGASVKISCKASGYTFTDYNLHWVRQAPGQGLEWIGFIYPSNGITGYAQKFQGRATLTVDNSTSTAYMELSSLRSEDTAVYYCARSDVDYFDYWGQGTLLTVSSASTKGPSVFPLAPCSRSTSESTAALGCLVKDYFPEPVTVSWNSGALTSGVHTFPAVLQSSGLYSLSSVVTVPSSNFGTQTYTCNVDHKPSNTKVDKTVERKCCVECPPCPAPPVAGPSVFLFPPKPKDTLMISRTPEVTCVVVDVSHEDPEVQFNWYVDGVEVHNAKTKPREEQFNSTFRVVSVLTVVHQDWLNGKEYKCKVSNKGLPAPIEKTISKTKGQPREPQVYTLPPSREEMTKNQVSLTCLVKGFYPSDIAVEWESNGQPENNYKTTPPMLDSDGSFFLYSKLTVDKSRWQQGNVFSCSVMHEALHNHYTQKSLSLSPG

SEQ ID NO: 3922 - protein, 447 aa, Artificial Sequence
  source: /note="Description of Artificial Sequence: Synthetic polypeptide"
QVQLVQSGAEVKKPGASVKISCKASGYTFTDYNLHWVRQAPGQGLEWIGFIYPSNGITGYAQKFQGRATLTVDNSTSTAYMELSSLRSEDTAVYYCARSDVDYFDYWGQGTLLTVSSASTKGPSVFPLAPSSKSTSGGTAALGCLVKDYFPEPVTVSWNSGALTSGVHTFPAVLQSSGLYSLSSVVTVPSSSLGTQTYICNVNHKPSNTKVDKKVEPKSCDKTHTCPPCPAPEAAGGPSVFLFPPKPKDTLMISRTPEVTCVVVDVSHEDPEVKFNWYVDGVEVHNAKTKPREEQYNSTYRVVSVLTVLHQDWLNGKEYKCKVSNKALPASIEKTISKAKGQPREPQVYTLPPSRDELTKNQVSLTCLVKGFYPSDIAVEWESNGQPENNYKTTPPVLDSDGSFFLYSKLTVDKSRWQQGNVFSCSVMHEALHNHYTQKSLSLSPGK

SEQ ID NO: 3923 - protein, 446 aa, Artificial Sequence
  source: /note="Description of Artificial Sequence: Synthetic polypeptide"
QVQLVQSGAEVKKPGASVKISCKASGYTFTDYNLHWVRQAPGQGLEWIGFIYPSNGITGYAQKFQGRATLTVDNSTSTAYMELSSLRSEDTAVYYCARSDVDYFDYWGQGTLLTVSSASTKGPSVFPLAPSSKSTSGGTAALGCLVKDYFPEPVTVSWNSGALTSGVHTFPAVLQSSGLYSLSSVVTVPSSSLGTQTYICNVNHKPSNTKVDKKVEPKSCDKTHTCPPCPAPEAAGGPSVFLFPPKPKDTLMISRTPEVTCVVVDVSHEDPEVKFNWYVDGVEVHNAKTKPREEQYNSTYRVVSVLTVLHQDWLNGKEYKCKVSNKALPASIEKTISKAKGQPREPQVYTLPPSRDELTKNQVSLTCLVKGFYPSDIAVEWESNGQPENNYKTTPPVLDSDGSFFLYSKLTVDKSRWQQGNVFSCSVMHEALHNHYTQKSLSLSPG

SEQ ID NO: 3924 - protein, 447 aa, Artificial Sequence
  source: /note="Description of Artificial Sequence: Synthetic polypeptide"
QVQLVQSGAEVKKPGASVKISCKASGYTFTDYNLHWVRQAPGQGLEWIGFIYPSNGITGYAQKFQGRATLTVDNSTSTAYMELSSLRSEDTAVYYCARSDVDYFDYWGQGTLLTVSSASTKGPSVFPLAPSSKSTSGGTAALGCLVKDYFPEPVTVSWNSGALTSGVHTFPAVLQSSGLYSLSSVVTVPSSSLGTQTYICNVNHKPSNTKVDKKVEPKSCDKTHTCPPCPAPELLGGPSVFLFPPKPKDTLMISRTPEVTCVVVDVSHEDPEVKFNWYVDGVEVHNAKTKPREEQYNSTYRVVSVLTVLHQDWLNGKEYKCKVSNKALPAPIEKTISKAKGQPREPQVYTLPPSRDELTKNQVSLTCLVKGFYPSDIAVEWESNGQPENNYKTTPPVLDSDGSFFLYSKLTVDKSRWQQGNVFSCSVMHEALHNHYTQKSLSLSPGK

SEQ ID NO: 3925 - protein, 446 aa, Artificial Sequence
  source: /note="Description of Artificial Sequence: Synthetic polypeptide"
QVQLVQSGAEVKKPGASVKISCKASGYTFTDYNLHWVRQAPGQGLEWIGFIYPSNGITGYAQKFQGRATLTVDNSTSTAYMELSSLRSEDTAVYYCARSDVDYFDYWGQGTLLTVSSASTKGPSVFPLAPSSKSTSGGTAALGCLVKDYFPEPVTVSWNSGALTSGVHTFPAVLQSSGLYSLSSVVTVPSSSLGTQTYICNVNHKPSNTKVDKKVEPKSCDKTHTCPPCPAPELLGGPSVFLFPPKPKDTLMISRTPEVTCVVVDVSHEDPEVKFNWYVDGVEVHNAKTKPREEQYNSTYRVVSVLTVLHQDWLNGKEYKCKVSNKALPAPIEKTISKAKGQPREPQVYTLPPSRDELTKNQVSLTCLVKGFYPSDIAVEWESNGQPENNYKTTPPVLDSDGSFFLYSKLTVDKSRWQQGNVFSCSVMHEALHNHYTQKSLSLSPG

SEQ ID NO: 3926 - protein, 443 aa, Artificial Sequence
  source: /note="Description of Artificial Sequence: Synthetic polypeptide"
QVQLVQSGAEVKKPGASVKISCKASGYTFTDYNLHWVRQAPGQGLEWIGFIYPSNQITGYAQKFQGRATLTVDNSASTAYMELSSLRSEDTAVYYCARSDVDYFDYWGQGTLLTVSSASTKGPSVFPLAPCSRSTSESTAALGCLVKDYFPEPVTVSWNSGALTSGVHTFPAVLQSSGLYSLSSVVTVPSSNFGTQTYTCNVDHKPSNTKVDKTVERKCCVECPPCPAPPVAGPSVFLFPPKPKDTLMISRTPEVTCVVVDVSHEDPEVQFNWYVDGVEVHNAKTKPREEQFNSTFRVVSVLTVVHQDWLNGKEYKCKVSNKGLPAPIEKTISKTKGQPREPQVYTLPPSREEMTKNQVSLTCLVKGFYPSDIAVEWESNGQPENNYKTTPPMLDSDGSFFLYSKLTVDKSRWQQGNVFSCSVMHEALHNHYTQKSLSLSPGK

SEQ ID NO: 3927 - protein, 442 aa, Artificial Sequence
  source: /note="Description of Artificial Sequence: Synthetic polypeptide"
QVQLVQSGAEVKKPGASVKISCKASGYTFTDYNLHWVRQAPGQGLEWIGFIYPSNQITGYAQKFQGRATLTVDNSASTAYMELSSLRSEDTAVYYCARSDVDYFDYWGQGTLLTVSSASTKGPSVFPLAPCSRSTSESTAALGCLVKDYFPEPVTVSWNSGALTSGVHTFPAVLQSSGLYSLSSVVTVPSSNFGTQTYTCNVDHKPSNTKVDKTVERKCCVECPPCPAPPVAGPSVFLFPPKPKDTLMISRTPEVTCVVVDVSHEDPEVQFNWYVDGVEVHNAKTKPREEQFNSTFRVVSVLTVVHQDWLNGKEYKCKVSNKGLPAPIEKTISKTKGQPREPQVYTLPPSREEMTKNQVSLTCLVKGFYPSDIAVEWESNGQPENNYKTTPPMLDSDGSFFLYSKLTVDKSRWQQGNVFSCSVMHEALHNHYTQKSLSLSPG

SEQ ID NO: 3928 - protein, 447 aa, Artificial Sequence
  source: /note="Description of Artificial Sequence: Synthetic polypeptide"
QVQLVQSGAEVKKPGASVKISCKASGYTFTDYNLHWVRQAPGQGLEWIGFIYPSNQITGYAQKFQGRATLTVDNSASTAYMELSSLRSEDTAVYYCARSDVDYFDYWGQGTLLTVSSASTKGPSVFPLAPSSKSTSGGTAALGCLVKDYFPEPVTVSWNSGALTSGVHTFPAVLQSSGLYSLSSVVTVPSSSLGTQTYICNVNHKPSNTKVDKKVEPKSCDKTHTCPPCPAPEAAGGPSVFLFPPKPKDTLMISRTPEVTCVVVDVSHEDPEVKFNWYVDGVEVHNAKTKPREEQYNSTYRVVSVLTVLHQDWLNGKEYKCKVSNKALPASIEKTISKAKGQPREPQVYTLPPSRDELTKNQVSLTCLVKGFYPSDIAVEWESNGQPENNYKTTPPVLDSDGSFFLYSKLTVDKSRWQQGNVFSCSVMHEALHNHYTQKSLSLSPGK

SEQ ID NO: 3929 - protein, 446 aa, Artificial Sequence
  source: /note="Description of Artificial Sequence: Synthetic polypeptide"
QVQLVQSGAEVKKPGASVKISCKASGYTFTDYNLHWVRQAPGQGLEWIGFIYPSNQITGYAQKFQGRATLTVDNSASTAYMELSSLRSEDTAVYYCARSDVDYFDYWGQGTLLTVSSASTKGPSVFPLAPSSKSTSGGTAALGCLVKDYFPEPVTVSWNSGALTSGVHTFPAVLQSSGLYSLSSVVTVPSSSLGTQTYICNVNHKPSNTKVDKKVEPKSCDKTHTCPPCPAPEAAGGPSVFLFPPKPKDTLMISRTPEVTCVVVDVSHEDPEVKFNWYVDGVEVHNAKTKPREEQYNSTYRVVSVLTVLHQDWLNGKEYKCKVSNKALPASIEKTISKAKGQPREPQVYTLPPSRDELTKNQVSLTCLVKGFYPSDIAVEWESNGQPENNYKTTPPVLDSDGSFFLYSKLTVDKSRWQQGNVFSCSVMHEALHNHYTQKSLSLSPG

SEQ ID NO: 3930 - protein, 447 aa, Artificial Sequence
  source: /note="Description of Artificial Sequence: Synthetic polypeptide"
QVQLVQSGAEVKKPGASVKISCKASGYTFTDYNLHWVRQAPGQGLEWIGFIYPSNQITGYAQKFQGRATLTVDNSASTAYMELSSLRSEDTAVYYCARSDVDYFDYWGQGTLLTVSSASTKGPSVFPLAPSSKSTSGGTAALGCLVKDYFPEPVTVSWNSGALTSGVHTFPAVLQSSGLYSLSSVVTVPSSSLGTQTYICNVNHKPSNTKVDKKVEPKSCDKTHTCPPCPAPELLGGPSVFLFPPKPKDTLMISRTPEVTCVVVDVSHEDPEVKFNWYVDGVEVHNAKTKPREEQYNSTYRVVSVLTVLHQDWLNGKEYKCKVSNKALPAPIEKTISKAKGQPREPQVYTLPPSRDELTKNQVSLTCLVKGFYPSDIAVEWESNGQPENNYKTTPPVLDSDGSFFLYSKLTVDKSRWQQGNVFSCSVMHEALHNHYTQKSLSLSPGK

SEQ ID NO: 3931 - protein, 446 aa, Artificial Sequence
  source: /note="Description of Artificial Sequence: Synthetic polypeptide"
QVQLVQSGAEVKKPGASVKISCKASGYTFTDYNLHWVRQAPGQGLEWIGFIYPSNQITGYAQKFQGRATLTVDNSASTAYMELSSLRSEDTAVYYCARSDVDYFDYWGQGTLLTVSSASTKGPSVFPLAPSSKSTSGGTAALGCLVKDYFPEPVTVSWNSGALTSGVHTFPAVLQSSGLYSLSSVVTVPSSSLGTQTYICNVNHKPSNTKVDKKVEPKSCDKTHTCPPCPAPELLGGPSVFLFPPKPKDTLMISRTPEVTCVVVDVSHEDPEVKFNWYVDGVEVHNAKTKPREEQYNSTYRVVSVLTVLHQDWLNGKEYKCKVSNKALPAPIEKTISKAKGQPREPQVYTLPPSRDELTKNQVSLTCLVKGFYPSDIAVEWESNGQPENNYKTTPPVLDSDGSFFLYSKLTVDKSRWQQGNVFSCSVMHEALHNHYTQKSLSLSPG

SEQ ID NO: 3932 - protein, 443 aa, Artificial Sequence
  source: /note="Description of Artificial Sequence: Synthetic polypeptide"
QVQLVQSGAEVKKPGASVKISCKASGYTFTDYNLHWVRQAPGQGLEWIGFIYPSNRITGYAQKFQGRATLTVDNSTSTAYMELSSLRSEDTAVYYCARSDVDYFDYWGQGTLLTVSSASTKGPSVFPLAPCSRSTSESTAALGCLVKDYFPEPVTVSWNSGALTSGVHTFPAVLQSSGLYSLSSVVTVPSSNFGTQTYTCNVDHKPSNTKVDKTVERKCCVECPPCPAPPVAGPSVFLFPPKPKDTLMISRTPEVTCVVVDVSHEDPEVQFNWYVDGVEVHNAKTKPREEQFNSTFRVVSVLTVVHQDWLNGKEYKCKVSNKGLPAPIEKTISKTKGQPREPQVYTLPPSREEMTKNQVSLTCLVKGFYPSDIAVEWESNGQPENNYKTTPPMLDSDGSFFLYSKLTVDKSRWQQGNVFSCSVMHEALHNHYTQKSLSLSPGK

SEQ ID NO: 3933 - protein, 442 aa, Artificial Sequence
  source: /note="Description of Artificial Sequence: Synthetic polypeptide"
QVQLVQSGAEVKKPGASVKISCKASGYTFTDYNLHWVRQAPGQGLEWIGFIYPSNRITGYAQKFQGRATLTVDNSTSTAYMELSSLRSEDTAVYYCARSDVDYFDYWGQGTLLTVSSASTKGPSVFPLAPCSRSTSESTAALGCLVKDYFPEPVTVSWNSGALTSGVHTFPAVLQSSGLYSLSSVVTVPSSNFGTQTYTCNVDHKPSNTKVDKTVERKCCVECPPCPAPPVAGPSVFLFPPKPKDTLMISRTPEVTCVVVDVSHEDPEVQFNWYVDGVEVHNAKTKPREEQFNSTFRVVSVLTVVHQDWLNGKEYKCKVSNKGLPAPIEKTISKTKGQPREPQVYTLPPSREEMTKNQVSLTCLVKGFYPSDIAVEWESNGQPENNYKTTPPMLDSDGSFFLYSKLTVDKSRWQQGNVFSCSVMHEALHNHYTQKSLSLSPG

SEQ ID NO: 3934 - protein, 447 aa, Artificial Sequence
  source: /note="Description of Artificial Sequence: Synthetic polypeptide"
QVQLVQSGAEVKKPGASVKISCKASGYTFTDYNLHWVRQAPGQGLEWIGFIYPSNRITGYAQKFQGRATLTVDNSTSTAYMELSSLRSEDTAVYYCARSDVDYFDYWGQGTLLTVSSASTKGPSVFPLAPSSKSTSGGTAALGCLVKDYFPEPVTVSWNSGALTSGVHTFPAVLQSSGLYSLSSVVTVPSSSLGTQTYICNVNHKPSNTKVDKKVEPKSCDKTHTCPPCPAPEAAGGPSVFLFPPKPKDTLMISRTPEVTCVVVDVSHEDPEVKFNWYVDGVEVHNAKTKPREEQYNSTYRVVSVLTVLHQDWLNGKEYKCKVSNKALPASIEKTISKAKGQPREPQVYTLPPSRDELTKNQVSLTCLVKGFYPSDIAVEWESNGQPENNYKTTPPVLDSDGSFFLYSKLTVDKSRWQQGNVFSCSVMHEALHNHYTQKSLSLSPGK

SEQ ID NO: 3935 - protein, 446 aa, Artificial Sequence
  source: /note="Description of Artificial Sequence: Synthetic polypeptide"
QVQLVQSGAEVKKPGASVKISCKASGYTFTDYNLHWVRQAPGQGLEWIGFIYPSNRITGYAQKFQGRATLTVDNSTSTAYMELSSLRSEDTAVYYCARSDVDYFDYWGQGTLLTVSSASTKGPSVFPLAPSSKSTSGGTAALGCLVKDYFPEPVTVSWNSGALTSGVHTFPAVLQSSGLYSLSSVVTVPSSSLGTQTYICNVNHKPSNTKVDKKVEPKSCDKTHTCPPCPAPEAAGGPSVFLFPPKPKDTLMISRTPEVTCVVVDVSHEDPEVKFNWYVDGVEVHNAKTKPREEQYNSTYRVVSVLTVLHQDWLNGKEYKCKVSNKALPASIEKTISKAKGQPREPQVYTLPPSRDELTKNQVSLTCLVKGFYPSDIAVEWESNGQPENNYKTTPPVLDSDGSFFLYSKLTVDKSRWQQGNVFSCSVMHEALHNHYTQKSLSLSPG

SEQ ID NO: 3936 - protein, 447 aa, Artificial Sequence
  source: /note="Description of Artificial Sequence: Synthetic polypeptide"
QVQLVQSGAEVKKPGASVKISCKASGYTFTDYNLHWVRQAPGQGLEWIGFIYPSNRITGYAQKFQGRATLTVDNSTSTAYMELSSLRSEDTAVYYCARSDVDYFDYWGQGTLLTVSSASTKGPSVFPLAPSSKSTSGGTAALGCLVKDYFPEPVTVSWNSGALTSGVHTFPAVLQSSGLYSLSSVVTVPSSSLGTQTYICNVNHKPSNTKVDKKVEPKSCDKTHTCPPCPAPELLGGPSVFLFPPKPKDTLMISRTPEVTCVVVDVSHEDPEVKFNWYVDGVEVHNAKTKPREEQYNSTYRVVSVLTVLHQDWLNGKEYKCKVSNKALPAPIEKTISKAKGQPREPQVYTLPPSRDELTKNQVSLTCLVKGFYPSDIAVEWESNGQPENNYKTTPPVLDSDGSFFLYSKLTVDKSRWQQGNVFSCSVMHEALHNHYTQKSLSLSPGK

SEQ ID NO: 3937 - protein, 446 aa, Artificial Sequence
  source: /note="Description of Artificial Sequence: Synthetic polypeptide"
QVQLVQSGAEVKKPGASVKISCKASGYTFTDYNLHWVRQAPGQGLEWIGFIYPSNRITGYAQKFQGRATLTVDNSTSTAYMELSSLRSEDTAVYYCARSDVDYFDYWGQGTLLTVSSASTKGPSVFPLAPSSKSTSGGTAALGCLVKDYFPEPVTVSWNSGALTSGVHTFPAVLQSSGLYSLSSVVTVPSSSLGTQTYICNVNHKPSNTKVDKKVEPKSCDKTHTCPPCPAPELLGGPSVFLFPPKPKDTLMISRTPEVTCVVVDVSHEDPEVKFNWYVDGVEVHNAKTKPREEQYNSTYRVVSVLTVLHQDWLNGKEYKCKVSNKALPAPIEKTISKAKGQPREPQVYTLPPSRDELTKNQVSLTCLVKGFYPSDIAVEWESNGQPENNYKTTPPVLDSDGSFFLYSKLTVDKSRWQQGNVFSCSVMHEALHNHYTQKSLSLSPG

SEQ ID NO: 3938 - protein, 25 aa, Artificial Sequence [sequence omitted]

SEQ ID NO: 3939 - protein, 25 aa, Artificial Sequence [sequence omitted]

SEQ ID NO: 3940 - protein, 25 aa, Artificial Sequence [sequence omitted]

SEQ ID NO: 3941 - protein, 39 aa, Artificial Sequence
  source: /note="Description of Artificial Sequence: Synthetic polypeptide"
SAQKFQGRVTMTVDTSTSTVYMELSSLRSEDTAVYYCAR

SEQ ID NO: 3942 - protein, 11 aa, Artificial Sequence
  source: /note="Description of Artificial Sequence: Synthetic peptide"
WGQGTLLTVSS

SEQ ID NO: 3943 - protein, 11 aa, Artificial Sequence
  source: /note="Description of Artificial Sequence: Synthetic peptide"
  VARIANT (7)..(7): /replace="Leu"
  SITE (1)..(11): /note="Variant residues given in the sequence have no preference with respect to those in the annotations for variant positions"
WGQGTLVTVSS

SEQ ID NO: 3944 - protein, 14 aa, Artificial Sequence
  source: /note="Description of Artificial Sequence: Synthetic peptide"
WVRQAPGQGLEWIG

SEQ ID NO: 3945 - protein, 39 aa, Artificial Sequence
  source: /note="Description of Artificial Sequence: Synthetic polypeptide"
  VARIANT (1)..(1): /replace="Ser"
  VARIANT (3)..(3): /replace="Glu"
  VARIANT (4)..(4): /replace="Asp"
  VARIANT (5)..(5): /replace="Asp"
  VARIANT (6)..(6): /replace="Phe" or "Glu" or "Thr"
  VARIANT (7)..(7): /replace="Asp" or "His"
  VARIANT (9)..(9): /replace="Ala"
  VARIANT (11)..(11): /replace="Leu"
  VARIANT (15)..(15): /replace="Asn" or "Gln"
  VARIANT (16)..(16): /replace="Pro"
  VARIANT (17)..(17): /replace="Ala"
  VARIANT (20)..(20): /replace="Ala"
  SITE (1)..(39): /note="Variant residues given in the sequence have no preference with respect to those in the annotations for variant positions"
YAQKFQGRVTMTVDTSTSTVYMELSSLRSEDTAVYYCAR

SEQ ID NO: 3946 - protein, 23 aa, Artificial Sequence
  source: /note="Description of Artificial Sequence: Synthetic peptide"
  VARIANT (1)..(1): /replace="Gly"
  VARIANT (3)..(3): /replace="Val"
  VARIANT (4)..(4): /replace="Leu"
  VARIANT (9)..(9): /replace="Asp"
  VARIANT (12)..(12): /replace="Pro" or "Ala"
  VARIANT (13)..(13): /replace="Val"
  VARIANT (15)..(15): /replace="Leu"
  VARIANT (17)..(17): /replace="Glu"
  VARIANT (19)..(19): /replace="Ala"
  VARIANT (22)..(22): /replace="Asn" or "Asp"
  SITE (1)..(23): /note="Variant residues given in the sequence have no preference with respect to those in the annotations for variant positions"
DIQMTQSPSSLSASVGDRVTITC

SEQ ID NO: 3947 - protein, 39 aa, Artificial Sequence
  source: /note="Description of Artificial Sequence: Synthetic polypeptide"
YAEKFEGRATLTVDNSTSTAYMELSSLRSEDTAVYYCAR

SEQ ID NO: 3948 - protein, 39 aa, Artificial Sequence
  source: /note="Description of Artificial Sequence: Synthetic polypeptide"
YAQDFQGRVTMTVDTSTSTVYMELSSLRSEDTAVYYCAR

SEQ ID NO: 3949 - protein, 39 aa, Artificial Sequence
  source: /note="Description of Artificial Sequence: Synthetic polypeptide"
YAQKDQGRVTMTVDTSTSTVYMELSSLRSEDTAVYYCAR

SEQ ID NO: 3950 - protein, 39 aa, Artificial Sequence
  source: /note="Description of Artificial Sequence: Synthetic polypeptide"
YAQKFFGRATLTVDNSTSTAYMELSSLRSEDTAVYYCAR

SEQ ID NO: 3951 - protein, 39 aa, Artificial Sequence
  source: /note="Description of Artificial Sequence: Synthetic polypeptide"
YAQKFQDRVTMTVDTSTSTVYMELSSLRSEDTAVYYCAR

SEQ ID NO: 3952 - protein, 39 aa, Artificial Sequence
  source: /note="Description of Artificial Sequence: Synthetic polypeptide"
YAQKFQGRATLTVDNPTSTAYMELSSLRSEDTAVYYCAR

SEQ ID NO: 3953 - protein, 39 aa, Artificial Sequence
  source: /note="Description of Artificial Sequence: Synthetic polypeptide"
YAQKFQGRATLTVDNSASTAYMELSSLRSEDTAVYYCAR

SEQ ID NO: 3954 - protein, 39 aa, Artificial Sequence
  source: /note="Description of Artificial Sequence: Synthetic polypeptide"
YAQKFQGRATLTVDNSTSTAYMELSSLRSEDTAVYYCAR

SEQ ID NO: 3955 - protein, 39 aa, Artificial Sequence
  source: /note="Description of Artificial Sequence: Synthetic polypeptide"
YAQKFQGRATLTVDQSTSTAYMELSSLRSEDTAVYYCAR

SEQ ID NO: 3956 - protein, 39 aa, Artificial Sequence
  source: /note="Description of Artificial Sequence: Synthetic polypeptide"
YAQKFQGRATLTVDTSTSTAYMELSSLRSEDTAVYYCAR

SEQ ID NO: 3957 - protein, 39 aa, Artificial Sequence; identical to SEQ ID NO: 3945
  source: /note="Description of Artificial Sequence: Synthetic polypeptide"

SEQ ID NO: 3958 - protein, 39 aa, Artificial Sequence
  source: /note="Description of Artificial Sequence: Synthetic polypeptide"
YAQKFQHRATLTVDNSTSTAYMELSSLRSEDTAVYYCAR

SEQ ID NO: 3959 - protein, 39 aa, Artificial Sequence
  source: /note="Description of Artificial Sequence: Synthetic polypeptide"
YAQKFTGRVTMTVDTSTSTVYMELSSLRSEDTAVYYCAR

SEQ ID NO: 3960 - protein, 447 aa, Artificial Sequence
  source: /note="Description of Artificial Sequence: Synthetic polypeptide"
  MOD_RES (445)..(447): Any amino acid
QVQLVQSGAEVKKPGASVKVSCKASGYTFTNYNMHWVRQAPGQRLEWMGTIYPGNDDTSYNQKFKDRVTITADTSASTAYMELSSLRSEDTAVYYCARGGYRAMDYWGQGTLVTVSSASTKGPSVFPLAPCSRSTSESTAALGCLVKDYFPEPVTVSWNSGALTSGVHTFPAVLQSSGLYSLSSVVTVPSSSLGTKTYTCNVDHKPSNTKVDKRVESKYGPPCPPCPAPEFLGGPSVFLFPPKPKDTLMISRTPEVTCVVVDVSQEDPEVQFNWYVDGVEVHNAKTKPREEQFNSTYRVVSVLTVLHQDWLNGKEYKCKVSNKGLPSSIEKTISKAKGQPREPQVYTLPPSQEEMTKNQVSLTCLVKGFYPSDIAVEWESNGQPENNYKTTPPVLDSDGSFFLYSRLTVDKSRWQEGNVFSCSVMHEALHNHYTQKSLSLSLGKXXX

SEQ ID NO: 3961 - protein, 450 aa, Artificial Sequence
  source: /note="Description of Artificial Sequence: Synthetic polypeptide"
  MOD_RES (448)..(450): Any amino acid
QVQLVQSGAEVVKPGASVKISCKASGYTFTGYFMNWVKQSPGQSLEWIGRIHPYDGDTFYNQKFQGKATLTVDKSSNTAHMELLSLTSEDFAVYYCTRYDGSRAMDYWGQGTTVTVSSASTKGPSVFPLAPSSKSTSGGTAALGCLVKDYFPEPVTVSWNSGALTSGVHTFPAVLQSSGLYSLSSVVTVPSSSLGTQTYICNVNHKPSNTKVDKKVEPKSCDKTHTCPPCPAPELLGGPSVFLFPPKPKDTLMISRTPEVTCVVVDVSHEDPEVKFNWYVDGVEVHNAKTKPREEQYNSTYRVVSVLTVLHQDWLNGKEYKCKVSNKALPAPIEKTISKAKGQPREPQVYTLPPSRDELTKNQVSLTCLVKGFYPSDIAVEWESNGQPENNYKTTPPVLDSDGSFFLYSKLTVDKSRWQQGNVFSCSVMHEALHNHYTQKSLSLSPGXXX

SEQ ID NO: 3962 - protein, 121 aa, Artificial Sequence
  source: /note="Description of Artificial Sequence: Synthetic polypeptide"
  MOD_RES (119)..(121): Any amino acid
QVQLVQSGAEVVKPGASVKISCKASGYTFTGYFMNWVKQSPGQSLEWIGRIHPYDGDTFYNQKFQGKATLTVDKSSNTAHMELLSLTSEDFAVYYCTRYDGSRAMDYWGQGTTVTVSSXXX

SEQ ID NO: 3963 - protein, 449 aa, Artificial Sequence
  source: /note="Description of Artificial Sequence: Synthetic polypeptide"
EVQLVESGGGLVQPGGSLRLSCAASGFNIKDTYIHWVRQAPGKGLEWVARIYPTNGYTRYADSVKGRFTISADTSKNTAYLQMNSLRAEDTAVYYCSRWGGDGFYAMDYWGQGTLVTVSSASTKGPSVFPLAPSSKSTSGGTAALGCLVKDYFPEPVTVSWNSGALTSGVHTFPAVLQSSGLYSLSSVVTVPSSSLGTQTYICNVNHKPSNTKVDKKVEPKSCDKTHTCPPCPAPELLGGPSVFLFPPKPKDTLMISRTPEVTCVVVDVSHEDPEVKFNWYVDGVEVHNAKTKPREEQYNSTYRVVSVLTVLHQDWLNGKEYKCKVSNKALPAPIEKTISKAKGQPREPQVYTLPPSREEMTKNQVSLTCLVKGFYPSDIAVEWESNGQPENNYKTTPPVLDSDGSFFLYSKLTVDKSRWQQGNVFSCSVMHEALHNHYTQKSLSLSPG

SEQ ID NO: 3964 - protein, 448 aa, Artificial Sequence
  source: /note="Description of Artificial Sequence: Synthetic polypeptide"
EVQLVESGGGLVQPGGSLRLSCAASGFTFTDYTMDWVRQAPGKGLEWVADVNPNSGGSIYNQRFKGRFTLSVDRSKNTLYLQMNSLRAEDTAVYYCARNLGPSFYFDYWGQGTLVTVSSASTKGPSVFPLAPSSKSTSGGTAALGCLVKDYFPEPVTVSWNSGALTSGVHTFPAVLQSSGLYSLSSVVTVPSSSLGTQTYICNVNHKPSNTKVDKKVEPKSCDKTHTCPPCPAPELLGGPSVFLFPPKPKDTLMISRTPEVTCVVVDVSHEDPEVKFNWYVDGVEVHNAKTKPREEQYNSTYRVVSVLTVLHQDWLNGKEYKCKVSNKALPAPIEKTISKAKGQPREPQVYTLPPSREEMTKNQVSLTCLVKGFYPSDIAVEWESNGQPENNYKTTPPVLDSDGSFFLYSKLTVDKSRWQQGNVFSCSVMHEALHNHYTQKSLSLSPG

SEQ ID NO: 3965 - protein, 449 aa, Artificial Sequence
  source: /note="Description of Artificial Sequence: Synthetic polypeptide"
EVQLVESGGGLVQPGGSLRLSCAASGFTFTDYTMDWVRQAPGKGLEWVADVNPNSGGSIYNQRFKGRFTLSVDRSKNTLYLQMNSLRAEDTAVYYCARNLGPSFYFDYWGQGTLVTVSSASTKGPSVFPLAPSSKSTSGGTAALGCLVKDYFPEPVTVSWNSGALTSGVHTFPAVLQSSGLYSLSSVVTVPSSSLGTQTYICNVNHKPSNTKVDKKVEPKSCDKTHTCPPCPAPELLGGPSVFLFPPKPKDTLMISRTPEVTCVVVDVSHEDPEVKFNWYVDGVEVHNAKTKPREEQYNSTYRVVSVLTVLHQDWLNGKEYKCKVSNKALPAPIEKTISKAKGQPREPQVYTLPPSREEMTKNQVSLTCLVKGFYPSDIAVEWESNGQPENNYKTTPPVLDSDGSFFLYSKLTVDKSRWQQGNVFSCSVMHEALHNHYTQKSLSLSPGK

SEQ ID NO: 3966 - protein, 450 aa, Artificial Sequence
  source: /note="Description of Artificial Sequence: Synthetic polypeptide"
  MOD_RES (448)..(450): Any amino acid
QVQLVQSGVEVKKPGASVKVSCKASGYTFTNYYMYWVRQAPGQGLEWMGGINPSNGGTNFNEKFKNRVTLTTDSSTTTAYMELKSLQFDDTAVYYCARRDYRFDMGFDYWGQGTTVTVSSASTKGPSVFPLAPCSRSTSESTAALGCLVKDYFPEPVTVSWNSGALTSGVHTFPAVLQSSGLYSLSSVVTVPSSSLGTKTYTCNVDHKPSNTKVDKRVESKYGPPCPPCPAPEFLGGPSVFLFPPKPKDTLMISRTPEVTCVVVDVSQEDPEVQFNWYVDGVEVHNAKTKPREEQFNSTYRVVSVLTVLHQDWLNGKEYKCKVSNKGLPSSIEKTISKAKGQPREPQVYTLPPSQEEMTKNQVSLTCLVKGFYPSDIAVEWESNGQPENNYKTTPPVLDSDGSFFLYSRLTVDKSRWQEGNVFSCSVMHEALHNHYTQKSLSLSLGKXXX

SEQ ID NO: 3967 - protein, 120 aa, Artificial Sequence
  source: /note="Description of Artificial Sequence: Synthetic polypeptide"
  SITE (1)..(120): /note="A091881 heavy chain variable region"
EVQLLESGGGLVQPGGSLRLSCAASGFTFSMYMMMWVRQAPGKGLEWVSSIYPSGGITFYADSVKGRFTISRDNSKNTLYLQMNSLRAEDTAIYYCARIKLGTVTTVDYWGQGTLVTVSS

SEQ ID NO: 3968 - protein, 450 aa, Artificial Sequence
  source: /note="Description of Artificial Sequence: Synthetic polypeptide"
  SITE (1)..(450): /note="A091881 complete heavy chain"
EVQLLESGGGLVQPGGSLRLSCAASGFTFSMYMMMWVRQAPGKGLEWVSSIYPSGGITFYADSVKGRFTISRDNSKNTLYLQMNSLRAEDTAIYYCARIKLGTVTTVDYWGQGTLVTVSSASTKGPSVFPLAPSSKSTSGGTAALGCLVKDYFPEPVTVSWNSGALTSGVHTFPAVLQSSGLYSLSSVVTVPSSSLGTQTYICNVNHKPSNTKVDKRVEPKSCDKTHTCPPCPAPELLGGPSVFLFPPKPKDTLMISRTPEVTCVVVDVSHEDPEVKFNWYVDGVEVHNAKTKPREEQYNSTYRVVSVLTVLHQDWLNGKEYKCKVSNKALPAPIEKTISKAKGQPREPQVYTLPPSREEMTKNQVSLTCLVKGFYPSDIAVEWESNGQPENNYKTTPPVLDSDGSFFLYSKLTVDKSRWQQGNVFSCSVMHEALHNHYTQKSLSLSPGK

SEQ ID NO: 3969 - protein, 120 aa, Artificial Sequence
  source: /note="Description of Artificial Sequence: Synthetic polypeptide"
  SITE (1)..(120): /note="A092462 heavy chain variable region"
EVQLLESGGGLVQPGGSLRLSCAASGFTFSSYIMMWVRQAPGKGLEWVSSIYPSGGITFYADTVKGRFTISRDNSKNTLYLQMNSLRAEDTAVYYCARIKLGTVTTVDYWGQGTLVTVSS

SEQ ID NO: 3970 - protein, 453 aa, Artificial Sequence
  source: /note="Description of Artificial Sequence: Synthetic polypeptide"
  MOD_RES (451)..(453): Any amino acid
EVQLLESGGGLVQPGGSLRLSCAASGFTFSSYIMMWVRQAPGKGLEWVSSIYPSGGITFYADTVKGRFTISRDNSKNTLYLQMNSLRAEDTAVYYCARIKLGTVTTVDYWGQGTLVTVSSASTKGPSVFPLAPSSKSTSGGTAALGCLVKDYFPEPVTVSWNSGALTSGVHTFPAVLQSSGLYSLSSVVTVPSSSLGTQTYICNVNHKPSNTKVDKKVEPKSCDKTHTCPPCPAPELLGGPSVFLFPPKPKDTLMISRTPEVTCVVVDVSHEDPEVKFNWYVDGVEVHNAKTKPREEQYNSTYRVVSVLTVLHQDWLNGKEYKCKVSNKALPAPIEKTISKAKGQPREPQVYTLPPSRDELTKNQVSLTCLVKGFYPSDIAVEWESNGQPENNYKTTPPVLDSDGSFFLYSKLTVDKSRWQQGNVFSCSVMHEALHNHYTQKSLSLSPGKXXX

SEQ ID NO: 3971 - protein, 118 aa, Artificial Sequence
  source: /note="Description of Artificial Sequence: Synthetic polypeptide"
EVQLVESGGGLVQPGGSLRLSCAASGFTFSDSWIHWVRQAPGKGLEWVAWISPYGGSTYYADSVKGRFTISADTSKNTAYLQMNSLRAEDTAVYYCARRHWPGGFDYWGQGTLVTVSA

SEQ ID NO: 3972 - protein, 118 aa, Artificial Sequence
  source: /note="Description of Artificial Sequence: Synthetic polypeptide"
EVQLVESGGGLVQPGGSLRLSCAASGFTFSGSWIHWVRQAPGKGLEWVAWILPYGGSSYYADSVKGRFTISADTSKNTAYLQMNSLRAEDTAVYYCARRHWPGGFDYWGQGTLVTVSA

SEQ ID NO: 3973 - protein, 113 aa, Homo sapiens
EVQLVESGGGLVQPGGSLRLSCAASGFTFSSYAMSWVRQAPGKGLEWVSVISGDGGSTYYADSVKGRFTISRDNSKNTLYLQMNSLRAEDTAVYYCARGFDYWGQGTLVTVSA

SEQ ID NO: 3974 - protein, 456 aa, Homo sapiens
QVQLVESGGGVVQPGRSLRLSCAASGFIFSSYAMHWVRQAPGNGLEWVAFMSYDGSNKKYADSVKGRFTISRDNSKNTLYLQMNSLRAEDTAVYYCARDRGIAAGGNYYYYGMDVWGQGTTVTVSSASTKGPSVFPLAPSSKSTSGGTAALGCLVKDYFPEPVTVSWNSGALTSGVHTFPAVLQSSGLYSLSSVVTVPSSSLGTQTYICNVNHKPSNTKVDKKVEPKSCDKTHTCPPCPAPELLGGPSVFLFPPKPKDTLMISRTPEVTCVVVDVSHEDPEVKFNWYVDGVEVHNAKTKPREEQYNSTYRVVSVLTVLHQDWLNGKEYKCKVSNKALPAPIEKTISKAKGQPREPQVYTLPPSRDELTKNQVSLTCLVKGFYPSDIAVEWESNGQPENNYKTTPPVLDSDGSFFLYSKLTVDKSRWQQGNVFSCSVMHEALHNHYTQKSLSLSPGK

SEQ ID NO: 3975 - protein, 23 aa, Artificial Sequence
  source: /note="Description of Artificial Sequence: Synthetic peptide"
DVVMTQSPDSLAVSLGERATINC

SEQ ID NO: 3976 - protein, 23 aa, Artificial Sequence
  source: /note="Description of Artificial Sequence: Synthetic peptide"
DVVMTQTPLSLSVTPGQPASISC

SEQ ID NO: 3977 - protein, 26 aa, Artificial Sequence
  source: /note="Description of Artificial Sequence: Synthetic peptide"
EVQLVQSGAEVKKPGSSVKVSCKASG

SEQ ID NO: 3978 - protein, 23 aa, Artificial Sequence
  source: /note="Description of Artificial Sequence: Synthetic peptide"
GVVMAQTPLSLSVTPGQPASISC

SEQ ID NO: 3979 - protein, 23 aa, Artificial Sequence
  source: /note="Description of Artificial Sequence: Synthetic peptide"
GVVMTQTPLSLSVTPGQPASISC

SEQ ID NO: 3980 - protein, 453 aa, Artificial Sequence
  source: /note="Description of Artificial Sequence: Synthetic polypeptide"
QVQLVQSGAEVKKPGASVKVSCKASGYAFSSQWMNWVRQAPGQRLEWIGRIYPGGGDTNYAGKFQGRVTITADTSASTAYMELSSLRSEDTAVYYCARLLRNQPGESYAMDYWGQGTLVTVSSASTKGPSVFPLAPSSKSTSGGTAALGCLVKDYFPEPVTVSWNSGALTSGVHTFPAVLQSSGLYSLSSVVTVPSSSLGTQTYICNVNHKPSNTKVDKKVEPKSCDKTHTCPPCPAPELLGGPSVFLFPPKPKDTLMISRTPEVTCVVVDVSHEDPEVKFNWYVDGVEVHNAKTKPREEQYNSTYRVVSVLTVLHQDWLNGKEYKCKVSNKALPAPIEKTISKAKGQPREPQVYTLPPSRDELTKNQVSLTCLVKGFYPSDIAVEWESNGQPENNYKTTPPVLDSDGSFFLYSKLTVDKSRWQQGNVFSCSVMHEALHNHYTQKSLSLSPGK

SEQ ID NO: 3981 - protein, 452 aa, Artificial Sequence
  source: /note="Description of Artificial Sequence: Synthetic polypeptide"
QVQLVQSGAEVKKPGASVKVSCKASGYAFSSQWMNWVRQAPGQRLEWIGRIYPGGGDTNYAGKFQGRVTITADTSASTAYMELSSLRSEDTAVYYCARLLRNQPGESYAMDYWGQGTLVTVSSASTKGPSVFPLAPSSKSTSGGTAALGCLVKDYFPEPVTVSWNSGALTSGVHTFPAVLQSSGLYSLSSVVTVPSSSLGTQTYICNVNHKPSNTKVDKKVEPKSCDKTHTCPPCPAPELLGGPSVFLFPPKPKDTLMISRTPEVTCVVVDVSHEDPEVKFNWYVDGVEVHNAKTKPREEQYNSTYRVVSVLTVLHQDWLNGKEYKCKVSNKALPAPIEKTISKAKGQPREPQVYTLPPSRDELTKNQVSLTCLVKGFYPSDIAVEWESNGQPENNYKTTPPVLDSDGSFFLYSKLTVDKSRWQQGNVFSCSVMHEALHNHYTQKSLSLSPG

SEQ ID NO: 3982 - protein, 453 aa, Artificial Sequence
  source: /note="Description of Artificial Sequence: Synthetic polypeptide"
QVQLVQSGAEVKKPGASVKVSCKASGYAFSSQWMNWVRQAPGQRLEWIGRIYPGGGDTNYAGKFQGRVTITADTSASTAYMELSSLRSEDTAVYYCARLLRNQPGESYAMDYWGQGTLVTVSSASTKGPSVFPLAPSSKSTSGGTAALGCLVKDYFPEPVTVSWNSGALTSGVHTFPAVLQSSGLYSLSSVVTVPSSSLGTQTYICNVNHKPSNTKVDKKVEPKSCDKTHTCPPCPAPELLGGPSVFLFPPKPKDTLMISRTPEVTCVVVDVSHEDPEVKFNWYVDGVEVHNAKTKPREEQYNSTYRVVSVLTVLHQDWLNGKEYKCKVSNKALPASIEKTISKAKGQPREPQVYTLPPSRDELTKNQVSLTCLVKGFYPSDIAVEWESNGQPENNYKTTPPVLDSDGSFFLYSKLTVDKSRWQQGNVFSCSVMHGALHNHYTQKSLSLSPGK

SEQ ID NO: 3983 - protein, 452 aa, Artificial Sequence
  source: /note="Description of Artificial Sequence: Synthetic polypeptide"
QVQLVQSGAEVKKPGASVKVSCKASGYAFSSQWMNWVRQAPGQRLEWIGRIYPGGGDTNYAGKFQGRVTITADTSASTAYMELSSLRSEDTAVYYCARLLRNQPGESYAMDYWGQGTLVTVSSASTKGPSVFPLAPSSKSTSGGTAALGCLVKDYFPEPVTVSWNSGALTSGVHTFPAVLQSSGLYSLSSVVTVPSSSLGTQTYICNVNHKPSNTKVDKKVEPKSCDKTHTCPPCPAPELLGGPSVFLFPPKPKDTLMISRTPEVTCVVVDVSHEDPEVKFNWYVDGVEVHNAKTKPREEQYNSTYRVVSVLTVLHQDWLNGKEYKCKVSNKALPASIEKTISKAKGQPREPQVYTLPPSRDELTKNQVSLTCLVKGFYPSDIAVEWESNGQPENNYKTTPPVLDSDGSFFLYSKLTVDKSRWQQGNVFSCSVMHGALHNHYTQKSLSLSPG

SEQ ID NO: 3984 - protein, 453 aa, Artificial Sequence
  source: /note="Description of Artificial Sequence: Synthetic polypeptide"
QVQLVQSGAEVKKPGSSVKVSCKASGYAFSSDWMNWVRQAPGQGLEWMGRIYPGEGDTNYARKFHGRVTITADESTSTAYMELSSLRSEDTAVYYCARLLRNKPGESYAMDYWGQGTLVTVSSASTKGPSVFPLAPSSKSTSGGTAALGCLVKDYFPEPVTVSWNSGALTSGVHTFPAVLQSSGLYSLSSVVTVPSSSLGTQTYICNVNHKPSNTKVDKKVEPKSCDKTHTCPPCPAPELLGGPSVFLFPPKPKDTLMISRTPEVTCVVVDVSHEDPEVKFNWYVDGVEVHNAKTKPREEQYNSTYRVVSVLTVLHQDWLNGKEYKCKVSNKALPAPIEKTISKAKGQPREPQVYTLPPSRDELTKNQVSLTCLVKGFYPSDIAVEWESNGQPENNYKTTPPVLDSDGSFFLYSKLTVDKSRWQQGNVFSCSVMHEALHNHYTQKSLSLSPGK

SEQ ID NO: 3985 - protein, 452 aa, Artificial Sequence
  source: /note="Description of Artificial Sequence: Synthetic polypeptide"
QVQLVQSGAEVKKPGSSVKVSCKASGYAFSSDWMNWVRQAPGQGLEWMGRIYPGEGDTNYARKFHGRVTITADESTSTAYMELSSLRSEDTAVYYCARLLRNKPGESYAMDYWGQGTLVTVSSASTKGPSVFPLAPSSKSTSGGTAALGCLVKDYFPEPVTVSWNSGALTSGVHTFPAVLQSSGLYSLSSVVTVPSSSLGTQTYICNVNHKPSNTKVDKKVEPKSCDKTHTCPPCPAPELLGGPSVFLFPPKPKDTLMISRTPEVTCVVVDVSHEDPEVKFNWYVDGVEVHNAKTKPREEQYNSTYRVVSVLTVLHQDWLNGKEYKCKVSNKALPAPIEKTISKAKGQPREPQVYTLPPSRDELTKNQVSLTCLVKGFYPSDIAVEWESNGQPENNYKTTPPVLDSDGSFFLYSKLTVDKSRWQQGNVFSCSVMHEALHNHYTQKSLSLSPG

SEQ ID NO: 3986 - protein, 453 aa, Artificial Sequence
  source: /note="Description of Artificial Sequence: Synthetic polypeptide"
QVQLVQSGAEVKKPGSSVKVSCKASGYAFSSDWMNWVRQAPGQGLEWMGRIYPGEGDTNYARKFHGRVTITADESTSTAYMELSSLRSEDTAVYYCARLLRNKPGESYAMDYWGQGTLVTVSSASTKGPSVFPLAPSSKSTSGGTAALGCLVKDYFPEPVTVSWNSGALTSGVHTFPAVLQSSGLYSLSSVVTVPSSSLGTQTYICNVNHKPSNTKVDKKVEPKSCDKTHTCPPCPAPELLGGPSVFLFPPKPKDTLMISRTPEVTCVVVDVSHEDPEVKFNWYVDGVEVHNAKTKPREEQYNSTYRVVSVLTVLHQDWLNGKEYKCKVSNKALPASIEKTISKAKGQPREPQVYTLPPSRDELTKNQVSLTCLVKGFYPSDIAVEWESNGQPENNYKTTPPVLDSDGSFFLYSKLTVDKSRWQQGNVFSCSVMHGALHNHYTQKSLSLSPGK

SEQ ID NO: 3987 - protein, 452 aa, Artificial Sequence
  source: /note="Description of Artificial Sequence: Synthetic polypeptide"
QVQLVQSGAEVKKPGSSVKVSCKASGYAFSSDWMNWVRQAPGQGLEWMGRIYPGEGDTNYARKFHGRVTITADESTSTAYMELSSLRSEDTAVYYCARLLRNKPGESYAMDYWGQGTLVTVSSASTKGPSVFPLAPSSKSTSGGTAALGCLVKDYFPEPVTVSWNSGALTSGVHTFPAVLQSSGLYSLSSVVTVPSSSLGTQTYICNVNHKPSNTKVDKKVEPKSCDKTHTCPPCPAPELLGGPSVFLFPPKPKDTLMISRTPEVTCVVVDVSHEDPEVKFNWYVDGVEVHNAKTKPREEQYNSTYRVVSVLTVLHQDWLNGKEYKCKVSNKALPASIEKTISKAKGQPREPQVYTLPPSRDELTKNQVSLTCLVKGFYPSDIAVEWESNGQPENNYKTTPPVLDSDGSFFLYSKLTVDKSRWQQGNVFSCSVMHGALHNHYTQKSLSLSPG

SEQ ID NO: 3988 - protein, 453 aa, Artificial Sequence
  source: /note="Description of Artificial Sequence: Synthetic polypeptide"
QVQLVQSGAEVKKPGSSVKVSCKASGYAFSSHWMNWVRQAPGQGLEWMGRIYPGEGDTNYAQKFRGRVTITADESTSTAYMELSSLRSEDTAVYYCARLLRNQPGASYAMDYWGQGTLVTVSSASTKGPSVFPLAPSSKSTSGGTAALGCLVKDYFPEPVTVSWNSGALTSGVHTFPAVLQSSGLYSLSSVVTVPSSSLGTQTYICNVNHKPSNTKVDKKVEPKSCDKTHTCPPCPAPELLGGPSVFLFPPKPKDTLMISRTPEVTCVVVDVSHEDPEVKFNWYVDGVEVHNAKTKPREEQYNSTYRVVSVLTVLHQDWLNGKEYKCKVSNKALPAPIEKTISKAKGQPREPQVYTLPPSRDELTKNQVSLTCLVKGFYPSDIAVEWESNGQPENNYKTTPPVLDSDGSFFLYSKLTVDKSRWQQGNVFSCSVMHEALHNHYTQKSLSLSPGK

SEQ ID NO: 3989 - protein, 452 aa, Artificial Sequence
  source: /note="Description of Artificial Sequence: Synthetic polypeptide"
QVQLVQSGAEVKKPGSSVKVSCKASGYAFSSHWMNWVRQAPGQGLEWMGRIYPGEGDTNYAQKFRGRVTITADESTSTAYMELSSLRSEDTAVYYCARLLRNQPGASYAMDYWGQGTLVTVSSASTKGPSVFPLAPSSKSTSGGTAALGCLVKDYFPEPVTVSWNSGALTSGVHTFPAVLQSSGLYSLSSVVTVPSSSLGTQTYICNVNHKPSNTKVDKKVEPKSCDKTHTCPPCPAPELLGGPSVFLFPPKPKDTLMISRTPEVTCVVVDVSHEDPEVKFNWYVDGVEVHNAKTKPREEQYNSTYRVVSVLTVLHQDWLNGKEYKCKVSNKALPAPIEKTISKAKGQPREPQVYTLPPSRDELTKNQVSLTCLVKGFYPSDIAVEWESNGQPENNYKTTPPVLDSDGSFFLYSKLTVDKSRWQQGNVFSCSVMHEALHNHYTQKSLSLSPG

SEQ ID NO: 3990 - protein, 453 aa, Artificial Sequence
  source: /note="Description of Artificial Sequence: Synthetic polypeptide"
QVQLVQSGAEVKKPGSSVKVSCKASGYAFSSHWMNWVRQAPGQGLEWMGRIYPGGGDTNYAQKFRGRVTITADESTSTAYMELSSLRSEDTAVYYCARLLRNQPGASYAMDYWGQGTLVTVSSASTKGPSVFPLAPSSKSTSGGTAALGCLVKDYFPEPVTVSWNSGALTSGVHTFPAVLQSSGLYSLSSVVTVPSSSLGTQTYICNVNHKPSNTKVDKKVEPKSCDKTHTCPPCPAPELLGGPSVFLFPPKPKDTLMISRTPEVTCVVVDVSHEDPEVKFNWYVDGVEVHNAKTKPREEQYNSTYRVVSVLTVLHQDWLNGKEYKCKVSNKALPAPIEKTISKAKGQPREPQVYTLPPSRDELTKNQVSLTCLVKGFYPSDIAVEWESNGQPENNYKTTPPVLDSDGSFFLYSKLTVDKSRWQQGNVFSCSVMHEALHNHYTQKSLSLSPGK

SEQ ID NO: 3991 - protein, 452 aa, Artificial Sequence
  source: /note="Description of Artificial Sequence: Synthetic polypeptide"
QVQLVQSGAEVKKPGSSVKVSCKASGYAFSSHWMNWVRQAPGQGLEWMGRIYPGGGDTNYAQKFRGRVTITADESTSTAYMELSSLRSEDTAVYYCARLLRNQPGASYAMDYWGQGTLVTVSSASTKGPSVFPLAPSSKSTSGGTAALGCLVKDYFPEPVTVSWNSGALTSGVHTFPAVLQSSGLYSLSSVVTVPSSSLGTQTYICNVNHKPSNTKVDKKVEPKSCDKTHTCPPCPAPELLGGPSVFLFPPKPKDTLMISRTPEVTCVVVDVSHEDPEVKFNWYVDGVEVHNAKTKPREEQYNSTYRVVSVLTVLHQDWLNGKEYKCKVSNKALPAPIEKTISKAKGQPREPQVYTLPPSRDELTKNQVSLTCLVKGFYPSDIAVEWESNGQPENNYKTTPPVLDSDGSFFLYSKLTVDKSRWQQGNVFSCSVMHEALHNHYTQKSLSLSPG

SEQ ID NO: 3992 - protein, 453 aa, Artificial Sequence
  source: /note="Description of Artificial Sequence: Synthetic polypeptide"
QVQLVQSGAEVKKPGSSVKVSCKASGYAFSSHWMNWVRQAPGQGLEWMGRIYPGGGDTNYARKFRGRVTITADESTSTAYMELSSLRSEDTAVYYCARLLRNQPGASYAMDYWGQGTLVTVSSASTKGPSVFPLAPSSKSTSGGTAALGCLVKDYFPEPVTVSWNSGALTSGVHTFPAVLQSSGLYSLSSVVTVPSSSLGTQTYICNVNHKPSNTKVDKKVEPKSCDKTHTCPPCPAPELLGGPSVFLFPPKPKDTLMISRTPEVTCVVVDVSHEDPEVKFNWYVDGVEVHNAKTKPREEQYNSTYRVVSVLTVLHQDWLNGKEYKCKVSNKALPAPIEKTISKAKGQPREPQVYTLPPSRDELTKNQVSLTCLVKGFYPSDIAVEWESNGQPENNYKTTPPVLDSDGSFFLYSKLTVDKSRWQQGNVFSCSVMHEALHNHYTQKSLSLSPGK

SEQ ID NO: 3993 - protein, 452 aa, Artificial Sequence
  source: /note="Description of Artificial Sequence: Synthetic polypeptide"
QVQLVQSGAEVKKPGSSVKVSCKASGYAFSSHWMNWVRQAPGQGLEWMGRIYPGGGDTNYARKFRGRVTITADESTSTAYMELSSLRSEDTAVYYCARLLRNQPGASYAMDYWGQGTLVTVSSASTKGPSVFPLAPSSKSTSGGTAALGCLVKDYFPEPVTVSWNSGALTSGVHTFPAVLQSSGLYSLSSVVTVPSSSLGTQTYICNVNHKPSNTKVDKKVEPKSCDKTHTCPPCPAPELLGGPSVFLFPPKPKDTLMISRTPEVTCVVVDVSHEDPEVKFNWYVDGVEVHNAKTKPREEQYNSTYRVVSVLTVLHQDWLNGKEYKCKVSNKALPAPIEKTISKAKGQPREPQVYTLPPSRDELTKNQVSLTCLVKGFYPSDIAVEWESNGQPENNYKTTPPVLDSDGSFFLYSKLTVDKSRWQQGNVFSCSVMHEALHNHYTQKSLSLSPG

SEQ ID NO: 3994 - protein, 453 aa, Artificial Sequence
  source: /note="Description of Artificial Sequence: Synthetic polypeptide"
QVQLVQSGAEVKKPGSSVKVSCKASGYAFSSQWMNWVRQAPGQGLEWMGRIYPGEGDTNYARKFQGRVTITADESTSTAYMELSSLRSEDTAVYYCARLLRNQPGESYAMDYWGQGTLVTVSSASTKGPSVFPLAPSSKSTSGGTAALGCLVKDYFPEPVTVSWNSGALTSGVHTFPAVLQSSGLYSLSSVVTVPSSSLGTQTYICNVNHKPSNTKVDKKVEPKSCDKTHTCPPCPAPELLGGPSVFLFPPKPKDTLMISRTPEVTCVVVDVSHEDPEVKFNWYVDGVEVHNAKTKPREEQYNSTYRVVSVLTVLHQDWLNGKEYKCKVSNKALPAPIEKTISKAKGQPREPQVYTLPPSRDELTKNQVSLTCLVKGFYPSDIAVEWESNGQPENNYKTTPPVLDSDGSFFLYSKLTVDKSRWQQGNVFSCSVMHEALHNHYTQKSLSLSPGK

SEQ ID NO: 3995 - protein, 452 aa, Artificial Sequence
  source: /note="Description of Artificial Sequence: Synthetic polypeptide"
QVQLVQSGAEVKKPGSSVKVSCKASGYAFSSQWMNWVRQAPGQGLEWMGRIYPGEGDTNYARKFQGRVTITADESTSTAYMELSSLRSEDTAVYYCARLLRNQPGESYAMDYWGQGTLVTVSSASTKGPSVFPLAPSSKSTSGGTAALGCLVKDYFPEPVTVSWNSGALTSGVHTFPAVLQSSGLYSLSSVVTVPSSSLGTQTYICNVNHKPSNTKVDKKVEPKSCDKTHTCPPCPAPELLGGPSVFLFPPKPKDTLMISRTPEVTCVVVDVSHEDPEVKFNWYVDGVEVHNAKTKPREEQYNSTYRVVSVLTVLHQDWLNGKEYKCKVSNKALPAPIEKTISKAKGQPREPQVYTLPPSRDELTKNQVSLTCLVKGFYPSDIAVEWESNGQPENNYKTTPPVLDSDGSFFLYSKLTVDKSRWQQGNVFSCSVMHEALHNHYTQKSLSLSPG

SEQ ID NO: 3996 - protein, 30 aa, Artificial Sequence
  source: /note="Description of Artificial Sequence: Synthetic polypeptide"
RVTITADTSASTAYMELSSLRSEDTAVYYC

SEQ ID NO: 3997 - protein, 14 aa, Artificial Sequence
  source: /note="Description of Artificial Sequence: Synthetic peptide"
WVRQAPGQRLEWIG

SEQ ID NO: 3998 - protein, 473 aa, Homo sapiens
MGWNYIILFLVTTATDVHSQAQLQQPGAELVKPGASVNLSCKASGYTFTNYWIHWVSQRPGQGLEWIGEINPSDGRTYYNEKFKNKVILTVDEASTTAYLQLSSLTSEDSAVYYCTSRYYIYGVDYWGQGTTLTVSSAKTTPPSVYPLAPGCGDTTGSSVTLGCLVKGYFPESVTVTWNSGSLSSSVHTFPALLQSGLYTMSSSVTVPSSTWPSQTVTCSVAHPASSTTVDKKLEPSGPISTINPCPPCKECHKCPAPNLEGGPSVFIFPPNIKDVLMISLTPKVTCVVVDVSEDDPDVQIGWFVNNVEVHTAQTQTHREDYNSTIRVVSTLPIQHQDWMSGKEFKCKVNNKDLPSPIERTISKIKGLVRAPQVYILPPPAEQLSRKDVSLTCLVVGFNPGDISVEWTSNGHTEENYKDTAPVLDSDGSYFIYSKLNMKTSKWEKTDSFSCNVRHEGLKNYYLKKTISRSPGK

SEQ ID NO: 3999 - protein, 472 aa, Homo sapiens
MRVLILLCLFTVFPGILSDVRLQESGPDLVKPSQSLSLTCTVTGYSITRAYNWHWIRQFPGNKLEWMGYILYSGTTDYNPSLKSRISFTRDTSKNQLILQLDSVTTDDTGTYYCARAGYDGGMDYWGQGVSVTVSSAKTTPPSVYPLAPGCGDTTGSSVTLGCLVKGYFPESVTVTWNSGSLSSSVHTFPALLQSGLYTMSSSVTVPSSTWPSQTVTCSVAHPASSTTVDKKLEPSGPISTINPCPPCKECHKCPAPNLEGGPSVFIFPPNIKDVLMISLTPKVTCVVVDVSEDDPDVQISWFVNNVEVHTAQTQTHREDYNSTIRVVSTLPIQHQDWMSGKEFKCKVNNKDLPSPIERTISKIKGLVRAPQVYILPPPAEQLSRKDVSLTCLVVGFNPGDISVEWTSNGHTEENYKDTAPVLDSDGSYFIYSKLNMKTSKWEKTDSFSCNVRHEGLKNYYLKKTISRSPGK

SEQ ID NO: 4000 - protein, 121 aa, Mus sp.
EVQLQQSGAELVKPGASVKLSCTASGFNIKDTYMHWVKQRPEQGLEWIGRIDPASGDTKYDPKFQVKATITADTSSNTAWLQLSSLTSEDTAVYYCADGMWVSTGYALDFWGQGTTVTVSS

SEQ ID NO: 4001 - protein, 453 aa, Artificial Sequence
  source: /note="Description of Artificial Sequence: Synthetic polypeptide"
  VARIANT (1)..(1): /replace="pyroglutamic acid"
  VARIANT (451)..(453): /replace=" "
  MOD_RES (451)..(453): Any amino acid
  SITE (1)..(453): /note="Variant residues given in the sequence have no preference with respect to those in the annotations for variant positions"
QVQLVQSGAEVKKPGASVKVSCKASGFNIKDTYIHWVRQAPGQRLEWMGRIDPANGYTKYDPKFQGRVTITADTSASTAYMELSSLRSEDTAVYYCAREGYYGNYGVYAMDYWGQGTLVTVSSASTKGPSVFPLAPCSRSTSESTAALGCLVKDYFPEPVTVSWNSGALTSGVHTFPAVLQSSGLYSLSSVVTVPSSSLGTKTYTCNVDHKPSNTKVDKRVESKYGPPCPSCPAPEFLGGPSVFLFPPKPKDTLMISRTPEVTCVVVDVSQEDPEVQFNWYVDGVEVHNAKTKPREEQFNSTYRVVSVLTVLHQDWLNGKEYKCKVSNKGLPSSIEKTISKAKGQPREPQVYTLPPSQEEMTKNQVSLTCLVKGFYPSDIAVEWESNGQPENNYKTTPPVLDSDGSFFLYSRLTVDKSRWQEGNVFSCSVMHEALHNHYTQKSLSLSLGKXXX

SEQ ID NO: 4002 - DNA, 705 bp, Artificial Sequence
  source: /note="Description of Artificial Sequence: Synthetic polynucleotide"
atggagttgcctgttaggctgttggtgctgatgttctggattcctgcttccttaagccagtccgccctgacccagcctgcctccgtgtctggctcccctggccagtccatcaccatcagctgcaccggcacctccagcgacgtgggcggctacaactacgtgtcctggtatcagcagcaccccggcaaggcccccaagctgatgatctacgacgtgtccaaccggccctccggcgtgtccaacagattctccggctccaagtccggcaacaccgcctccctgaccatcagcggactgcaggcagaggacgaggccgactactactgctcctcctacacctcctccagcaccagagtgttcggcaccggcacaaaagtgaccgtgctgggccagcccaaggccaacccaaccgtgacactgttccccccatcctccgaggaactgcaggccaacaaggccaccctggtctgcctgatctcagatttctatccaggcgccgtgaccgtggcctggaaggctgatggctccccagtgaaggccggcgtggaaaccaccaagccctccaagcagtccaacaacaaatacgccgcctcctcctacctgtccctgacccccgagcagtggaagtcccaccggtcctacagctgccaggtcacacacgagggctccaccgtggaaaagaccgtcgcccccaccgagtgctca

SEQ ID NO: 4003 - DNA, 751 bp, Artificial Sequence
  source: /note="Description of Artificial Sequence: Synthetic polynucleotide"
gaattctcgagatcgatctcaccatgggatggagctgtatcatcctcttcttggtagcaacagctacaggtgtccactccgatgtagtgatgactcaaagtccactctccctgcctgtcacccctggagaaccagcttctatctcttgcaggtctagtcagagtcttgcaaagagttatgggaacacctatttgtcttggtacctgcagaagcctggccagtctccacagctcctcatctatgggatttccaacagattttctggggtgccagacaggttcagtggcagtggttcagggacagatttcacactcaagatctcgcgagtagaggctgaggacgtgggagtgtattactgcttacaaggtacacatcagccgtacacgttcggacaggggaccaaggtggagatcaagcgtacggtggctgcaccatctgtcttcatcttcccgccatctgatgagcagttgaaatctggaactgcctctgttgtgtgcctgctgaataacttctatcccagagaggccaaagtacagtggaaggtggataacgccctccaatcgggtaactcccaggagagtgtcacagagcaggacagcaaggacagcacctacagcctcagcagcaccctgaccctgagcaaagcagactacgagaaacacaaagtctacgcctgcgaagtcacccatcagggcctgagctcgcccgtcacaaagagcttcaacaggggagagtgttagtctagagcagc

SEQ ID NO: 4004 - protein, 218 aa, Artificial Sequence
  source: /note="Description of Artificial Sequence: Synthetic polypeptide"
DIVLTQSPDSLAVSLGERATINCRASQSVSTSTYSYMHWYQQKPGQPPKLLIKYASNLESGVPDRFSGSGSGTDFTLTISSLQAEDVAVYYCQHSWEIPLTFGQGTKLEIKRTVAAPSVFIFPPSDEQLKSGTASVVCLLNNFYPREAKVQWKVDNALQSGNSQESVTEQDSKDSTYSLSSTLTLSKADYEKHKVYACEVTHQGLSSPVTKSFNRGEC

SEQ ID NO: 4005 - protein, 10 aa, Artificial Sequence
  source: /note="Description of Artificial Sequence: Synthetic peptide"
FGQGTKLEIE

SEQ ID NO: 4006 - protein, 10 aa, Artificial Sequence
  source: /note="Description of Artificial Sequence: Synthetic peptide"
FGQGTKLEIK

SEQ ID NO: 4007 - protein, 32 aa, Artificial Sequence
  source: /note="Description of Artificial Sequence: Synthetic polypeptide"
GVPSRFSGSGSGTDFTLTISSLQPEDLATYYC

SEQ ID NO: 4008 - protein, 32 aa, Artificial Sequence; identical to SEQ ID NO: 3500
  source: /note="Description of Artificial Sequence: Synthetic polypeptide"
  VARIANT (4)..(4): /replace="Asp"
  VARIANT (24)..(24): /replace="Ala"
  VARIANT (27)..(27): /replace="Leu" or "Val"
  VARIANT (29)..(29): /replace="Val"
  SITE (1)..(32): /note="Variant residues given in the sequence have no preference with respect to those in the annotations for variant positions"

SEQ ID NO: 4009 - protein, 15 aa, Artificial Sequence
  source: /note="Description of Artificial Sequence: Synthetic peptide"
WYQQKPGKAPKLLIK

SEQ ID NO: 4010 - protein, 15 aa, Artificial Sequence
  source: /note="Description of Artificial Sequence: Synthetic peptide"
  VARIANT (8)..(8): /replace="Gln"
  VARIANT (9)..(9): /replace="Pro"
  SITE (1)..(15): /note="Variant residues given in the sequence have no preference with respect to those in the annotations for variant positions"
WYQQKPGKAPKLLIK

SEQ ID NO: 4011 - protein, 15 aa, Artificial Sequence
  source: /note="Description of Artificial Sequence: Synthetic peptide"
WYQRKPGKAPKLLIK

SEQ ID NO: 4012 - protein, 15 aa, Artificial Sequence
  source: /note="Description of Artificial Sequence: Synthetic peptide"
  VARIANT (4)..(4): /replace="Arg"
  VARIANT (8)..(8): /replace="Gln"
  VARIANT (9)..(9): /replace="Pro"
  SITE (1)..(15): /note="Variant residues given in the sequence have no preference with respect to those in the annotations for variant positions"
WYQQKPGKAPKLLIK

SEQ ID NO: 4013 - protein, 222 aa, Artificial Sequence
  source: /note="Description of Artificial Sequence: Synthetic polypeptide"
  MOD_RES (220)..(222): Any amino acid
DIVMTQSPLSLPVTPGEPASISCRSSQSIVYSNGNTYLGWYLQKPGQSPQLLIYKVSNRFSGVPDRFSGSGSGTDFTLKISRVEAEDVGVYYCFQGSHVPYTFGQGTKLEIKRTVAAPSVFIFPPSDEQLKSGTASVVCLLNNFYPREAKVQWKVDNALQSGNSQESVTEQDSKDSTYSLSSTLTLSKADYEKHKVYACEVTHQGLSSPVTKSFNRGECXXX

SEQ ID NO: 4014 - protein, 220 aa, Artificial Sequence
  source: /note="Description of Artificial Sequence: Synthetic polypeptide"
  MOD_RES (219)..(220): Any amino acid
DIVLTQSPLSLAVSLGQPAIISCKASQSVSFAGTSLMHWYHQKPGQQPRLLIYRASNLEAGVPDRFSGSGSKTDFTLTISPVEAEDAATYYCQQSREYPYTFGGGTKLEIKRTVAAPSVFIFPPSDEQLKSGTASVVCLLNNFYPREAKVQWKVDNALQSGNSQESVTEQDSKDSTYSLSSTLTLSKADYEKHKVYACEVTHQGLSSPVTKSFNRGECXX

SEQ ID NO: 4015 - protein, 214 aa, Artificial Sequence
  source: /note="Description of Artificial Sequence: Synthetic polypeptide"
DIQMTQSPSSLSASVGDRVTITCKASQDVSIGVAWYQQKPGKAPKLLIYSASYRYTGVPSRFSGSGSGTDFTLTISSLQPEDFATYYCQQYYIYPYTFGQGTKVEIKRTVAAPSVFIFPPSDEQLKSGTASVVCLLNNFYPREAKVQWKVDNALQSGNSQESVTEQDSKDSTYSLSSTLTLSKADYEKHKVYACEVTHQGLSSPVTKSFNRGEC

SEQ ID NO: 4016 - protein, 214 aa, Artificial Sequence
  source: /note="Description of Artificial Sequence: Synthetic polypeptide"
DIQMTQSPSSLSASVGDRVTITCRASQDVNTAVAWYQQKPGKAPKLLIYSASFLYSGVPSRFSGSRSGTDFTLTISSLQPEDFATYYCQQHYTTPPTFGQGTKVEIKRTVAAPSVFIFPPSDEQLKSGTASVVCLLNNFYPREAKVQWKVDNALQSGNSQESVTEQDSKDSTYSLSSTLTLSKADYEKHKVYACEVTHQGLSSPVTKSFNRGEC

SEQ ID NO: 4017 - protein, 217 aa, Artificial Sequence
  source: /note="Description of Artificial Sequence: Synthetic polypeptide"
VHSDIQMTQSPSSLSASVGDRVTITCKASQDVSIGVAWYQQKPGKAPKLLIYSASYRYTGVPSRFSGSGSGTDFTLTISSLQPEDFATYYCQQYYIYPYTFGQGTKVEIKRTVAAPSVFIFPPSDEQLKSGTASVVCLLNNFYPREAKVQWKVDNALQSGNSQESVTEQDSKDSTYSLSSTLTLSKADYEKHKVYACEVTHQGLSSPVTKSFNRGEC

SEQ ID NO: 4018 - protein, 218 aa, Artificial Sequence
  source: /note="Description of Artificial Sequence: Synthetic polypeptide"
EIVLTQSPATLSLSPGERATLSCRASKGVSTSGYSYLHWYQQKPGQAPRLLIYLASYLESGVPARFSGSGSGTDFTLTISSLEPEDFAVYYCQHSRDLPLTFGGGTKVEIKRTVAAPSVFIFPPSDEQLKSGTASVVCLLNNFYPREAKVQWKVDNALQSGNSQESVTEQDSKDSTYSLSSTLTLSKADYEKHKVYACEVTHQGLSSPVTKSFNRGEC

SEQ ID NO: 4019 - protein, 108 aa, Artificial Sequence
  source: /note="Description of Artificial Sequence: Synthetic polypeptide"
DIQMTQSPSSLSASVGDRVTITCRASQDVSTAVAWYQQKPGKAPKLLIYSASFLYSGVPSRFSGSGSGTDFTLTISSLQPEDFATYYCQQFFYTPPTFGQGTKVEIKR

SEQ ID NO: 4020 - protein, 108 aa, Artificial Sequence
  source: /note="Description of Artificial Sequence: Synthetic polypeptide"
DIQMTQSPSSLSASVGDRVTITCRASQDVSTAVAWYQQKPGKAPKLLIYSASFLYSGVPSRFSGSGSGTDFTLTISSLQPEDFATYYCQQGYGVPRTFGQGTKVEIKR

SEQ ID NO: 4021 - protein, 108 aa, Artificial Sequence
  source: /note="Description of Artificial Sequence: Synthetic polypeptide"
DIQMTQSPSSLSASVGDRVTITCRASQDVSTAVAWYQQKPGKAPKLLIYSASFLYSGVPSRFSGSGSGTDFTLTISSLQPEDFATYYCQQSLFTPPTFGQGTKVEIKR

SEQ ID NO: 4022 - protein, 108 aa, Artificial Sequence
  source: /note="Description of Artificial Sequence: Synthetic polypeptide"
DIQMTQSPSSLSASVGDRVTITCRASQDVSTAVAWYQQKPGKAPKLLIYSASFLYSGVPSRFSGSGSGTDFTLTISSLQPEDFATYYCQQSLYTPPTFGQGTKVEIKR

SEQ ID NO: 4023 - protein, 108 aa, Artificial Sequence
  source: /note="Description of Artificial Sequence: Synthetic polypeptide"
DIQMTQSPSSLSASVGDRVTITCRASQDVSTAVAWYQQKPGKAPKLLIYSASFLYSGVPSRFSGSGSGTDFTLTISSLQPEDFATYYCQQSWYHPPTFGQGTKVEIKR

SEQ ID NO: 4024 - protein, 108 aa, Artificial Sequence
  source: /note="Description of Artificial Sequence: Synthetic polypeptide"
DIQMTQSPSSLSASVGDRVTITCRASQDVSTAVAWYQQKPGKAPKLLIYSASFLYSGVPSRFSGSGSGTDFTLTISSLQPEDFATYYCQQSYFIPPTFGQGTKVEIKR

SEQ ID NO: 4025 - protein, 108 aa, Artificial Sequence
  source: /note="Description of Artificial Sequence: Synthetic polypeptide"
DIQMTQSPSSLSASVGDRVTITCRASQDVSTAVAWYQQKPGKAPKLLIYSASFLYSGVPSRFSGSGSGTDFTLTISSLQPEDFATYYCQQYFITPTTFGQGTKVEIKR

SEQ ID NO: 4026 - protein, 108 aa, Artificial Sequence
  source: /note="Description of Artificial Sequence: Synthetic polypeptide"
DIQMTQSPSSLSASVGDRVTITCRASQDVSTAVAWYQQKPGKAPKLLIYSASFLYSGVPSRFSGSGSGTDFTLTISSLQPEDFATYYCQQYFYIPPTFGQGTKVEIKR

SEQ ID NO: 4027 - protein, 108 aa, Artificial Sequence
  source: /note="Description of Artificial Sequence: Synthetic polypeptide"
DIQMTQSPSSLSASVGDRVTITCRASQDVSTAVAWYQQKPGKAPKLLIYSASFLYSGVPSRFSGSGSGTDFTLTISSLQPEDFATYYCQQYLFTPPTFGQGTKVEIKR

SEQ ID NO: 4028 - protein, 108 aa, Artificial Sequence
  source: /note="Description of Artificial Sequence: Synthetic polypeptide"
DIQMTQSPSSLSASVGDRVTITCRASQDVSTAVAWYQQKPGKAPKLLIYSASFLYSGVPSRFSGSGSGTDFTLTISSLQPEDFATYYCQQYLYHPATFGQGTKVEIKR

SEQ ID NO: 4029 - protein, 108 aa, Artificial Sequence
  source: /note="Description of Artificial Sequence: Synthetic polypeptide"
DIQMTQSPSSLSASVGDRVTITCRASQDVSTAVAWYQQKPGKAPKLLIYSASFLYSGVPSRFSGSGSGTDFTLTISSLQPEDFATYYCQQYWYTPTTFGQGTKVEIKR

SEQ ID NO: 4030 - protein, 108 aa, Artificial Sequence
  source: /note="Description of Artificial Sequence: Synthetic polypeptide"
DIQMTQSPSSLSASVGDRVTITCRASQDVSTAVAWYQQKPGKAPKLLIYSASFLYSGVPSRFSGSGSGTDFTLTISSLQPEDFATYYCQQYYAPPWTFGQGTKVEIKR

SEQ ID NO: 4031 - protein, 108 aa, Artificial Sequence
  source: /note="Description of Artificial Sequence: Synthetic polypeptide"
DIQMTQSPSSLSASVGDRVTITCRASQDVSTAVAWYQQKPGKAPKLLIYSASFLYSGVPSRFSGSGSGTDFTLTISSLQPEDFATYYCQQYYNVPWTFGQGTKVEIKR

SEQ ID NO: 4032 - protein, 108 aa, Artificial Sequence
  source: /note="Description of Artificial Sequence: Synthetic polypeptide"
DIQMTQSPSSLSASVGDRVTITCRASQDVSTAVAWYQQKPGKAPKLLIYSASFLYSGVPSRFSGSGSGTDFTLTISSLQPEDFATYYCQQYYTVPWTFGQGTKVEIKR

SEQ ID NO: 4033 - protein, 108 aa, Artificial Sequence
  source: /note="Description of Artificial Sequence: Synthetic polypeptide"
DIQMTQSPSSLSASVGDRVTITCRASQDVSTAVAWYQQKPGKAPKLLIYSASFLYSGVPSRFSGSGSGTDFTLTISSLQPEDFATYYCQQYYYTPPTFGQGTKVEIKR

SEQ ID NO: 4034 - protein, 108 aa, Homo sapiens
DIQMTQSPSSLSASVGDRVTITCRASQSISNYLAWYQQKPGKAPKLLIYAASSLESGVPSRFSGSGSGTDFTLTISSLQPEDFATYYCQQYNSLPWTFGQGTKVEIKR

SEQ ID NO: 4035 - protein, 108 aa, Artificial Sequence
  source: /note="Description of Artificial Sequence: Synthetic polypeptide"
DIQMTQSPSSLSASVGDRVTITCRASQVINTFLAWYQQKPGKAPKLLIYSASTLASGVPSRFSGSGSGTDFTLTISSLQPEDFATYYCQQYYTVPRTFGQGTKVEIKR

SEQ ID NO: 4036 - protein, 110 aa, Artificial Sequence
  source: /note="Description of Artificial Sequence: Synthetic polypeptide"
  SITE (1)..(110): /note="A091881 light chain variable region"
QSALTQPASVSGSPGQSITISCTGTSSDVGAYNYVSWYQQHPGKAPKLMIYDVSNRPSGVSNRFSGSKSGNTASLTISGLQAEDEADYYCSSYTSSSTRVFGTGTKVTVL

SEQ ID NO: 4037 - protein, 216 aa, Artificial Sequence
  source: /note="Description of Artificial Sequence: Synthetic polypeptide"
  SITE (1)..(216): /note="A091881 complete light chain"
QSALTQPASVSGSPGQSITISCTGTSSDVGAYNYVSWYQQHPGKAPKLMIYDVSNRPSGVSNRFSGSKSGNTASLTISGLQAEDEADYYCSSYTSSSTRVFGTGTKVTVLGQPKANPTVTLFPPSSEELQANKATLVCLISDFYPGAVTVAWKADGSPVKAGVETTKPSKQSNNKYAASSYLSLTPEQWKSHRSYSCQVTHEGSTVEKTVAPTECS

SEQ ID NO: 4038 - protein, 110 aa, Artificial Sequence
  source: /note="Description of Artificial Sequence: Synthetic polypeptide"
  SITE (1)..(110): /note="A092462 light chain variable region"
QSALTQPASVSGSPGQSITISCTGTSSDVGGYNYVSWYQQHPGKAPKLMIYDVSNRPSGVSNRFSGSKSGNTASLTISGLQAEDEADYYCSSYTSSSTRVFGTGTKVTVL

SEQ ID NO: 4039 - protein, 215 aa, Homo sapiens
EIVLTQSPATLSLSPGERATLSCRASQSVYSYLAWYQQKPGQAPRLLIYDASNRATGIPARFSGSGSGTDFTLTISSLEPEDFAVYYCQQRSNWPPFTFGPGTKVDIKRTVAAPSVFIFPPSDEQLKSGTASVVCLLNNFYPREAKVQWKVDNALQSGNSQESVTEQDSKDSTYSLSSTLTLSKADYEKHKVYACEVTHQGLSSPVTKSFNRGEC

SEQ ID NO: 4040 - protein, 219 aa, Artificial Sequence
  source: /note="Description of Artificial Sequence: Synthetic polypeptide"
DVVMTQSPDSLAVSLGERATINCRSSQSLVHSNRYTYLHWYQQKPGQSPKLLIYKVSNRFSGVPDRFSGSGSGTDFTLKISRVEAEDVGVYYCSQSTRVPYTFGQGTKLEIKRTVAAPSVFIFPPSDEQLKSGTASVVCLLNNFYPREAKVQWKVDNALQSGNSQESVTEQDSKDSTYSLSSTLTLSKADYEKHKVYACEVTHQGLSSPVTKSFNRGEC

SEQ ID NO: 4041 - protein, 219 aa, Artificial Sequence
  source: /note="Description of Artificial Sequence: Synthetic polypeptide"
DVVMTQTPLSLSVTPGQPASISCRTSQSLVHSNAYTYLHWYLQKPGQSPQLLIYKVSNRVSGVPDRFSGSGSGTDFTLKISRVEAEDVGVYYCSQSTRVPYTFGQGTKLEIKRTVAAPSVFIFPPSDEQLKSGTASVVCLLNNFYPREAKVQWKVDNALQSGNSQESVTEQDSKDSTYSLSSTLTLSKADYEKHKVYACEVTHQGLSSPVTKSFNRGEC

SEQ ID NO: 4042 - protein, 219 aa, Artificial Sequence
  source: /note="Description of Artificial Sequence: Synthetic polypeptide"
GVVMTQTPLSLSVTPGQPASISCRSSQSLVHSNQYTYLHWYLQKPGQSPQLLIYKVSNRRSGVPDRFSGSGSGTDFTLKISRVEAEDVGVYYCSQSTRVPYTFGQGTKLEIKRTVAAPSVFIFPPSDEQLKSGTASVVCLLNNFYPREAKVQWKVDNALQSGNSQESVTEQDSKDSTYSLSSTLTLSKADYEKHKVYACEVTHQGLSSPVTKSFNRGEC

SEQ ID NO: 4043 - protein, 219 aa, Artificial Sequence
  source: /note="Description of Artificial Sequence: Synthetic polypeptide"
GVVMTQTPLSLSVTPGQPASISCRSSRSLVHSNQYTYLHWYLQKPGQSPQLLIYKVSNRRSGVPDRFSGSGSGTDFTLKISRVEAEDVGVYYCSQSTRVPYTFGQGTKLEIKRTVAAPSVFIFPPSDEQLKSGTASVVCLLNNFYPREAKVQWKVDNALQSGNSQESVTEQDSKDSTYSLSSTLTLSKADYEKHKVYACEVTHQGLSSPVTKSFNRGEC

SEQ ID NO: 4044 - protein, 219 aa, Artificial Sequence
  source: /note="Description of Artificial Sequence: Synthetic polypeptide"
GVVMTQTPLSLSVTPGQPASISCRTSRSLVHSNRYTYLHWYLQKPGQSPQLLIYKVSNRRSGVPDRFSGSGSGTDFTLKISRVEAEDVGVYYCSQSTRVPYTFGQGTKLEIKRTVAAPSVFIFPPSDEQLKSGTASVVCLLNNFYPREAKVQWKVDNALQSGNSQESVTEQDSKDSTYSLSSTLTLSKADYEKHKVYACEVTHQGLSSPVTKSFNRGEC

SEQ ID NO: 4045 - protein, 233 aa, Homo sapiens
MGVPTQLLLLGLTVVVVRCDIQMTQSPASLSASVGETVTITCGASENIYGGLTWYQRRRGKSPQLLIYGASNLADGMSSRFTGSGSGRQFSLKISGVHPDDVATYYCQNVFTTPYTFGGGTRLEIKRADAAPTVSIFPPSSEQLTSGGASVVCFLNNFYPKDINVKWKIDGSERQNGVLNSWTDQDSKDSTYSMSSTLTLTKDEYERHNSYTCEATHKTSTSPIVKSFNRNEC

SEQ ID NO: 4046 - protein, 234 aa, Homo sapiens
MKSQTQVFVFLLLCVSGVHGSIVMTQTPKFLLVSPGDRVTITCKASQSVGHDVSWYRQKPGQSPKVLIYYASNRYTGVPDRFTGSGYGTDFTFTVRSVRTEDLAVYFCQQDYTSPLTFGTGTKLELKRADAAPTVSIFPPSSEQLTSGGASVVCFLNNFYPKDINVKWKIDGSERQNGVLNSWTDQDSKDSTYSMSSTLTLTKDEYERHNSYTCEATHKTSTSPIVKSFNRNEC

SEQ ID NO: 4047 - protein, 107 aa, Artificial Sequence
  source: /note="Description of Artificial Sequence: Synthetic polypeptide"
DIVMTQSPDSLAVSLGERATINCKASQSVTNDVAWYQQKPGQPPKLLIYYASNRYTGVPDRFSGSGSGTDFTLTISSLQAEDVAVYYCQQDYSSPYTFGQGTKVEIK

SEQ ID NO: 4048 - protein, 107 aa, Artificial Sequence
  source: /note="Description of Artificial Sequence: Synthetic polypeptide"
SIVMTQSPDSLAVSLGERATINCKASQSVTNDVAWYQQKPGQPPKLLIYYASNRYTGVPDRFSGSGSGTDFTLTISSLQAEDVAVYFCQQDYSSPYTFGQGTKVEIK

SEQ ID NO: 4049 - protein, 107 aa, Artificial Sequence
  source: /note="Description of Artificial Sequence: Synthetic polypeptide"
SIVMTQSPDSLAVSLGERATINCKASQSVTNDVAWYQQKPGQPPKLLIYYASNRYTGVPDRFSGSGYGTDFTFTISSLQAEDVATYFCQQDYSSPYTFGQGTKVEIK

SEQ ID NO: 4050 - protein, 107 aa, Artificial Sequence
  source: /note="Description of Artificial Sequence: Synthetic polypeptide"
SIVMTQSPDSLAVSLGERATINCKASQSVTNDVAWYQQKPGQPPKLLIYYASNRYTGVPDRFSGSGYGTDFTLTISSLQAEDVAVYFCQQDYSSPYTFGQGTKVEIK

SEQ ID NO: 4051 - protein, 107 aa, Mus sp.
SIVMTQTPKFLLVSAGDRVTITCKASQSVTNDVAWYQQKPGQSPKLLIYYASNRYTGVPDRFTGSGYGTDFTFTISTVQAEDLAVYFCQQDYSSPYTFGGGTKLEIK

SEQ ID NO: 4052 - protein, 216 aa, Artificial Sequence
  source: /note="Description of Artificial Sequence: Synthetic polypeptide"
  MOD_RES (214)..(216): Any amino acid
DIQMTQSPSSLSASVGDRVTITCKTSQDINKYMAWYQQTPGKAPRLLIHYTSALQPGIPSRFSGSGSGRDYTFTISSLQPEDIATYYCLQYDNLWTFGQGTKVEIKRTVAAPSVFIFPPSDEQLKSGTASVVCLLNNFYPREAKVQWKVDNALQSGNSQESVTEQDSKDSTYSLSSTLTLSKADYEKHKVYACEVTHQGLSSPVTKSFNRGECXXX

SEQ ID NO: 4053 - DNA, 428 bp, Homo sapiens
atggggtttgggctgagctgggttttcctcgttgctcttttaagaggtgtccagtgtcaggtgcagctggtggagtctgggggaggcgtggtccagcctgggaggtccctgagactctcctgtgcagcctctggttcaccttcagtagctatgctatgcactgggtccgccaggctccggcaaggggctggagtgggtggcagttatatcatatgatggaaaataaatactacgcagactccgtgaagggccgattcaccatctagagacaattccaagaacacgctgtatctgcaaatgaacagccagagctgaggacacggctgtgtattactgtgcgagagatcgaggtatatcagcaggtggaatactactactactacggtatggacgtctgggggcaagggaccacggtcaccgtctcctca

SEQ ID NO: 4054 - DNA, 357 bp, Mus sp.
  CDS (1)..(357)
gaagtgaagcttgaggagtctggaggaggcttggtgcaacctggaggatccatgaaactctcctgtgttgcctctggattcattttcagtaaccactggatgaactgggtccgccagtctccagagaaggggcttgagtgggttgctgaaattagatcaaaatctattaattctgcaacacattatgcggagtctgtgaaagggaggttcaccatctcaagagatgattccaaaagtgctgtctacctgcaaatgaccgacttaagaactgaagacactggcgtttattactgttccaggaattactacggtagtacctacgactactggggccaaggcaccactctcacagtctcc

SEQ ID NO: 4055 - DNA, 363 bp, Artificial Sequence
  source: /note="Description of Artificial Sequence: Synthetic polynucleotide"
gaggtgcagctggtggagtctgggggaggcttggtacagcccggcaggtccctgagactctcctgtgcggcctctggattcacctttgatgattatgccatgcactgggtccggcaagctccagggaagggcctggaatgggtctcagctatcacttggaatagtggtcacatagactatgcggactctgtggagggccgattcaccatctccagagacaacgccaagaactccctgtatctgcaaatgaacagtctgagagctgaggatacggccgtatattactgtgcgaaagtctcgtaccttagcaccgcgtcctcccttgactattggggccaaggtaccctggtcaccgtctcgagt

SEQ ID NO: 4056 - protein, 250 aa, Artificial Sequence
  source: /note="Description of Artificial Sequence: Synthetic polypeptide"
  MOD_RES (231)..(250): Any amino acid
QVQLVQSGAEVKKPGASVKVSCKASGYIFSNYWIQWVRQAPGQGLEWMGEILPGSGSTEYTENFKDRVTMTRDTSTSTVYMELSSLRSEDTAVYYCARYFFGSSPNWYFDVWGQGTLVTVSSASTKGPSVFPLAPSSKSTSGGTAALGCLVKDYFPEPVTVSWNSGALTSGVHTFPAVLQSSGLYSLSSVVTVPSSSLGTQTYICNVNHKPSNTKVDKKVEPKSCDKTHTXXXXXXXXXXXXXXXXXXXX

SEQ ID NO: 4057 - protein, 120 aa, Artificial Sequence [sequence omitted]

SEQ ID NO: 4058 - protein, 129 aa, Artificial Sequence
  source: /note="Description of Artificial Sequence: Synthetic polypeptide"
EVQLLESGGGLVQPGGSLRLSCAASGFTFSKYIMQWVRQAPGKGLEWVSGIDIPTKGTVYADSVKGRFTISRDNSKNTLYLQMNSLRAEDTAVYYCARALPRSGYLISPHYYYYALDVWGQGTTVTVSS

SEQ ID NO: 4059 - protein, 130 aa, Artificial Sequence
  source: /note="Description of Artificial Sequence: Synthetic polypeptide"
EVQLLESGGGLVQPGGSLRLSCAASGFTFSKYIMQWVRQAPGKGLEWVSGIDMPTKGGTVYADSVKGRFTISRDNSKNTLYLQMNSLRAEDTAVYYCARALPRSGYLISPHYYYYALDVWGQGTTVTVSS

SEQ ID NO: 4060 - protein, 131 aa, Artificial Sequence
  source: /note="Description of Artificial Sequence: Synthetic polypeptide"
EVQLLESGGGLVQPGGSLRLSCAASGFTFSKYIMQWVRQAPGKGLEWVSGINVPLYGGGTVYADSVKGRFTISRDNSKNTLYLQMNSLRAEDTAVYYCARALPRSGYLISPHYYYYALDVWGQGTTVTVSS

SEQ ID NO: 4061 - protein, 129 aa, Artificial Sequence
  source: /note="Description of Artificial Sequence: Synthetic polypeptide"
EVQLLESGGGLVQPGGSLRLSCAASGFTFSKYIMQWVRQAPGKGLEWVSGINVPVQGTVYADSVKGRFTISRDNSKNTLYLQMNSLRAEDTAVYYCARALPRSGYLISPHYYYYALDVWGQGTTVTVSS

SEQ ID NO: 4062 - protein, 129 aa, Homo sapiens
EVQLLESGGGLVQPGGSLRLSCAASGFTFSKYIMQWVRQAPGKGLEWVSGIRPSGGTTVYADSVKGRFTISRDNSKNTLYLQMNSLRAEDTAVYYCARALPRSGYLISPHYYYYALDVWGQGTTVTVSS

SEQ ID NO: 4063 - protein, 9 aa, Artificial Sequence
  source: /note="Description of Artificial Sequence: Synthetic peptide"
GGSDDVQAE

SEQ ID NO: 4064 - protein, 119 aa, Homo sapiens
EVQLVESGAGLVKPGGSLRLSCAASGFTFSYSWMNWVRQAPGKGLEWMGRIFPGDGDTDYNGKFKGRVTITADKSTSTAYMELSSLRSEDTAVYYCARNVFDGYWLVYWGQGTLVTVSS

SEQ ID NO: 4065 - protein, 119 aa, Homo sapiens
EVQLVESGGGLKKPGGSLRLSCAASGFTFSYSWMNWVRQAPGKGLEWMGRIFPGDGDTDYNGKFKGRVTITADKSTSTAYMELSSLRSEDTAVYYCARNVFDGYWLVYWGQGTLVTVSS

SEQ ID NO: 4066 - protein, 119 aa, Homo sapiens
EVQLVESGGGLVKPGGSLRLSCAASGFAFSYSWMNWVRQAPGKGLEWVGRIFPGDGDTDYNGKFKGRVTITADKSTSTAYMELSSLRSEDTAVYYCARNVFDGYWLVYWGQGTLVTVSS

SEQ ID NO: 4067 - protein, 119 aa, Homo sapiens
EVQLVESGGGLVKPGGSLRLSCAASGFTFSYSWMNWVRQAPGKGLEWMGRIFPGDGDTDYNGKFKGRVTITADKSTSTAYMELSSLRSEDTAVYYCARNVFDGYWLVYWGQGTLVTVSS

SEQ ID NO: 4068 - protein, 119 aa, Homo sapiens
EVQLVESGGGLVKPGGSLRLSCAASGFTFSYSWMNWVRQAPGKGLEWVGRIFPGDGDTDYNGKFKGRVTITADKSTSTAYMELSSLRSEDTAVYYCARNVFDGYWLVYWGQGTLVTVSS

SEQ ID NO: 4069 - protein, 119 aa, Homo sapiens
EVQLVESGGGLVKPGGSLRVSCAASGFTFSYSWMNWVRQAPGKGLEWMGRIFPGDGDTDYNGKFKGRVTITADKSTSTAYMELSSLRSEDTAVYYCARNVFDGYWLVYWGQGTLVTVSS

SEQ ID NO: 4070 - protein, 119 aa, Homo sapiens
EVQLVESGGGLVKPGSSLRLSCAASGFTFSYSWMNWVRQAPGKGLEWMGRIFPGDGDTDYNGKFKGRVTITADKSTSTAYMELSSLRSEDTAVYYCARNVFDGYWLVYWGQGTLVTVSS

SEQ ID NO: 4071 - protein, 119 aa, Homo sapiens
EVQLVESGGGVVKPGGSLRLSCAASGFTFSYSWMNWVRQAPGKGLEWMGRIFPGDGDTDYNGKFKGRVTITADKSTSTAYMELSSLRSEDTAVYYCARNVFDGYWLVYWGQGTLVTVSS

SEQ ID NO: 4072 - protein, 119 aa, Homo sapiens
QVQLVESGGGLVKPGGSLRLSCAASGFTFSYSWMNWVRQAPGKGLEWVGRIFPGDGDTDYNGKFKGRVTITADKSTSTAYMELSSLRSEDTAVYYCARNVFDGYWLVYWGQGTLVTVSS

SEQ ID NO: 4073 - protein, 119 aa, Homo sapiens
QVQLVQSGAEVKKPGASVKVSCKASGYTFSYSWMNWVRQAPGQGLEWMGRIFPGDGDTDYNGKFKGRVTITADKSTSTAYMELSSLRSEDTAVYYCARNVFDGYWLVYWGQGTLVTVSS

SEQ ID NO: 4074 - protein, 119 aa, Homo sapiens
QVQLVQSGAEVKKPGASVKVSCKASGYTFTYSWMNWVRQAPGQGLEWMGRIFPGDGDTDYNGKFKGRVTITADKSTSTAYMELSSLRSEDTAVYYCARNVFDGYWLVYWGQGTLVTVSS

SEQ ID NO: 4075 - protein, 119 aa, Homo sapiens
QVQLVQSGAEVKKPGASVKVSCKVSGYAFSYSWMNWVRQAPGQGLEWMGRIFPGDGDTDYNGKFKGRVTITADKSTSTAYMELSSLRSEDTAVYYCARNVFDGYWLVYWGQGTLVTVSS

SEQ ID NO: 4076 - protein, 119 aa, Homo sapiens
QVQLVQSGAEVKKPGSSVKVSCKASGYAFSYSWINWVRQAPGQGLEWMGRIFPGDGDTDYNGKFKGRVTITADKSTSTAYMELSSLRSEDTAVYYCARNVFDGYWLVYWGQGTLVTVSS

SEQ ID NO: 4077 - protein, 119 aa, Homo sapiens
QVQLVQSGAEVKKPGSSVKVSCKASGYAFSYSWISWVRQAPGQGLEWMGRIFPGDGDTDYNGKFKGRVTITADKSTSTAYMELSSLRSEDTAVYYCARNVFDGYWLVYWGQGTLVTVSS

SEQ ID NO: 4078 - protein, 119 aa, Homo sapiens
QVQLVQSGAEVKKPGSSVKVSCKASGYAFSYSWMNWVRQAPGQGLEWMGRIFPGDGDTDYNGKFKGRVTITADKSTSTAYMELSSLRSEDTAVYLCARNVFDGYWLVYWGQGTLVTVSS

SEQ ID NO: 4079 - protein, 119 aa, Homo sapiens
QVQLVQSGAEVKKPGSSVKVSCKASGYAFSYSWMNWVRQAPGQGLEWMGRIFPGDGDTDYNGKFKGRVTITADKSTSTAYMELSSLRSEDTAVYYCARNVFDGYWLVYWGQGTLVTVSS

SEQ ID NO: 4080 - protein, 119 aa, Homo sapiens
QVQLVQSGAEVKKPGSSVKVSCKASGYAFSYSWMSWVRQAPGQGLEWMGRIFPGDGDTDYNGKFKGRVTITADKSTSTAYMELSSLRSEDTAVYYCARNVFDGYWLVYWGQGTLVTVSS

SEQ ID NO: 4081 - protein, 120 aa, Mus musculus
EVKLEESGGGLVQPGGSMKLSCVGSGFTFSNYCMNWVRQSPEKGLEWVAEIRLKSNNYVTNYVYCESVKGRFTISRDDSKSRVYLQMNNLRGEDTGFYTRDGYYVPFAYWGQGTLVTVSA

SEQ ID NO: 4082 - protein, 125 aa, Artificial Sequence
  source: /note="Description of Artificial Sequence: Synthetic polypeptide"
EVQLLESGGGLVQPGGSLRLSCAASGFTFSNYAMSWVRQAPGKGLEWVSAISGSGGSTYYADSVKGRFTISRDNSKNTLYLQMNSLRAEDTAVYYCARDGSRYSYGLVAYGMDVWGQGTTVTVSS

SEQ ID NO: 4083 - protein, 120 aa, Artificial Sequence
  source: /note="Description of Artificial Sequence: Synthetic polypeptide"
EVQLLESGGGLVQPGGSLRLSCAASGFTFSNYCMNWVRQAPGKGLEWVAEIRLKSNNYVTNYVDSVKGRFTISRDNSKNTLYLQMNSLRAEDTAVYYCTRDGYYVPFAYWGQGTLVTVSS

SEQ ID NO: 4084 - protein, 125 aa, Artificial Sequence
  source: /note="Description of Artificial Sequence: Synthetic polypeptide"
EVQLLESGGGLVQPGGSLRLSCAASGFTFSSSAMSWVRQAPGKGLEWVSAISGSGGSTYYADSVKGRFTISRDNSKNTLYLQMNSLRAEDTAVYYCAKEGSNYGDYTIHYGMDVWGQGTTVTVSS

SEQ ID NO: 4085 - protein, 122 aa, Artificial Sequence
  source: /note="Description of Artificial Sequence: Synthetic polypeptide"
EVQLLESGGGLVQPGGSLRLSCAASGFTFSSYAMSWVRQAPGKGLEWVSAISASGGSTYYADSVKGRFTISRDNSKNTLYLQMNSLRAEDTAVYYCARLHMTGTASSGMDVWGQGTTVTVSS

SEQ ID NO: 4086 - protein, 118 aa, Artificial Sequence
  source: /note="Description of Artificial Sequence: Synthetic polypeptide"
EVQLLESGGGLVQPGGSLRLSCAASGFTFSSYAMSWVRQAPGKGLEWVSAISGSGGSTYYADSVKGRFTISRDNSKNTLYLQMNSLRAEDTAVYYCAKHDMESGLDVWGQGTMVTVSS

SEQ ID NO: 4087 - protein, 119 aa, Artificial Sequence
  source: /note="Description of Artificial Sequence: Synthetic polypeptide"
EVQLLESGGGLVQPGGSLRLSCAASGFTFSSYAMSWVRQAPGKGLEWVSAISGSGGSTYYADSVKGRFTISRDNSKNTLYLQMNSLRAEDTAVYYCAKLGGSHASLDLWGRGTLVTVSS

SEQ ID NO: 4088 - protein, 120 aa, Artificial Sequence
  source: /note="Description of Artificial Sequence: Synthetic polypeptide"
EVQLLESGGGLVQPGGSLRLSCAASGFTFSSYAMSWVRQAPGKGLEWVSAISGSGGSTYYADSVKGRFTISRDNSKNTLYLQMNSLRAEDTAVYYCAKSRYYYGDYFDYWGQGTLVTVSS

SEQ ID NO: 4089 - protein, 126 aa, Artificial Sequence
  source: /note="Description of Artificial Sequence: Synthetic polypeptide"
EVQLLESGGGLVQPGGSLRLSCAASGFTFSSYAMSWVRQAPGKGLEWVSAISGSGGSTYYADSVKGRFTISRDNSKNTLYLQMNSLRAEDTAVYYCARDGYYRSGSYWIGYGMDVWGQGTTVTVSS

SEQ ID NO: 4090 - protein, 120 aa, Artificial Sequence
  source: /note="Description of Artificial Sequence: Synthetic polypeptide"
EVQLLESGGGLVQPGGSLRLSCAASGFTFSSYAMSWVRQAPGKGLEWVSAISGSGGSTYYADSVKGRFTISRDNSKNTLYLQMNSLRAEDTAVYYCARGGADRGYGMDVWGQGTTVTVSS

SEQ ID NO: 4091 - protein, 122 aa, Artificial Sequence
  source: /note="Description of Artificial Sequence: Synthetic polypeptide"
EVQLLESGGGLVQPGGSLRLSCAASGFTFSSYAMSWVRQAPGKGLEWVSAISGSGGSTYYADSVKGRFTISRDNSKNTLYLQMNSLRAEDTAVYYCARVGGDDDWATAFDIWGQGTMVTVSS

SEQ ID NO: 4092 - protein, 120 aa, Artificial Sequence
  source: /note="Description of Artificial Sequence: Synthetic polypeptide"
EVQLLESGGGLVQPGGSLRLSCAASGYSFTGYYMHWVRQAPGKGLEWIGEINPSTGGTSYNDSVKGRFTISRDNSKNTLYLQMNSLRAEDTAVYYCTRGHYGSYLTFDYWGQGTLVTVSS

SEQ ID NO: 4093 - protein, 117 aa, Artificial Sequence
  source: /note="Description of Artificial Sequence: Synthetic polypeptide"
EVQLLESGGGLVQPGGSLRLSCAASGYTFTDYNLHWVRQAPGKGLEWIGFIYPSNGITGYNDSVKGRFTISRDNSKNTLYLQMNSLRAEDTAVYYCARSTVDYFDYWGQGTLVTVSS

SEQ ID NO: 4094 - protein, 115 aa, Artificial Sequence
  source: /note="Description of Artificial Sequence: Synthetic polypeptide"
EVQLLESGGGLVQPGGSLRLSCAASGYTFTSYDINWVRQAPGKGLEWIGWIFPGDGSTKYNDSVKGRFTISRDNSKNTLYLQMNSLRAEDTAVYYCRYHYAMDSWGQGTLVTVSS

SEQ ID NO: 4095 - protein, 120 aa, Artificial Sequence
  source: /note="Description of Artificial Sequence: Synthetic polypeptide"
EVQLLESGGGLVQPGGSLRLSCAASGYTFTSYWMHWVRQAPGKGLEWIGNIYPGSGSTYYDDSVKGRFTISRDNSKNTLYLQMNSLRAEDTAVYYCTRGHYGNYLTFDYWGQGTLVTVSS

SEQ ID NO: 4096 - protein, 120 aa, Artificial Sequence
  source: /note="Description of Artificial Sequence: Synthetic polypeptide"
EVQLLESGGGLVQPGGSLRLSCAASGYTFTSYWMHWVRQAPGKGLEWIGNIYPGSISSNYDDSVKGRFTISRDNSKNTLYLQMNSLRAEDTAVYYCTRGHYGSYLTFDYWGQGTLVTVSS

SEQ ID NO: 4097 - protein, 117 aa, Mus musculus
EVQLQQSGPELVKPGASVKISCKASGYTFTDYNLHWVKLSHGKSLEWIGFIYPSNGITGYNQKFKNKATLTVDNSSSTAYMELRSLTSEDSAVYYCARSTVDYFDYWGQGTTLTVSS

SEQ ID NO: 4098 - protein, 127 aa, Mus musculus
  MOD_RES (118)..(127): Any amino acid
EVQLQQSGPELVKPGASVKISCKASGYTFTDYNLHWVKLSHGKSLEWIGFIYPSNGITGYNQKFKNKATLTVDNSSSTAYMELRSLTSEDSAVYYCARSTVDYFDYWGQGTTLTVSSXXXXXXXXXX

SEQ ID NO: 4099 - protein, 120 aa, Artificial Sequence
  source: /note="Description of Artificial Sequence: Synthetic polypeptide"
EVQLVESGGGLVKPGGSLRLSCAASGFTFSNYCMNWVRQAPGKGLEWVAEIRLKSNNYVTNYVAPVKGRFTISRDDSKNTLYLQMNSLKTEDTAVYYCTRDGYYVPFAYWGQGTLVTVSS

SEQ ID NO: 4100 - protein, 124 aa, Artificial Sequence
  source: /note="Description of Artificial Sequence: Synthetic polypeptide"
EVQLVESGGGLVKPGGSLRLSCAASGFTFSSYSMNWVRQAPGKGLEWVSSISSSSSYIYYADSVKGRFTISRDNAKNSLYLQMNSLRAEDTAVYYCARLGATATTDYAYGMDVWGQGTTVTVSS

SEQ ID NO: 4101 - protein, 117 aa, Artificial Sequence
  source: /note="Description of Artificial Sequence: Synthetic polypeptide"
EVQLVESGGGLVKPGGSLRLSCAASGYTFTDYNLHWVRQAPGKGLEWIGFIYPSNGITGYNAPVKGRFTISRDDSKNTLYLQMNSLKTEDTAVYYCARSTVDYFDYWGQGTLVTVSS

SEQ ID NO: 4102 - protein, 115 aa, Artificial Sequence
  source: /note="Description of Artificial Sequence: Synthetic polypeptide"
EVQLVESGGGLVKPGGSLRLSCAASGYTFTSYDINWVRQAPGKGLEWIGWIFPGDGSTKYNAPVKGRFTISRDDSKNTLYLQMNSLKTEDTAVYYCRYHYAMDSWGQGTLVTVSS

SEQ ID NO: 4103 - protein, 120 aa, Artificial Sequence
  source: /note="Description of Artificial Sequence: Synthetic polypeptide"
EVQLVESGGGLVKPGGSLRLSCAASGYTFTSYWMHWVRQAPGKGLEWIGNIYPGSGSTYYDAPVKGRFTISRDDSKNTLYLQMNSLKTEDTAVYYCTRGHYGNYLTFDYWGQGTLVTVSS

SEQ ID NO: 4104 - protein, 120 aa, Artificial Sequence
  source: /note="Description of Artificial Sequence: Synthetic polypeptide"
EVQLVESGGGLVKPGGSLRLSCAASGYTFTSYWMHWVRQAPGKGLEWIGNIYPGSISSNYDAPVKGRFTISRDDSKNTLYLQMNSLKTEDTAVYYCTRGHYGSYLTFDYWGQGTLVTVSS

SEQ ID NO: 4105 - protein, 120 aa, Artificial Sequence
  source: /note="Description of Artificial Sequence: Synthetic polypeptide"
EVQLVESGGGLVQPGGSLRLSCAASGFTFSNYCMNWVRQAPGKGLEWVAEIRLKSNNYVTNYVDSVKGRFTISRDNAKNSLYLQMNSLRAEDTAVYYCTRDGYYVPFAYWGQGTLVTVSS

SEQ ID NO: 4106 - protein, 119 aa, Artificial Sequence
  source: /note="Description of Artificial Sequence: Synthetic polypeptide"
EVQLVESGGGLVQPGGSLRLSCAASGFTFSSYSMNWVRQAPGKGLEWVSYISSSSSTIYYADSVKGRFTISRDNAKNSLYLQMNSLRAEDTAVYYCARGGEGRPYLDIWGQGTMVTVSS

SEQ ID NO: 4107 - protein, 121 aa, Artificial Sequence
  source: /note="Description of Artificial Sequence: Synthetic polypeptide"
EVQLVESGGGLVQPGGSLRLSCAASGFTFSSYWMSWVRQAPGKGLEWVANIKQDGSEKYYVDSVKGRFTISRDNAKNSLYLQMNSLRAEDTAVYYCARDGQYYPAYGMDVWGQGTTVTVSS

SEQ ID NO: 4108 - protein, 121 aa, Artificial Sequence
  source: /note="Description of Artificial Sequence: Synthetic polypeptide"
EVQLVESGGGLVQPGGSLRLSCAASGFTFSSYWMSWVRQAPGKGLEWVANIKQDGSEKYYVDSVKGRFTISRDNAKNSLYLQMNSLRAEDTAVYYCARDYGSVAGTPFDYWGQGTLVTVSS

SEQ ID NO: 4109 - protein, 120 aa, Artificial Sequence
  source: /note="Description of Artificial Sequence: Synthetic polypeptide"
EVQLVESGGGLVQPGGSLRLSCAASGFTFSSYWMSWVRQAPGKGLEWVANIKQDGSEKYYVDSVKGRFTISRDNAKNSLYLQMNSLRAEDTAVYYCAREGGYVGHGMDVWGQGTTVTVSS

SEQ ID NO: 4110 - protein, 121 aa, Artificial Sequence
  source: /note="Description of Artificial Sequence: Synthetic polypeptide"
EVQLVESGGGLVQPGGSLRLSCAASGFTFSSYWMSWVRQAPGKGLEWVANIKSDGSEKYYVDSVKGRFTISRDNAKNSLYLQMNSLRAEDTAVYYCARAETYQLSSAFDIWGQGTMVTVSS

SEQ ID NO: 4111 - protein, 123 aa, Artificial Sequence
  source: /note="Description of Artificial Sequence: Synthetic polypeptide"
EVQLVESGGGLVQPGGSLRLSCAASGFTFSSYWMSWVRQAPGKGLEWVANIKSDGSEKYYVDSVKGRFTISRDNAKNSLYLQMNSLRAEDTAVYYCARDVGGDYSGSDLASYWGQGTLVTVSS

SEQ ID NO: 4112 - protein, 121 aa, Artificial Sequence
  source: /note="Description of Artificial Sequence: Synthetic polypeptide"
EVQLVESGGGLVQPGGSLRLSCAASGFTFSSYWMSWVRQAPGKGLEWVANIKSDGSEKYYVDSVKGRFTISRDNAKNSLYLQMNSLRAEDTAVYYCAREGFRDGINWFDPWGQGTLVTVSS

SEQ ID NO: 4113 - protein, 122 aa, Artificial Sequence
  source: /note="Description of Artificial Sequence: Synthetic polypeptide"
EVQLVESGGGLVQPGGSLRLSCAASGFTFSSYWMSWVRQAPGKGLEWVANIKSDGSEKYYVDSVKGRFTISRDNAKNSLYLQMNSLRAEDTAVYYCAREGRPRLGYAAFDIWGQGTMVTVSS

SEQ ID NO: 4114 - protein, 122 aa, Artificial Sequence
  source: /note="Description of Artificial Sequence: Synthetic polypeptide"
EVQLVESGGGLVQPGGSLRLSCAASGFTFSSYWMSWVRQAPGKGLEWVANIKSDGSEKYYVDSVKGRFTISRDNAKNSLYLQMNSLRAEDTAVYYCARGPSEAAAAKDFDLWGRGTLVTVSS

SEQ ID NO: 4115 - protein, 121 aa, Artificial Sequence
  source: /note="Description of Artificial Sequence: Synthetic polypeptide"
EVQLVESGGGLVQPGGSLRLSCAASGFTFSSYWMSWVRQAPGKGLEWVANIKSDGSEKYYVDSVKGRFTISRDNAKNSLYLQMNSLRAEDTAVYYCARGPSYLASGAFDLWGRGTLVTVSS

SEQ ID NO: 4116 - protein, 120 aa, Artificial Sequence
  source: /note="Description of Artificial Sequence: Synthetic polypeptide"
EVQLVESGGGLVQPGGSLRLSCAASGFTFSSYWMSWVRQAPGKGLEWVANINQDGSEKYYVDSVKGRFTISRDNAKNSLYLQMNSLRAEDTAVYYCARDHGATGPDFDLWGRGTLVTVSS

SEQ ID NO: 4117 - protein, 122 aa, Artificial Sequence
  source: /note="Description of Artificial Sequence: Synthetic polypeptide"
EVQLVESGGGLVQPGGSLRLSCAASGFTFSSYWMSWVRQAPGKGLEWVANINQDGSEKYYVDSVKGRFTISRDNAKNSLYLQMNSLRAEDTAVYYCAREAGAVTGYRWFDPWGQGTLVTVSS

SEQ ID NO: 4118 - protein, 120 aa, Artificial Sequence
  source: /note="Description of Artificial Sequence: Synthetic polypeptide"
EVQLVESGGGLVQPGGSLRLSCAASGFTFSSYWMSWVRQAPGKGLEWVANINQDGSEKYYVDSVKGRFTISRDNAKNSLYLQMNSLRAEDTAVYYCAREGRRTMNAFDIWGQGTMVTVSS

SEQ ID NO: 4119 - protein, 119 aa, Artificial Sequence
  source: /note="Description of Artificial Sequence: Synthetic polypeptide"
EVQLVESGGGLVQPGGSLRLSCAASGFTFSSYWMSWVRQAPGKGLEWVANINQDGSEKYYVDSVKGRFTISRDNAKNSLYLQMNSLRAEDTAVYYCAREGSDRHPFDYWGQGTLVTVSS

SEQ ID NO: 4120 - protein, 117 aa, Artificial Sequence
  source: /note="Description of Artificial Sequence: Synthetic polypeptide"
EVQLVESGGGLVQPGGSLRLSCAASGYTFTDYNLHWVRQAPGKGLEWIGFIYPSNGITGYNDSVKGRFTISRDNAKNSLYLQMNSLRAEDTAVYYCARSTVDYFDYWGQGTLVTVSS

SEQ ID NO: 4121 - protein, 115 aa, Artificial Sequence
  source: /note="Description of Artificial Sequence: Synthetic polypeptide"
EVQLVESGGGLVQPGGSLRLSCAASGYTFTSYDINWVRQAPGKGLEWIGWIFPGDGSTKYNDSVKGRFTISRDNAKNSLYLQMNSLRAEDTAVYYCRYHYAMDSWGQGTLVTVSS

SEQ ID NO: 4122 - protein, 120 aa, Artificial Sequence
  source: /note="Description of Artificial Sequence: Synthetic polypeptide"
EVQLVESGGGLVQPGGSLRLSCAASGYTFTSYWMHWVRQAPGKGLEWIGNIYPGSGSTYYDDSVKGRFTISRDNAKNSLYLQMNSLRAEDTAVYYCTRGHYGNYLTFDYWGQGTLVTVSS

SEQ ID NO: 4123 - protein, 120 aa, Artificial Sequence
  source: /note="Description of Artificial Sequence: Synthetic polypeptide"
EVQLVESGGGLVQPGGSLRLSCAASGYTFTSYWMHWVRQAPGKGLEWIGNIYPGSISSNYDDSVKGRFTISRDNAKNSLYLQMNSLRAEDTAVYYCTRGHYGSYLTFDYWGQGTLVTVSS

SEQ ID NO: 4124 - protein, 120 aa, Artificial Sequence
  source: /note="Description of Artificial Sequence: Synthetic polypeptide"
EVQLVQSGAEVKKPGESLKISCKGSGFTFSNYCMNWVRQMPGKGLEWVAEIRLKSNNYVTNYVPSFQGQVTISADKSISTAYLQWSSLKASDTAMYYCTRDGYYVPFAYWGQGTLVTVSS

SEQ ID NO: 4125 - protein, 120 aa, Artificial Sequence
  source: /note="Description of Artificial Sequence: Synthetic polypeptide"
EVQLVQSGAEVKKPGESLKISCKGSGYSFTGYYMHWVRQMPGKGLEWIGEINPSTGGTSYNPSFQGQVTISADKSISTAYLQWSSLKASDTAMYYCTRGHYGSYLTFDYWGQGTLVTVSS

SEQ ID NO: 4126 - protein, 117 aa, Artificial Sequence
  source: /note="Description of Artificial Sequence: Synthetic polypeptide"
EVQLVQSGAEVKKPGESLKISCKGSGYTFTDYNLHWVRQMPGKGLEWIGFIYPSNGITGYNPSFQGQVTISADKSISTAYLQWSSLKASDTAMYYCARSTVDYFDYWGQGTLVTVSS

SEQ ID NO: 4127 - protein, 115 aa, Artificial Sequence
  source: /note="Description of Artificial Sequence: Synthetic polypeptide"
EVQLVQSGAEVKKPGESLKISCKGSGYTFTSYDINWVRQMPGKGLEWIGWIFPGDGSTKYNPSFQGQVTISADKSISTAYLQWSSLKASDTAMYYCRYHYAMDSWGQGTLVTVSS

SEQ ID NO: 4128 - protein, 120 aa, Artificial Sequence
  source: /note="Description of Artificial Sequence: Synthetic polypeptide"
EVQLVQSGAEVKKPGESLKISCKGSGYTFTSYWMHWVRQMPGKGLEWIGNIYPGSGSTYYDPSFQGQVTISADKSISTAYLQWSSLKASDTAMYYCTRGHYGNYLTFDYWGQGTLVTVSS

SEQ ID NO: 4129 - protein, 120 aa, Artificial Sequence
  source: /note="Description of Artificial Sequence: Synthetic polypeptide"
EVQLVQSGAEVKKPGESLKISCKGSGYTFTSYWMHWVRQMPGKGLEWIGNIYPGSISSNYDPSFQGQVTISADKSISTAYLQWSSLKASDTAMYYCTRGHYGSYLTFDYWGQGTLVTVSS

SEQ ID NO: 4130 - protein, 120 aa, Artificial Sequence
  source: /note="Description of Artificial Sequence: Synthetic polypeptide"
QLQLQESGPGLVKPSETLSLTCTVSGFTFSNYCMNWIRQPPGKGLEWVAEIRLKSNNYVTNYVPSLKSRVTISVDTSKNQFSLKLSSVTAADTAVYYCTRDGYYVPFAYWGQGTLVTVSS

SEQ ID NO: 4131 - protein, 128 aa, Artificial Sequence
  source: /note="Description of Artificial Sequence: Synthetic polypeptide"
QLQLQESGPGLVKPSETLSLTCTVSGGSISSNSYYWGWIRQPPGKGLEWIGSIYYSGSTYYNPSLKSRVTISVDTSKNQFSLKLSSVTAADTAVYYCARSPVYYDSSGYFQYYGMDVWGQGTTVTVSS

SEQ ID NO: 4132 - protein, 121 aa, Artificial Sequence
  source: /note="Description of Artificial Sequence: Synthetic polypeptide"
QLQLQESGPGLVKPSETLSLTCTVSGGSISSSSYAWGWIRQPPGKGLEWIGNIYYSGSTYYNPSLKSRVTISVDTSKNQFSLKLSSVTAADTAVYYCARAGYRSPSGFDYWGQGTLVTVSS

SEQ ID NO: 4133 - protein, 123 aa, Artificial Sequence
  source: /note="Description of Artificial Sequence: Synthetic polypeptide"
QLQLQESGPGLVKPSETLSLTCTVSGGSISSSSYAWGWIRQPPGKGLEWIGSIYYSGSTYYNPSLKSRVTISVDTSKNQFSLKLSSVTAADTAVYYCARDPLYPLTPYGMDVWGQGTTVTVSS

SEQ ID NO: 4134 - protein, 121 aa, Artificial Sequence
  source: /note="Description of Artificial Sequence: Synthetic polypeptide"
QLQLQESGPGLVKPSETLSLTCTVSGGSISSSSYAWGWIRQPPGKGLEWIGSIYYSGSTYYNPSLKSRVTISVDTSKNQFSLKLSSVTAADTAVYYCAREGYVAAYGMDVWGQGTTVTVSS

SEQ ID NO: 4135 - protein, 121 aa, Artificial Sequence
  source: /note="Description of Artificial Sequence: Synthetic polypeptide"
QLQLQESGPGLVKPSETLSLTCTVSGGSISSSSYAWGWIRQPPGKGLEWIGSIYYSGSTYYNPSLKSRVTISVDTSKNQFSLKLSSVTAADTAVYYCARVGYTRPYGMDVWGQGTTVTVSS

SEQ ID NO: 4136 - protein, 118 aa, Artificial Sequence
  source: /note="Description of Artificial Sequence: Synthetic polypeptide"
QLQLQESGPGLVKPSETLSLTCTVSGGSISSSSYYWGWIRQPPGKGLEWIGSISYSGSTYYNPSLKSRVTISVDTSKNQFSLKLSSVTAADTAVYYCAREGGKGMDVWGQGTLVTVSS

SEQ ID NO: 4137 - protein, 121 aa, Artificial Sequence
  source: /note="Description of Artificial Sequence: Synthetic polypeptide"
QLQLQESGPGLVKPSETLSLTCTVSGGSISSSSYYWGWIRQPPGKGLEWIGSISYSGSTYYNPSLKSRVTISVDTSKNQFSLKLSSVTAADTAVYYCAREHRAADAGSNVWGQGTMVTVSS

SEQ ID NO: 4138 - protein, 123 aa, Artificial Sequence
  source: /note="Description of Artificial Sequence: Synthetic polypeptide"
QLQLQESGPGLVKPSETLSLTCTVSGGSISSSSYYWGWIRQPPGKGLEWIGSIYYSGSTYYNPSLKSRVTISVDTSKNQFSLKLSSVTAADTAVYYCAREATAAADHPGMDVWGQGTTVTVSS

SEQ ID NO: 4139 - protein, 117 aa, Artificial Sequence
  source: /note="Description of Artificial Sequence: Synthetic polypeptide"
QLQLQESGPGLVKPSETLSLTCTVSGGSISSSSYYWGWIRQPPGKGLEWIGSIYYSGSTYYNPSLKSRVTISVDTSKNQFSLKLSSVTAADTAVYYCAREGPRFDPWGQGTLVTVSS

SEQ ID NO: 4140 - protein, 118 aa, Artificial Sequence
  source: /note="Description of Artificial Sequence: Synthetic polypeptide"
QLQLQESGPGLVKPSETLSLTCTVSGGSISSSSYYWGWIRQPPGKGLEWIGSIYYSGSTYYNPSLKSRVTISVDTSKNQFSLKLSSVTAADTAVYYCAREGVRGMDVWGQGTTVTVSS

SEQ ID NO: 4141 - protein, 120 aa, Artificial Sequence
  source: /note="Description of Artificial Sequence: Synthetic polypeptide"
QLQLQESGPGLVKPSETLSLTCTVSGGSISSSSYYWGWIRQPPGKGLEWIGSIYYSGSTYYNPSLKSRVTISVDTSKNQFSLKLSSVTAADTAVYYCAREPIYRRGMDVWGQGTTVTVSS

SEQ ID NO: 4142 - protein, 119 aa, Artificial Sequence
  source: /note="Description of Artificial Sequence: Synthetic polypeptide"
QLQLQESGPGLVKPSETLSLTCTVSGGSISSSSYYWGWIRQPPGKGLEWIGSIYYSGSTYYNPSLKSRVTISVDTSKNQFSLKLSSVTAADTAVYYCARESGFAGLDPWGQGTLVTVSS

SEQ ID NO: 4143 - protein, 120 aa, Artificial Sequence
  source: /note="Description of Artificial Sequence: Synthetic polypeptide"
QLQLQESGPGLVKPSETLSLTCTVSGGSISSSSYYWGWIRQPPGKGLEWIGSIYYSGSTYYNPSLKSRVTISVDTSKNQFSLKLSSVTAADTAVYYCAREVGYPYGMDVWGQGTTVTVSS

SEQ ID NO: 4144 - protein, 121 aa, Artificial Sequence
  source: /note="Description of Artificial Sequence: Synthetic polypeptide"
QLQLQESGPGLVKPSETLSLTCTVSGGSISSSSYYWGWIRQPPGKGLEWIGSIYYSGSTYYNPSLKSRVTISVDTSKNQFSLKLSSVTAADTAVYYCAREVSGTRHGMDVWGQGTTVTVSS

SEQ ID NO: 4145 - protein, 125 aa, Artificial Sequence
  source: /note="Description of Artificial Sequence: Synthetic polypeptide"
QLQLQESGPGLVKPSETLSLTCTVSGGSISSSSYYWGWIRQPPGKGLEWIGSIYYSGSTYYNPSLKSRVTISVDTSKNQFSLKLSSVTAADTAVYYCARGAPHDYGGGVGWFDPWGQGTTVTVSS

SEQ ID NO: 4146 - protein, 128 aa, Artificial Sequence
  source: /note="Description of Artificial Sequence: Synthetic polypeptide"
QLQLQESGPGLVKPSETLSLTCTVSGGSISSSSYYWGWIRQPPGKGLEWIGSIYYSGSTYYNPSLKSRVTISVDTSKNQFSLKLSSVTAADTAVYYCARLPIYYDSSGYFDYHGMDVWGQGTTVTVSS

SEQ ID NO: 4147 - protein, 117 aa, Artificial Sequence
  source: /note="Description of Artificial Sequence: Synthetic polypeptide"
QLQLQESGPGLVKPSETLSLTCTVSGYTFTDYNLHWIRQPPGKGLEWIGFIYPSNGITGYNPSLKSRVTISVDTSKNQFSLKLSSVTAADTAVYYCARSTVDYFDYWGQGTLVTVSS

SEQ ID NO: 4148 - protein, 115 aa, Artificial Sequence
  source: /note="Description of Artificial Sequence: Synthetic polypeptide"
QLQLQESGPGLVKPSETLSLTCTVSGYTFTSYDINWIRQPPGKGLEWIGWIFPGDGSTKYNPSLKSRVTISVDTSKNQFSLKLSSVTAADTAVYYCRYHYAMDSWGQGTLVTVSS

SEQ ID NO: 4149 - protein, 125 aa, Artificial Sequence
  source: /note="Description of Artificial Sequence: Synthetic polypeptide"
QVQLQESGPGLVKPSETLSLTCAVSGYSISSGYYWGWIRQPPGKGLEWIGSIYHSGNTYYNPSLKSRVTISVDTSKNQFSLKLSSVTAADTAVYYCARDGRYSSSGELYYGMDVWGQGTTVTVSS

SEQ ID NO: 4150 - protein, 122 aa, Artificial Sequence
  source: /note="Description of Artificial Sequence: Synthetic polypeptide"
QVQLQESGPGLVKPSETLSLTCAVSGYSISSGYYWGWIRQPPGKGLEWIGTIYHSGSTYYNPSLKSRVTISVDTSKNQFSLKLSSVTAADTAVYYCAREVGVVGALPYFDYWGQGTLVTVSS

SEQ ID NO: 4151 - protein, 120 aa, Artificial Sequence
  source: /note="Description of Artificial Sequence: Synthetic polypeptide"
QVQLQESGPGLVKPSETLSLTCTVSGFTFSNYCMNWIRQPPGKGLEWVAEIRLKSNNYVTNYVPSLKSRVTISVDTSKNQFSLKLSSVTAADTAVYYCTRDGYYVPFAYWGQGTLVTVSS

SEQ ID NO: 4152 - protein, 117 aa, Artificial Sequence
  source: /note="Description of Artificial Sequence: Synthetic polypeptide"
QVQLQESGPGLVKPSETLSLTCTVSGYTFTDYNLHWIRQPPGKGLEWIGFIYPSNGITGYNPSLKSRVTISVDTSKNQFSLKLSSVTAADTAVYYCARSTVDYFDYWGQGTLVTVSS

SEQ ID NO: 4153 - protein, 115 aa, Artificial Sequence
  source: /note="Description of Artificial Sequence: Synthetic polypeptide"
QVQLQESGPGLVKPSETLSLTCTVSGYTFTSYDINWIRQPPGKGLEWIGWIFPGDGSTKYNPSLKSRVTISVDTSKNQFSLKLSSVTAADTAVYYCRYHYAMDSWGQGTLVTVSS

SEQ ID NO: 4154 - protein, 120 aa, Artificial Sequence
  source: /note="Description of Artificial Sequence: Synthetic polypeptide"
QVQLQESGPGLVKPSETLSLTCTVSGYTFTSYWMHWIRQPPGKGLEWIGNIYPGSGSTYYDPSLKSRVTISVDTSKNQFSLKLSSVTAADTAVYYCTRGHYGNYLTFDYWGQGTLVTVSS

SEQ ID NO: 4155 - protein, 120 aa, Artificial Sequence
  source: /note="Description of Artificial Sequence: Synthetic polypeptide"
QVQLQESGPGLVKPSETLSLTCTVSGYTFTSYWMHWIRQPPGKGLEWIGNIYPGSISSNYDPSLKSRVTISVDTSKNQFSLKLSSVTAADTAVYYCTRGHYGSYLTFDYWGQGTLVTVSS

SEQ ID NO: 4156 - protein, 125 aa, Artificial Sequence
  source: /note="Description of Artificial Sequence: Synthetic polypeptide"
QVQLQESGPGLVKPSQTLSLTCTVSGGSISSGGYYWSWIRQHPGKGLEWIGNIYYSGSTYYNPSLKSRVTISVDTSKNQFSLKLSSVTAADTAVYYCARDLPNSGSPGSDYFDYWGQGTLVTVSS

SEQ ID NO: 4157 - protein, 122 aa, Artificial Sequence
  source: /note="Description of Artificial Sequence: Synthetic polypeptide"
QVQLQESGPGLVKPSQTLSLTCTVSGGSISSGGYYWSWIRQHPGKGLEWIGNIYYSGSTYYNPSLKSRVTISVDTSKNQFSLKLSSVTAADTAVYYCARDSGGEPVYGMDVWGQGTTVTVSS

SEQ ID NO: 4158 - protein, 123 aa, Artificial Sequence
  source: /note="Description of Artificial Sequence: Synthetic polypeptide"
QVQLQESGPGLVKPSQTLSLTCTVSGGSISSGGYYWSWIRQHPGKGLEWIGSIYYSGSTYYNPSLKSRVTISVDTSKNQFSLKLSSVTAADTAVYYCARGQHSDSGHYGMDVWGQGTTVTVSS

SEQ ID NO: 4159 - protein, 117 aa, Artificial Sequence
  source: /note="Description of Artificial Sequence: Synthetic polypeptide"
QVQLQESGPGLVKPSQTLSLTCTVSGYTFTDYNLHWIRQPPGKGLEWIGFIYPSNGITGYNPSLKSRVTISVDTSKNQFSLKLSSVTAADTAVYYCARSTVDYFDYWGQGTLVTVSS

SEQ ID NO: 4160 - protein, 120 aa, Artificial Sequence
  source: /note="Description of Artificial Sequence: Synthetic polypeptide"
QVQLQESGPGLVKPSQTLSLTCTVSGYTFTSYWMHWIRQPPGKGLEWIGNIYPGSGSTYYDPSLKSRVTISVDTSKNQFSLKLSSVTAADTAVYYCTRGHYGNYLTFDYWGQGTLVTVSS

SEQ ID NO: 4161 - protein, 120 aa, Artificial Sequence
  source: /note="Description of Artificial Sequence: Synthetic polypeptide"
QVQLQESGPGLVKPSQTLSLTCTVSGYTFTSYWMHWIRQPPGKGLEWIGNIYPGSISSNYDPSLKSRVTISVDTSKNQFSLKLSSVTAADTAVYYCTRGHYGSYLTFDYWGQGTLVTVSS

SEQ ID NO: 4162 - protein, 120 aa, Mus musculus
QVQLQQPGSELVRPGASVKLSCKASGYTFTSYWMHWVKQRPGQGLEWIGNIYPGSGSTYYDEKFKSKATLTVDTSSGTAYMQLSSLTSEDSAVYYCTRGHYGNYLTFDYWGQGTTLTVSS

SEQ ID NO: 4163 - protein, 120 aa, Mus musculus
QVQLQQSGSELVRPGASVKLSCKASGYTFTSYWMHWVKQRPGQGLEWIGNIYPGSISSNYDEKFKNKATLTVDTSSSTAYMQLSSLTSEDSAVYFCTRGHYGSYLTFDYWGHGTTLTVSS

SEQ ID NO: 4164 - protein, 120 aa, Artificial Sequence
  source: /note="Description of Artificial Sequence: Synthetic polypeptide"
QVQLVESGGGVVQPGRSLRLSCAASGFTFSNYCMNWVRQAPGKGLEWVAEIRLKSNNYVTNYVDSVKGRFTISRDNSKNTLYLQMNSLRAEDTAVYYCTRDGYYVPFAYWGQGTLVTVSS

SEQ ID NO: 4165 - protein, 123 aa, Artificial Sequence
  source: /note="Description of Artificial Sequence: Synthetic polypeptide"
QVQLVESGGGVVQPGRSLRLSCAASGFTFSSYGMHWVRQAPGKGLEWVAVISYDGSNKYYADSVKGRFTISRDNSKNTLYLQMNSLRAEDTAVYYCARGPYYSYTDTAWFDPWGQGTLVTVSS

SEQ ID NO: 4166 - protein, 120 aa, Artificial Sequence
  source: /note="Description of Artificial Sequence: Synthetic polypeptide"
QVQLVESGGGVVQPGRSLRLSCAASGFTFSSYGMHWVRQAPGKGLEWVAVIWYDGSNKYYADSVKGRFTISRDNSKNTLYLQMNSLRAEDTAVYYCAKEGGTYSDDFDLWGGGTLVTVSS

SEQ ID NO: 4167 - protein, 121 aa, Artificial Sequence
  source: /note="Description of Artificial Sequence: Synthetic polypeptide"
QVQLVESGGGVVQPGRSLRLSCAASGFTFSSYGMHWVRQAPGKGLEWVAVIWYDGSNKYYADSVKGRFTISRDNSKNTLYLQMNSLRAEDTAVYYCAKGVGYDTGTDMDVWGKGTTVTVSS

SEQ ID NO: 4168 - protein, 122 aa, Artificial Sequence
  source: /note="Description of Artificial Sequence: Synthetic polypeptide"
QVQLVESGGGVVQPGRSLRLSCAASGFTFSSYGMHWVRQAPGKGLEWVAVIWYDGSNKYYADSVKGRFTISRDNSKNTLYLQMNSLRAEDTAVYYCARGTNAYGTPRDFDLWGRGTLVTVSS

SEQ ID NO: 4169 - protein, 121 aa, Artificial Sequence
  source: /note="Description of Artificial Sequence: Synthetic polypeptide"
QVQLVESGGGVVQPGRSLRLSCAASGFTFSTYGMHWVRQAPGKGLEWVAVIWYDGSNKYYADSVKGRFTISRDNSKNTLYLQMNSLRAEDTAVYYCARGQHGTSRVDFDYWGQGTLVTVSS

SEQ ID NO: 4170 - protein, 117 aa, Artificial Sequence
  source: /note="Description of Artificial Sequence: Synthetic polypeptide"
QVQLVESGGGVVQPGRSLRLSCAASGYTFTDYNLHWVRQAPGKGLEWIGFIYPSNGITGYNDSVKGRFTISRDNSKNTLYLQMNSLRAEDTAVYYCARSTVDYFDYWGQGTLVTVSS

SEQ ID NO: 4171 - protein, 115 aa, Artificial Sequence
  source: /note="Description of Artificial Sequence: Synthetic polypeptide"
QVQLVESGGGVVQPGRSLRLSCAASGYTFTSYDINWVRQAPGKGLEWIGWIFPGDGSTKYNDSVKGRFTISRDNSKNTLYLQMNSLRAEDTAVYYCRYHYAMDSWGQGTLVTVSS

SEQ ID NO: 4172 - protein, 120 aa, Artificial Sequence
  source: /note="Description of Artificial Sequence: Synthetic polypeptide"
QVQLVESGGGVVQPGRSLRLSCAASGYTFTSYWMHWVRQAPGKGLEWIGNIYPGSGSTYYDDSVKGRFTISRDNSKNTLYLQMNSLRAEDTAVYYCTRGHYGNYLTFDYWGQGTLVTVSS

SEQ ID NO: 4173 - protein, 120 aa, Artificial Sequence
  source: /note="Description of Artificial Sequence: Synthetic polypeptide"
QVQLVESGGGVVQPGRSLRLSCAASGYTFTSYWMHWVRQAPGKGLEWIGNIYPGSISSNYDDSVKGRFTISRDNSKNTLYLQMNSLRAEDTAVYYCTRGHYGSYLTFDYWGQGTLVTVSS

SEQ ID NO: 4174 - protein, 117 aa, Artificial Sequence
  source: /note="Description of Artificial Sequence: Synthetic polypeptide"
QVQLVQSGAELKKPGASVKVSCKASGYTFTDYNLHWVRQAPGQRLEWIGFIYPSNGITGYSQKFQGKATLTVDTSASTAYMELSSLRSEDTAVYYCARSTVDYFDYWGQGTTVTVSS

SEQ ID NO: 4175 - protein, 117 aa, Artificial Sequence
  source: /note="Description of Artificial Sequence: Synthetic polypeptide"
QVQLVQSGAEVKKPGASVKISCKASGYTFTDYNLHWVRQAPGQGLEWIGFIYPSNGITGYAEKFEGRATLTVDNSTSTAYMELSSLRSEDTAVYYCARSFVDYFDYWGQGTLLTVSS

SEQ ID NO: 4176 - protein, 117 aa, Artificial Sequence
  source: /note="Description of Artificial Sequence: Synthetic polypeptide"
QVQLVQSGAEVKKPGASVKISCKASGYTFTDYNLHWVRQAPGQGLEWIGFIYPSNGITGYAQKFQGRATLTVDNPTSTAYMELSSLRSEDTAVYYCARSDVDYFDYWGQGTLLTVSS

SEQ ID NO: 4177 - protein, 117 aa, Artificial Sequence
  source: /note="Description of Artificial Sequence: Synthetic polypeptide"
QVQLVQSGAEVKKPGASVKISCKASGYTFTDYNLHWVRQAPGQGLEWIGFIYPSNGITGYAQKFQGRATLTVDNSASTAYMELSSLRSEDTAVYYCARSDVDYFDYWGQGTLLTVSS

SEQ ID NO: 4178 - protein, 117 aa, Artificial Sequence
  source: /note="Description of Artificial Sequence: Synthetic polypeptide"
QVQLVQSGAEVKKPGASVKISCKASGYTFTDYNLHWVRQAPGQGLEWIGFIYPSNGITGYAQKFQGRATLTVDNSTSTAYMELSSLRSEDTAVYYCARSDVDYFDYWGQGTLLTVSS

SEQ ID NO: 4179 - protein, 117 aa, Artificial Sequence
  source: /note="Description of Artificial Sequence: Synthetic polypeptide"
QVQLVQSGAEVKKPGASVKISCKASGYTFTDYNLHWVRQAPGQGLEWIGFIYPSNGITGYAQKFQGRATLTVDNSTSTAYMELSSLRSEDTAVYYCARSTVDYFDYWGQGTLLTVSS

SEQ ID NO: 4180 - protein, 117 aa, Artificial Sequence
  source: /note="Description of Artificial Sequence: Synthetic polypeptide"
QVQLVQSGAEVKKPGASVKISCKASGYTFTDYNLHWVRQAPGQGLEWIGFIYPSNGITGYAQKFQGRATLTVDQSTSTAYMELSSLRSEDTAVYYCARSDVDYFDYWGQGTLLTVSS

SEQ ID NO: 4181 - protein, 117 aa, Artificial Sequence
  source: /note="Description of Artificial Sequence: Synthetic polypeptide"
QVQLVQSGAEVKKPGASVKISCKASGYTFTDYNLHWVRQAPGQGLEWIGFIYPSNGITGYAQKFQGRATLTVDTSTSTAYMELSSLRSEDTAVYYCARSDVDYFDYWGQGTLLTVSS

SEQ ID NO: 4182 - protein, 117 aa, Artificial Sequence
  source: /note="Description of Artificial Sequence: Synthetic polypeptide"
QVQLVQSGAEVKKPGASVKISCKASGYTFTDYNLHWVRQAPGQGLEWIGFIYPSNGITGYAQKFQGRATLTVDTSTSTAYMELSSLRSEDTAVYYCARSTVDYFDYWGQGTLLTVSS

SEQ ID NO: 4183 - protein, 117 aa, Artificial Sequence
  source: /note="Description of Artificial Sequence: Synthetic polypeptide"
QVQLVQSGAEVKKPGASVKISCKASGYTFTDYNLHWVRQAPGQGLEWIGFIYPSNGITGYAQKFQGRATLTVDTSTSTAYMELSSLRSEDTAVYYCARSTVDYFDYWGQGTTVTVSS

SEQ ID NO: 4184 - protein, 117 aa, Artificial Sequence
  source: /note="Description of Artificial Sequence: Synthetic polypeptide"
QVQLVQSGAEVKKPGASVKISCKASGYTFTDYNLHWVRQAPGQGLEWIGFIYPSNQITGYAQKFQGRATLTVDNPTSTAYMELSSLRSEDTAVYYCARSDVDYFDYWGQGTLLTVSS

SEQ ID NO: 4185 - protein, 117 aa, Artificial Sequence
  source: /note="Description of Artificial Sequence: Synthetic polypeptide"
QVQLVQSGAEVKKPGASVKISCKASGYTFTDYNLHWVRQAPGQGLEWIGFIYPSNQITGYAQKFQGRATLTVDNSASTAYMELSSLRSEDTAVYYCARSDVDYFDYWGQGTLLTVSS

SEQ ID NO: 4186 - protein, 117 aa, Artificial Sequence
  source: /note="Description of Artificial Sequence: Synthetic polypeptide"
QVQLVQSGAEVKKPGASVKISCKASGYTFTDYNLHWVRQAPGQGLEWIGFIYPSNQITGYAQKFQGRATLTVDNSTSTAYMELSSLRSEDTAVYYCARSDVDYFDYWGQGTLLTVSS

SEQ ID NO: 4187 - protein, 117 aa, Artificial Sequence
  source: /note="Description of Artificial Sequence: Synthetic polypeptide"
QVQLVQSGAEVKKPGASVKISCKASGYTFTDYNLHWVRQAPGQGLEWIGFIYPSNRITGYAQKFQGRATLTVDNSASTAYMELSSLRSEDTAVYYCARSDVDYFDYWGQGTLLTVSS

SEQ ID NO: 4188 - protein, 117 aa, Artificial Sequence
  source: /note="Description of Artificial Sequence: Synthetic polypeptide"
QVQLVQSGAEVKKPGASVKISCKASGYTFTDYNLHWVRQAPGQGLEWIGFIYPSNRITGYAQKFQGRATLTVDNSTSTAYMELSSLRSEDTAVYYCARSDVDYFDYWGQGTLLTVSS

SEQ ID NO: 4189 - protein, 117 aa, Artificial Sequence
  source: /note="Description of Artificial Sequence: Synthetic polypeptide"
QVQLVQSGAEVKKPGASVKISCKASGYTFTDYNLHWVRQAPGQGLEWIGFIYPSNRITGYAQKFQGRATLTVDQSTSTAYMELSSLRSEDTAVYYCARSDVDYFDYWGQGTLLTVSS

SEQ ID NO: 4190 - protein, 117 aa, Artificial Sequence
  source: /note="Description of Artificial Sequence: Synthetic polypeptide"
QVQLVQSGAEVKKPGASVKISCKASGYTFTDYNLHWVRQAPGQGLEWIGFIYPSNRITGYAQKFQGRATLTVDTSTSTAYMELSSLRSEDTAVYYCARSDVDYFDYWGQGTLLTVSS

SEQ ID NO: 4191 - protein, 117 aa, Artificial Sequence
  source: /note="Description of Artificial Sequence: Synthetic polypeptide"
QVQLVQSGAEVKKPGASVKISCKASGYTFTDYNLHWVRQAPGQGLEWIGFIYPSNVITGYAQKFQGRATLTVDNSASTAYMELSSLRSEDTAVYYCARSDVDYFDYWGQGTLLTVSS

SEQ ID NO: 4192 - protein, 117 aa, Artificial Sequence
  source: /note="Description of Artificial Sequence: Synthetic polypeptide"
QVQLVQSGAEVKKPGASVKISCKASGYTFTDYNLHWVRQAPGQGLEWIGFIYPSNVITGYAQKFQGRATLTVDNSTSTAYMELSSLRSEDTAVYYCARSDVDYFDYWGQGTLLTVSS

SEQ ID NO: 4193 - protein, 117 aa, Artificial Sequence
  source: /note="Description of Artificial Sequence: Synthetic polypeptide"
QVQLVQSGAEVKKPGASVKISCKASGYTFTDYNLHWVRQAPGQGLEWIGFIYPSNVITGYAQKFQGRATLTVDQSTSTAYMELSSLRSEDTAVYYCARSDVDYFDYWGQGTLLTVSS

SEQ ID NO: 4194 - protein, 117 aa, Artificial Sequence
  source: /note="Description of Artificial Sequence: Synthetic polypeptide"
QVQLVQSGAEVKKPGASVKISCKASGYTFTDYNLHWVRQAPGQGLEWIGFIYPSNVITGYAQKFQGRATLTVDTSTSTAYMELSSLRSEDTAVYYCARSDVDYFDYWGQGTLLTVSS

SEQ ID NO: 4195 - protein, 117 aa, Artificial Sequence
  source: /note="Description of Artificial Sequence: Synthetic polypeptide"
QVQLVQSGAEVKKPGASVKISCKASGYTFTDYNLHWVRQAPGQRLEWIGFIYPSNGITGYNQKFKNKATLTVDTSASTAYMELSSLRSEDTAVYYCARSTVDYFDYWGQGTTVTVSS

SEQ ID NO: 4196 - protein, 117 aa, Artificial Sequence
  source: /note="Description of Artificial Sequence: Synthetic polypeptide"
QVQLVQSGAEVKKPGASVKISCKASGYTFTDYNLHWVRQAPGQRLEWIGFIYPSNGITGYSQKFQGKATLTVDTSASTAYMELSSLRSEDTAVYYCARSTVDYFDYWGQGTTVTVSS

SEQ ID NO: 4197 - protein, 117 aa, Artificial Sequence
  source: /note="Description of Artificial Sequence: Synthetic polypeptide"
QVQLVQSGAEVKKPGASVKISCKASGYTFTDYNYHWVRQAPGQGLEWIGFIYPSNGITGYAQKFFGRATLTVDNSTSTAYMELSSLRSEDTAVYYCARSDVDYFDYWGQGTLLTVSS

SEQ ID NO: 4198 - protein, 117 aa, Artificial Sequence
  source: /note="Description of Artificial Sequence: Synthetic polypeptide"
QVQLVQSGAEVKKPGASVKISCKASGYTFTDYNYHWVRQAPGQGLEWIGFIYPSNGITGYAQKFQGRATLTVDNSTSTAYMELSSLRSEDTAVYYCARSDVDYFDYWGQGTLLTVSS

SEQ ID NO: 4199 - protein, 117 aa, Artificial Sequence
  source: /note="Description of Artificial Sequence: Synthetic polypeptide"
QVQLVQSGAEVKKPGASVKISCKASGYTFTDYNYHWVRQAPGQGLEWIGFIYPSNGITGYAQKFQHRATLTVDNSTSTAYMELSSLRSEDTAVYYCARSDVDYFDYWGQGTLLTVSS

SEQ ID NO: 4200 - protein, 117 aa, Artificial Sequence
  source: /note="Description of Artificial Sequence: Synthetic polypeptide"
QVQLVQSGAEVKKPGASVKVSCKASGATFTDYNFHWVRQAPGQGLEWIGFIYPSNGITGYAQDFQGRVTMTVDTSTSTVYMELSSLRSEDTAVYYCARSDVDYFDYWGQGTLVTVSS

SEQ ID NO: 4201 - protein, 117 aa, Artificial Sequence
  source: /note="Description of Artificial Sequence: Synthetic polypeptide"
QVQLVQSGAEVKKPGASVKVSCKASGATFTDYNYHWVRQAPGQGLEWIGFIYPSNGITGYAQKFQDRVTMTVDTSTSTVYMELSSLRSEDTAVYYCARSFVDYFDYWGQGTLVTVSS

SEQ ID NO: 4202 - protein, 120 aa, Artificial Sequence
  source: /note="Description of Artificial Sequence: Synthetic polypeptide"
QVQLVQSGAEVKKPGASVKVSCKASGFTFSNYCMNWVRQAPGQGLEWVAEIRLKSNNYVTNYVQKFQGRVTMTRDTSTSTVYMELSSLRSEDTAVYYCTRDGYYVPFAYWGQGTLVTVSS

SEQ ID NO: 4203 - protein, 117 aa, Artificial Sequence
  source: /note="Description of Artificial Sequence: Synthetic polypeptide"
QVQLVQSGAEVKKPGASVKVSCKASGYAFTDYNLHWVRQAPGQGLEWIGFIYPSNGITGYAQKFQGRVTMTVDTSTSTVYMELSSLRSEDTAVYYCARSDVDYFDYWGQGTLVTVSS

SEQ ID NO: 4204 - protein, 120 aa, Artificial Sequence
  source: /note="Description of Artificial Sequence: Synthetic polypeptide"
QVQLVQSGAEVKKPGASVKVSCKASGYSFTGYYMHWVRQAPGQGLEWIGEINPSTGGTSYNQKFQGRVTMTRDTSTSTVYMELSSLRSEDTAVYYCTRGHYGSYLTFDYWGQGTLVTVSS

SEQ ID NO: 4205 - protein, 117 aa, Artificial Sequence
  source: /note="Description of Artificial Sequence: Synthetic polypeptide"
QVQLVQSGAEVKKPGASVKVSCKASGYTETDYNLHWVRQAPGQGLEWIGFIYPSNGITGYAQKFQGRVTMTVDTSTSTVYMELSSLRSEDTAVYYCARSDVDYFDYWGQGTLVTVSS

SEQ ID NO: 4206 - protein, 117 aa, Artificial Sequence
  source: /note="Description of Artificial Sequence: Synthetic polypeptide"
QVQLVQSGAEVKKPGASVKVSCKASGYTFTDYNFHWVRQAPGQGLEWIGFIYPANGITGYAQKDQGRVTMTVDTSTSTVYMELSSLRSEDTAVYYCARSDVDYFDYWGQGTLVTVSS

SEQ ID NO: 4207 - protein, 117 aa, Artificial Sequence
  source: /note="Description of Artificial Sequence: Synthetic polypeptide"
QVQLVQSGAEVKKPGASVKVSCKASGYTFTDYNFHWVRQAPGQGLEWIGFIYPSNGITGYAQKFTGRVTMTVDTSTSTVYMELSSLRSEDTAVYYCARSTVDYFDDWGQGTLVTVSS

SEQ ID NO: 4208 - protein, 117 aa, Artificial Sequence
  source: /note="Description of Artificial Sequence: Synthetic polypeptide"
QVQLVQSGAEVKKPGASVKVSCKASGYTFTDYNLHWVRQAPGQGLEWIGFIYPSNGIRGYAQKFQGRVTMTVDTSTSTVYMELSSLRSEDTAVYYCARSDVDYFDYWGQGTLVTVSS

SEQ ID NO: 4209 - protein, 117 aa, Artificial Sequence
  source: /note="Description of Artificial Sequence: Synthetic polypeptide"
QVQLVQSGAEVKKPGASVKVSCKASGYTFTDYNLHWVRQAPGQGLEWIGFIYPSNGITGYAQKFQGRVTMTVDTSTSTVYMELSSLRSEDTAVYYCARSTVDYFDYWGQGTLVTVSS

SEQ ID NO: 4210 - protein, 117 aa, Artificial Sequence
  source: /note="Description of Artificial Sequence: Synthetic polypeptide"
QVQLVQSGAEVKKPGASVKVSCKASGYTFTDYNLHWVRQAPGQGLEWIGFIYPSNGITGYNQKFQGRVTMTRDTSTSTVYMELSSLRSEDTAVYYCARSTVDYFDYWGQGTLVTVSS

SEQ ID NO: 4211 - protein, 117 aa, Artificial Sequence
  source: /note="Description of Artificial Sequence: Synthetic polypeptide"
QVQLVQSGAEVKKPGASVKVSCKASGYTFTDYNLHWVRQAPGQGLEWMGFIYPSNGITGYAQKFQGRVTMTRDTSTSTVYMELSSLRSEDTAVYYCARSTVDYFDYWGQGTLVTVSS

SEQ ID NO: 4212 - protein, 117 aa, Artificial Sequence
  source: /note="Description of Artificial Sequence: Synthetic polypeptide"
QVQLVQSGAEVKKPGASVKVSCKASGYTFTDYNLHWVRQAPGQGLEWMGFIYPSNGITGYAQKFQGRVTMTRDTSTSTVYMELSSLRSEDTAVYYCARSTVDYFDYWGQGTTVTVSS

SEQ ID NO: 4213 - protein, 117 aa, Artificial Sequence
  source: /note="Description of Artificial Sequence: Synthetic polypeptide"
QVQLVQSGAEVKKPGASVKVSCKASGYTFTDYNLHWVRQAPGQGLEWMGFIYPSNGITGYAQKFQGRVTMTVDTSTSTAYMELSSLRSEDTAVYYCARSTVDYFDYWGQGTTVTVSS

SEQ ID NO: 4214 - protein, 117 aa, Artificial Sequence
  source: /note="Description of Artificial Sequence: Synthetic polypeptide"
QVQLVQSGAEVKKPGASVKVSCKASGYTFTDYNLHWVRQAPGQRLEWIGFIYPSNGITGYSQKFQGRATLTVDTSASTAYMELSSLRSEDTAVYYCARSTVDYFDYWGQGTTVTVSS

SEQ ID NO: 4215 - protein, 117 aa, Artificial Sequence
  source: /note="Description of Artificial Sequence: Synthetic polypeptide"
QVQLVQSGAEVKKPGASVKVSCKASGYTFTDYNLHWVRQAPGQSLEWIGFIYPSNGITGYSQKFQGKATLTVDTSASTAYMELSSLRSEDTAVYYCARSTVDYFDYWGQGTTVTVSS

SEQ ID NO: 4216 - protein, 117 aa, Artificial Sequence
  source: /note="Description of Artificial Sequence: Synthetic polypeptide"
QVQLVQSGAEVKKPGASVKVSCKASGYTFTDYNNHWVRQAPGQGLEWIGFIYPSNGITGYAQKFQGRVTMTVDTSTSTVYMELSSLRSEDTAVYYCARSDVDYFDYWGQGTLVTVSS

SEQ ID NO: 4217 - protein, 117 aa, Artificial Sequence
  source: /note="Description of Artificial Sequence: Synthetic polypeptide"
QVQLVQSGAEVKKPGASVKVSCKASGYTFTDYNYHWVRQAPGQGLEWIGFIYPSNGITGSAQKFQGRVTMTVDTSTSTVYMELSSLRSEDTAVYYCARSDVDYFDYWGQGTLVTVSS

SEQ ID NO: 4218 - protein, 117 aa, Artificial Sequence
  source: /note="Description of Artificial Sequence: Synthetic polypeptide"
QVQLVQSGAEVKKPGASVKVSCKASGYTFTDYNYHWVRQAPGQGLEWIGFIYPSNGITGYAQKFQGRVTMTVDTSTSTVYMELSSLRSEDTAVYYCADSTVDYFDYWGQGTLVTVSS

SEQ ID NO: 4219 - protein, 117 aa, Artificial Sequence
  source: /note="Description of Artificial Sequence: Synthetic polypeptide"
QVQLVQSGAEVKKPGASVKVSCKASGYTFTDYNYHWVRQAPGQGLEWIGFIYPSNGITGYAQKFQGRVTMTVDTSTSTVYMELSSLRSEDTAVYYCARSDVDYFDLWGQGTLVTVSS

SEQ ID NO: 4220 - protein, 117 aa, Artificial Sequence
  source: /note="Description of Artificial Sequence: Synthetic polypeptide"
QVQLVQSGAEVKKPGASVKVSCKASGYTFTDYNYHWVRQAPGQGLEWIGFIYPSNGITGYAQKFQGRVTMTVDTSTSTVYMELSSLRSEDTAVYYCARSDVDYFDYWGQGTLVTVSS

SEQ ID NO: 4221 - protein, 117 aa, Artificial Sequence
  source: /note="Description of Artificial Sequence: Synthetic polypeptide"
QVQLVQSGAEVKKPGASVKVSCKASGYTFTDYNYHWVRQAPGQGLEWIGFIYPSNGITGYAQKFQGRVTMTVDTSTSTVYMELSSLRSEDTAVYYCARSSVDYFDYWGQGTLVTVSS

SEQ ID NO: 4222 - protein, 117 aa, Artificial Sequence
  source: /note="Description of Artificial Sequence: Synthetic polypeptide"
QVQLVQSGAEVKKPGASVKVSCKASGYTFTDYNYHWVRQAPGQGLEWIGFIYPSNGITGYAQKFQGRVTMTVDTSTSTVYMELSSLRSEDTAVYYCARSTVDYFDYWGQGTLVTVSS

SEQ ID NO: 4223 - protein, 123 aa, Artificial Sequence
  source: /note="Description of Artificial Sequence: Synthetic polypeptide"
QVQLVQSGAEVKKPGASVKVSCKASGYTFTGSYMHWVRQAPGQGLEWMGWINPNSGGTNYAQKFQGRVTMTRDTSISTAYMELSRLRSDDTAVYYCARDISSDFGSTGYLDPWGQGTLVTVSS

SEQ ID NO: 4224 - protein, 124 aa, Artificial Sequence
  source: /note="Description of Artificial Sequence: Synthetic polypeptide"
QVQLVQSGAEVKKPGASVKVSCKASGYTFTGYYMHWVRQAPGQGLEWMGWINPNSGGTKYAQKFQGRVTMTRDTSISTAYMELSRLRSDDTAVYYCARDRGGQESGSYYYMDVWGKGTTVTVSS

SEQ ID NO: 4225 - protein, 124 aa, Artificial Sequence
  source: /note="Description of Artificial Sequence: Synthetic polypeptide"
QVQLVQSGAEVKKPGASVKVSCKASGYTFTGYYMHWVRQAPGQGLEWMGWINPNSGGTSYAQKFQGRVTMTRDTSISTAYMELSRLRSDDTAVYYCARDGPNYYDGVVNWFDPWGQGTLVTVSS

SEQ ID NO: 4226 - protein, 122 aa, Artificial Sequence
  source: /note="Description of Artificial Sequence: Synthetic polypeptide"
QVQLVQSGAEVKKPGASVKVSCKASGYTFTGYYMHWVRQAPGQGLEWMGWINPNSGGTSYAQKFQGRVTMTRDTSISTAYMELSRLRSDDTAVYYCARDGYTDGATDYMDVWGKGTTVTVSS

SEQ ID NO: 4227 - protein, 123 aa, Artificial Sequence
  source: /note="Description of Artificial Sequence: Synthetic polypeptide"
QVQLVQSGAEVKKPGASVKVSCKASGYTFTGYYMHWVRQAPGQGLEWMGWINPNSGGTSYAQKFQGRVTMTRDTSISTAYMELSRLRSDDTAVYYCARDVGYYYGSSGYVDYWGQGTLVTVSS

SEQ ID NO: 4228 - protein, 125 aa, Artificial Sequence
  source: /note="Description of Artificial Sequence: Synthetic polypeptide"
QVQLVQSGAEVKKPGASVKVSCKASGYTFTGYYMHWVRQAPGQGLEWMGWINPSSGGTNYAQKFQGRVTMTRDTSISTAYMELSRLRSDDTAVYYCARDAPNSYDTGSINWFDPWGQGTLVTVSS

SEQ ID NO: 4229 - protein, 124 aa, Artificial Sequence
  source: /note="Description of Artificial Sequence: Synthetic polypeptide"
QVQLVQSGAEVKKPGASVKVSCKASGYTFTRYYMHWVRQAPGQGLEWMGWINPNSGGTNYAQKFQGRVTMTRDTSISTAYMELSRLRSDDTAVYYCARDLSHIADGATNYFDYWGQGTLVTVSS

SEQ ID NO: 4230 - protein, 115 aa, Artificial Sequence
  source: /note="Description of Artificial Sequence: Synthetic polypeptide"
QVQLVQSGAEVKKPGASVKVSCKASGYTFTSYDINWVRQAPGQGLEWIGWIFPGDGSTKYNQKFQGRVTMTRDTSTSTVYMELSSLRSEDTAVYYCRYHYAMDSWGQGTLVTVSS

SEQ ID NO: 4231 - protein, 120 aa, Artificial Sequence
  source: /note="Description of Artificial Sequence: Synthetic polypeptide"
QVQLVQSGAEVKKPGASVKVSCKASGYTFTSYWMHWVRQAPGQGLEWIGNIYPGSGSTYYDQKFQGRVTMTRDTSTSTVYMELSSLRSEDTAVYYCTRGHYGNYLTFDYWGQGTLVTVSS

SEQ ID NO: 4232 - protein, 120 aa, Artificial Sequence
  source: /note="Description of Artificial Sequence: Synthetic polypeptide"
QVQLVQSGAEVKKPGASVKVSCKASGYTFTSYWMHWVRQAPGQGLEWIGNIYPGSISSNYDQKFQGRVTMTRDTSTSTVYMELSSLRSEDTAVYYCTRGHYGSYLTFDYWGQGTLVTVSS

SEQ ID NO: 4233 - protein, 119 aa, Artificial Sequence
  source: /note="Description of Artificial Sequence: Synthetic polypeptide"
QVQLVQSGAEVKKPGASVKVSCKASGYTFTSYYIHWVRQAPGQGLEWMGIINPSGGSTSYAQKFQGRVTMTRDTSTSTVYMELSSLRSEDTAVYYCARVSRQQHSMDVWGQGTTVTVSS

SEQ ID NO: 4234 - protein, 121 aa, Artificial Sequence
  source: /note="Description of Artificial Sequence: Synthetic polypeptide"
QVQLVQSGAEVKKPGASVKVSCKASGYTFTSYYMHWVRQAPGQGLEWMGVINPSGGSTSYAQKFQGRVTMTRDTSTSTVYMELSSLRSEDTAVYYCAREEAVAADLGVDVWGQGTTVTVSS

SEQ ID NO: 4235 - protein, 121 aa, Artificial Sequence
  source: /note="Description of Artificial Sequence: Synthetic polypeptide"
QVQLVQSGAEVKKPGASVKVSCKASGYTFTSYYMHWVRQAPGQGLEWMGVINPSGGSTSYAQKFQGRVTMTRDTSTSTVYMELSSLRSEDTAVYYCAREGANYDSSGLDAWGQGTLVTVSS

SEQ ID NO: 4236 - protein, 121 aa, Artificial Sequence
  source: /note="Description of Artificial Sequence: Synthetic polypeptide"
QVQLVQSGAEVKKPGASVKVSCKASGYTFTSYYMHWVRQAPGQGLEWMGVINPSGGSTSYAQKFQGRVTMTRDTSTSTVYMELSSLRSEDTAVYYCARESQYYDVHGMDVWGQGTTVTVSS

SEQ ID NO: 4237 - protein, 120 aa, Artificial Sequence
  source: /note="Description of Artificial Sequence: Synthetic polypeptide"
QVQLVQSGAEVKKPGSSVKVSCKASGFTFSNYCMNWVRQAPGQGLEWVAEIRLKSNNYVTNYVQKFQGRVTITADESTSTAYMELSSLRSEDTAVYYCTRDGYYVPFAYWGQGTLVTVSS

SEQ ID NO: 4238 - protein, 122 aa, Artificial Sequence
  source: /note="Description of Artificial Sequence: Synthetic polypeptide"
QVQLVQSGAEVKKPGSSVKVSCKASGGTFSNYAISWVRQAPGQGLEWMGGIIPIFGTANYAQKFQGRVTITADESTSTAYMELSSLRSEDTAVYYCARDTGTYVTGDGMDVWGQGTTVTVSS

SEQ ID NO: 4239 - protein, 120 aa, Artificial Sequence
  source: /note="Description of Artificial Sequence: Synthetic polypeptide"
QVQLVQSGAEVKKPGSSVKVSCKASGGTFSSLAISWVRQAPGQGLEWMGGIIPIFGTANYAQKFQGRVTITADESTSTAYMELSSLRSEDTAVYYCARGTFYSDELFDYWGQGTLVTVSS

SEQ ID NO: 4240 - protein, 121 aa, Artificial Sequence
  source: /note="Description of Artificial Sequence: Synthetic polypeptide"
QVQLVQSGAEVKKPGSSVKVSCKASGGTFSSYAISWVRQAPGQGLEWMGSIIPIFGTANYAQKFQGRVTITADESTSTAYMELSSLRSEDTAVYYCARDLGGQYYGSHHYWGQGTLVTVSS

SEQ ID NO: 4241 - protein, 117 aa, Artificial Sequence
  source: /note="Description of Artificial Sequence: Synthetic polypeptide"
QVQLVQSGAEVKKPGSSVKVSCKASGVTFTDYNYHWVRQAPGQGLEWIGFIYPSNGITGYAQKFQDRVTMTVDTSTSTVYMELSSLRSEDTAVYYCARSTVDYFDYWGQGTLVTVSS

SEQ ID NO: 4242 - protein, 120 aa, Artificial Sequence
  source: /note="Description of Artificial Sequence: Synthetic polypeptide"
QVQLVQSGAEVKKPGSSVKVSCKASGYSFTGYYMHWVRQAPGQGLEWIGEINPSTGGTSYNQKFQGRVTITADESTSTAYMELSSLRSEDTAVYYCTRGHYGSYLTFDYWGQGTLVTVSS

SEQ ID NO: 4243 - protein, 117 aa, Artificial Sequence
  source: /note="Description of Artificial Sequence: Synthetic polypeptide"
QVQLVQSGAEVKKPGSSVKVSCKASGYTFTDYNLHWVRQAPGQGLEWIGFIYPSNGITGYAQKFQGRVTMTVDTSTSTVYMELSSLRSEDTAVYYCARSDVDYFDYWGQGTLVTVSS

SEQ ID NO: 4244 - protein, 117 aa, Artificial Sequence
  source: /note="Description of Artificial Sequence: Synthetic polypeptide"
QVQLVQSGAEVKKPGSSVKVSCKASGYTFTDYNLHWVRQAPGQGLEWIGFIYPSNGITGYNQKFQGRVTITADESTSTAYMELSSLRSEDTAVYYCARSTVDYFDYWGQGTLVTVSS

SEQ ID NO: 4245 - protein, 446 aa, Artificial Sequence
  source: /note="Description of Artificial Sequence: Synthetic polypeptide"
QVQLVQSGAEVKKPGSSVKVSCKASGYTFTDYNMHWVRQAPGQGLEWIGYIYPYNGGTGYNQKFKSKATITADESTNTAYMELSSLRSEDTAVYYCARGRPAMDYWGQGTLVTVSSASTKGPSVFPLAPSSKSTSGGTAALGCLVKDYFPEPVTVSWNSGALTSGVHTFPAVLQSSGLYSLSSVVTVPSSSLGTQTYICNVNHKPSNTKVDKKVEPKSCDKTHTCPPCPAPELLGGPSVFLFPPKPKDTLMISRTPEVTCVVVDVSHEDPEVKFNWYVDGVEVHNAKTKPREEQYNSTYRVVSVLTVLHQDWLNGKEYKCKVSNKALPAPIEKTISKAKGQPREPQVYTLPPSRDELTKNQVSLTCLVKGFYPSDIAVEWESNGQPENNYKTTPPVLDSDGSFFLYSKLTVDKSRWQQGNVFSCSVMHEALHNHYTQKSLSLSPGK

SEQ ID NO: 4246 - protein, 115 aa, Artificial Sequence
  source: /note="Description of Artificial Sequence: Synthetic polypeptide"
QVQLVQSGAEVKKPGSSVKVSCKASGYTFTSYDINWVRQAPGQGLEWIGWIFPGDGSTKYNQKFQGRVTITADESTSTAYMELSSLRSEDTAVYYCRYHYAMDSWGQGTLVTVSS

SEQ ID NO: 4247 - protein, 120 aa, Artificial Sequence
  source: /note="Description of Artificial Sequence: Synthetic polypeptide"
QVQLVQSGAEVKKPGSSVKVSCKASGYTFTSYWMHWVRQAPGQGLEWIGNIYPGSGSTYYDQKFQGRVTITADESTSTAYMELSSLRSEDTAVYYCTRGHYGNYLTFDYWGQGTLVTVSS

SEQ ID NO: 4248 - protein, 120 aa, Artificial Sequence
  source: /note="Description of Artificial Sequence: Synthetic polypeptide"
QVQLVQSGAEVKKPGSSVKVSCKASGYTFTSYWMHWVRQAPGQGLEWIGNIYPGSISSNYDQKFQGRVTITADESTSTAYMELSSLRSEDTAVYYCTRGHYGSYLTFDYWGQGTLVTVSS

SEQ ID NO: 4249 - protein, 117 aa, Artificial Sequence
  source: /note="Description of Artificial Sequence: Synthetic polypeptide"
QVQLVQSGAEVKKPGSSVKVSCKASGYTHTDYNLHWVRQAPGQGLEWIGFIYPSNGITGYAQKFQGRVTMTVDTSTSTVYMELSSLRSEDTAVYYCARSDVDYFDYWGQGTLVTVSS

SEQ ID NO: 4250 - protein, 167 aa, Artificial Sequence
  source: /note="Description of Artificial Sequence: Synthetic polypeptide"
GVVQPGRSLRLSCAASGFTFSSYGMHWVRQAPGKGLEWVAVIWYDGSNKYYADSVKGRFTISRDNSKNTLYLQMNSLRAEDTAVYYCARDPRGATLYYYYYGMDVWGQGTTVTVSSASTKGPSVFPLAPCSRSTSESTAALGCLVKDYFPEPVTVSWNSGALTSGVH

SEQ ID NO: 4251 - protein, 10 aa, Homo sapiens
GFNIKDTYIH

SEQ ID NO: 4252 - protein, 119 aa, Mus musculus
EVQLQQSGPELVKPGTSVKISCKASGFTFTDYTMDWVKQSHGKSLEWIGDVNPNSGGSIYNQRFKGKASLTVDRSSRIVYMELRSLTFEDTAVYYCARNLGPSFYFDYWGQGTTLTVSS

SEQ ID NO: 4253 - protein, 119 aa, Artificial Sequence
  source: /note="Description of Artificial Sequence: Synthetic polypeptide"
EVQLVESGGGLVQPGGSLRLSCAASGFTFSSYAMSWVRQAPGKGLEWVAVISGDGGSTYYADSVKGRFTISRDNSKNTLYLQMNSLRAEDTAVYYCARGRVGYSLYDYWGQGTLVTVSS

SEQ ID NO: 4254 - protein, 119 aa, Artificial Sequence [sequence omitted]

SEQ ID NO: 4255 - protein, 121 aa, Homo sapiens
EVQLVESGGGLVQPGRSLRLSCAASGITFDDYGMHWVRQAPGKGLEWVSGISWNRGRIEYADSVKGRFTISRDNAKNSLYLQMNSLRAEDTALYYCAKGRFRYFDWFLDYWGQGTLVTVSS

SEQ ID NO: 4256 - protein, 113 aa, Homo sapiens
EVQLVESGGGLVQPGRSLRLSCAVSGFTFDDYVVHWVRQAPGKGLEWVSGISGNSGNIGYADSVKGRFTISRDNAKNSLYLQMNSLRAEDTALYYCAVPFDYWGQGTLVTVSS

SEQ ID NO: 4257 - protein, 141 aa, Oryctolagus cuniculus
METGLRWLLLVAVLKGVQCLSVEESGGRLVTPGTPLTLTCTASGFTITNYHMFWVRQAPGKGLEWIGVITSSGIGSSSTTYYATWAKGRFTISKTSTTVNLRITSPTTEDTATYFCARDYFTNTYYALDIWGPGTLVTVSS

SEQ ID NO: 4258 - protein, 121 aa, Homo sapiens
QLQLQESGPGLVKPSETLSLTCSVSGGSLSRSSYFWGWIRQPPGKGLEWIASIFYSGETYFNPSLKSRVTISVDTSRNQFSLKLSSVTAADTAVYYCARDYDILTGDEDYWGQGTLVTVSS

SEQ ID NO: 4259 - protein, 121 aa, Homo sapiens
QLQLQESGPGLVKPSETLSLTCTVSGGSLSRSSFFWGWIRQPPGKGLEWIGSIYYSGSTYYNPSLKSRVTISVDTSKNQFSLKLSSVTAADTAVYYCVRDYDILTGDEDYWGQGTLVTVSS

SEQ ID NO: 4260 - protein, 113 aa, Homo sapiens
QVQLVESGGDVVQPGGSLRLSCAASGVAFSNYGMHWVRQAPGKGLEWVAVIWYDGSNKYYADSVKGRFTISRDNSKNMLYLQMNSLRAEDTAMYYCARNDDYWGQGTLVTVSS

SEQ ID NO: 4261 - protein, 113 aa, Homo sapiens
QVQLVESGGDVVQPGRSLRLSCAASGLTFTNYGFHWVRQAPGKGLEWVAVIWYDGSKKYYADSVKGRFTISRDNSKNTLYLQMNNLRAEDTAVYYCATGDDYWGQGTLVTVSS

SEQ ID NO: 4262 - protein, 113 aa, Homo sapiens [sequence omitted]

SEQ ID NO: 4263 - protein, 113 aa, Homo sapiens
QVQLVESGGGVVQPGRSLRLSCTTSGITFSSYGFHWVRQAPGKGLEWVAVIWYDGSKKYYADSVKGRFTLSRDDSKNTLYLQMNSLRAEDTAVYYCVTGDDYWGQGTLVTVSS

SEQ ID NO: 4264 - protein, 123 aa, Homo sapiens
QVQLVQSGAEVKEPGSSVKVSCKASGGTFNSYAISWVRQAPGQGLEWMGGIIPLFGIAHYAQKFQGRVTITADESTNTAYMDLSSLRSEDTAVYYCARKYSYVSGSPFGMDVWGQGTTVTVSS

SEQ ID NO: 4265 - protein, 117 aa, Homo sapiens
QVQLVQSGAEVKKPGASVKVSCKASGYTFTDYGFSWVRQAPGQGLEWMGWITAYNGNTNYAQKLQGRVTMTTDTSTSTVYMELRSLRSDDTAVYYCARDYFYGMDVWGQGTTVTVSS

SEQ ID NO: 4266 - protein, 118 aa, Homo sapiens
QVQLVQSGAEVKKPGASVKVSCKASGYTFTSYDVHWVRQAPGQRLEWMGWLHADTGITKFSQKFQGRVTITRDTSASTAYMELSSLRSEDTAVYYCARERIQLWFDYWGQGTLVTVSS

SEQ ID NO: 4267 - protein, 121 aa, Homo sapiens
QVQLVQSGAEVKKPGSSVKVSCKASGGTFSSYAINWVRQAPGQGLEWMGGIIPIFGSANYAQKFQDRVTITADESTSAAYMELSSLRSEDTAVYYCARDSSGWSRYYMDVWGQGTTVTVSS

SEQ ID NO: 4268 - protein, 123 aa, Homo sapiens
QVQLVQSGAEVKKPGSSVKVSCKTSGDTFSSYAISWVRQAPGQGLEWMGGIIPIFGRAHYAQKFQGRVTITADESTSTAYMELSSLRSEDTAVYFCARKFHFVSGSPFGMDVWGQGTTVTVSS

SEQ ID NO: 4269 - protein, 123 aa, Homo sapiens
QVQLVQSGAEVKKPGSSVKVSCKTSGDTFSTYAISWVRQAPGQGLEWMGGIIPIFGKAHYAQKFQGRVTITADESTSTAYMELSSLRSEDTAVYFCARKFHFVSGSPFGMDVWGQGTTVTVSS

SEQ ID NO: 4270 - protein, 123 aa, Homo sapiens
QVQLVQSGAEVKKPGSSVKVSCKTSGGTFSSYAISWVRQAPGQGLEWMGGIIPIFGKAHYAQKFQGRVTITADESTTTAYMELSSLRSEDTAVYYCARKYDYVSGSPFGMDVWGQGTTVTVSS

SEQ ID NO: 4271 - protein, 120 aa, Homo sapiens
QVQLVQSGAEVKKPGSSVKVSCKVSGGIFSTYAINWVRQAPGQGLEWMGGIIPIFGTANHAQKFQGRVTITADESTSTAYMELSSLRSEDTAVYYCARDQGIAAALFDYWGQGTLVTVSS

SEQ ID NO: 4272 - protein, 123 aa, Artificial Sequence
  source: /note="Description of Artificial Sequence: Synthetic polypeptide"
  MOD_RES (121)..(123): Any amino acid
QVQLVQSGVEVKKPGASVKVSCKASGYTFTNYYMYWVRQAPGQGLEWMGGINPSNGGTNFNEKFKNRVTLTTDSSTTTAYMELKSLQFDDTAVYYCARRDYRFDMGFDYWGQGTTVTVSSXXX

SEQ ID NO: 4273 - protein, 113 aa, Homo sapiens
QVYLVESGGGVVQPGRSLRLSCAASGFTFSNYGMHWVRQAPGKGLEWVALIWYDGSNKYYADSVKGRFTISRDNSKNTLYLQMTSLRVEDTAVYYCASNVDHWGQGTLVTVSS

SEQ ID NO: 4274 - protein, 18 aa, Artificial Sequence
  source: /note="Description of Artificial Sequence: Synthetic peptide"
AWISPYGGSTYYADSVKG

SEQ ID NO: 4275 - protein, 18 aa, Artificial Sequence
  source: /note="Description of Artificial Sequence: Synthetic peptide"
  VARIANT (4)..(4): /replace="Leu"
  VARIANT (10)..(10): /replace="Ser"
  SITE (1)..(18): /note="Variant residues given in the sequence have no preference with respect to those in the annotations for variant positions"
AWISPYGGSTYYADSVKG

SEQ ID NO: 4276 - protein, 30 aa, Artificial Sequence
  source: /note="Description of Artificial Sequence: Synthetic polypeptide"
EVQLLESGGGLVQPGGSLRLSCAASGFTFS

SEQ ID NO: 4277 - protein, 25 aa, Artificial Sequence [sequence omitted]

SEQ ID NO: 4278 - protein, 121 aa, Artificial Sequence
  source: /note="Description of Artificial Sequence: Synthetic polypeptide"
EVQLVESGGGLVQPGGSLRLSCAASGFTFSRYWMSWVRQAPGKGLEWVANIKQDGSEKYYVDSVKGRFTISRDNAKNSLYLQMNSLRAEDTAVYYCAREGGWFGELAFDYWGQGTLVTVSS

SEQ ID NO: 4279 - protein, 10 aa, Artificial Sequence
  source: /note="Description of Artificial Sequence: Synthetic peptide"
GFTFSDSWIH

SEQ ID NO: 4280 - protein, 10 aa, Artificial Sequence
  source: /note="Description of Artificial Sequence: Synthetic peptide"
  VARIANT (6)..(6): /replace="Gly"
  SITE (1)..(10): /note="Variant residues given in the sequence have no preference with respect to those in the annotations for variant positions"
GFTFSDSWIH

SEQ ID NO: 4281 - protein, 11 aa, Artificial Sequence
  source: /note="Description of Artificial Sequence: Synthetic peptide"
IKLGTVTTVDY

SEQ ID NO: 4282 - protein, 11 aa, Artificial Sequence
  source: /note="Description of Artificial Sequence: Synthetic peptide"
  VARIANT (10)..(10): /replace="Asp"
  SITE (1)..(11): /note="Variant residues given in the sequence have no preference with respect to those in the annotations for variant positions"
IKLGTVTTVEY

SEQ ID NO: 4283 - protein, 5 aa, Artificial Sequence
  source: /note="Description of Artificial Sequence: Synthetic peptide"
MYMMM

SEQ ID NO: 4284 - protein, 9 aa, Artificial Sequence
  source: /note="Description of Artificial Sequence: Synthetic peptide"
  VARIANT (3)..(3): /replace="Gly" or "Phe" or "Ser"
  VARIANT (4)..(4): /replace="Tyr" or "Phe" or "Trp"
  VARIANT (5)..(5): /replace="Asn" or "Ala" or "Thr" or "Gly" or "Phe" or "Ile"
  VARIANT (6)..(6): /replace="Val" or "Pro" or "Thr" or "Ile"
  VARIANT (8)..(8): /replace="Trp" or "Arg" or "Pro" or "Thr"
  SITE (1)..(9): /note="Variant residues given in the sequence have no preference with respect to those in the annotations for variant positions"
QQYLYHPAT

SEQ ID NO: 4285 - protein, 11 aa, Artificial Sequence
  source: /note="Description of Artificial Sequence: Synthetic peptide"
  VARIANT (5)..(5): /replace="Val"
  VARIANT (6)..(6): /replace="Ile"
  VARIANT (7)..(7): /replace="Asn"
  VARIANT (9)..(9): /replace="Phe"
  VARIANT (10)..(10): /replace="Leu"
  SITE (1)..(11): /note="Variant residues given in the sequence have no preference with respect to those in the annotations for variant positions"
RASQDVSTAVA

SEQ ID NO: 4286 - protein, 32 aa, Artificial Sequence
  source: /note="Description of Artificial Sequence: Synthetic polypeptide"
RFTISADTSKNTAYLQMNSLRAEDTAVYYCAR

SEQ ID NO: 4287 - protein, 32 aa, Artificial Sequence
  source: /note="Description of Artificial Sequence: Synthetic polypeptide"
RFTISRDNSKNTLYLQMNSLRAEDTAVYYCAR

SEQ ID NO: 4288 - protein, 9 aa, Artificial Sequence
  source: /note="Description of Artificial Sequence: Synthetic peptide"
RHWPGGFDY

SEQ ID NO: 4289 - protein, 7 aa, Artificial Sequence
  source: /note="Description of Artificial Sequence: Synthetic peptide"
  VARIANT (4)..(4): /replace="Thr"
  VARIANT (6)..(6): /replace="Ala"
  SITE (1)..(7): /note="Variant residues given in the sequence have no preference with respect to those in the annotations for variant positions"
SASFLYS

SEQ ID NO: 4290 - protein, 17 aa, Artificial Sequence
  source: /note="Description of Artificial Sequence: Synthetic peptide"
SIYPSGGITFYADSVKG

SEQ ID NO: 4291 - protein, 17 aa, Artificial Sequence
  source: /note="Description of Artificial Sequence: Synthetic peptide"
SIYPSGGITFYADTVKG

SEQ ID NO: 4292 - protein, 17 aa, Artificial Sequence
  source: /note="Description of Artificial Sequence: Synthetic peptide"
  VARIANT (8)..(8): /replace="Ile"
  VARIANT (14)..(14): /replace="Thr"
  SITE (1)..(17): /note="Variant residues given in the sequence have no preference with respect to those in the annotations for variant positions"
SIYPSGGFTFYADSVKG

SEQ ID NO: 4293 - protein, 5 aa, Artificial Sequence
  source: /note="Description of Artificial Sequence: Synthetic peptide"
SYIMM

SEQ ID NO: 4294 - protein, 13 aa, Artificial Sequence
  source: /note="Description of Artificial Sequence: Synthetic peptide"
WVRQAPGKGLEWV

SEQ ID NO: 4295 - protein, 5 aa, Artificial Sequence
  source: /note="Description of Artificial Sequence: Synthetic peptide"
  VARIANT (1)..(1): /replace="Arg" or "Thr" or "Gln" or "Gly" or "Ala" or "Trp" or "Met" or "Ile" or "Ser"
  VARIANT (3)..(3): /replace="Arg" or "Lys" or "Leu" or "Met" or "Ile"
  VARIANT (5)..(5): /replace="Thr" or "Asn" or "Gln" or "Ala" or "Val" or "Tyr" or "Trp" or "Phe" or "Met"
  SITE (1)..(5): /note="Variant residues given in the sequence have no preference with respect to those in the annotations for variant positions"
KYVMH

SEQ ID NO: 4296 - protein, 118 aa, Artificial Sequence
  source: /note="Description of Artificial Sequence: Synthetic polypeptide"
EIQLQQSGPELVKPGASVKVSCKASDYAFTSYNIYWVKQSHGKSLEWIGYIDPYNGGTSYNQTFKGKATLTVDKSSSTAYMHLNSLTSEDSAVYYCAMKVGYEAMDYWGQGTSVTVSS

SEQ ID NO: 4297 - protein, 118 aa, Artificial Sequence
  source: /note="Description of Artificial Sequence: Synthetic polypeptide"
EIQLQQSGPELVKPGASVKVSCKASGYSFTDYNMYWVKQSHGKSLECFGYIDPYNGGPYYNQKFKGKATLTVDKSSSTAFMHLNSLTSEDSAVYYCAFYYGYYGVPYWGQGTLVTVSA

SEQ ID NO: 4298 - protein, 118 aa, Artificial Sequence
  source: /note="Description of Artificial Sequence: Synthetic polypeptide"
EIQLQQSGPELVKPGASVKVSCKASGYSFTDYNMYWVKQSHGKSLEWIGYIDPYNGGTTYNQKFKGKATLTVDKSSSTAFMHLNSLTSEDSAVFYCAFYYGYYGVPYWGQGTLVTVSA

SEQ ID NO: 4299 - protein, 118 aa, Artificial Sequence
  source: /note="Description of Artificial Sequence: Synthetic polypeptide"
EIQLQQSGPELVKPGASVKVSCKASGYSFTDYNMYWVKQSHGKSLEWIGYIDPYNGNTTYNQRFKGKATLTVDKSSSTAFMHLNSLTSEDAAVYYCATFYGFDGFAYWGQGSLVAVSA

SEQ ID NO: 4300 - protein, 118 aa, Artificial Sequence
  source: /note="Description of Artificial Sequence: Synthetic polypeptide"
EIQLQQSGPELVKPGASVKVSCKASGYSFTGYNMYWVKQSHGKSFEWIGYIDPYTGGTSYNQRFKGKATLTVDKSSSTAFMHLNSLTSEDSAIYYCALFYDYDGFPYWGQGTLVTVSA

SEQ ID NO: 4301 - protein, 118 aa, Artificial Sequence
  source: /note="Description of Artificial Sequence: Synthetic polypeptide"
EVQLQQSGPELVKPGASVKVSCKASGYSFTDYNMYWVKQSHGKSLEWIGYIDPYNGGTSYNQKFKGKATLTVDKSSSTAFMLLNSLTSEDSAVYYCALYYDYDGIPYWGQGTLVTVSA

SEQ ID NO: 4302 - protein, 118 aa, Artificial Sequence
  source: /note="Description of Artificial Sequence: Synthetic polypeptide"
QVQLQQSGAELVKPGASVKLSCKASGYTFTEYIIHWVKQRSGQGLEWIGWFYPGSGSIKYNEKFKDKATLTADKSSSTVYMELSRLTSEDSAVYFCAYNDYDGAFAYWGQGTLVTVSA

SEQ ID NO: 4303 - protein, 119 aa, Artificial Sequence
  source: /note="Description of Artificial Sequence: Synthetic polypeptide"
QVQLQQSGAELVKPGASVKLSCKASGYTFTEYTIHWVKQRSGQGLEWIGWFYPGSGSIKYNEKFKDKATLTADKSSSTVYMELSRLTSEDSAVYFCARQEEGGIGFDYWGQGTTLTVSS

SEQ ID NO: 4304 - protein, 119 aa, Artificial Sequence
  source: /note="Description of Artificial Sequence: Synthetic polypeptide"
QVQLQQSGAELVKPGASVKLSCKASGYTFTEYTIHWVKQRSGQGLEWIGWFYPGSGSIKYNEKFKDKATLTAVKSSSTVYMEFSRLTSEDSAVYFCARQDYDGLGFAYWGQGTLVTVSA

SEQ ID NO: 4305 - protein, 119 aa, Artificial Sequence
  source: /note="Description of Artificial Sequence: Synthetic polypeptide"
QVQLQQSGAELVKPGASVKLSCKASGYTFTEYTLHWVKQRSGQGLEWIGWFYPGSGSIKYNEKFKAKATLTADKSSSTVYMELSGLTSEDSAVYFCARQDYDGLGFAYWGQGTLVTVSA

SEQ ID NO: 4306 - protein, 119 aa, Artificial Sequence
  source: /note="Description of Artificial Sequence: Synthetic polypeptide"
QVQLQQSGGGLVKPGTSVKLSCKASGYIFTEYIIHWVKQRSGQGLEWIGWFYPGIISIKYNEKFKDKATLTADKSSSTVYMELSRLTSEDSAVYFCAGHEGYDGAMDYWGQGTSVTVSS

SEQ ID NO: 4307 - protein, 118 aa, Artificial Sequence
  source: /note="Description of Artificial Sequence: Synthetic polypeptide"
QVQLQQSGPELVEPGASVKVSCKASGYAFTSYNMYWVKQSHGKSLEWIGYIDPYNGGTYYDQKFKGRATLTVDKSSSTAHMHLNSLTSEDSAVYYCVFFYEYDGFPYWGQGTLVTVSA

SEQ ID NO: 4308 - protein, 118 aa, Artificial Sequence
  source: /note="Description of Artificial Sequence: Synthetic polypeptide"
QVQLQQSGPELVKPGASVKVSCKASDYAFTSYNIYWVKQSHGKSLEWIGYIDPYNGGTSYNQTFKGKATLTVDKSSSTAYMHLNSLTSEDSAVYYCAMKVGYEAMDYWGQGTSVTVSS

SEQ ID NO: 4309 - protein, 121 aa, Artificial Sequence
  source: /note="Description of Artificial Sequence: Synthetic polypeptide"
EVKLADSGGALVNPGGSLKISCAVSGFIFSNYDMSWVRQNPEKRLEWVATISSGGGYTYYPDSVKGRFTISRDNAKNALYLQMSSLRSEDTALYYCTRHGYGNYDWYFDVWGAGATVTVSS

SEQ ID NO: 4310 - protein, 121 aa, Artificial Sequence
  source: /note="Description of Artificial Sequence: Synthetic polypeptide"
EVKLVEFGGALVKPGGSLKLSCAALGFTFSTYAMFRVRQTPEKREEGVASISSGGRYTYYPDSAKDRHPIFRDNARNTLYLQMSSLRSKDTAMYYCVRHSYGSSYWYLDVWGAGTTVTVSS

SEQ ID NO: 4311 - protein, 121 aa, Artificial Sequence
  source: /note="Description of Artificial Sequence: Synthetic polypeptide"
EVKLVESGGTLVKPGGSLKISCAASGFTFSNYDMSWVRQNPEKRLEWVATISSGGDYTYYPDIFKGRFTISRDDAKNALYLQMSSLRSEDTALYYCARHGYGNYDWYFDVWGAGATVTVSS

SEQ ID NO: 4312 - protein, 121 aa, Artificial Sequence
  source: /note="Description of Artificial Sequence: Synthetic polypeptide"
EVQLLESGGGLVQPGGSLRLSCAASGFIFSNYDMSWVRQAPGKGLEWVATISSGGGYTYYPDSVKGRFTISRDNSKNTLYLQMNSLRAEDTAVYYCTRHGYGNYDWYFDVWGQGTLVTVSS

SEQ ID NO: 4313 - protein, 120 aa, Artificial Sequence
  source: /note="Description of Artificial Sequence: Synthetic polypeptide"
EVQLLESGGGLVQPGGSLRLSCAASGFNIKGSLLHWVRQAPGKGLEWIGWIDPEDGETRFDDSVKGRFTISRDNSKNTLYLQMNSLRAEDTAVYYCARTEYSNPAWFAYWGQGTLVTVSS

SEQ ID NO: 4314 - protein, 116 aa, Artificial Sequence
  source: /note="Description of Artificial Sequence: Synthetic polypeptide"
EVQLLESGGGLVQPGGSLRLSCAASGFSLSNYGVHWVRQAPGKGLEWLGVIWAGGITNYNDSVKGRFTISRDNSKNTLYLQMNSLRAEDTAVYYCAKQGGTSFSYWGQGTLVTVSS

SEQ ID NO: 4315 - protein, 121 aa, Artificial Sequence
  source: /note="Description of Artificial Sequence: Synthetic polypeptide"
EVQLLESGGGLVQPGGSLRLSCAASGFTFSNYAMSWVRQAPGKGLEWVASISSGGSYNYYPDSVKGRFTISRDNSKNTLYLQMNSLRAEDTAVYYCASQSYGSSYWYFDVWGQGTLVTVSS

SEQ ID NO: 4316 - protein, 121 aa, Artificial Sequence
  source: /note="Description of Artificial Sequence: Synthetic polypeptide"
EVQLLESGGGLVQPGGSLRLSCAASGFTFSNYDMSWVRQAPGKGLEWVATISSGGDYTYYPDSVKGRFTISRDNSKNTLYLQMNSLRAEDTAVYYCARHGYGNYDWYFDVWGQGTLVTVSS

SEQ ID NO: 4317 - protein, 121 aa, Artificial Sequence
  source: /note="Description of Artificial Sequence: Synthetic polypeptide"
EVQLLESGGGLVQPGGSLRLSCAASGFTFSTYAMFWVRQAPGKGLEWVASISSGGRYTYYPDSVKGRFTISRDNSKNTLYLQMNSLRAEDTAVYYCVRHSYGSSYWYLDVWGQGTLVTVSS

SEQ ID NO: 4318 - protein, 118 aa, Artificial Sequence
  source: /note="Description of Artificial Sequence: Synthetic polypeptide"
EVQLLESGGGLVQPGGSLRLSCAASGSEVFPITYMNWVRQAPGKGLEWIGDILPSIGRTMYGDSVKGRFTISRDNSKNTLYLQMNSLRAEDTAVYYCARSEGYLLAYWGQGTLVTVSS

SEQ ID NO: 4319 - protein, 118 aa, Artificial Sequence
  source: /note="Description of Artificial Sequence: Synthetic polypeptide"
EVQLLESGGGLVQPGGSLRLSCAASGYAFTNCWMNWVRQAPGKGLEWIGRIFPGNGHTNYSDSVKGRFTISRDNSKNTLYLQMNSLRAEDTAVYYCARDYSDYYFDYWGQGTLVTVSS

SEQ ID NO: 4320 - protein, 116 aa, Artificial Sequence
  source: /note="Description of Artificial Sequence: Synthetic polypeptide"
EVQLLESGGGLVQPGGSLRLSCAASGYIFTDYGITWVRQAPGKGLEWIGEISPRSGETYFNDSVKGRFTISRDNSKNTLYLQMNSLRAEDTAVYYCAREGNPFTYWGQGTLVTVSS

SEQ ID NO: 4321 - protein, 117 aa, Artificial Sequence
  source: /note="Description of Artificial Sequence: Synthetic polypeptide"
EVQLLESGGGLVQPGGSLRLSCAASGYTFTNYWINWVRQAPGKGLEWIGNIYSGSSRTNYNDSVKGRFTISRDNSKNTLYLQMNSLRAEDTAVYYCAREGLRAMDYWGQGTLVTVSS

SEQ ID NO: 4322 - protein, 121 aa, Artificial Sequence
  source: /note="Description of Artificial Sequence: Synthetic polypeptide"
EVQLVESGGALVKPGGSLKISCAVSGFIFSNYDMSWVRQNPEKRLEWVATISSGGGYTYYPDSVKGRFTISRDNAKNALYLQMSSLRSEDTALYYCTRHGYGNYDWYFDVWGAGATVTVSS

SEQ ID NO: 4323 - protein, 121 aa, Artificial Sequence
  source: /note="Description of Artificial Sequence: Synthetic polypeptide"
EVQLVESGGGLVKPGGSLRISCAVSGFIFSNYDMSWVRQAPGKGLEWVATISSGGGYTYYADSVKGRFTISRDNAKNSLYLQMNSLRAEDTAVYYCTRHGYGNYDWYFDVWGQGALVTVSS

SEQ ID NO: 4324 - protein, 121 aa, Artificial Sequence
  source: /note="Description of Artificial Sequence: Synthetic polypeptide"
EVQLVESGGGLVKPGGSLRLSCAASGFIFSNYDMSWVRQAPGKGLEWVATISSGGGYTYYPAPVKGRFTISRDDSKNTLYLQMNSLKTEDTAVYYCTRHGYGNYDWYFDVWGQGTLVTVSS

SEQ ID NO: 4325 - protein, 121 aa, Artificial Sequence
  source: /note="Description of Artificial Sequence: Synthetic polypeptide"
EVQLVESGGGLVKPGGSLRLSCAASGFIFSNYDMSWVRQAPGKGLEWVSTISSGGGYTYYADSVKGRFTISRDNAKNSLYLQMNSLRAEDTAVYYCARHGYGNYDWYFDVWGQGTLVTVSS

SEQ ID NO: 4326 - protein, 120 aa, Artificial Sequence
  source: /note="Description of Artificial Sequence: Synthetic polypeptide"
EVQLVESGGGLVKPGGSLRLSCAASGFNIKGSLLHWVRQAPGKGLEWIGWIDPEDGETRFDAPVKGRFTISRDDSKNTLYLQMNSLKTEDTAVYYCARTEYSNPAWFAYWGQGTLVTVSS

SEQ ID NO: 4327 - protein, 121 aa, Artificial Sequence
  source: /note="Description of Artificial Sequence: Synthetic polypeptide"
EVQLVESGGGLVKPGGSLRLSCAASGFTFSNYAMSWVRQAPGKGLEWVASISSGGSYNYYPAPVKGRFTISRDDSKNTLYLQMNSLKTEDTAVYYCASQSYGSSYWYFDVWGQGTLVTVSS

SEQ ID NO: 4328 - protein, 121 aa, Artificial Sequence
  source: /note="Description of Artificial Sequence: Synthetic polypeptide"
EVQLVESGGGLVKPGGSLRLSCAASGFTFSNYDMSWVRQAPGKGLEWVATISSGGDYTYYPAPVKGRFTISRDDSKNTLYLQMNSLKTEDTAVYYCARHGYGNYDWYFDVWGQGTLVTVSS

SEQ ID NO: 4329 - protein, 95 aa, Artificial Sequence
  source: /note="Description of Artificial Sequence: Synthetic polypeptide"
EVQLVESGGGLVKPGGSLRLSCAASGFTFSSYSMNWVRQAPGKGLEWVSSISSSSSYIYYADSVKGRFTISRDNAKNSLYLQMNSLRAEDTAVYY

SEQ ID NO: 4330 - protein, 109 aa, Artificial Sequence
  source: /note="Description of Artificial Sequence: Synthetic polypeptide"
EVQLVESGGGLVKPGGSLRLSCAASGFTFSSYSMNWVRQAPGKGLEWVSSISSSSSYIYYADSVKGRFTISRDNAKNSLYLQMNSLRAEDTAVYYCARWGQGTLVTVSS

SEQ ID NO: 4331 - protein, 121 aa, Artificial Sequence
  source: /note="Description of Artificial Sequence: Synthetic polypeptide"
EVQLVESGGGLVKPGGSLRLSCAASGFTFSTYAMFWVRQAPGKGLEWVASISSGGRYTYYPAPVKGRFTISRDDSKNTLYLQMNSLKTEDTAVYYCVRHSYGSSYWYLDVWGQGTLVTVSS

SEQ ID NO: 4332 - protein, 118 aa, Artificial Sequence
  source: /note="Description of Artificial Sequence: Synthetic polypeptide"
EVQLVESGGGLVKPGGSLRLSCAASGYAFTNCWMNWVRQAPGKGLEWIGRIFPGNGHTNYSAPVKGRFTISRDDSKNTLYLQMNSLKTEDTAVYYCARDYSDYYFDYWGQGTLVTVSS

SEQ ID NO: 4333 - protein, 116 aa, Artificial Sequence
  source: /note="Description of Artificial Sequence: Synthetic polypeptide"
EVQLVESGGGLVKPGGSLRLSCAASGYIFTDYGITWVRQAPGKGLEWIGEISPRSGETYFNAPVKGRFTISRDDSKNTLYLQMNSLKTEDTAVYYCAREGNPFTYWGQGTLVTVSS

SEQ ID NO: 4334 - protein, 117 aa, Artificial Sequence
  source: /note="Description of Artificial Sequence: Synthetic polypeptide"
EVQLVESGGGLVKPGGSLRLSCAASGYTFTNYWINWVRQAPGKGLEWIGNIYSGSSRTNYNAPVKGRFTISRDDSKNTLYLQMNSLKTEDTAVYYCAREGLRAMDYWGQGTLVTVSS

SEQ ID NO: 4335 - protein, 121 aa, Artificial Sequence
  source: /note="Description of Artificial Sequence: Synthetic polypeptide"
EVQLVESGGGLVKPGGSLRLSCAVSGFIFSNYDMSWVRQAPGKGLEWVATISSGGGYTYYADSVKGRFTISRDNAKNSLYLQMNSLRAEDTAVYYCTRHGYGNYDWYFDVWGQGTLVTVSS

SEQ ID NO: 4336 - protein, 121 aa, Artificial Sequence
  source: /note="Description of Artificial Sequence: Synthetic polypeptide"
EVQLVESGGGLVQPGGSLRLSCAASGFIFSNYDMSWVRQAPGKGLEWVATISSGGGYTYYPDSVKGRFTISRDNAKNSLYLQMNSLRAEDTAVYYCTRHGYGNYDWYFDVWGQGTLVTVSS

SEQ ID NO: 4337 - protein, 120 aa, Artificial Sequence
  source: /note="Description of Artificial Sequence: Synthetic polypeptide"
EVQLVESGGGLVQPGGSLRLSCAASGFNIKGSLLHWVRQAPGKGLEWIGWIDPEDGETRFDDSVKGRFTISRDNAKNSLYLQMNSLRAEDTAVYYCARTEYSNPAWFAYWGQGTLVTVSS

SEQ ID NO: 4338 - protein, 116 aa, Artificial Sequence
  source: /note="Description of Artificial Sequence: Synthetic polypeptide"
EVQLVESGGGLVQPGGSLRLSCAASGFSLSNYGVHWVRQAPGKGLEWLGVIWAGGITNYNDSVKGRFTISRDNAKNSLYLQMNSLRAEDTAVYYCAKQGGTSFSYWGQGTLVTVSS

SEQ ID NO: 4339 - protein, 121 aa, Artificial Sequence
  source: /note="Description of Artificial Sequence: Synthetic polypeptide"
EVQLVESGGGLVQPGGSLRLSCAASGFTFSNYAMSWVRQAPGKGLEWVASISSGGSYNYYPDSVKGRFTISRDNAKNSLYLQMNSLRAEDTAVYYCASQSYGSSYWYFDVWGQGTLVTVSS

SEQ ID NO: 4340 - protein, 121 aa, Artificial Sequence
  source: /note="Description of Artificial Sequence: Synthetic polypeptide"
EVQLVESGGGLVQPGGSLRLSCAASGFTFSNYDMSWVRQAPGKGLEWVATISSGGDYTYYPDSVKGRFTISRDNAKNSLYLQMNSLRAEDTAVYYCARHGYGNYDWYFDVWGQGTLVTVSS

SEQ ID NO: 4341 - protein, 121 aa, Artificial Sequence
  source: /note="Description of Artificial Sequence: Synthetic polypeptide"
EVQLVESGGGLVQPGGSLRLSCAASGFTFSTYAMFWVRQAPGKGLEWVASISSGGRYTYYPDSVKGRFTISRDNAKNSLYLQMNSLRAEDTAVYYCVRHSYGSSYWYLDVWGQGTLVTVSS

SEQ ID NO: 4342 - protein, 118 aa, Artificial Sequence
  source: /note="Description of Artificial Sequence: Synthetic polypeptide"
EVQLVESGGGLVQPGGSLRLSCAASGSEVFPITYMNWVRQAPGKGLEWIGDILPSIGRTMYGDSVKGRFTISRDNAKNSLYLQMNSLRAEDTAVYYCARSEGYLLAYWGQGTLVTVSS

SEQ ID NO: 4343 - protein, 118 aa, Artificial Sequence
  source: /note="Description of Artificial Sequence: Synthetic polypeptide"
EVQLVESGGGLVQPGGSLRLSCAASGYAFTNCWMNWVRQAPGKGLEWIGRIFPGNGHTNYSDSVKGRFTISRDNAKNSLYLQMNSLRAEDTAVYYCARDYSDYYFDYWGQGTLVTVSS

SEQ ID NO: 4344 - protein, 116 aa, Artificial Sequence
  source: /note="Description of Artificial Sequence: Synthetic polypeptide"
EVQLVESGGGLVQPGGSLRLSCAASGYIFTDYGITWVRQAPGKGLEWIGEISPRSGETYFNDSVKGRFTISRDNAKNSLYLQMNSLRAEDTAVYYCAREGNPFTYWGQGTLVTVSS

SEQ ID NO: 4345 - protein, 117 aa, Artificial Sequence
  source: /note="Description of Artificial Sequence: Synthetic polypeptide"
EVQLVESGGGLVQPGGSLRLSCAASGYTFTNYWINWVRQAPGKGLEWIGNIYSGSSRTNYNDSVKGRFTISRDNAKNSLYLQMNSLRAEDTAVYYCAREGLRAMDYWGQGTLVTVSS

SEQ ID NO: 4346 - protein, 121 aa, Artificial Sequence
  source: /note="Description of Artificial Sequence: Synthetic polypeptide"
EVQLVQSGAEVKKPGESLKISCKGSGFIFSNYDMSWVRQMPGKGLEWVATISSGGGYTYYPPSFQGQVTISADKSISTAYLQWSSLKASDTAMYYCTRHGYGNYDWYFDVWGQGTLVTVSS

SEQ ID NO: 4347 - protein, 120 aa, Artificial Sequence
  source: /note="Description of Artificial Sequence: Synthetic polypeptide"
EVQLVQSGAEVKKPGESLKISCKGSGFNIKGSLLHWVRQMPGKGLEWIGWIDPEDGETRFDPSFQGQVTISADKSISTAYLQWSSLKASDTAMYYCARTEYSNPAWFAYWGQGTLVTVSS

SEQ ID NO: 4348 - protein, 116 aa, Artificial Sequence
  source: /note="Description of Artificial Sequence: Synthetic polypeptide"
EVQLVQSGAEVKKPGESLKISCKGSGFSLSNYGVHWVRQMPGKGLEWLGVIWAGGITNYNPSFQGQVTISADKSISTAYLQWSSLKASDTAMYYCAKQGGTSFSYWGQGTLVTVSS

SEQ ID NO: 4349 - protein, 121 aa, Artificial Sequence
  source: /note="Description of Artificial Sequence: Synthetic polypeptide"
EVQLVQSGAEVKKPGESLKISCKGSGFTFSNYAMSWVRQMPGKGLEWVASISSGGSYNYYPPSFQGQVTISADKSISTAYLQWSSLKASDTAMYYCASQSYGSSYWYFDVWGQGTLVTVSS

SEQ ID NO: 4350 - protein, 121 aa, Artificial Sequence
  source: /note="Description of Artificial Sequence: Synthetic polypeptide"
EVQLVQSGAEVKKPGESLKISCKGSGFTFSNYDMSWVRQMPGKGLEWVATISSGGDYTYYPPSFQGQVTISADKSISTAYLQWSSLKASDTAMYYCARHGYGNYDWYFDVWGQGTLVTVSS

SEQ ID NO: 4351 - protein, 121 aa, Artificial Sequence
  source: /note="Description of Artificial Sequence: Synthetic polypeptide"
EVQLVQSGAEVKKPGESLKISCKGSGFTFSTYAMFWVRQMPGKGLEWVASISSGGRYTYYPPSFQGQVTISADKSISTAYLQWSSLKASDTAMYYCVRHSYGSSYWYLDVWGQGTLVTVSS

SEQ ID NO: 4352 - protein, 118 aa, Artificial Sequence
  source: /note="Description of Artificial Sequence: Synthetic polypeptide"
EVQLVQSGAEVKKPGESLKISCKGSGSEVFPITYMNWVRQMPGKGLEWIGDILPSIGRTMYGPSFQGQVTISADKSISTAYLQWSSLKASDTAMYYCARSEGYLLAYWGQGTLVTVSS

SEQ ID NO: 4353 - protein, 118 aa, Artificial Sequence
  source: /note="Description of Artificial Sequence: Synthetic polypeptide"
EVQLVQSGAEVKKPGESLKISCKGSGYAFTNCWMNWVRQMPGKGLEWIGRIFPGNGHTNYSPSFQGQVTISADKSISTAYLQWSSLKASDTAMYYCARDYSDYYFDYWGQGTLVTVSS

SEQ ID NO: 4354 - protein, 116 aa, Artificial Sequence
  source: /note="Description of Artificial Sequence: Synthetic polypeptide"
EVQLVQSGAEVKKPGESLKISCKGSGYIFTDYGITWVRQMPGKGLEWIGEISPRSGETYFNPSFQGQVTISADKSISTAYLQWSSLKASDTAMYYCAREGNPFTYWGQGTLVTVSS

SEQ ID NO: 4355 - protein, 117 aa, Artificial Sequence
  source: /note="Description of Artificial Sequence: Synthetic polypeptide"
EVQLVQSGAEVKKPGESLKISCKGSGYTFTNYWINWVRQMPGKGLEWIGNIYSGSSRTNYNPSFQGQVTISADKSISTAYLQWSSLKASDTAMYYCAREGLRAMDYWGQGTLVTVSS

SEQ ID NO: 4356 - protein, 118 aa, Artificial Sequence
  source: /note="Description of Artificial Sequence: Synthetic polypeptide"
  MOD_RES (3)..(3): Any amino acid
LVXSGGALVKPGGSLKLSCAASGFTFSNYAMSWVRQTPEKRLEWVASISSGGSYNYYPDSVKGRFTISRDNARNTLYLQMSSLRSKDTAMYYCASQSYGSSYWYFDVWGAGTTVTVSS

SEQ ID NO: 4357 - protein, 121 aa, Artificial Sequence
  source: /note="Description of Artificial Sequence: Synthetic polypeptide"
QLQLQESGPGLVKPSETLSLTCTVSGFIFSNYDMSWIRQPPGKGLEWVATISSGGGYTYYPPSLKSRVTISVDTSKNQFSLKLSSVTAADTAVYYCTRHGYGNYDWYFDVWGQGTLVTVSS

SEQ ID NO: 4358 - protein, 116 aa, Artificial Sequence
  source: /note="Description of Artificial Sequence: Synthetic polypeptide"
QLQLQESGPGLVKPSETLSLTCTVSGFSLSNYGVHWIRQPPGKGLEWLGVIWAGGITNYNPSLKSRVTISVDTSKNQFSLKLSSVTAADTAVYYCAKQGGTSFSYWGQGTLVTVSS

SEQ ID NO: 4359 - protein, 121 aa, Artificial Sequence
  source: /note="Description of Artificial Sequence: Synthetic polypeptide"
QLQLQESGPGLVKPSETLSLTCTVSGFTFSNYDMSWIRQPPGKGLEWVATISSGGDYTYYPPSLKSRVTISVDTSKNQFSLKLSSVTAADTAVYYCARHGYGNYDWYFDVWGQGTLVTVSS

SEQ ID NO: 4360 - protein, 121 aa, Artificial Sequence
  source: /note="Description of Artificial Sequence: Synthetic polypeptide"
QLQLQESGPGLVKPSETLSLTCTVSGFTFSTYAMFWIRQPPGKGLEWVASISSGGRYTYYPPSLKSRVTISVDTSKNQFSLKLSSVTAADTAVYYCVRHSYGSSYWYLDVWGQGTLVTVSS

SEQ ID NO: 4361 - protein, 118 aa, Artificial Sequence
  source: /note="Description of Artificial Sequence: Synthetic polypeptide"
QLQLQESGPGLVKPSETLSLTCTVSGSEVFPITYMNWIRQPPGKGLEWIGDILPSIGRTMYGPSLKSRVTISVDTSKNQFSLKLSSVTAADTAVYYCARSEGYLLAYWGQGTLVTVSS

SEQ ID NO: 4362 - protein, 118 aa, Artificial Sequence
  source: /note="Description of Artificial Sequence: Synthetic polypeptide"
QLQLQESGPGLVKPSETLSLTCTVSGYAFTNCWMNWIRQPPGKGLEWIGRIFPGNGHTNYSPSLKSRVTISVDTSKNQFSLKLSSVTAADTAVYYCARDYSDYYFDYWGQGTLVTVSS

SEQ ID NO: 4363 - protein, 118 aa, Artificial Sequence
  source: /note="Description of Artificial Sequence: Synthetic polypeptide"
QVHLQQSGPELVKPGASVKISCKASGYAFTNCWMNWVRQRPGKGLDWIGRIFPGNGHTNYSGKFKDKATLTEDKSSSTAYMQLSSLTSEDSAVYFCARDYSDYYFDYWGQGTTLTVSS

SEQ ID NO: 4364 - protein, 116 aa, Artificial Sequence
  source: /note="Description of Artificial Sequence: Synthetic polypeptide"
QVQLKQSGPVLVAPSQSLSITCTVSGFSLSNYGVHWVRQFPGKGLEWLGVIWAGGITNYNSVLMSRLSISKDNSKSQVFLKMNSLQTDDTAMYYCAKQGGTSFSYWGQGTLVTVSA

SEQ ID NO: 4365 - protein, 121 aa, Artificial Sequence
  source: /note="Description of Artificial Sequence: Synthetic polypeptide"
QVQLQESGPGLVKPSETLSLTCTVSGFIFSNYDMSWIRQPPGKGLEWVATISSGGGYTYYPPSLKSRVTISVDTSKNQFSLKLSSVTAADTAVYYCTRHGYGNYDWYFDVWGQGTLVTVSS

SEQ ID NO: 4366 - protein, 120 aa, Artificial Sequence
  source: /note="Description of Artificial Sequence: Synthetic polypeptide"
QVQLQESGPGLVKPSETLSLTCTVSGFNIKGSLLHWIRQPPGKGLEWIGWIDPEDGETRFDPSLKSRVTISVDTSKNQFSLKLSSVTAADTAVYYCARTEYSNPAWFAYWGQGTLVTVSS

SEQ ID NO: 4367 - protein, 116 aa, Artificial Sequence
  source: /note="Description of Artificial Sequence: Synthetic polypeptide"
QVQLQESGPGLVKPSETLSLTCTVSGFSLSNYGVHWIRQPPGKGLEWLGVIWAGGITNYNPSLKSRVTISVDTSKNQFSLKLSSVTAADTAVYYCAKQGGTSFSYWGQGTLVTVSS

SEQ ID NO: 4368 - protein, 121 aa, Artificial Sequence
  source: /note="Description of Artificial Sequence: Synthetic polypeptide"
QVQLQESGPGLVKPSETLSLTCTVSGFTFSNYAMSWIRQPPGKGLEWVASISSGGSYNYYPPSLKSRVTISVDTSKNQFSLKLSSVTAADTAVYYCASQSYGSSYWYFDVWGQGTLVTVSS

SEQ ID NO: 4369 - protein, 121 aa, Artificial Sequence
  source: /note="Description of Artificial Sequence: Synthetic polypeptide"
QVQLQESGPGLVKPSETLSLTCTVSGFTFSNYDMSWIRQPPGKGLEWVATISSGGDYTYYPPSLKSRVTISVDTSKNQFSLKLSSVTAADTAVYYCARHGYGNYDWYFDVWGQGTLVTVSS

SEQ ID NO: 4370 - protein, 121 aa, Artificial Sequence
  source: /note="Description of Artificial Sequence: Synthetic polypeptide"
QVQLQESGPGLVKPSETLSLTCTVSGFTFSTYAMFWIRQPPGKGLEWVASISSGGRYTYYPPSLKSRVTISVDTSKNQFSLKLSSVTAADTAVYYCVRHSYGSSYWYLDVWGQGTLVTVSS

SEQ ID NO: 4371 - protein, 118 aa, Artificial Sequence
  source: /note="Description of Artificial Sequence: Synthetic polypeptide"
QVQLQESGPGLVKPSETLSLTCTVSGSEVFPITYMNWIRQPPGKGLEWIGDILPSIGRTMYGPSLKSRVTISVDTSKNQFSLKLSSVTAADTAVYYCARSEGYLLAYWGQGTLVTVSS

SEQ ID NO: 4372 - protein, 118 aa, Artificial Sequence
  source: /note="Description of Artificial Sequence: Synthetic polypeptide"
QVQLQESGPGLVKPSETLSLTCTVSGYAFTNCWMNWIRQPPGKGLEWIGRIFPGNGHTNYSPSLKSRVTISVDTSKNQFSLKLSSVTAADTAVYYCARDYSDYYFDYWGQGTLVTVSS

SEQ ID NO: 4373 - protein, 116 aa, Artificial Sequence
  source: /note="Description of Artificial Sequence: Synthetic polypeptide"
QVQLQESGPGLVKPSETLSLTCTVSGYIFTDYGITWIRQPPGKGLEWIGEISPRSGETYFNPSLKSRVTISVDTSKNQFSLKLSSVTAADTAVYYCAREGNPFTYWGQGTLVTVSS

SEQ ID NO: 4374 - protein, 117 aa, Artificial Sequence
  source: /note="Description of Artificial Sequence: Synthetic polypeptide"
QVQLQESGPGLVKPSETLSLTCTVSGYTFTNYWINWIRQPPGKGLEWIGNIYSGSSRTNYNPSLKSRVTISVDTSKNQFSLKLSSVTAADTAVYYCAREGLRAMDYWGQGTLVTVSS

SEQ ID NO: 4375 - protein, 120 aa, Artificial Sequence
  source: /note="Description of Artificial Sequence: Synthetic polypeptide"
QVQLQESGPGLVKPSQTLSLTCTVSGFNIKGSLLHWIRQPPGKGLEWIGWIDPEDGETRFDPSLKSRVTISVDTSKNQFSLKLSSVTAADTAVYYCARTEYSNPAWFAYWGQGTLVTVSS

SEQ ID NO: 4376 - protein, 116 aa, Artificial Sequence
  source: /note="Description of Artificial Sequence: Synthetic polypeptide"
QVQLQESGPGLVKPSQTLSLTCTVSGFSLSNYGVHWIRQPPGKGLEWLGVIWAGGITNYNPSLKSRVTISVDTSKNQFSLKLSSVTAADTAVYYCAKQGGTSFSYWGQGTLVTVSS

SEQ ID NO: 4377 - protein, 121 aa, Artificial Sequence
  source: /note="Description of Artificial Sequence: Synthetic polypeptide"
QVQLQESGPGLVKPSQTLSLTCTVSGFTFSNYAMSWIRQPPGKGLEWVASISSGGSYNYYPPSLKSRVTISVDTSKNQFSLKLSSVTAADTAVYYCASQSYGSSYWYFDVWGQGTLVTVSS

SEQ ID NO: 4378 - protein, 118 aa, Artificial Sequence
  source: /note="Description of Artificial Sequence: Synthetic polypeptide"
QVQLQESGPGLVKPSQTLSLTCTVSGSEVFPITYMNWIRQPPGKGLEWIGDILPSIGRTMYGPSLKSRVTISVDTSKNQFSLKLSSVTAADTAVYYCARSEGYLLAYWGQGTLVTVSS

SEQ ID NO: 4379 - protein, 116 aa, Artificial Sequence
  source: /note="Description of Artificial Sequence: Synthetic polypeptide"
QVQLQESGPGLVKPSQTLSLTCTVSGYIFTDYGITWIRQPPGKGLEWIGEISPRSGETYFNPSLKSRVTISVDTSKNQFSLKLSSVTAADTAVYYCAREGNPFTYWGQGTLVTVSS

SEQ ID NO: 4380 - protein, 117 aa, Artificial Sequence
  source: /note="Description of Artificial Sequence: Synthetic polypeptide"
QVQLQESGPGLVKPSQTLSLTCTVSGYTFTNYWINWIRQPPGKGLEWIGNIYSGSSRTNYNPSLKSRVTISVDTSKNQFSLKLSSVTAADTAVYYCAREGLRAMDYWGQGTLVTVSS

SEQ ID NO: 4381 - protein, 116 aa, Artificial Sequence
  source: /note="Description of Artificial Sequence: Synthetic polypeptide"
QVQLQQSGAELARPGASVKLSCKASGYIFTDYGITWVKQRTGQGLEWIGEISPRSGETYFNENYRVKATLTADKSSSTAYMQLFSLTSEDSAVYFCAREGNPFTYWGHGTLVTVSA

SEQ ID NO: 4382 - protein, 117 aa, Artificial Sequence
  source: /note="Description of Artificial Sequence: Synthetic polypeptide"
QVQLQQSGAELVKPGASVKLSCKTSGYTFTNYWINWVKQRPGQGLEWIGNIYSGSSRTNYNEKFKSKATLTVDTSSSTAYMQLSSLTSDDSAVYYCAREGLRAMDYWGQGTSVTVSS

SEQ ID NO: 4383 - protein, 120 aa, Artificial Sequence
  source: /note="Description of Artificial Sequence: Synthetic polypeptide"
QVQLQQSGAELVRPGASVKLSCSASGFNIKGSLLHWIKQRPLQGLEWIGWIDPEDGETRFDPKFQDKAFLTADTSSTTAYLQLSSLTSEDTAIYYCARTEYSNPAWFAYWGQGTLVTVSA

SEQ ID NO: 4384 - protein, 118 aa, Artificial Sequence
  source: /note="Description of Artificial Sequence: Synthetic polypeptide"
QVQLQQSGPELVKPGASVKISCKASGYAFTNCWMNWVRQRPGKGLDWIGRIFPGNGHTNYSGKFKDKATLTEDKSSSTAYMQLSSLTSEDSAVYFCARDYSDYYFDYWGQGTTLTVSS

SEQ ID NO: 4385 - protein, 118 aa, Artificial Sequence
  source: /note="Description of Artificial Sequence: Synthetic polypeptide"
QVQLQQSGSELRSPGSSVKLSCKDFDSEVFPITYMNWVRQKPGHGFEWIGDILPSIGRTMYGEKFEDKATLDADTVSNTAYLELNSLTSEDSAIYYCARSEGYLLAYWGQGTLVTVSA

SEQ ID NO: 4386 - protein, 121 aa, Artificial Sequence
  source: /note="Description of Artificial Sequence: Synthetic polypeptide"
QVQLVESGGGVVQPGRSLRLSCAASGFIFSNYDMSWVRQAPGKGLEWVATISSGGGYTYYPDSVKGRFTISRDNSKNTLYLQMNSLRAEDTAVYYCTRHGYGNYDWYFDVWGQGTLVTVSS

SEQ ID NO: 4387 - protein, 120 aa, Artificial Sequence
  source: /note="Description of Artificial Sequence: Synthetic polypeptide"
QVQLVESGGGVVQPGRSLRLSCAASGFNIKGSLLHWVRQAPGKGLEWIGWIDPEDGETRFDDSVKGRFTISRDNSKNTLYLQMNSLRAEDTAVYYCARTEYSNPAWFAYWGQGTLVTVSS

SEQ ID NO: 4388 - protein, 116 aa, Artificial Sequence
  source: /note="Description of Artificial Sequence: Synthetic polypeptide"
QVQLVESGGGVVQPGRSLRLSCAASGFSLSNYGVHWVRQAPGKGLEWLGVIWAGGITNYNDSVKGRFTISRDNSKNTLYLQMNSLRAEDTAVYYCAKQGGTSFSYWGQGTLVTVSS

SEQ ID NO: 4389 - protein, 121 aa, Artificial Sequence
  source: /note="Description of Artificial Sequence: Synthetic polypeptide"
QVQLVESGGGVVQPGRSLRLSCAASGFTFSNYAMSWVRQAPGKGLEWVASISSGGSYNYYPDSVKGRFTISRDNSKNTLYLQMNSLRAEDTAVYYCASQSYGSSYWYFDVWGQGTLVTVSS

SEQ ID NO: 4390 - protein, 121 aa, Artificial Sequence
  source: /note="Description of Artificial Sequence: Synthetic polypeptide"
QVQLVESGGGVVQPGRSLRLSCAASGFTFSNYDMSWVRQAPGKGLEWVATISSGGDYTYYPDSVKGRFTISRDNSKNTLYLQMNSLRAEDTAVYYCARHGYGNYDWYFDVWGQGTLVTVSS

SEQ ID NO: 4391 - protein, 121 aa, Artificial Sequence
  source: /note="Description of Artificial Sequence: Synthetic polypeptide"
QVQLVESGGGVVQPGRSLRLSCAASGFTFSTYAMFWVRQAPGKGLEWVASISSGGRYTYYPDSVKGRFTISRDNSKNTLYLQMNSLRAEDTAVYYCVRHSYGSSYWYLDVWGQGTLVTVSS

SEQ ID NO: 4392 - protein, 118 aa, Artificial Sequence
  source: /note="Description of Artificial Sequence: Synthetic polypeptide"
QVQLVESGGGVVQPGRSLRLSCAASGSEVFPITYMNWVRQAPGKGLEWIGDILPSIGRTMYGDSVKGRFTISRDNSKNTLYLQMNSLRAEDTAVYYCARSEGYLLAYWGQGTLVTVSS

SEQ ID NO: 4393 - protein, 118 aa, Artificial Sequence
  source: /note="Description of Artificial Sequence: Synthetic polypeptide"
QVQLVESGGGVVQPGRSLRLSCAASGYAFTNCWMNWVRQAPGKGLEWIGRIFPGNGHTNYSDSVKGRFTISRDNSKNTLYLQMNSLRAEDTAVYYCARDYSDYYFDYWGQGTLVTVSS

SEQ ID NO: 4394 - protein, 116 aa, Artificial Sequence
  source: /note="Description of Artificial Sequence: Synthetic polypeptide"
QVQLVESGGGVVQPGRSLRLSCAASGYIFTDYGITWVRQAPGKGLEWIGEISPRSGETYFNDSVKGRFTISRDNSKNTLYLQMNSLRAEDTAVYYCAREGNPFTYWGQGTLVTVSS

SEQ ID NO: 4395 - protein, 117 aa, Artificial Sequence
  source: /note="Description of Artificial Sequence: Synthetic polypeptide"
QVQLVESGGGVVQPGRSLRLSCAASGYTFTNYWINWVRQAPGKGLEWIGNIYSGSSRTNYNDSVKGRFTISRDNSKNTLYLQMNSLRAEDTAVYYCAREGLRAMDYWGQGTLVTVSS

SEQ ID NO: 4396 - protein, 118 aa, Artificial Sequence
  source: /note="Description of Artificial Sequence: Synthetic polypeptide"
QVQLVQSGAEVKKPGASVKISCKASGYAFTNCWMNWVRQAPGQGLEWIGRIFPGNGHTNYAQKFQGRATLTEDKSTSTAYMELSSLRSEDTAVYYCARDYSDYYFDYWGQGTLLTVSS

SEQ ID NO: 4397 - protein, 118 aa, Artificial Sequence
  source: /note="Description of Artificial Sequence: Synthetic polypeptide"
QVQLVQSGAEVKKPGASVKISCKASGYAFTNCWMNWVRQAPGQGLEWIGRIFPGNGHTNYAQKFQGRATLTEDTSTSTAYMELSSLRSEDTAVYYCARDYSDYYFDYWGQGTLLTVSS

SEQ ID NO: 4398 - protein, 121 aa, Artificial Sequence
  source: /note="Description of Artificial Sequence: Synthetic polypeptide"
QVQLVQSGAEVKKPGASVKVSCKASGFIFSNYDMSWVRQAPGQGLEWVATISSGGGYTYYPQKFQGRVTMTRDTSTSTVYMELSSLRSEDTAVYYCTRHGYGNYDWYFDVWGQGTLVTVSS

SEQ ID NO: 4399 - protein, 120 aa, Artificial Sequence
  source: /note="Description of Artificial Sequence: Synthetic polypeptide"
QVQLVQSGAEVKKPGASVKVSCKASGFNIKGSLLHWVRQAPGQGLEWIGWIDPEDGETRFDQKFQGRVTMTRDTSTSTVYMELSSLRSEDTAVYYCARTEYSNPAWFAYWGQGTLVTVSS

SEQ ID NO: 4400 - protein, 116 aa, Artificial Sequence
  source: /note="Description of Artificial Sequence: Synthetic polypeptide"
QVQLVQSGAEVKKPGASVKVSCKASGFSLSNYGVHWVRQAPGQGLEWLGVIWAGGITNYNQKFQGRVTMTRDTSTSTVYMELSSLRSEDTAVYYCAKQGGTSFSYWGQGTLVTVSS

SEQ ID NO: 4401 - protein, 121 aa, Artificial Sequence
  source: /note="Description of Artificial Sequence: Synthetic polypeptide"
QVQLVQSGAEVKKPGASVKVSCKASGFTFSNYAMSWVRQAPGQGLEWVASISSGGSYNYYPQKFQGRVTMTRDTSTSTVYMELSSLRSEDTAVYYCASQSYGSSYWYFDVWGQGTLVTVSS

SEQ ID NO: 4402 - protein, 121 aa, Artificial Sequence
  source: /note="Description of Artificial Sequence: Synthetic polypeptide"
QVQLVQSGAEVKKPGASVKVSCKASGFTFSNYDMSWVRQAPGQGLEWVATISSGGDYTYYPQKFQGRVTMTRDTSTSTVYMELSSLRSEDTAVYYCARHGYGNYDWYFDVWGQGTLVTVSS

SEQ ID NO: 4403 - protein, 121 aa, Artificial Sequence
  source: /note="Description of Artificial Sequence: Synthetic polypeptide"
QVQLVQSGAEVKKPGASVKVSCKASGFTFSTYAMFWVRQAPGQGLEWVASISSGGRYTYYPQKFQGRVTMTRDTSTSTVYMELSSLRSEDTAVYYCVRHSYGSSYWYLDVWGQGTLVTVSS

SEQ ID NO: 4404 - protein, 118 aa, Artificial Sequence
  source: /note="Description of Artificial Sequence: Synthetic polypeptide"
QVQLVQSGAEVKKPGASVKVSCKASGSEVFPITYMNWVRQAPGQGLEWIGDILPSIGRTMYGQKFQGRVTMTRDTSTSTVYMELSSLRSEDTAVYYCARSEGYLLAYWGQGTLVTVSS

SEQ ID NO: 4405 - protein, 118 aa, Artificial Sequence
  source: /note="Description of Artificial Sequence: Synthetic polypeptide"
QVQLVQSGAEVKKPGASVKVSCKASGYAFTNCWMNWVRQAPGQGLEWIGRIFPGNGHTNYAQKFQGRVTMTEDTSTSTVYMELSSLRSEDTAVYYCARDYSDYYFDYWGQGTLVTVSS

SEQ ID NO: 4406 - protein, 118 aa, Artificial Sequence
  source: /note="Description of Artificial Sequence: Synthetic polypeptide"
QVQLVQSGAEVKKPGASVKVSCKASGYAFTNCWMNWVRQAPGQGLEWIGRIFPGNGHTNYSQKFQGRVTMTRDTSTSTVYMELSSLRSEDTAVYYCARDYSDYYFDYWGQGTLVTVSS

SEQ ID NO: 4407 - protein, 118 aa, Artificial Sequence
  source: /note="Description of Artificial Sequence: Synthetic polypeptide"
QVQLVQSGAEVKKPGASVKVSCKASGYAFTNCWMNWVRQAPGQGLEWMGRIFPGNGHTNYAQKFQGRVTMTRDTSTSTVYMELSSLRSEDTAVYYCARDYSDYYFDYWGQGTLVTVSS

SEQ ID NO: 4408 - protein, 116 aa, Artificial Sequence
  source: /note="Description of Artificial Sequence: Synthetic polypeptide"
QVQLVQSGAEVKKPGASVKVSCKASGYIFTDYGITWVRQAPGQGLEWIGEISPRSGETYFNQKFQGRVTMTRDTSTSTVYMELSSLRSEDTAVYYCAREGNPFTYWGQGTLVTVSS

SEQ ID NO: 4409 - protein, 117 aa, Artificial Sequence
  source: /note="Description of Artificial Sequence: Synthetic polypeptide"
QVQLVQSGAEVKKPGASVKVSCKASGYTFTNYWINWVRQAPGQGLEWIGNIYSGSSRTNYNQKFQGRVTMTRDTSTSTVYMELSSLRSEDTAVYYCAREGLRAMDYWGQGTLVTVSS

SEQ ID NO: 4410 - protein, 94 aa, Artificial Sequence
  source: /note="Description of Artificial Sequence: Synthetic polypeptide"
QVQLVQSGAEVKKPGASVKVSCKASGYTFTSYYMHWVRQAPGQGLEWMGIINPSGGSTSYAQKFQGRVTMTRDTSTSTVYMELSSLRSEDTAVY

SEQ ID NO: 4411 - protein, 121 aa, Artificial Sequence
  source: /note="Description of Artificial Sequence: Synthetic polypeptide"
QVQLVQSGAEVKKPGSSVKVSCKASGFIFSNYDMSWVRQAPGQGLEWVATISSGGGYTYYPQKFQGRVTITADESTSTAYMELSSLRSEDTAVYYCTRHGYGNYDWYFDVWGQGTLVTVSS

SEQ ID NO: 4412 - protein, 120 aa, Artificial Sequence
  source: /note="Description of Artificial Sequence: Synthetic polypeptide"
QVQLVQSGAEVKKPGSSVKVSCKASGFNIKGSLLHWVRQAPGQGLEWIGWIDPEDGETRFDQKFQGRVTITADESTSTAYMELSSLRSEDTAVYYCARTEYSNPAWFAYWGQGTLVTVSS

SEQ ID NO: 4413 - protein, 116 aa, Artificial Sequence
  source: /note="Description of Artificial Sequence: Synthetic polypeptide"
QVQLVQSGAEVKKPGSSVKVSCKASGFSLSNYGVHWVRQAPGQGLEWLGVIWAGGITNYNQKFQGRVTITADESTSTAYMELSSLRSEDTAVYYCAKQGGTSFSYWGQGTLVTVSS

SEQ ID NO: 4414 - protein, 121 aa, Artificial Sequence
  source: /note="Description of Artificial Sequence: Synthetic polypeptide"
QVQLVQSGAEVKKPGSSVKVSCKASGFTFSNYAMSWVRQAPGQGLEWVASISSGGSYNYYPQKFQGRVTITADESTSTAYMELSSLRSEDTAVYYCASQSYGSSYWYFDVWGQGTLVTVSS

SEQ ID NO: 4415 - protein, 121 aa, Artificial Sequence
  source: /note="Description of Artificial Sequence: Synthetic polypeptide"
QVQLVQSGAEVKKPGSSVKVSCKASGFTFSNYDMSWVRQAPGQGLEWVATISSGGDYTYYPQKFQGRVTITADESTSTAYMELSSLRSEDTAVYYCARHGYGNYDWYFDVWGQGTLVTVSS

SEQ ID NO: 4416 - protein, 121 aa, Artificial Sequence
  source: /note="Description of Artificial Sequence: Synthetic polypeptide"
QVQLVQSGAEVKKPGSSVKVSCKASGFTFSTYAMFWVRQAPGQGLEWVASISSGGRYTYYPQKFQGRVTITADESTSTAYMELSSLRSEDTAVYYCVRHSYGSSYWYLDVWGQGTLVTVSS

SEQ ID NO: 4417 - protein, 118 aa, Artificial Sequence
  source: /note="Description of Artificial Sequence: Synthetic polypeptide"
QVQLVQSGAEVKKPGSSVKVSCKASGSEVFPITYMNWVRQAPGQGLEWIGDILPSIGRTMYGQKFQGRVTITADESTSTAYMELSSLRSEDTAVYYCARSEGYLLAYWGQGTLVTVSS

SEQ ID NO: 4418 - protein, 118 aa, Artificial Sequence
  source: /note="Description of Artificial Sequence: Synthetic polypeptide"
QVQLVQSGAEVKKPGSSVKVSCKASGYAFTNCWMNWVRQAPGQGLEWIGRIFPGNGHTNYSQKFQGRVTITADESTSTAYMELSSLRSEDTAVYYCARDYSDYYFDYWGQGTLVTVSS

SEQ ID NO: 4419 - protein, 116 aa, Artificial Sequence
  source: /note="Description of Artificial Sequence: Synthetic polypeptide"
QVQLVQSGAEVKKPGSSVKVSCKASGYIFTDYGITWVRQAPGQGLEWIGEISPRSGETYFNQKFQGRVTITADESTSTAYMELSSLRSEDTAVYYCAREGNPFTYWGQGTLVTVSS

SEQ ID NO: 4420 - protein, 117 aa, Artificial Sequence
  source: /note="Description of Artificial Sequence: Synthetic polypeptide"
QVQLVQSGAEVKKPGSSVKVSCKASGYTFTNYWINWVRQAPGQGLEWIGNIYSGSSRTNYNQKFQGRVTITADESTSTAYMELSSLRSEDTAVYYCAREGLRAMDYWGQGTLVTVSS

SEQ ID NO: 4421 - protein, 15 aa, Artificial Sequence
  source: /note="Description of Artificial Sequence: Synthetic peptide"
YFDYWGQGTLVTVSS

SEQ ID NO: 4422 - protein, 119 aa, Artificial Sequence
  source: /note="Description of Artificial Sequence: Synthetic polypeptide"
EVKLVESGGALVKPGGSLKLSCAASGFTFSNYAMSWVRQTPEKRLEWVATINNGGSYTYYSDSVKGRFAISRDNAKNTLYLQMSNLRSEDTALYYCVRRDYGTSDFDYWGQGTTLTVSS

SEQ ID NO: 4423 - protein, 119 aa, Artificial Sequence
  source: /note="Description of Artificial Sequence: Synthetic polypeptide"
EVQLLESGGGLVQPGGSLRLSCAASGFTFSNYAMSWVRQAPGKGLEWVATINNGGSYTYYSDSVKGRFTISRDNSKNTLYLQMNSLRAEDTAVYYCVRRDYGTSDFDYWGQGTLVTVSS

SEQ ID NO: 4424 - protein, 116 aa, Artificial Sequence
  source: /note="Description of Artificial Sequence: Synthetic polypeptide"
EVQLLESGGGLVQPGGSLRLSCAASGYAFSSYWMNWVRQAPGKGLEWIGRIYPRDGDTNYNDSVKGRFTISRDNSKNTLYLQMNSLRAEDTAVYYCARWLLRFAYWGQGTLVTVSS

SEQ ID NO: 4425 - protein, 118 aa, Artificial Sequence
  source: /note="Description of Artificial Sequence: Synthetic polypeptide"
EVQLLESGGGLVQPGGSLRLSCAASGYTFTSYWMHWVRQAPGKGLEWIGEIDPSDSYTYYNDSVKGRFTISRDNSKNTLYLQMNSLRAEDTAVYYCAAYYSNYVRAYWGQGTLVTVSS

SEQ ID NO: 4426 - protein, 116 aa, Artificial Sequence
  source: /note="Description of Artificial Sequence: Synthetic polypeptide"
EVQLLESGGGLVQPGGSLRLSCAASGYTFTSYWMHWVRQAPGKGLEWIGEINPRDGVSNCNDSVKGRFTISRDNSKNTLYLQMNSLRAEDTAVYYCTIWEDYFDYWGQGTLVTVSS

SEQ ID NO: 4427 - protein, 119 aa, Artificial Sequence
  source: /note="Description of Artificial Sequence: Synthetic polypeptide"
EVQLVESGGGLVKPGGSLRLSCAASGFTFSNYAMSWVRQAPGKGLEWVATINNGGSYTYYSAPVKGRFTISRDDSKNTLYLQMNSLKTEDTAVYYCVRRDYGTSDFDYWGQGTLVTVSS

SEQ ID NO: 4428 - protein, 116 aa, Artificial Sequence
  source: /note="Description of Artificial Sequence: Synthetic polypeptide"
EVQLVESGGGLVKPGGSLRLSCAASGYAFSSYWMNWVRQAPGKGLEWIGRIYPRDGDTNYNAPVKGRFTISRDDSKNTLYLQMNSLKTEDTAVYYCARWLLRFAYWGQGTLVTVSS

SEQ ID NO: 4429 - protein, 118 aa, Artificial Sequence
  source: /note="Description of Artificial Sequence: Synthetic polypeptide"
EVQLVESGGGLVKPGGSLRLSCAASGYTFTSYWMHWVRQAPGKGLEWIGEIDPSDSYTYYNAPVKGRFTISRDDSKNTLYLQMNSLKTEDTAVYYCAAYYSNYVRAYWGQGTLVTVSS

SEQ ID NO: 4430 - protein, 116 aa, Artificial Sequence
  source: /note="Description of Artificial Sequence: Synthetic polypeptide"
EVQLVESGGGLVKPGGSLRLSCAASGYTFTSYWMHWVRQAPGKGLEWIGEINPRDGVSNCNAPVKGRFTISRDDSKNTLYLQMNSLKTEDTAVYYCTIWEDYFDYWGQGTLVTVSS

SEQ ID NO: 4431 - protein, 119 aa, Artificial Sequence
  source: /note="Description of Artificial Sequence: Synthetic polypeptide"
EVQLVESGGGLVQPGGSLRLSCAASGFTFSNYAMSWVRQAPGKGLEWVATINNGGSYTYYSDSVKGRFTISRDNAKNSLYLQMNSLRAEDTAVYYCVRRDYGTSDFDYWGQGTLVTVSS

SEQ ID NO: 4432 - protein, 116 aa, Artificial Sequence
  source: /note="Description of Artificial Sequence: Synthetic polypeptide"
EVQLVESGGGLVQPGGSLRLSCAASGYAFSSYWMNWVRQAPGKGLEWIGRIYPRDGDTNYNDSVKGRFTISRDNAKNSLYLQMNSLRAEDTAVYYCARWLLRFAYWGQGTLVTVSS

SEQ ID NO: 4433 - protein, 118 aa, Artificial Sequence
  source: /note="Description of Artificial Sequence: Synthetic polypeptide"
EVQLVESGGGLVQPGGSLRLSCAASGYTFTSYWMHWVRQAPGKGLEWIGEIDPSDSYTYYNDSVKGRFTISRDNAKNSLYLQMNSLRAEDTAVYYCAAYYSNYVRAYWGQGTLVTVSS

SEQ ID NO: 4434 - protein, 116 aa, Artificial Sequence
  source: /note="Description of Artificial Sequence: Synthetic polypeptide"
EVQLVESGGGLVQPGGSLRLSCAASGYTFTSYWMHWVRQAPGKGLEWIGEINPRDGVSNCNDSVKGRFTISRDNAKNSLYLQMNSLRAEDTAVYYCTIWEDYFDYWGQGTLVTVSS

SEQ ID NO: 4435 - protein, 119 aa, Artificial Sequence
  source: /note="Description of Artificial Sequence: Synthetic polypeptide"
EVQLVQSGAEVKKPGESLKISCKGSGFTFSNYAMSWVRQMPGKGLEWVATINNGGSYTYYSPSFQGQVTISADKSISTAYLQWSSLKASDTAMYYCVRRDYGTSDFDYWGQGTLVTVSS

SEQ ID NO: 4436 - protein, 116 aa, Artificial Sequence
  source: /note="Description of Artificial Sequence: Synthetic polypeptide"
EVQLVQSGAEVKKPGESLKISCKGSGYAFSSYWMNWVRQMPGKGLEWIGRIYPRDGDTNYNPSFQGQVTISADKSISTAYLQWSSLKASDTAMYYCARWLLRFAYWGQGTLVTVSS

SEQ ID NO: 4437 - protein, 118 aa, Artificial Sequence
  source: /note="Description of Artificial Sequence: Synthetic polypeptide"
EVQLVQSGAEVKKPGESLKISCKGSGYTFTSYWMHWVRQMPGKGLEWIGEIDPSDSYTYYNPSFQGQVTISADKSISTAYLQWSSLKASDTAMYYCAAYYSNYVRAYWGQGTLVTVSS

SEQ ID NO: 4438 - protein, 116 aa, Artificial Sequence
  source: /note="Description of Artificial Sequence: Synthetic polypeptide"
EVQLVQSGAEVKKPGESLKISCKGSGYTFTSYWMHWVRQMPGKGLEWIGEINPRDGVSNCNPSFQGQVTISADKSISTAYLQWSSLKASDTAMYYCTIWEDYFDYWGQGTLVTVSS

SEQ ID NO: 4439 - protein, 119 aa, Artificial Sequence
  source: /note="Description of Artificial Sequence: Synthetic polypeptide"
QLQLQESGPGLVKPSETLSLTCTVSGFTFSNYAMSWIRQPPGKGLEWVATINNGGSYTYYSPSLKSRVTISVDTSKNQFSLKLSSVTAADTAVYYCVRRDYGTSDFDYWGQGTLVTVSS

SEQ ID NO: 4440 - protein, 116 aa, Artificial Sequence
  source: /note="Description of Artificial Sequence: Synthetic polypeptide"
QLQLQESGPGLVKPSETLSLTCTVSGYTFTSYWMHWIRQPPGKGLEWIGEINPRDGVSNCNPSLKSRVTISVDTSKNQFSLKLSSVTAADTAVYYCTIWEDYFDYWGQGTLVTVSS

SEQ ID NO: 4441 - protein, 119 aa, Artificial Sequence
  source: /note="Description of Artificial Sequence: Synthetic polypeptide"
QVQLQESGPGLVKPSETLSLTCTVSGFTFSNYAMSWIRQPPGKGLEWVATINNGGSYTYYSPSLKSRVTISVDTSKNQFSLKLSSVTAADTAVYYCVRRDYGTSDFDYWGQGTLVTVSS

SEQ ID NO: 4442 - protein, 116 aa, Artificial Sequence
  source: /note="Description of Artificial Sequence: Synthetic polypeptide"
QVQLQESGPGLVKPSETLSLTCTVSGYAFSSYWMNWIRQPPGKGLEWIGRIYPRDGDTNYNPSLKSRVTISVDTSKNQFSLKLSSVTAADTAVYYCARWLLRFAYWGQGTLVTVSS

SEQ ID NO: 4443 - protein, 118 aa, Artificial Sequence
  source: /note="Description of Artificial Sequence: Synthetic polypeptide"
QVQLQESGPGLVKPSETLSLTCTVSGYTFTSYWMHWIRQPPGKGLEWIGEIDPSDSYTYYNPSLKSRVTISVDTSKNQFSLKLSSVTAADTAVYYCAAYYSNYVRAYWGQGTLVTVSS

SEQ ID NO: 4444 - protein, 116 aa, Artificial Sequence
  source: /note="Description of Artificial Sequence: Synthetic polypeptide"
QVQLQESGPGLVKPSETLSLTCTVSGYTFTSYWMHWIRQPPGKGLEWIGEINPRDGVSNCNPSLKSRVTISVDTSKNQFSLKLSSVTAADTAVYYCTIWEDYFDYWGQGTLVTVSS

SEQ ID NO: 4445 - protein, 116 aa, Artificial Sequence
  source: /note="Description of Artificial Sequence: Synthetic polypeptide"
QVQLQESGPGLVKPSQTLSLTCTVSGYAFSSYWMNWIRQPPGKGLEWIGRIYPRDGDTNYNPSLKSRVTISVDTSKNQFSLKLSSVTAADTAVYYCARWLLRFAYWGQGTLVTVSS

SEQ ID NO: 4446 - protein, 118 aa, Artificial Sequence
  source: /note="Description of Artificial Sequence: Synthetic polypeptide"
QVQLQESGPGLVKPSQTLSLTCTVSGYTFTSYWMHWIRQPPGKGLEWIGEIDPSDSYTYYNPSLKSRVTISVDTSKNQFSLKLSSVTAADTAVYYCAAYYSNYVRAYWGQGTLVTVSS

SEQ ID NO: 4447 - protein, 116 aa, Artificial Sequence
  source: /note="Description of Artificial Sequence: Synthetic polypeptide"
QVQLQQSGAEVVKPGASVKLSCKAFGYTFTSYWMHWVKQRPGQGLEWIGEINPRDGVSNCNEKFTSKATLTVDTSSNTAYMQLNNLTSEDSAVYYCTIWEDYFDYWGQGTTLTVST

SEQ ID NO: 4448 - protein, 116 aa, Artificial Sequence
  source: /note="Description of Artificial Sequence: Synthetic polypeptide"
QVQLQQSGPELVKPGASVKISCKASGYAFSSYWMNWVKQRPGKGLEWIGRIYPRDGDTNYNGKFKGKATLTADKSSSTAYMQLSSLTSEDSAVYFCARWLLRFAYWGQGTLVTVSA

SEQ ID NO: 4449 - protein, 119 aa, Artificial Sequence
  source: /note="Description of Artificial Sequence: Synthetic polypeptide"
QVQLVESGGGVVQPGRSLRLSCAASGFTFSNYAMSWVRQAPGKGLEWVATINNGGSYTYYSDSVKGRFTISRDNSKNTLYLQMNSLRAEDTAVYYCVRRDYGTSDFDYWGQGTLVTVSS

SEQ ID NO: 4450 - protein, 116 aa, Artificial Sequence
  source: /note="Description of Artificial Sequence: Synthetic polypeptide"
QVQLVESGGGVVQPGRSLRLSCAASGYAFSSYWMNWVRQAPGKGLEWIGRIYPRDGDTNYNDSVKGRFTISRDNSKNTLYLQMNSLRAEDTAVYYCARWLLRFAYWGQGTLVTVSS

SEQ ID NO: 4451 - protein, 118 aa, Artificial Sequence
  source: /note="Description of Artificial Sequence: Synthetic polypeptide"
QVQLVESGGGVVQPGRSLRLSCAASGYTFTSYWMHWVRQAPGKGLEWIGEIDPSDSYTYYNDSVKGRFTISRDNSKNTLYLQMNSLRAEDTAVYYCAAYYSNYVRAYWGQGTLVTVSS

SEQ ID NO: 4452 - protein, 116 aa, Artificial Sequence
  source: /note="Description of Artificial Sequence: Synthetic polypeptide"
QVQLVESGGGVVQPGRSLRLSCAASGYTFTSYWMHWVRQAPGKGLEWIGEINPRDGVSNCNDSVKGRFTISRDNSKNTLYLQMNSLRAEDTAVYYCTIWEDYFDYWGQGTLVTVSS

SEQ ID NO: 4453 - protein, 119 aa, Artificial Sequence
  source: /note="Description of Artificial Sequence: Synthetic polypeptide"
QVQLVQSGAEVKKPGASVKVSCKASGFTFSNYAMSWVRQAPGQGLEWVATINNGGSYTYYSQKFQGRVTMTRDTSTSTVYMELSSLRSEDTAVYYCVRRDYGTSDFDYWGQGTLVTVSS

SEQ ID NO: 4454 - protein, 116 aa, Artificial Sequence
  source: /note="Description of Artificial Sequence: Synthetic polypeptide"
QVQLVQSGAEVKKPGASVKVSCKASGYAFSSYWMNWVRQAPGQGLEWIGRIYPRDGDTNYNQKFQGRVTMTRDTSTSTVYMELSSLRSEDTAVYYCARWLLRFAYWGQGTLVTVSS

SEQ ID NO: 4455 - protein, 118 aa, Artificial Sequence
  source: /note="Description of Artificial Sequence: Synthetic polypeptide"
QVQLVQSGAEVKKPGASVKVSCKASGYTFTSYWMHWVRQAPGQGLEWIGEIDPSDSYTYYNQKFQGRVTMTRDTSTSTVYMELSSLRSEDTAVYYCAAYYSNYVRAYWGQGTLVTVSS

SEQ ID NO: 4456 - protein, 116 aa, Artificial Sequence
  source: /note="Description of Artificial Sequence: Synthetic polypeptide"
QVQLVQSGAEVKKPGASVKVSCKASGYTFTSYWMHWVRQAPGQGLEWIGEINPRDGVSNCNQKFQGRVTMTRDTSTSTVYMELSSLRSEDTAVYYCTIWEDYFDYWGQGTLVTVSS

SEQ ID NO: 4457 - protein, 119 aa, Artificial Sequence
  source: /note="Description of Artificial Sequence: Synthetic polypeptide"
QVQLVQSGAEVKKPGSSVKVSCKASGFTFSNYAMSWVRQAPGQGLEWVATINNGGSYTYYSQKFQGRVTITADESTSTAYMELSSLRSEDTAVYYCVRRDYGTSDFDYWGQGTLVTVSS

SEQ ID NO: 4458 - protein, 116 aa, Artificial Sequence
  source: /note="Description of Artificial Sequence: Synthetic polypeptide"
QVQLVQSGAEVKKPGSSVKVSCKASGYAFSSYWMNWVRQAPGQGLEWIGRIYPRDGDTNYNQKFQGRVTITADESTSTAYMELSSLRSEDTAVYYCARWLLRFAYWGQGTLVTVSS

SEQ ID NO: 4459 - protein, 118 aa, Artificial Sequence
  source: /note="Description of Artificial Sequence: Synthetic polypeptide"
QVQLVQSGAEVKKPGSSVKVSCKASGYTFTSYWMHWVRQAPGQGLEWIGEIDPSDSYTYYNQKFQGRVTITADESTSTAYMELSSLRSEDTAVYYCAAYYSNYVRAYWGQGTLVTVSS

SEQ ID NO: 4460 - protein, 116 aa, Artificial Sequence
  source: /note="Description of Artificial Sequence: Synthetic polypeptide"
QVQLVQSGAEVKKPGSSVKVSCKASGYTFTSYWMHWVRQAPGQGLEWIGEINPRDGVSNCNQKFQGRVTITADESTSTAYMELSSLRSEDTAVYYCTIWEDYFDYWGQGTLVTVSS

SEQ ID NO: 4461 - protein, 117 aa, Artificial Sequence
  source: /note="Description of Artificial Sequence: Synthetic polypeptide"
VQLQQSGAELVKPGASVKLSCKASGYTFTSYWMHWVKQRPGQGLEWIGEIDPSDSYTYYNQKFKGKATLTVDKSSSTAYMQLSSLTSEDSAVYYCAAYYSNYVRAYWGQGTLVTVSA

SEQ ID NO: 4462 - protein, 120 aa, Artificial Sequence
  source: /note="Description of Artificial Sequence: Synthetic polypeptide"
  MOD_RES (118)..(120): Any amino acid
DVQLQESGPGLVKPSQSLSLTCTVTGFSISRGYDWHWIRHFPGNILEWMGYITYSGISNYNPSLKSRISITHDTSKNHFFLRLNSVTAEDTATYYCARGGGAWFTYWGQGTLVTVSAXXX

SEQ ID NO: 4463 - protein, 121 aa, Artificial Sequence
  source: /note="Description of Artificial Sequence: Synthetic polypeptide"
  MOD_RES (119)..(121): Any amino acid
EFQLQQSGAELVKPGASVKISCKASGYSLTGYNMNWVKQSRGKSLEWIGNINPHYGSSTYNQNFKDKATLTVDKSSSAAYMQFNSLTSEDSAVYYCAREGYDGVFDYWGQGTTLTVSSXXX

SEQ ID NO: 4464 - protein, 121 aa, Artificial Sequence
  source: /note="Description of Artificial Sequence: Synthetic polypeptide"
  MOD_RES (119)..(121): Any amino acid
EVKLEESGGGLVKPGGSMKLSCAASGFTFSDAWMDWVRQSPEKGLEWVAEIRGKTTNYATYYAESVKGRFTISRDDSKSSVYLQMNSFSTEDTGIYYCTRRNWGFAYWGQGTLVTVSAXXX

SEQ ID NO: 4465 - protein, 125 aa, Artificial Sequence
  source: /note="Description of Artificial Sequence: Synthetic polypeptide"
  MOD_RES (123)..(125): Any amino acid
EVKLVESGGGLVKPGGSLKLSCAASGFTFSSYAMSWVRQTPEKRLEWVATISDYGGSYTYYPDSVKGRFTISRDNAKYTLYLQMSSLRSEDTALYYCARPPYDDYYGGFAYWGQGTLVTVSAXXX

SEQ ID NO: 4466 - protein, 124 aa, Artificial Sequence
  source: /note="Description of Artificial Sequence: Synthetic polypeptide"
  MOD_RES (122)..(124): Any amino acid
EVQLVESGGDLVKPGGSLKLSCAASGFSFSSYAMSWVRQTPAKRLEWVATISGSGGYTYYPDSMKGRFTISRDNAKDILYLQMSSLRSEDTAMYYCARDPRYTTLYAMDYWGQGTSVTVSSXXX

SEQ ID NO: 4467 - protein, 122 aa, Artificial Sequence
  source: /note="Description of Artificial Sequence: Synthetic polypeptide"
  MOD_RES (120)..(122): Any amino acid
QIQLVQSGPELKKPGETVKISCKASDYTFTDYSMHWVKQAPGKDLKWMGWINTETGEPTYADDFKGRFAFSLEASASTAYLQINNLKNEDTATYFCARHGYPHYYFDYWGQGTTLTVSSXXX

SEQ ID NO: 4468 - protein, 122 aa, Artificial Sequence
  source: /note="Description of Artificial Sequence: Synthetic polypeptide"
  MOD_RES (120)..(122): Any amino acid
QVQLQQPGAELVKPGASVKMSCKASGYTFTSYWMHWVKQRPGQGLEWIGVIDPSDSYTNYNQKFKGKATLTVDTSSSTAYMQLSSLTSEDSAVYYCTRSGYGKYDFDYWGQGTTLTVSSXXX

SEQ ID NO: 4469 - protein, 105 aa, Artificial Sequence
  source: /note="Description of Artificial Sequence: Synthetic polypeptide"
EIVLTQSPGTLSLSPGERATLSCRASQSVRSSYLAWYQQKPGQAPRLLIYGASSRATGIPDRFSGSGSGTDFTLTISRLEPEDFAVYYCQQSPWTFGGGTKVEIK

SEQ ID NO: 4470 - protein, 115 aa, Artificial Sequence
  source: /note="Description of Artificial Sequence: Synthetic polypeptide"
EVQLLESGGGLVQPGGSLRLSCAASGFTFSSYAMSWVRQAPGKGLEWVSAISGSGGSTYYADSVKGRFTISRDNSKNTLYLQMNSLRAEDTAVYYCARGDGMDVWGQGTTVTVSS

SEQ ID NO: 4471 - protein, 121 aa, Artificial Sequence
  source: /note="Description of Artificial Sequence: Synthetic polypeptide"
EVQLLESGGGLVQPGGSLRLSCAASGFTFSSYAMSWVRQAPGKGLEWVSAISGSGGSTYYADSVKGRFTISRDNSKNTLYLQMNSLRAEDTAVYYCARVRGYGGSNYFDYWGQGTLVTVSS

SEQ ID NO: 4472 - protein, 120 aa, Artificial Sequence
  source: /note="Description of Artificial Sequence: Synthetic polypeptide"
EVQLVESGGGLVKPGGSLRLSCAASGFTFSSYSMNWVRQAPGKGLEWVSSISSSSNYIYYADSVKGRFTISRDNAKNSLYLQMNSLRAEDTAVYYCARGGLDRWGSFDIWGQGTMVTVSS

SEQ ID NO: 4473 - protein, 125 aa, Artificial Sequence
  source: /note="Description of Artificial Sequence: Synthetic polypeptide"
QLQLQESGPGLVKPSETLSLTCTVSGGSISSSDYYWGWIRQPPGKGLEWIGSIYYSGSTYYNPSLKSRVTISVDTSKNQFSLKLSSVTAADTAVYYCARGVGSGYSYGYRYFDYWGQGTLVTVSS

SEQ ID NO: 4474 - protein, 123 aa, Artificial Sequence
  source: /note="Description of Artificial Sequence: Synthetic polypeptide"
QLQLQESGPGLVKPSETLSLTCTVSGGSISSSSYYWGWIRQPPGKGLEWIGSIYYSGSTYYNPSLKSRVTISVDTSKNQFSLKLSSVTAADTAVYYCARGSPTWLRDYYMDVWGKGTTVTVSS

SEQ ID NO: 4475 - protein, 120 aa, Artificial Sequence
  source: /note="Description of Artificial Sequence: Synthetic polypeptide"
QVQLQESGPGLVKPSETLSLTCAVSGYSISSGYYWGWIRQPPGKGLEWIGSIYHSGSTYYNPSLKSRVTISVDTSKNQFSLKLSSVTAADTAVYYCARAEHRGPRYFDLWGRGTLVTVSS

SEQ ID NO: 4476 - protein, 120 aa, Artificial Sequence
  source: /note="Description of Artificial Sequence: Synthetic polypeptide"
QVQLQESGPGLVKPSETLSLTCAVSGYSISSGYYWGWIRQPPGKGLEWIGSIYHSGSTYYNPSLKSRVTISVDTSKNQFSLKLSSVTAADTAVYYCAREGQLPTGTFDYWGQGTLVTVSS

SEQ ID NO: 4477 - protein, 126 aa, Artificial Sequence
  source: /note="Description of Artificial Sequence: Synthetic polypeptide"
QVQLQESGPGLVKPSETLSLTCAVSGYSISSGYYWGWIRQPPGKGLEWIGSIYHSGSTYYNPSLKSRVTISVDTSKNQFSLKLSSVTAADTAVYYCARGPLKFYYGSGSYGFFDYWGQGTLVTVSS

SEQ ID NO: 4478 - protein, 122 aa, Artificial Sequence
  source: /note="Description of Artificial Sequence: Synthetic polypeptide"
QVQLQESGPGLVKPSETLSLTCAVSGYSISSGYYWGWIRQPPGKGLEWIGTIYHSGSTYYNPSLKSRVTISVDTSKNQFSLKLSSVTAADTAVYYCARQGSIKQGYYGMDVWGQGTTVTVSS

SEQ ID NO: 4479 - protein, 124 aa, Artificial Sequence
  source: /note="Description of Artificial Sequence: Synthetic polypeptide"
QVQLQESGPGLVKPSQTLSLTCTVSGGSISSGTYYWSWIRQHPGKGLEWIGYIYYSGSTYYNPSLKSRVTISVDTSKNQFSLKLSSVTAADTAVYYCARDRGRTESYYYGMDVWGQGTTVTVSS

SEQ ID NO: 4480 - protein, 129 aa, Artificial Sequence
  source: /note="Description of Artificial Sequence: Synthetic polypeptide"
QVQLVESGGGVVQPGRSLRLSCAASGFTFSSYGMHWVRQAPGKGLEWVAVISYDGSNKYYADSVKGRFTISRDNSKNTLYLQMNSLRAEDTAVYYCAKGLEYYDSSRLYYPYYYYMDVWGKGTTVTVSS

SEQ ID NO: 4481 - protein, 126 aa, Artificial Sequence
  source: /note="Description of Artificial Sequence: Synthetic polypeptide"
QVQLVESGGGVVQPGRSLRLSCAASGFTFSSYGMHWVRQAPGKGLEWVAVISYDGSNKYYADSVKGRFTISRDNSKNTLYLQMNSLRAEDTAVYYCARDRGGYSSLLPYYYYMDVWGQGTTVTVSS

SEQ ID NO: 4482 - protein, 124 aa, Artificial Sequence
  source: /note="Description of Artificial Sequence: Synthetic polypeptide"
QVQLVQSGAEVKKPGASVKVSCKASGYTFGAYYMHWVRQAPGQGLEWMGWVNPNSGGTRYAQKFQGRVTMTRDTSISTAYMELSRLRSDDTAVYYCARGKRSSGWYEGYGMDVWGQGTTVTVSS

SEQ ID NO: 4483 - protein, 126 aa, Artificial Sequence
  source: /note="Description of Artificial Sequence: Synthetic polypeptide"
QVQLVQSGAEVKKPGASVKVSCKASGYTFTGYYMHWVRQAPGQGLEWMGSINPNSGGTNYAQKFQGRVTMTRDTSISTAYMELSRLRSDDTAVYYCARGVGSTVTLAYYYYGMDVWGQGTTVTVSS

SEQ ID NO: 4484 - protein, 120 aa, Artificial Sequence
  source: /note="Description of Artificial Sequence: Synthetic polypeptide"
QVQLVQSGAEVKKPGASVKVSCKASGYTFTGYYMHWVRQAPGQGLEWMGSINPNSGGTNYAQKFQGRVTMTRDTSISTAYMELSRLRSDDTAVYYCARRHRSSTYGMDVWGQGTTVTVSS

SEQ ID NO: 4485 - protein, 124 aa, Artificial Sequence
  source: /note="Description of Artificial Sequence: Synthetic polypeptide"
QVQLVQSGAEVKKPGASVKVSCKASGYTFTGYYMHWVRQAPGQGLEWMGWINPNSGGTNYAQKFQGRVTMTRDTSISTAYMELSRLRSDDTAVYYCARGKRSSGWYEGYGMDVWGQGTTVTVSS

SEQ ID NO: 4486 - protein, 129 aa, Artificial Sequence
  source: /note="Description of Artificial Sequence: Synthetic polypeptide"
QVQLVQSGAEVKKPGASVKVSCKASGYTFTKYYMSWVRQAPGQGLEWMGIINPIGGSTSYAQKFQGRVTMTRDTSTSTVYMELSSLRSEDTAVYYCARDPSGIALAGPASRGYQGMDVWGQGTTVTVSS

SEQ ID NO: 4487 - protein, 127 aa, Artificial Sequence
  source: /note="Description of Artificial Sequence: Synthetic polypeptide"
QVQLVQSGAEVKKPGASVKVSCKASGYTFTSYGISWVRQAPGQGLEWMGSISAYNGNTNYAQKLQGRVTMTTDTSTSTAYMELRSLRSDDTAVYYCARQGGHDSPTLYYYYYGMDVWGQGTTVTVSS

SEQ ID NO: 4488 - protein, 129 aa, Artificial Sequence
  source: /note="Description of Artificial Sequence: Synthetic polypeptide"
QVQLVQSGAEVKKPGASVKVSCKASGYTFTSYYMSWVRQAPGQGLEWMGIINPSGGSTSYAQKFQGRVTMTRDTSTSTVYMELSSLRSEDTAVYYCARDPSGIAAAGPASRYYYGMDVWGQGTTVTVSS

SEQ ID NO: 4489 - protein, 124 aa, Artificial Sequence
  source: /note="Description of Artificial Sequence: Synthetic polypeptide"
QVQLVQSGAEVKKPGSSVKVSCKASGGTFSSYAISWVRQAPGQGLEWMGGIIPIFGTANYAQKFQGRVTITADESTSTAYMELSSLRSEDTAVYYCAREGRMSGWYYAYGMDVWGQGTTVTVSS

SEQ ID NO: 4490 - protein, 126 aa, Artificial Sequence
  source: /note="Description of Artificial Sequence: Synthetic polypeptide"
QVQLVQSGAEVKKPGSSVKVSCKASGGTFSSYAISWVRQAPGQGLEWMGGIIPIFGTASYAQKFQGRVTITADESTSTAYMELSSLRSEDTAVYYCARESRIPGSGYYYYYGMDVWGQGTTVTVSS

SEQ ID NO: 4491 - protein, 124 aa, Artificial Sequence
  source: /note="Description of Artificial Sequence: Synthetic polypeptide"
QVQLVQSGAEVKKPGSSVKVSCKASGGTFSSYAISWVRQAPGQGLEWMGGIIPIFGTASYAQKFQGRVTITADESTSTAYMELSSLRSEDTAVYYCARQGRKTGYYYYYGMDVWGQGTTVTVSS

SEQ ID NO: 4492 - protein, 123 aa, Artificial Sequence
  source: /note="Description of Artificial Sequence: Synthetic polypeptide"
QVQLVQSGAEVKKPGSSVKVSCKASGGTFSSYAISWVRQAPGQGLEWMGSIIPIFGTANYAQKFQGRVTITADESTSTAYMELSSLRSEDTAVYYCARDKHGRRGYYYYMDVWGKGTTVTVSS

SEQ ID NO: 4493 - protein, 124 aa, Artificial Sequence
  source: /note="Description of Artificial Sequence: Synthetic polypeptide"
QVQLVQSGAEVKKPGSSVKVSCKASGGTFSSYAISWVRQAPGQGLEWMGSIIPIFGTANYAQKFQGRVTITADESTSTAYMELSSLRSEDTAVYYCARERRYDGYYYYYGMDVWGQGTTVTVSS

SEQ ID NO: 4494 - protein, 121 aa, Artificial Sequence [sequence omitted]

SEQ ID NO: 4495 - protein, 119 aa, Mus sp.
EVKLEESGGGLVQPGGSMKLSCVASGFIFSNHWMNWVRQSPEKGLEWVAEIRSKSINSATHYAESVKGRFTISRDDSKSAVYLQMTDLRTEDTGVYYCSRNYYGSTYDYWGQGTTLTVS

SEQ ID NO: 4496 - protein, 27 aa, Homo sapiens
  MOD_RES (20)..(27): Any amino acid
MGFGLSWVFLVALLRGVQCXXXXXXXX

SEQ ID NO: 4497 - protein, 121 aa, Artificial Sequence
  source: /note="Description of Artificial Sequence: Synthetic polypeptide"
QVQLVESGGGLVQPGRSLRLSCAASGFTFDDYAMHWVRQAPGKGLDWVSAITWNSGHIDYADSVEGRFAVSRDNAKNALYLQMNSLRPEDTAVYYCTKASYLSTSSSLDNWGQGTLVTVSS

SEQ ID NO: 4498 - protein, 128 aa, Homo sapiens
  SITE (1)..(30): /note="framework 1"
  VARIANT (28)..(28): /replace="Thr"
  SITE (31)..(35): /note="complementarity determining region 1 (CDR1)"
  SITE (36)..(49): /note="framework 2"
  VARIANT (43)..(43): /replace="Asn"
  SITE (50)..(66): /note="complementarity determining region 2 (CDR2)"
  VARIANT (50)..(50): /replace="Phe" or "Val"
  VARIANT (51)..(51): /replace="Met"
  VARIANT (52)..(52): /replace="Leu"
  VARIANT (53)..(53): /replace="Phe"
  VARIANT (59)..(59): /replace="Tyr"
  VARIANT (60)..(60): /replace="Tyr"
  VARIANT (66)..(66): /replace="Gly"
  SITE (67)..(98): /note="framework 3"
  VARIANT (70)..(70): /replace="Ile"
  VARIANT (75)..(75): /replace="Pro"
  VARIANT (78)..(78): /replace="Ala"
  VARIANT (80)..(80): /replace="Phe"
  VARIANT (94)..(94): /replace="Phe"
  SITE (99)..(115): /note="complementarity determining region 3 (CDR3)"
  VARIANT (102)..(102): /replace="Val"
  SITE (116)..(126): /note="J6 region"
  MOD_RES (127)..(128): Any amino acid
  SITE (1)..(128): /note="Variant residues given in the sequence have no preference with respect to those in the annotations for variant positions"
QVQLVESGGGVVQPGRSLRLSCAASGFIFSSYAMHWVRQAPGKGLEWVAIISYDGSNKKSADSVKDRFTVSRDNSKNTLYLQMNSLRAEDTAVYYCARDRGIAAGGNYYYYGMDVWGQGTTVTVSSXX

SEQ ID NO: 4499 - protein, 116 aa, Artificial Sequence
  source: /note="Description of Artificial Sequence: Synthetic polypeptide"
EVKLEESGGGLVQPGGSMKLSCAASGFTFSDAWMGWVRQSPEKGLEWVAEIRDKVKNHATYYAESVKGRFTISRDDSKSTVYLQMNTLRADDTGIYYCRLGVFDYWGQGTTLTVSS

SEQ ID NO: 4500 - protein, 122 aa, Artificial Sequence
  source: /note="Description of Artificial Sequence: Synthetic polypeptide"
EVKLEESGGGLVQPGGSMKLSCTASGFTFSDAWMDWVRQSPEKGLEWVAEIRNKVNNHATYYAESVKGRFTISRDDSKSTVYLQMNSLRTEDTGIYYCTSLYDGYYLRFAYWGQGTLVTVSA

SEQ ID NO: 4501 - protein, 119 aa, Artificial Sequence
  source: /note="Description of Artificial Sequence: Synthetic polypeptide"
EVKLVESGGGLVKPGGSLKLSCAASGFTLSSYAMSWVRQTPEKRLEWVASISRGGSTYYPDSVQGRFTFSRDNARNILYLQMSSLRSEDTAMYYCTRGYGYYRTPFANWGQGTLVTVSA

SEQ ID NO: 4502 - protein, 121 aa, Artificial Sequence
  source: /note="Description of Artificial Sequence: Synthetic polypeptide"
EVQLLESGGGLVQPGGSLRLSCAASGFNFNTYAMKWVRQAPGKGLEWIARIRSNSNDYATNYSDSVKGRFTISRDNSKNTLYLQMNSLRAEDTAVYYCVGHKINNYPFAHWGQGTLVTVSS

SEQ ID NO: 4503 - protein, 122 aa, Artificial Sequence
  source: /note="Description of Artificial Sequence: Synthetic polypeptide"
EVQLLESGGGLVQPGGSLRLSCAASGFNFNTYAMNWVRQAPGKGLEWVARIRSKSNNYATYYADSVKGRFTISRDNSKNTLYLQMNSLRAEDTAVYYCVRHYSNYGWGFAYWGQGTLVTVSS

SEQ ID NO: 4504 - protein, 121 aa, Artificial Sequence
  source: /note="Description of Artificial Sequence: Synthetic polypeptide"
EVQLLESGGGLVQPGGSLRLSCAASGFRFNTYAMTWVRQAPGKGLEWEGVIRRKSSNFATLYADSVKGRFTISRDNSKNTLYLQMNSLRAEDTAVYYCVRHKSNKYPFVYWGQGTLVTVSS

SEQ ID NO: 4505 - protein, 122 aa, Artificial Sequence
  source: /note="Description of Artificial Sequence: Synthetic polypeptide"
EVQLLESGGGLVQPGGSLRLSCAASGFSFNTYAMNWVRQAPGKGLEWIARIRSKSNNYATYYADSVKGRFTISRDNSKNTLYLQMNSLRAEDTAVYYCVRHGDGNLWYIDVWGQGTLVTVSS

SEQ ID NO: 4506 - protein, 121 aa, Artificial Sequence
  source: /note="Description of Artificial Sequence: Synthetic polypeptide"
  VARIANT (55)..(55): /replace="Gln"
  VARIANT (100)..(100): /replace="Gln"
  VARIANT (102)..(102): /replace="Gln"
  SITE (1)..(121): /note="Variant residues given in the sequence have no preference with respect to those in the annotations for variant positions"
EVQLLESGGGLVQPGGSLRLSCAASGFTFNTYSMNWVRQAPGKGLEWVAHIKTKENNFATFYADSVKGRFTISRDNSKNTLYLQMNSLRAEDTAVYYCVEHESNNYPFAYWGQGTLVTVSS

SEQ ID NO: 4507 - protein, 122 aa, Artificial Sequence
  source: /note="Description of Artificial Sequence: Synthetic polypeptide"
EVQLLESGGGLVQPGGSLRLSCAASGFTFSDAWMDWVRQAPGKGLEWVAEIRNKINNHATYYADSVKGRFTISRDNSKNTLYLQMNSLRAEDTAVYYCTSLYDGSYLRFAYWGQGTLVTVSS

SEQ ID NO: 4508 - protein, 122 aa, Artificial Sequence
  source: /note="Description of Artificial Sequence: Synthetic polypeptide"
EVQLLESGGGLVQPGGSLRLSCAASGFTFSDAWMDWVRQAPGKGLEWWVAEIRNKVNNHATYYDSVKGRFTISRDNSKNTLYLQMNSLRAEDTAVYYCCTSLYDGYYLRFAWGQGTLVTVSS

SEQ ID NO: 4509 - protein, 116 aa, Artificial Sequence
  source: /note="Description of Artificial Sequence: Synthetic polypeptide"
EVQLLESGGGLVQPGGSLRLSCAASGFTFSDAWMGWVRQAPGKGLEWVAEIRDKVKNHATYYADSVKGRFTISRDNSKNTLYLQMNSLRAEDTAVYYCRLGVFDYWGQGTLVTVSS

SEQ ID NO: 4510 - protein, 121 aa, Artificial Sequence
  source: /note="Description of Artificial Sequence: Synthetic polypeptide"
EVQLLESGGGLVQPGGSLRLSCAASGFTFSSSAMSWVRQAPGKGLEWVSAISGSGGSTYYADSVKGRFTISRDNSKNTLYLQMNSLRAEDTAVYYCAKSPAVAGIYRADYWGQGTLVTVSS

SEQ ID NO: 4511 - protein, 128 aa, Artificial Sequence
  source: /note="Description of Artificial Sequence: Synthetic polypeptide"
EVQLLESGGGLVQPGGSLRLSCAASGFTFSSSAMSWVRQAPGKGLEWVSAISGSGGSTYYADSVKGRFTISRDNSKNTLYLQMNSLRAEDTAVYYCAKVPSYDYWSGYSNYYYYMDVWGKGTTVTVSS

SEQ ID NO: 4512 - protein, 121 aa, Artificial Sequence
  source: /note="Description of Artificial Sequence: Synthetic polypeptide"
EVQLLESGGGLVQPGGSLRLSCAASGFTFSSSAMSWVRQAPGKGLEWVSAISGSGGSTYYADSVKGRFTISRDNSKNTLYLQMNSLRAEDTAVYYCAKVPSYQRGTAFDPWGQGTLVTVSS

SEQ ID NO: 4513 - protein, 119 aa, Artificial Sequence
  source: /note="Description of Artificial Sequence: Synthetic polypeptide"
EVQLLESGGGLVQPGGSLRLSCAASGFTFSSYAMSWVRQAPGKGLEWVSAISGSGGSTYYADSVKGRFTISRDNSKNTLYLQMNSLRAEDTAVYYCAKHYHVGIAFDIWGQGTMVTVSS

SEQ ID NO: 4514 - protein, 120 aa, Artificial Sequence
  source: /note="Description of Artificial Sequence: Synthetic polypeptide"
EVQLLESGGGLVQPGGSLRLSCAASGFTFSSYAMSWVRQAPGKGLEWVSAISGSGGSTYYADSVKGRFTISRDNSKNTLYLQMNSLRAEDTAVYYCAKKYSSRGVYFDYWGQGTLVTVSS

SEQ ID NO: 4515 - protein, 117 aa, Artificial Sequence
  source: /note="Description of Artificial Sequence: Synthetic polypeptide"
EVQLLESGGGLVQPGGSLRLSCAASGFTFSSYAMSWVRQAPGKGLEWVSAISGSGGSTYYADSVKGRFTISRDNSKNTLYLQMNSLRAEDTAVYYCAKLGGHSMDVWGQGTTVTVSS

SEQ ID NO: 4516 - protein, 118 aa, Artificial Sequence
  source: /note="Description of Artificial Sequence: Synthetic polypeptide"
EVQLLESGGGLVQPGGSLRLSCAASGFTFSSYAMSWVRQAPGKGLEWVSAISGSGGSTYYADSVKGRFTISRDNSKNTLYLQMNSLRAEDTAVYYCAKPLKRGRGFYWGQGTLVTVSS

SEQ ID NO: 4517 - protein, 124 aa, Artificial Sequence
  source: /note="Description of Artificial Sequence: Synthetic polypeptide"
EVQLLESGGGLVQPGGSLRLSCAASGFTFSSYAMSWVRQAPGKGLEWVSAISGSGGSTYYADSVKGRFTISRDNSKNTLYLQMNSLRAEDTAVYYCARLGGAVGARHVTYFDYWGQGTLVTVSS

SEQ ID NO: 4518 - protein, 119 aa, Artificial Sequence
  source: /note="Description of Artificial Sequence: Synthetic polypeptide"
EVQLLESGGGLVQPGGSLRLSCAASGFTFSSYAMSWVRQAPGKGLEWVSAISGSGGSTYYADSVKGRFTISRDNSKNTLYLQMNSLRAEDTAVYYCARLGQEYAYFQHWGQGTLVTVSS

SEQ ID NO: 4519 - protein, 122 aa, Artificial Sequence
  source: /note="Description of Artificial Sequence: Synthetic polypeptide"
EVQLLESGGGLVQPGGSLRLSCAASGFTFSSYAMSWVRQAPGKGLEWVSAISGSGGSTYYADSVKGRFTISRDNSKNTLYLQMNSLRAEDTAVYYCARTRSGYGASNYFDYWGQGTLVTVSS

SEQ ID NO: 4520 - protein, 119 aa, Artificial Sequence
  source: /note="Description of Artificial Sequence: Synthetic polypeptide"
EVQLLESGGGLVQPGGSLRLSCAASGFTFSSYAMSWVRQAPGKGLEWVSAISGSGGSTYYADSVKGRFTISRDNSKNTLYLQMNSLRAEDTAVYYCARVGQYMLGMDVWGQGTTVTVSS

SEQ ID NO: 4521 - protein, 119 aa, Artificial Sequence
  source: /note="Description of Artificial Sequence: Synthetic polypeptide"
EVQLLESGGGLVQPGGSLRLSCAASGFTFSSYAMSWVRQAPGKGLEWVSAISGSGGSTYYADSVKGRFTISRDNSKNTLYLQMNSLRAEDTAVYYCARVPKHYVVLDYWGQGTLVTVSS

SEQ ID NO: 4522 - protein, 117 aa, Artificial Sequence
  source: /note="Description of Artificial Sequence: Synthetic polypeptide"
EVQLLESGGGLVQPGGSLRLSCAASGFTFSSYAMSWVRQAPGKGLEWVSVISGSGGSTYYADSVKGRFTISRDNSKNTLYLQMNSLRAEDTAVYYCAKDQYSVLDYWGQGTLVTVSS

SEQ ID NO: 4523 - protein, 117 aa, Artificial Sequence
  source: /note="Description of Artificial Sequence: Synthetic polypeptide"
EVQLLESGGGLVQPGGSLRLSCAASGFTFSSYAMSWVRQAPGKGLEWVSVISGSGGSTYYADSVKGRFTISRDNSKNTLYLQMNSLRAEDTAVYYCAKEGRTITMDWGQGTLVTVSS

SEQ ID NO: 4524 - protein, 118 aa, Artificial Sequence
  source: /note="Description of Artificial Sequence: Synthetic polypeptide"
EVQLLESGGGLVQPGGSLRLSCAASGFTFSSYAMSWVRQAPGKGLEWVSVISGSGGSTYYADSVKGRFTISRDNSKNTLYLQMNSLRAEDTAVYYCAKGTPTLLFQHWGQGTLVTVSS

SEQ ID NO: 4525 - protein, 120 aa, Artificial Sequence
  source: /note="Description of Artificial Sequence: Synthetic polypeptide"
EVQLLESGGGLVQPGGSLRLSCAASGFTFSTYAMSWVRQAPGKGLEWVSAISGSGGSTYYADSVKGRFTISRDNSKNTLYLQMNSLRAEDTAVYYCARAMARKSVAFDIWGQGTMVTVSS

SEQ ID NO: 4526 - protein, 119 aa, Artificial Sequence
  source: /note="Description of Artificial Sequence: Synthetic polypeptide"
EVQLLESGGGLVQPGGSLRLSCAASGFTLSSYAMSWVRQAPGKGLEWVASISRGGSTYYPDSVKGRFTISRDNSKNTLYLQMNSLRAEDTAVYYCTRGYGYYRTPFANWGQGTLVTVSS

SEQ ID NO: 4527 - protein, 121 aa, Artificial Sequence
  source: /note="Description of Artificial Sequence: Synthetic polypeptide"
EVQLLESGGGLVQPGGSLRLSCAASGLTSNTYTQTWVRQAPGKGLEWESVIRSKSNNFSTLYADSVKGRFTISRDNSKNTLYLQMNSLRAEDTAVYYCVRHKSNRYPGVYWGQGTLVTVSS

SEQ ID NO: 4528 - protein, 126 aa, Artificial Sequence
  source: /note="Description of Artificial Sequence: Synthetic polypeptide"
EVQLLESGGGLVQPGGSLRLSCAASGYAFSNYWMSWVRQAPGKGLEWIGQIYPGDGDTKYNDSVKGRFTISRDNSKNTLYLQMNSLRAEDTAVYYCSREKGADYYGSTYSAWFSYWGQGTLVTVSS

SEQ ID NO: 4529 - protein, 123 aa, Artificial Sequence
  source: /note="Description of Artificial Sequence: Synthetic polypeptide"
EVQLLESGGGLVQPGGSLRLSCAASGYAFSSSWMNWVRQAPGKGLEWIGRIYPGDGDTNYAQKFQGRATISADTSKNTAYLQMNSLRAEDTAVYYCARLLRNQPGESYAMDYWGQGTLVTVSS

SEQ ID NO: 4530 - protein, 123 aa, Artificial Sequence
  source: /note="Description of Artificial Sequence: Synthetic polypeptide"
EVQLLESGGGLVQPGGSLRLSCAASGYAFSSSWMNWVRQAPGKGLEWIGRIYPGDGDTNYNDSVKGRFTISRDNSKNTLYLQMNSLRAEDTAVYYCARLLRNQPGESYAMDYWGQGTLVTVSS

SEQ ID NO: 4531 - protein, 116 aa, Artificial Sequence
  source: /note="Description of Artificial Sequence: Synthetic polypeptide"
EVQLLESGGGLVQPGGSLRLSCAASGYIFTTYWIHWVRQAPGKGLEWIGRIDPNNGDTNYNDSVKGRFTISRDNSKNTLYLQMNSLRAEDTAVYYCVMTGTDFDYWGQGTLVTVSS

SEQ ID NO: 4532 - protein, 120 aa, Artificial Sequence
  source: /note="Description of Artificial Sequence: Synthetic polypeptide"
EVQLLESGGGLVQPGGSLRLSCAASGYPFSNFWITWVRQAPGKGLEWIGDIYPGSDNRNFNDSVKGRFTISRDNSKNTLYLQMNSLRAEDTAVYYCAREAYYTNPGFAYWGQGTLVTVSS

SEQ ID NO: 4533 - protein, 120 aa, Artificial Sequence
  source: /note="Description of Artificial Sequence: Synthetic polypeptide"
EVQLLESGGGLVQPGGSLRLSCAASGYPFSNFWITWVRQAPGKGLEWIGDIYPGSDNSNYNDSVKGRFTISRDNSKNTLYLQMNSLRAEDTAVYYCAREAYYTNPGFAYWGQGTLVTVSS

SEQ ID NO: 4534 - protein, 116 aa, Artificial Sequence
  source: /note="Description of Artificial Sequence: Synthetic polypeptide"
EVQLLESGGGLVQPGGSLRLSCAASGYSFTGYYMHWVRQAPGKGLEWIGRVNPNNGGTSYNDSVKGRFTISRDNSKNTLYLQMNSLRAEDTAVYYCVLTGGYFDYWGQGTLVTVSS

SEQ ID NO: 4535 - protein, 119 aa, Artificial Sequence
  source: /note="Description of Artificial Sequence: Synthetic polypeptide"
EVQLLESGGGLVQPGGSLRLSCAASGYTFSDYYIHWVRQAPGKGLEWIGYIYPNNGDNGYNDSVKGRFTISRDNSKNTLYLQMNSLRAEDTAVYYCARRGYYGGSYDYWGQGTLVTVSS

SEQ ID NO: 4536 - protein, 125 aa, Artificial Sequence
  source: /note="Description of Artificial Sequence: Synthetic polypeptide"
EVQLLESGGGLVQPGGSLRLSCAASGYTFTDYEMHWVRQAPGKGLEWIGVIDPETGGTAYNDSVKGRFTISRDNSKNTLYLQMNSLRAEDTAVYYCTSPDYYGSSYPLYYAMDYWGQGTLVTVSS

SEQ ID NO: 4537 - protein, 119 aa, Artificial Sequence
  source: /note="Description of Artificial Sequence: Synthetic polypeptide"
EVQLLESGGGLVQPGGSLRLSCAASGYTFTEYTMHWVRQAPGKGLEWIGGINPNNGGTSYKDSVKGRFTISRDNSKNTLYLQMNSLRAEDTAVYYCARGGSHYYAMDYWGQGTLVTVSS

SEQ ID NO: 4538 - protein, 119 aa, Artificial Sequence
  source: /note="Description of Artificial Sequence: Synthetic polypeptide"
EVQLLESGGGLVQPGGSLRLSCAASGYTFTEYTMHWVRQAPGKGLEWIGGINPNNGGTSYSDSVKGRFTISRDNSKNTLYLQMNSLRAEDTAVYYCARGGSHYYAMDYWGQGTLVTVSS

SEQ ID NO: 4539 - protein, 116 aa, Artificial Sequence
  source: /note="Description of Artificial Sequence: Synthetic polypeptide"
EVQLLESGGGLVQPGGSLRLSCAASGYTFTTYWIHWVRQAPGKGLEWIGRNDPNSGGSNYNDSVKGRFTISRDNSKNTLYLQMNSLRAEDTAVYYCVRTNWDGDFWGQGTLVTVSS

SEQ ID NO: 4540 - protein, 116 aa, Artificial Sequence
  source: /note="Description of Artificial Sequence: Synthetic polypeptide"
EVQLLESGGGLVQPGGSLRLSCAASGYTVSRYWMHWVRQAPGKGLEWIGRIDPNSGGTKYNDSVKGRFTISRDNSKNTLYLQMNSLRAEDTAVYYCVLTGTDFDYWGQGTLVTVSS

SEQ ID NO: 4541 - protein, 126 aa, Artificial Sequence
  source: /note="Description of Artificial Sequence: Synthetic polypeptide"
EVQLQQSGAELVKPGASVKISCKASGYAFSNYWMSWVKQRPGKGLEWIGQIYPGDGDTKYNGKFEGKATLTADKSSSTAYMQLSSLTSEDSAVYFCSREKGADYYGSTYSAWFSYWGQGTLVTVSA

SEQ ID NO: 4542 - protein, 119 aa, Artificial Sequence
  source: /note="Description of Artificial Sequence: Synthetic polypeptide"
EVQLQQSGPELVKPGTSVKISCKTSGYTFTEYTMHWVKQSHGKSLEWIGGINPNNGGTSYSQKFKGKASLTVDKSSSTAYMELHSLASDDSAVYYCARGGSHYYAMDYWGQGTSVTVSS

SEQ ID NO: 4543 - protein, 117 aa, Artificial Sequence
  source: /note="Description of Artificial Sequence: Synthetic polypeptide"
EVQLVESGGGLVKPGGSLKLSCEASRFTFSSYAMSWVRQTPEKRLEWVAAISGGGRYTYYPDSMKGRFTISRDNAKNFLYLQMSSLRSEDTAMYYCARHYDGYLDYWGQGTTLTVSS

SEQ ID NO: 4544 - protein, 117 aa, Artificial Sequence
  source: /note="Description of Artificial Sequence: Synthetic polypeptide"
EVQLVESGGGLVKPGGSLKLSCEASRFTFSSYAVSWVRQTPEKRLEWVATISGGGRYTYYPDSMKGRFTISRDNAKNFLYLQMSSLRSEDTAMYYCARHYDGYLDYWGQGTTLTVSS

SEQ ID NO: 4545 - protein, 121 aa, Artificial Sequence
  source: /note="Description of Artificial Sequence: Synthetic polypeptide"
EVQLVESGGGLVKPGGSLRLSCAASGFNFNTYAMKWVRQAPGKGLEWIARIRSNSNDYATNYSAPVKGRFTISRDDSKNTLYLQMNSLKTEDTAVYYCVGHKINNYPFAHWGQGTLVTVSS

SEQ ID NO: 4546 - protein, 122 aa, Artificial Sequence
  source: /note="Description of Artificial Sequence: Synthetic polypeptide"
EVQLVESGGGLVKPGGSLRLSCAASGFNFNTYAMNWVRQAPGKGLEWVARIRSKSNNYATYYAAPVKGRFTISRDDSKNTLYLQMNSLKTEDTAVYYCVRHYSNYGWGFAYWGQGTLVTVSS

SEQ ID NO: 4547 - protein, 121 aa, Artificial Sequence
  source: /note="Description of Artificial Sequence: Synthetic polypeptide"
EVQLVESGGGLVKPGGSLRLSCAASGFRFNTYAMTWVRQAPGKGLEWEGVIRRKSSNFATLYAAPVKGRFTISRDDSKNTLYLQMNSLKTEDTAVYYCVRHKSNKYPFVYWGQGTLVTVSS

SEQ ID NO: 4548 - protein, 122 aa, Artificial Sequence
  source: /note="Description of Artificial Sequence: Synthetic polypeptide"
EVQLVESGGGLVKPGGSLRLSCAASGFSFNTYAMNWVRQAPGKGLEWIARIRSKSNNYATYYAAPVKGRFTISRDDSKNTLYLQMNSLKTEDTAVYYCVRHGDGNLWYIDVWGQGTLVTVSS

SEQ ID NO: 4549 - protein, 121 aa, Artificial Sequence
  source: /note="Description of Artificial Sequence: Synthetic polypeptide"
  VARIANT (55)..(55): /replace="Gln"
  VARIANT (100)..(100): /replace="Gln"
  VARIANT (102)..(102): /replace="Gln"
  SITE (1)..(121): /note="Variant residues given in the sequence have no preference with respect to those in the annotations for variant positions"
EVQLVESGGGLVKPGGSLRLSCAASGFTFNTYSMNWVRQAPGKGLEWVAHIKTKENNFATFYAAPVKGRFTISRDDSKNTLYLQMNSLKTEDTAVYYCVEHESNNYPFAYWGQGTLVTVSS

SEQ ID NO: 4550 - protein, 122 aa, Artificial Sequence
  source: /note="Description of Artificial Sequence: Synthetic polypeptide"
EVQLVESGGGLVKPGGSLRLSCAASGFTFSDAWMDWVRQAPGKGLEWVAEIRNKINNHATYYAAPVKGRFTISRDDSKNTLYLQMNSLKTEDTAVYYCTSLYDGSYLRFAYWGQGTLVTVSS

SEQ ID NO: 4551 - protein, 122 aa, Artificial Sequence
  source: /note="Description of Artificial Sequence: Synthetic polypeptide"
EVQLVESGGGLVKPGGSLRLSCAASGFTFSDAWMDWVRQAPGKGLEWWVAEIRNKVNNHATYYAPVKGRFTISRDDSKNTLYLQMNSLKTEDTAVYYCCTSLYDGYYLRFAWGQGTLVTVSS

SEQ ID NO: 4552 - protein, 116 aa, Artificial Sequence
  source: /note="Description of Artificial Sequence: Synthetic polypeptide"
EVQLVESGGGLVKPGGSLRLSCAASGFTFSDAWMGWVRQAPGKGLEWVAEIRDKVKNHATYYAAPVKGRFTISRDDSKNTLYLQMNSLKTEDTAVYYCRLGVFDYWGQGTLVTVSS

SEQ ID NO: 4553 - protein, 122 aa, Artificial Sequence
  source: /note="Description of Artificial Sequence: Synthetic polypeptide"
EVQLVESGGGLVKPGGSLRLSCAASGFTFSSYSMNWVRQAPGKGLEWVSSISSSSSYIYYADSVKGRFTISRDNAKNSLYLQMNSLRAEDTAVYYCARGGGRRGDNNWFDPWGQGTLVTVSS

SEQ ID NO: 4554 - protein, 121 aa, Artificial Sequence
  source: /note="Description of Artificial Sequence: Synthetic polypeptide"
EVQLVESGGGLVKPGGSLRLSCAASGLTSNTYTQTWVRQAPGKGLEWESVIRSKSNNFSTLYAAPVKGRFTISRDDSKNTLYLQMNSLKTEDTAVYYCVRHKSNRYPGVYWGQGTLVTVSS

SEQ ID NO: 4555 - protein, 126 aa, Artificial Sequence
  source: /note="Description of Artificial Sequence: Synthetic polypeptide"
EVQLVESGGGLVKPGGSLRLSCAASGYAFSNYWMSWVRQAPGKGLEWIGQIYPGDGDTKYNAPVKGRFTISRDDSKNTLYLQMNSLKTEDTAVYYCSREKGADYYGSTYSAWFSYWGQGTLVTVSS

SEQ ID NO: 4556 - protein, 123 aa, Artificial Sequence
  source: /note="Description of Artificial Sequence: Synthetic polypeptide"
EVQLVESGGGLVKPGGSLRLSCAASGYAFSSSWMNWVRQAPGKGLEWIGRIYPGDGDTNYNAPVKGRFTISRDDSKNTLYLQMNSLKTEDTAVYYCARLLRNQPGESYAMDYWGQGTLVTVSS

SEQ ID NO: 4557 - protein, 116 aa, Artificial Sequence
  source: /note="Description of Artificial Sequence: Synthetic polypeptide"
EVQLVESGGGLVKPGGSLRLSCAASGYIFTTYWIHWVRQAPGKGLEWIGRIDPNNGDTNYNAPVKGRFTISRDDSKNTLYLQMNSLKTEDTAVYYCVMTGTDFDYWGQGTLVTVSS

SEQ ID NO: 4558 - protein, 120 aa, Artificial Sequence
  source: /note="Description of Artificial Sequence: Synthetic polypeptide"
EVQLVESGGGLVKPGGSLRLSCAASGYPFSNFWITWVRQAPGKGLEWIGDIYPGSDNRNFNAPVKGRFTISRDDSKNTLYLQMNSLKTEDTAVYYCAREAYYTNPGFAYWGQGTLVTVSS

SEQ ID NO: 4559 - protein, 120 aa, Artificial Sequence
  source: /note="Description of Artificial Sequence: Synthetic polypeptide"
EVQLVESGGGLVKPGGSLRLSCAASGYPFSNFWITWVRQAPGKGLEWIGDIYPGSDNSNYNAPVKGRFTISRDDSKNTLYLQMNSLKTEDTAVYYCAREAYYTNPGFAYWGQGTLVTVSS

SEQ ID NO: 4560 - protein, 116 aa, Artificial Sequence
  source: /note="Description of Artificial Sequence: Synthetic polypeptide"
EVQLVESGGGLVKPGGSLRLSCAASGYSFTGYYMHWVRQAPGKGLEWIGRVNPNNGGTSYNAPVKGRFTISRDDSKNTLYLQMNSLKTEDTAVYYCVLTGGYFDYWGQGTLVTVSS

SEQ ID NO: 4561 - protein, 119 aa, Artificial Sequence
  source: /note="Description of Artificial Sequence: Synthetic polypeptide"
EVQLVESGGGLVKPGGSLRLSCAASGYTFSDYYIHWVRQAPGKGLEWIGYIYPNNGDNGYNAPVKGRFTISRDDSKNTLYLQMNSLKTEDTAVYYCARRGYYGGSYDYWGQGTLVTVSS

SEQ ID NO: 4562 - protein, 125 aa, Artificial Sequence
  source: /note="Description of Artificial Sequence: Synthetic polypeptide"
EVQLVESGGGLVKPGGSLRLSCAASGYTFTDYEMHWVRQAPGKGLEWIGVIDPETGGTAYNAPVKGRFTISRDDSKNTLYLQMNSLKTEDTAVYYCTSPDYYGSSYPLYYAMDYWGQGTLVTVSS

SEQ ID NO: 4563 - protein, 119 aa, Artificial Sequence
  source: /note="Description of Artificial Sequence: Synthetic polypeptide"
EVQLVESGGGLVKPGGSLRLSCAASGYTFTEYTMHWVRQAPGKGLEWIGGINPNNGGTSYKAPVKGRFTISRDDSKNTLYLQMNSLKTEDTAVYYCARGGSHYYAMDYWGQGTLVTVSS

SEQ ID NO: 4564 - protein, 119 aa, Artificial Sequence
  source: /note="Description of Artificial Sequence: Synthetic polypeptide"
EVQLVESGGGLVKPGGSLRLSCAASGYTFTEYTMHWVRQAPGKGLEWIGGINPNNGGTSYSAPVKGRFTISRDDSKNTLYLQMNSLKTEDTAVYYCARGGSHYYAMDYWGQGTLVTVSS

SEQ ID NO: 4565 - protein, 116 aa, Artificial Sequence
  source: /note="Description of Artificial Sequence: Synthetic polypeptide"
EVQLVESGGGLVKPGGSLRLSCAASGYTFTTYWIHWVRQAPGKGLEWIGRNDPNSGGSNYNAPVKGRFTISRDDSKNTLYLQMNSLKTEDTAVYYCVRTNWDGDFWGQGTLVTVSS

SEQ ID NO: 4566 - protein, 116 aa, Artificial Sequence
  source: /note="Description of Artificial Sequence: Synthetic polypeptide"
EVQLVESGGGLVKPGGSLRLSCAASGYTVSRYWMHWVRQAPGKGLEWIGRIDPNSGGTKYNAPVKGRFTISRDDSKNTLYLQMNSLKTEDTAVYYCVLTGTDFDYWGQGTLVTVSS

SEQ ID NO: 4567 - protein, 121 aa, Artificial Sequence
  source: /note="Description of Artificial Sequence: Synthetic polypeptide"
EVQLVESGGGLVQPGGSLRLSCAASGFNFNTYAMKWVRQAPGKGLEWIARIRSNSNDYATNYSDSVKGRFTISRDNAKNSLYLQMNSLRAEDTAVYYCVGHKINNYPFAHWGQGTLVTVSS

SEQ ID NO: 4568 - protein, 122 aa, Artificial Sequence
  source: /note="Description of Artificial Sequence: Synthetic polypeptide"
EVQLVESGGGLVQPGGSLRLSCAASGFNFNTYAMNWVRQAPGKGLEWVARIRSKSNNYATYYADSVKGRFTISRDNAKNSLYLQMNSLRAEDTAVYYCVRHYSNYGWGFAYWGQGTLVTVSS

SEQ ID NO: 4569 - protein, 121 aa, Artificial Sequence
  source: /note="Description of Artificial Sequence: Synthetic polypeptide"
EVQLVESGGGLVQPGGSLRLSCAASGFRFNTYAMTWVRQAPGKGLEWEGVIRRKSSNFATLYADSVKGRFTISRDNAKNSLYLQMNSLRAEDTAVYYCVRHKSNKYPFVYWGQGTLVTVSS

SEQ ID NO: 4570 - protein, 122 aa, Artificial Sequence
  source: /note="Description of Artificial Sequence: Synthetic polypeptide"
EVQLVESGGGLVQPGGSLRLSCAASGFSFNTYAMNWVRQAPGKGLEWIARIRSKSNNYATYYADSVKGRFTISRDNAKNSLYLQMNSLRAEDTAVYYCVRHGDGNLWYIDVWGQGTLVTVSS

SEQ ID NO: 4571 - protein, 121 aa, Artificial Sequence
  source: /note="Description of Artificial Sequence: Synthetic polypeptide"
  VARIANT (55)..(55): /replace="Gln"
  VARIANT (100)..(100): /replace="Gln"
  VARIANT (102)..(102): /replace="Gln"
  SITE (1)..(121): /note="Variant residues given in the sequence have no preference with respect to those in the annotations for variant positions"
EVQLVESGGGLVQPGGSLRLSCAASGFTFNTYSMNWVRQAPGKGLEWVAHIKTKENNFATFYADSVKGRFTISRDNAKNSLYLQMNSLRAEDTAVYYCVEHESNNYPFAYWGQGTLVTVSS

SEQ ID NO: 4572 - protein, 122 aa, Artificial Sequence
  source: /note="Description of Artificial Sequence: Synthetic polypeptide"
EVQLVESGGGLVQPGGSLRLSCAASGFTFSDAWMDWVRQAPGKGLEWVAEIRNKINNHATYYADSVKGRFTISRDNAKNSLYLQMNSLRAEDTAVYYCTSLYDGSYLRFAYWGQGTLVTVSS

SEQ ID NO: 4573 - protein, 122 aa, Artificial Sequence
  source: /note="Description of Artificial Sequence: Synthetic polypeptide"
EVQLVESGGGLVQPGGSLRLSCAASGFTFSDAWMDWVRQAPGKGLEWWVAEIRNKVNNHATYYDSVKGRFTISRDNAKNSLYLQMNSLRAEDTAVYYCCTSLYDGYYLRFAWGQGTLVTVSS

SEQ ID NO: 4574 - protein, 116 aa, Artificial Sequence
  source: /note="Description of Artificial Sequence: Synthetic polypeptide"
EVQLVESGGGLVQPGGSLRLSCAASGFTFSDAWMGWVRQAPGKGLEWVAEIRDKVKNHATYYADSVKGRFTISRDNAKNSLYLQMNSLRAEDTAVYYCRLGVFDYWGQGTLVTVSS

SEQ ID NO: 4575 - protein, 120 aa, Artificial Sequence
  source: /note="Description of Artificial Sequence: Synthetic polypeptide"
EVQLVESGGGLVQPGGSLRLSCAASGFTFSSYSMNWVRQAPGKGLEWVSYISGSSSTIYYADSVKGRFTISRDNAKNSLYLQMNSLRAEDTAVYYCARGGRRHYGGMDVWGQGTTVTVSS

SEQ ID NO: 4576 - protein, 119 aa, Artificial Sequence
  source: /note="Description of Artificial Sequence: Synthetic polypeptide"
EVQLVESGGGLVQPGGSLRLSCAASGFTLSSYAMSWVRQAPGKGLEWVASISRGGSTYYPDSVKGRFTISRDNAKNSLYLQMNSLRAEDTAVYYCTRGYGYYRTPFANWGQGTLVTVSS

SEQ ID NO: 4577 - protein, 121 aa, Artificial Sequence
  source: /note="Description of Artificial Sequence: Synthetic polypeptide"
EVQLVESGGGLVQPGGSLRLSCAASGLTSNTYTQTWVRQAPGKGLEWESVIRSKSNNFSTLYADSVKGRFTISRDNAKNSLYLQMNSLRAEDTAVYYCVRHKSNRYPGVYWGQGTLVTVSS

SEQ ID NO: 4578 - protein, 126 aa, Artificial Sequence
  source: /note="Description of Artificial Sequence: Synthetic polypeptide"
EVQLVESGGGLVQPGGSLRLSCAASGYAFSNYWMSWVRQAPGKGLEWIGQIYPGDGDTKYNDSVKGRFTISRDNAKNSLYLQMNSLRAEDTAVYYCSREKGADYYGSTYSAWFSYWGQGTLVTVSS

SEQ ID NO: 4579 - protein, 123 aa, Artificial Sequence
  source: /note="Description of Artificial Sequence: Synthetic polypeptide"
EVQLVESGGGLVQPGGSLRLSCAASGYAFSSSWMNWVRQAPGKGLEWIGRIYPGDGDTNYNDSVKGRFTISRDNAKNSLYLQMNSLRAEDTAVYYCARLLRNQPGESYAMDYWGQGTLVTVSS

SEQ ID NO: 4580 - protein, 116 aa, Artificial Sequence
  source: /note="Description of Artificial Sequence: Synthetic polypeptide"
EVQLVESGGGLVQPGGSLRLSCAASGYIFTTYWIHWVRQAPGKGLEWIGRIDPNNGDTNYNDSVKGRFTISRDNAKNSLYLQMNSLRAEDTAVYYCVMTGTDFDYWGQGTLVTVSS

SEQ ID NO: 4581 - protein, 120 aa, Artificial Sequence
  source: /note="Description of Artificial Sequence: Synthetic polypeptide"
EVQLVESGGGLVQPGGSLRLSCAASGYPFSNFWITWVRQAPGKGLEWIGDIYPGSDNRNFNDSVKGRFTISRDNAKNSLYLQMNSLRAEDTAVYYCAREAYYTNPGFAYWGQGTLVTVSS

SEQ ID NO: 4582 - protein, 120 aa, Artificial Sequence
  source: /note="Description of Artificial Sequence: Synthetic polypeptide"
EVQLVESGGGLVQPGGSLRLSCAASGYPFSNFWITWVRQAPGKGLEWIGDIYPGSDNSNYNDSVKGRFTISRDNAKNSLYLQMNSLRAEDTAVYYCAREAYYTNPGFAYWGQGTLVTVSS

SEQ ID NO: 4583 - protein, 116 aa, Artificial Sequence
  source: /note="Description of Artificial Sequence: Synthetic polypeptide"
EVQLVESGGGLVQPGGSLRLSCAASGYSFTGYYMHWVRQAPGKGLEWIGRVNPNNGGTSYNDSVKGRFTISRDNAKNSLYLQMNSLRAEDTAVYYCVLTGGYFDYWGQGTLVTVSS

SEQ ID NO: 4584 - protein, 119 aa, Artificial Sequence
  source: /note="Description of Artificial Sequence: Synthetic polypeptide"
EVQLVESGGGLVQPGGSLRLSCAASGYTFSDYYIHWVRQAPGKGLEWIGYIYPNNGDNGYNDSVKGRFTISRDNAKNSLYLQMNSLRAEDTAVYYCARRGYYGGSYDYWGQGTLVTVSS

SEQ ID NO: 4585 - protein, 125 aa, Artificial Sequence
  source: /note="Description of Artificial Sequence: Synthetic polypeptide"
EVQLVESGGGLVQPGGSLRLSCAASGYTFTDYEMHWVRQAPGKGLEWIGVIDPETGGTAYNDSVKGRFTISRDNAKNSLYLQMNSLRAEDTAVYYCTSPDYYGSSYPLYYAMDYWGQGTLVTVSS

SEQ ID NO: 4586 - protein, 119 aa, Artificial Sequence
  source: /note="Description of Artificial Sequence: Synthetic polypeptide"
EVQLVESGGGLVQPGGSLRLSCAASGYTFTEYTMHWVRQAPGKGLEWIGGINPNNGGTSYKDSVKGRFTISRDNAKNSLYLQMNSLRAEDTAVYYCARGGSHYYAMDYWGQGTLVTVSS

SEQ ID NO: 4587 - protein, 119 aa, Artificial Sequence
  source: /note="Description of Artificial Sequence: Synthetic polypeptide"
EVQLVESGGGLVQPGGSLRLSCAASGYTFTEYTMHWVRQAPGKGLEWIGGINPNNGGTSYSDSVKGRFTISRDNAKNSLYLQMNSLRAEDTAVYYCARGGSHYYAMDYWGQGTLVTVSS

SEQ ID NO: 4588 - protein, 116 aa, Artificial Sequence
  source: /note="Description of Artificial Sequence: Synthetic polypeptide"
EVQLVESGGGLVQPGGSLRLSCAASGYTFTTYWIHWVRQAPGKGLEWIGRNDPNSGGSNYNDSVKGRFTISRDNAKNSLYLQMNSLRAEDTAVYYCVRTNWDGDFWGQGTLVTVSS

SEQ ID NO: 4589 - protein, 116 aa, Artificial Sequence
  source: /note="Description of Artificial Sequence: Synthetic polypeptide"
EVQLVESGGGLVQPGGSLRLSCAASGYTVSRYWMHWVRQAPGKGLEWIGRIDPNSGGTKYNDSVKGRFTISRDNAKNSLYLQMNSLRAEDTAVYYCVLTGTDFDYWGQGTLVTVSS

SEQ ID NO: 4590 - protein, 117 aa, Artificial Sequence
  source: /note="Description of Artificial Sequence: Synthetic polypeptide"
EVQLVESGGGLVQPKGSLKLSCAAFGFNFNTYAMKWVRQTPGKGLEWIARIRSNSNDYATNYSDSVKDRFTISRDDSESIVYVQMNNLKTEDTGMYSCVGHKINNYPFAHWGRGTLV

SEQ ID NO: 4591 - protein, 122 aa, Artificial Sequence
  source: /note="Description of Artificial Sequence: Synthetic polypeptide"
EVQLVESGGGLVQPKGSLKLSCAASGFSFNTYAMNWVRQAPGKGLEWIARIRSKSNNYATYYADSVKDRFTCSRDDSENMFYLQLSSLKTEDTAMYYCVRHGDGNLWYIDVWGTGTTVTVSS

SEQ ID NO: 4592 - protein, 122 aa, Artificial Sequence
  source: /note="Description of Artificial Sequence: Synthetic polypeptide"
EVQLVESGGGLVQPKGSLKLSCAASGFSFNTYAMNWVRQAPGKGLEWIARIRSKSNNYATYYADSVKDRITCSRDDSENMFYLQLSSLKTEDTAMYYCVRHGDGNLWYIDVWGTGTTVTVST

SEQ ID NO: 4593 - protein, 122 aa, Artificial Sequence
  source: /note="Description of Artificial Sequence: Synthetic polypeptide"
EVQLVESGGRLVQPKGSLKLSCAASGFNFNTYAMNWVRQAPGKGLEWVARIRSKSNNYATYYADSVKDRFTISRDDSESMLYLQMNNLKTEDTAMYYCVRHYSNYGWGFAYWGQGTLVTVSA

SEQ ID NO: 4594 - protein, 121 aa, Artificial Sequence
  source: /note="Description of Artificial Sequence: Synthetic polypeptide"
EVQLVQSGAEVKKPGESLKISCKGSGFNFNTYAMKWVRQMPGKGLEWIARIRSNSNDYATNYSPSFQGQVTISADKSISTAYLQWSSLKASDTAMYYCVGHKINNYPFAHWGQGTLVTVSS

SEQ ID NO: 4595 - protein, 122 aa, Artificial Sequence
  source: /note="Description of Artificial Sequence: Synthetic polypeptide"
EVQLVQSGAEVKKPGESLKISCKGSGFNFNTYAMNWVRQMPGKGLEWVARIRSKSNNYATYYAPSFQGQVTISADKSISTAYLQWSSLKASDTAMYYCVRHYSNYGWGFAYWGQGTLVTVSS

SEQ ID NO: 4596 - protein, 121 aa, Artificial Sequence
  source: /note="Description of Artificial Sequence: Synthetic polypeptide"
EVQLVQSGAEVKKPGESLKISCKGSGFRFNTYAMTWVRQMPGKGLEWEGVIRRKSSNFATLYAPSFQGQVTISADKSISTAYLQWSSLKASDTAMYYCVRHKSNKYPFVYWGQGTLVTVSS

SEQ ID NO: 4597 - protein, 122 aa, Artificial Sequence
  source: /note="Description of Artificial Sequence: Synthetic polypeptide"
EVQLVQSGAEVKKPGESLKISCKGSGFSFNTYAMNWVRQMPGKGLEWIARIRSKSNNYATYYAPSFQGQVTISADKSISTAYLQWSSLKASDTAMYYCVRHGDGNLWYIDVWGQGTLVTVSS

SEQ ID NO: 4598 - protein, 121 aa, Artificial Sequence
  source: /note="Description of Artificial Sequence: Synthetic polypeptide"
  VARIANT (55)..(55): /replace="Gln"
  VARIANT (100)..(100): /replace="Gln"
  VARIANT (102)..(102): /replace="Gln"
  SITE (1)..(121): /note="Variant residues given in the sequence have no preference with respect to those in the annotations for variant positions"
EVQLVQSGAEVKKPGESLKISCKGSGFTFNTYSMNWVRQMPGKGLEWVAHIKTKENNFATFYAPSFQGQVTISADKSISTAYLQWSSLKASDTAMYYCVEHESNNYPFAYWGQGTLVTVSS

SEQ ID NO: 4599 - protein, 122 aa, Artificial Sequence
  source: /note="Description of Artificial Sequence: Synthetic polypeptide"
EVQLVQSGAEVKKPGESLKISCKGSGFTFSDAWMDWVRQMPGKGLEWVAEIRNKINNHATYYAPSFQGQVTISADKSISTAYLQWSSLKASDTAMYYCTSLYDGSYLRFAYWGQGTLVTVSS

SEQ ID NO: 4600 - protein, 122 aa, Artificial Sequence
  source: /note="Description of Artificial Sequence: Synthetic polypeptide"
EVQLVQSGAEVKKPGESLKISCKGSGFTFSDAWMDWVRQMPGKGLEWWVAEIRNKVNNHATYYPSFQGQVTISADKSISTAYLQWSSLKASDTAMYYCCTSLYDGYYLRFAWGQGTLVTVSS

SEQ ID NO: 4601 - protein, 116 aa, Artificial Sequence
  source: /note="Description of Artificial Sequence: Synthetic polypeptide"
EVQLVQSGAEVKKPGESLKISCKGSGFTFSDAWMGWVRQMPGKGLEWVAEIRDKVKNHATYYAPSFQGQVTISADKSISTAYLQWSSLKASDTAMYYCRLGVFDYWGQGTLVTVSS

SEQ ID NO: 4602 - protein, 119 aa, Artificial Sequence
  source: /note="Description of Artificial Sequence: Synthetic polypeptide"
EVQLVQSGAEVKKPGESLKISCKGSGFTLSSYAMSWVRQMPGKGLEWVASISRGGSTYYPPSFQGQVTISADKSISTAYLQWSSLKASDTAMYYCTRGYGYYRTPFANWGQGTLVTVSS

SEQ ID NO: 4603 - protein, 121 aa, Artificial Sequence
  source: /note="Description of Artificial Sequence: Synthetic polypeptide"
EVQLVQSGAEVKKPGESLKISCKGSGLTSNTYTQTWVRQMPGKGLEWESVIRSKSNNFSTLYAPSFQGQVTISADKSISTAYLQWSSLKASDTAMYYCVRHKSNRYPGVYWGQGTLVTVSS

SEQ ID NO: 4604 - protein, 126 aa, Artificial Sequence
  source: /note="Description of Artificial Sequence: Synthetic polypeptide"
EVQLVQSGAEVKKPGESLKISCKGSGYAFSNYWMSWVRQMPGKGLEWIGQIYPGDGDTKYNPSFQGQVTISADKSISTAYLQWSSLKASDTAMYYCSREKGADYYGSTYSAWFSYWGQGTLVTVSS

SEQ ID NO: 4605 - protein, 123 aa, Artificial Sequence
  source: /note="Description of Artificial Sequence: Synthetic polypeptide"
EVQLVQSGAEVKKPGESLKISCKGSGYAFSSSWMNWVRQMPGKGLEWIGRIYPGDGDTNYNPSFQGQVTISADKSISTAYLQWSSLKASDTAMYYCARLLRNQPGESYAMDYWGQGTLVTVSS

SEQ ID NO: 4606 - protein, 116 aa, Artificial Sequence
  source: /note="Description of Artificial Sequence: Synthetic polypeptide"
EVQLVQSGAEVKKPGESLKISCKGSGYIFTTYWIHWVRQMPGKGLEWIGRIDPNNGDTNYNPSFQGQVTISADKSISTAYLQWSSLKASDTAMYYCVMTGTDFDYWGQGTLVTVSS

SEQ ID NO: 4607 - protein, 120 aa, Artificial Sequence
  source: /note="Description of Artificial Sequence: Synthetic polypeptide"
EVQLVQSGAEVKKPGESLKISCKGSGYPFSNFWITWVRQMPGKGLEWIGDIYPGSDNRNFNPSFQGQVTISADKSISTAYLQWSSLKASDTAMYYCAREAYYTNPGFAYWGQGTLVTVSS

SEQ ID NO: 4608 - protein, 120 aa, Artificial Sequence
  source: /note="Description of Artificial Sequence: Synthetic polypeptide"
EVQLVQSGAEVKKPGESLKISCKGSGYPFSNFWITWVRQMPGKGLEWIGDIYPGSDNSNYNPSFQGQVTISADKSISTAYLQWSSLKASDTAMYYCAREAYYTNPGFAYWGQGTLVTVSS

SEQ ID NO: 4609 - protein, 116 aa, Artificial Sequence
  source: /note="Description of Artificial Sequence: Synthetic polypeptide"
EVQLVQSGAEVKKPGESLKISCKGSGYSFTGYYMHWVRQMPGKGLEWIGRVNPNNGGTSYNPSFQGQVTISADKSISTAYLQWSSLKASDTAMYYCVLTGGYFDYWGQGTLVTVSS

SEQ ID NO: 4610 - protein, 122 aa, Artificial Sequence
  source: /note="Description of Artificial Sequence: Synthetic polypeptide"
EVQLVQSGAEVKKPGESLKISCKGSGYSFTSNWIGWVRQMPGKGLEWMGIIYPGDSDTRYSPSFQGQVTISADKSISTAYLQWSSLKASDTAMYYCAREAGYDYGELAFDIWGQGTMVTVSS

SEQ ID NO: 4611 - protein, 123 aa, Artificial Sequence
  source: /note="Description of Artificial Sequence: Synthetic polypeptide"
EVQLVQSGAEVKKPGESLKISCKGSGYSFTSYWIGWVRQMPGKGLEWMGIIYPGDSDTRYSPSFQGQVTISADKSISTAYLQWSSLKASDTAMYYCARAGHYDDWSGLGLDVWGQGTMVTVSS

SEQ ID NO: 4612 - protein, 124 aa, Artificial Sequence
  source: /note="Description of Artificial Sequence: Synthetic polypeptide"
EVQLVQSGAEVKKPGESLKISCKGSGYSFTSYWIGWVRQMPGKGLEWMGIIYPGDSDTRYSPSFQGQVTISADKSISTAYLQWSSLKASDTAMYYCARLGHYSGTVSSYGMDVWGQGTTVTVSS

SEQ ID NO: 4613 - protein, 122 aa, Artificial Sequence
  source: /note="Description of Artificial Sequence: Synthetic polypeptide"
EVQLVQSGAEVKKPGESLKISCKGSGYSFTSYWIGWVRQMPGKGLEWMGIIYPGDSDTRYSPSFQGQVTISADKSISTAYLQWSSLKASDTAMYYCARLGIYSTGATAFDIWGQGTMVTVSS

SEQ ID NO: 4614 - protein, 122 aa, Artificial Sequence
  source: /note="Description of Artificial Sequence: Synthetic polypeptide"
EVQLVQSGAEVKKPGESLKISCKGSGYSFTSYWIGWVRQMPGKGLEWMGIIYPGDSDTRYSPSFQGQVTISADKSISTAYLQWSSLKASDTAMYYCARLGRKPSGSVAFDIWGQGTMVTVSS

SEQ ID NO: 4615 - protein, 122 aa, Artificial Sequence
  source: /note="Description of Artificial Sequence: Synthetic polypeptide"
EVQLVQSGAEVKKPGESLKISCKGSGYSFTSYWIGWVRQMPGKGLEWMGIIYPGDSDTRYSPSFQGQVTISADKSISTAYLQWSSLKASDTAMYYCARLGRWSSGSTAFDIWGQGTMVTVSS

SEQ ID NO: 4616 - protein, 121 aa, Artificial Sequence
  source: /note="Description of Artificial Sequence: Synthetic polypeptide"
EVQLVQSGAEVKKPGESLKISCKGSGYSFTSYWIGWVRQMPGKGLEWMGIIYPGDSDTTYSPSFQGQVTISADKSISTAYLQWSSLKASDTAMYYCARAKMLDDGYAFDIWGQGTMVTVSS

SEQ ID NO: 4617 - protein, 121 aa, Artificial Sequence
  source: /note="Description of Artificial Sequence: Synthetic polypeptide"
EVQLVQSGAEVKKPGESLKISCKGSGYSFTSYWIGWVRQMPGKGLEWMGIIYPGDSDTTYSPSFQGQVTISADKSISTAYLQWSSLKASDTAMYYCARLHISGEVNWFDPWGQGTLVTVSS

SEQ ID NO: 4618 - protein, 122 aa, Artificial Sequence
  source: /note="Description of Artificial Sequence: Synthetic polypeptide"
EVQLVQSGAEVKKPGESLKISCKGSGYSFTTYWIGWVRQMPGKGLEWMGIIYPGDSDTRYSPSFQGQVTISADKSISTAYLQWSSLKASDTAMYYCARAGHYDGGHLGMDVWGQGTTVTVSS

SEQ ID NO: 4619 - protein, 119 aa, Artificial Sequence
  source: /note="Description of Artificial Sequence: Synthetic polypeptide"
EVQLVQSGAEVKKPGESLKISCKGSGYTFSDYYIHWVRQMPGKGLEWIGYIYPNNGDNGYNPSFQGQVTISADKSISTAYLQWSSLKASDTAMYYCARRGYYGGSYDYWGQGTLVTVSS

SEQ ID NO: 4620 - protein, 125 aa, Artificial Sequence
  source: /note="Description of Artificial Sequence: Synthetic polypeptide"
EVQLVQSGAEVKKPGESLKISCKGSGYTFTDYEMHWVRQMPGKGLEWIGVIDPETGGTAYNPSFQGQVTISADKSISTAYLQWSSLKASDTAMYYCTSPDYYGSSYPLYYAMDYWGQGTLVTVSS

SEQ ID NO: 4621 - protein, 119 aa, Artificial Sequence
  source: /note="Description of Artificial Sequence: Synthetic polypeptide"
EVQLVQSGAEVKKPGESLKISCKGSGYTFTEYTMHWVRQMPGKGLEWIGGINPNNGGTSYKPSFQGQVTISADKSISTAYLQWSSLKASDTAMYYCARGGSHYYAMDYWGQGTLVTVSS

SEQ ID NO: 4622 - protein, 119 aa, Artificial Sequence
  source: /note="Description of Artificial Sequence: Synthetic polypeptide"
EVQLVQSGAEVKKPGESLKISCKGSGYTFTEYTMHWVRQMPGKGLEWIGGINPNNGGTSYSPSFQGQVTISADKSISTAYLQWSSLKASDTAMYYCARGGSHYYAMDYWGQGTLVTVSS

SEQ ID NO: 4623 - protein, 116 aa, Artificial Sequence
  source: /note="Description of Artificial Sequence: Synthetic polypeptide"
EVQLVQSGAEVKKPGESLKISCKGSGYTFTTYWIHWVRQMPGKGLEWIGRNDPNSGGSNYNPSFQGQVTISADKSISTAYLQWSSLKASDTAMYYCVRTNWDGDFWGQGTLVTVSS

SEQ ID NO: 4624 - protein, 116 aa, Artificial Sequence
  source: /note="Description of Artificial Sequence: Synthetic polypeptide"
EVQLVQSGAEVKKPGESLKISCKGSGYTVSRYWMHWVRQMPGKGLEWIGRIDPNSGGTKYNPSFQGQVTISADKSISTAYLQWSSLKASDTAMYYCVLTGTDFDYWGQGTLVTVSS

SEQ ID NO: 4625 - protein, 123 aa, Artificial Sequence
  source: /note="Description of Artificial Sequence: Synthetic polypeptide"
EVQLVQSGAEVKKPGSSVKVSCKASGYAFSSDWMNWVRQAPGQGLEWMGRIYPGEGDTNYARKFHGRVTITADESTSTAYMELSSLRSEDTAVYYCARLLRNKPGESYAMDYWGQGTLVTVSS

SEQ ID NO: 4626 - protein, 123 aa, Artificial Sequence
  source: /note="Description of Artificial Sequence: Synthetic polypeptide"
EVQLVQSGAEVKKPGSSVKVSCKASGYAFSSHWMNWVRQAPGQGLEWMGRIYPGEGDTNYAQKFHGRVTITADESTSTAYMELSSLRSEDTAVYYCARLLRNKPGESYAMDYWGQGTLVTVSS

SEQ ID NO: 4627 - protein, 123 aa, Artificial Sequence
  source: /note="Description of Artificial Sequence: Synthetic polypeptide"
EVQLVQSGAEVKKPGSSVKVSCKASGYAFSSHWMNWVRQAPGQGLEWMGRIYPGEGDTNYAQKFHGRVTITADESTSTAYMELSSLRSEDTAVYYCARLLRNQPGESYAMDYWGQGTLVTVSS

SEQ ID NO: 4628 - protein, 123 aa, Artificial Sequence
  source: /note="Description of Artificial Sequence: Synthetic polypeptide"
EVQLVQSGAEVKKPGSSVKVSCKASGYAFSSSWMNWVRQAPGQGLEWMGRIYPGDGDTNYAQKFQGRVTITADESTSTAYMELSSLRSEDTAVYYCARLLRNQPGESYAMDYWGQGTLVTVSS

SEQ ID NO: 4629 - protein, 120 aa, Artificial Sequence
  source: /note="Description of Artificial Sequence: Synthetic polypeptide"
  VARIANT (6)..(7): /replace="Gln"
  VARIANT (11)..(11): /replace="Gln"
  MOD_RES (18)..(18): Any amino acid
  VARIANT (19)..(20): /replace="Gln"
  VARIANT (24)..(24): /replace="Gln"
  VARIANT (72)..(72): /replace="Gln"
  VARIANT (83)..(83): /replace="Gln"
  VARIANT (87)..(88): /replace="Gln"
  VARIANT (90)..(90): /replace="Gln"
  VARIANT (98)..(98): /replace="Gln"
  SITE (1)..(120): /note="Variant residues given in the sequence have no preference with respect to those in the annotations for variant positions"
EVQLVEEGRGESQGKGSXEEGRAERCLTSNTYTQTGVPQGPGKGREWESVIRSKSNNFSTLYADSVKDRFTESRDDSESLFYEQMSEEKEEDTAMYYEVRHKSNRYPGVYWGQGTIVTVS

SEQ ID NO: 4630 - protein, 121 aa, Artificial Sequence
  source: /note="Description of Artificial Sequence: Synthetic polypeptide"
  VARIANT (4)..(4): /replace="Gln"
  VARIANT (88)..(88): /replace="Gln"
  SITE (1)..(121): /note="Variant residues given in the sequence have no preference with respect to those in the annotations for variant positions"
EVQEQQSGPELVKPGASVKISCKASGYTFTDFYMNWVKQSLGKSLEWIGDINPNNGHTTYNQKFKGKATLTVDKSSSTAYMELRSLTEEESAVYYCAREPYSYGSSPWYFLVRGTGTTVTV

SEQ ID NO: 4631 - protein, 126 aa, Artificial Sequence
  source: /note="Description of Artificial Sequence: Synthetic polypeptide"
GVQSEVKFEESGGGLVQPGGSMKLSCTASGFTFSDAWMDWVRQSPEKGLEWVAEIRNKINNHATYYAESVKGRFTISRDDSKSSVSLQMNSLRTEDTGIYYCTSLYDGSYLRFAYWGQGTLVTVSA

SEQ ID NO: 4632 - protein, 102 aa, Artificial Sequence
  source: /note="Description of Artificial Sequence: Synthetic polypeptide"
  VARIANT (36)..(36): /replace="Gln"
  VARIANT (67)..(67): /replace="Gln"
  VARIANT (81)..(81): /replace="Gln"
  VARIANT (83)..(83): /replace="Gln"
  SITE (1)..(102): /note="Variant residues given in the sequence have no preference with respect to those in the annotations for variant positions"
LSCAASGFTFNTYSMNWVRQAPGKGLEWVAHIKTKENNFATFYADSVKDRFTISRDDSESMLYLQMENLKTEDTAMYYCVEHESNNYPFAYWGQGTLVTVSA

SEQ ID NO: 4633 - protein, 122 aa, Artificial Sequence
  source: /note="Description of Artificial Sequence: Synthetic polypeptide"
QLQLQESGPGLVKPSETLSLTCTVSGFNFNTYAMNWIRQPPGKGLEWVARIRSKSNNYATYYAPSLKSRVTISVDTSKNQFSLKLSSVTAADTAVYYCVRHYSNYGWGFAYWGQGTLVTVSS

SEQ ID NO: 4634 - protein, 121 aa, Artificial Sequence
  source: /note="Description of Artificial Sequence: Synthetic polypeptide"
QLQLQESGPGLVKPSETLSLTCTVSGFRFNTYAMTWIRQPPGKGLEWEGVIRRKSSNFATLYAPSLKSRVTISVDTSKNQFSLKLSSVTAADTAVYYCVRHKSNKYPFVYWGQGTLVTVSS

SEQ ID NO: 4635 - protein, 122 aa, Artificial Sequence
  source: /note="Description of Artificial Sequence: Synthetic polypeptide"
QLQLQESGPGLVKPSETLSLTCTVSGFTFSDAWMDWIRQPPGKGLEWWVAEIRNKVNNHATYYPSLKSRVTISVDTSKNQFSLKLSSVTAADTAVYYCCTSLYDGYYLRFAWGQGTLVTVSS

SEQ ID NO: 4636 - protein, 116 aa, Artificial Sequence
  source: /note="Description of Artificial Sequence: Synthetic polypeptide"
QLQLQESGPGLVKPSETLSLTCTVSGFTFSDAWMGWIRQPPGKGLEWVAEIRDKVKNHATYYAPSLKSRVTISVDTSKNQFSLKLSSVTAADTAVYYCRLGVFDYWGQGTLVTVSS

SEQ ID NO: 4637 - protein, 119 aa, Artificial Sequence
  source: /note="Description of Artificial Sequence: Synthetic polypeptide"
QLQLQESGPGLVKPSETLSLTCTVSGFTLSSYAMSWIRQPPGKGLEWVASISRGGSTYYPPSLKSRVTISVDTSKNQFSLKLSSVTAADTAVYYCTRGYGYYRTPFANWGQGTLVTVSS

SEQ ID NO: 4638 - protein, 120 aa, Artificial Sequence
  source: /note="Description of Artificial Sequence: Synthetic polypeptide"
QLQLQESGPGLVKPSETLSLTCTVSGGSISSNSYYWGWIRQPPGKGLEWIGSIYYSGSTYYNPSLKSRVTISVDTSKNQFSLKLSSVTAADTAVYYCARGVLGYGVFDYWGQGTLVTVSS

SEQ ID NO: 4639 - protein, 121 aa, Artificial Sequence
  source: /note="Description of Artificial Sequence: Synthetic polypeptide"
QLQLQESGPGLVKPSETLSLTCTVSGGSISSSSYYWGWIRQPPGKGLEWIGSISYSGSTYYNPSLKSRVTISVDTSKNQFSLKLSSVTAADTAVYYCARGPYRLLLGMDVWGQGTTVTVSS

SEQ ID NO: 4640 - protein, 121 aa, Artificial Sequence
  source: /note="Description of Artificial Sequence: Synthetic polypeptide"
QLQLQESGPGLVKPSETLSLTCTVSGLTSNTYTQTWIRQPPGKGLEWESVIRSKSNNFSTLYAPSLKSRVTISVDTSKNQFSLKLSSVTAADTAVYYCVRHKSNRYPGVYWGQGTLVTVSS

SEQ ID NO: 4641 - protein, 120 aa, Artificial Sequence
  source: /note="Description of Artificial Sequence: Synthetic polypeptide"
QLQLQESGPGLVKPSETLSLTCTVSGYPFSNFWITWIRQPPGKGLEWIGDIYPGSDNRNFNPSLKSRVTISVDTSKNQFSLKLSSVTAADTAVYYCAREAYYTNPGFAYWGQGTLVTVSS

SEQ ID NO: 4642 - protein, 120 aa, Artificial Sequence
  source: /note="Description of Artificial Sequence: Synthetic polypeptide"
QLQLQESGPGLVKPSETLSLTCTVSGYPFSNFWITWIRQPPGKGLEWIGDIYPGSDNSNYNPSLKSRVTISVDTSKNQFSLKLSSVTAADTAVYYCAREAYYTNPGFAYWGQGTLVTVSS

SEQ ID NO: 4643 - protein, 116 aa, Artificial Sequence
  source: /note="Description of Artificial Sequence: Synthetic polypeptide"
QLQLQESGPGLVKPSETLSLTCTVSGYSFTGYYMHWIRQPPGKGLEWIGRVNPNNGGTSYNPSLKSRVTISVDTSKNQFSLKLSSVTAADTAVYYCVLTGGYFDYWGQGTLVTVSS

SEQ ID NO: 4644 - protein, 125 aa, Artificial Sequence
  source: /note="Description of Artificial Sequence: Synthetic polypeptide"
QLQLQESGPGLVKPSETLSLTCTVSGYTFTDYEMHWIRQPPGKGLEWIGVIDPETGGTAYNPSLKSRVTISVDTSKNQFSLKLSSVTAADTAVYYCTSPDYYGSSYPLYYAMDYWGQGTLVTVSS

SEQ ID NO: 4645 - protein, 119 aa, Artificial Sequence
  source: /note="Description of Artificial Sequence: Synthetic polypeptide"
QLQLQESGPGLVKPSETLSLTCTVSGYTFTEYTMHWIRQPPGKGLEWIGGINPNNGGTSYKPSLKSRVTISVDTSKNQFSLKLSSVTAADTAVYYCARGGSHYYAMDYWGQGTLVTVSS

SEQ ID NO: 4646 - protein, 119 aa, Artificial Sequence
  source: /note="Description of Artificial Sequence: Synthetic polypeptide"
QLQLQESGPGLVKPSETLSLTCTVSGYTFTEYTMHWIRQPPGKGLEWIGGINPNNGGTSYSPSLKSRVTISVDTSKNQFSLKLSSVTAADTAVYYCARGGSHYYAMDYWGQGTLVTVSS

SEQ ID NO: 4647 - protein, 119 aa, Artificial Sequence
  source: /note="Description of Artificial Sequence: Synthetic polypeptide"
QVKLEESGGGLVQPGGSMKLSCVASGFTLSNYWMNWVRQSPEKGLEWVAQIRLKSDNYATHYAESVKGRFTISRDDSKSSVYLQMNNLRAVDTGIYYCTGAGGNHENYWGQGTTLTVSS

SEQ ID NO: 4648 - protein, 121 aa, Artificial Sequence
  source: /note="Description of Artificial Sequence: Synthetic polypeptide"
QVQLQESGPGLVKPSETLSLTCTVSGFNFNTYAMKWIRQPPGKGLEWIARIRSNSNDYATNYSPSLKSRVTISVDTSKNQFSLKLSSVTAADTAVYYCVGHKINNYPFAHWGQGTLVTVSS

SEQ ID NO: 4649 - protein, 122 aa, Artificial Sequence
  source: /note="Description of Artificial Sequence: Synthetic polypeptide"
QVQLQESGPGLVKPSETLSLTCTVSGFNFNTYAMNWIRQPPGKGLEWVARIRSKSNNYATYYAPSLKSRVTISVDTSKNQFSLKLSSVTAADTAVYYCVRHYSNYGWGFAYWGQGTLVTVSS

SEQ ID NO: 4650 - protein, 121 aa, Artificial Sequence
  source: /note="Description of Artificial Sequence: Synthetic polypeptide"
QVQLQESGPGLVKPSETLSLTCTVSGFRFNTYAMTWIRQPPGKGLEWEGVIRRKSSNFATLYAPSLKSRVTISVDTSKNQFSLKLSSVTAADTAVYYCVRHKSNKYPFVYWGQGTLVTVSS

SEQ ID NO: 4651 - protein, 122 aa, Artificial Sequence
  source: /note="Description of Artificial Sequence: Synthetic polypeptide"
QVQLQESGPGLVKPSETLSLTCTVSGFSFNTYAMNWIRQPPGKGLEWIARIRSKSNNYATYYAPSLKSRVTISVDTSKNQFSLKLSSVTAADTAVYYCVRHGDGNLWYIDVWGQGTLVTVSS

SEQ ID NO: 4652 - protein, 121 aa, Artificial Sequence
  source: /note="Description of Artificial Sequence: Synthetic polypeptide"
  VARIANT (55)..(55): /replace="Gln"
  VARIANT (100)..(100): /replace="Gln"
  VARIANT (102)..(102): /replace="Gln"
  SITE (1)..(121): /note="Variant residues given in the sequence have no preference with respect to those in the annotations for variant positions"
QVQLQESGPGLVKPSETLSLTCTVSGFTFNTYSMNWIRQPPGKGLEWVAHIKTKENNFATFYAPSLKSRVTISVDTSKNQFSLKLSSVTAADTAVYYCVEHESNNYPFAYWGQGTLVTVSS

SEQ ID NO: 4653 - protein, 122 aa, Artificial Sequence
  source: /note="Description of Artificial Sequence: Synthetic polypeptide"
QVQLQESGPGLVKPSETLSLTCTVSGFTFSDAWMDWIRQPPGKGLEWVAEIRNKINNHATYYAPSLKSRVTISVDTSKNQFSLKLSSVTAADTAVYYCTSLYDGSYLRFAYWGQGTLVTVSS

SEQ ID NO: 4654 - protein, 122 aa, Artificial Sequence
  source: /note="Description of Artificial Sequence: Synthetic polypeptide"
QVQLQESGPGLVKPSETLSLTCTVSGFTFSDAWMDWIRQPPGKGLEWWVAEIRNKVNNHATYYPSLKSRVTISVDTSKNQFSLKLSSVTAADTAVYYCCTSLYDGYYLRFAWGQGTLVTVSS

SEQ ID NO: 4655 - protein, 116 aa, Artificial Sequence
  source: /note="Description of Artificial Sequence: Synthetic polypeptide"
QVQLQESGPGLVKPSETLSLTCTVSGFTFSDAWMGWIRQPPGKGLEWVAEIRDKVKNHATYYAPSLKSRVTISVDTSKNQFSLKLSSVTAADTAVYYCRLGVFDYWGQGTLVTVSS

SEQ ID NO: 4656 - protein, 119 aa, Artificial Sequence
  source: /note="Description of Artificial Sequence: Synthetic polypeptide"
QVQLQESGPGLVKPSETLSLTCTVSGFTLSSYAMSWIRQPPGKGLEWVASISRGGSTYYPPSLKSRVTISVDTSKNQFSLKLSSVTAADTAVYYCTRGYGYYRTPFANWGQGTLVTVSS

SEQ ID NO: 4657 - protein, 122 aa, Artificial Sequence
  source: /note="Description of Artificial Sequence: Synthetic polypeptide"
QVQLQESGPGLVKPSETLSLTCTVSGGSISSYYWSWIRQPPGKGLEWIGSIYYSGSTNYNPSLKSRVTISVDTSKNQFSLKLSSVTAADTAVYYCARDGGGEYPSGTPFDIWGQGTMVTVSS

SEQ ID NO: 4658 - protein, 119 aa, Artificial Sequence
  source: /note="Description of Artificial Sequence: Synthetic polypeptide"
QVQLQESGPGLVKPSETLSLTCTVSGGSISSYYWSWIRQPPGKGLEWIGSIYYSGSTNYNPSLKSRVTISVDTSKNQFSLKLSSVTAADTAVYYCARHGWDRVGWFDPWGQGTLVTVSS

SEQ ID NO: 4659 - protein, 117 aa, Artificial Sequence
  source: /note="Description of Artificial Sequence: Synthetic polypeptide"
QVQLQESGPGLVKPSETLSLTCTVSGGSISSYYWSWIRQPPGKGLEWIGSIYYSGSTNYNPSLKSRVTISVDTSKNQFSLKLSSVTAADTAVYYCARSGMASFFDYWGQGTLVTVSS

SEQ ID NO: 4660 - protein, 117 aa, Artificial Sequence
  source: /note="Description of Artificial Sequence: Synthetic polypeptide"
QVQLQESGPGLVKPSETLSLTCTVSGGSISSYYWSWIRQPPGKGLEWIGSIYYSGSTNYNPSLKSRVTISVDTSKNQFSLKLSSVTAADTAVYYCARSGTETLFDYWGQGTLVTVSS

SEQ ID NO: 4661 - protein, 121 aa, Artificial Sequence
  source: /note="Description of Artificial Sequence: Synthetic polypeptide"
QVQLQESGPGLVKPSETLSLTCTVSGLTSNTYTQTWIRQPPGKGLEWESVIRSKSNNFSTLYAPSLKSRVTISVDTSKNQFSLKLSSVTAADTAVYYCVRHKSNRYPGVYWGQGTLVTVSS

SEQ ID NO: 4662 - protein, 126 aa, Artificial Sequence
  source: /note="Description of Artificial Sequence: Synthetic polypeptide"
QVQLQESGPGLVKPSETLSLTCTVSGYAFSNYWMSWIRQPPGKGLEWIGQIYPGDGDTKYNPSLKSRVTISVDTSKNQFSLKLSSVTAADTAVYYCSREKGADYYGSTYSAWFSYWGQGTLVTVSS

SEQ ID NO: 4663 - protein, 123 aa, Artificial Sequence
  source: /note="Description of Artificial Sequence: Synthetic polypeptide"
QVQLQESGPGLVKPSETLSLTCTVSGYAFSSSWMNWIRQPPGKGLEWIGRIYPGDGDTNYNPSLKSRVTISVDTSKNQFSLKLSSVTAADTAVYYCARLLRNQPGESYAMDYWGQGTLVTVSS

SEQ ID NO: 4664 - protein, 116 aa, Artificial Sequence
  source: /note="Description of Artificial Sequence: Synthetic polypeptide"
QVQLQESGPGLVKPSETLSLTCTVSGYIFTTYWIHWIRQPPGKGLEWIGRIDPNNGDTNYNPSLKSRVTISVDTSKNQFSLKLSSVTAADTAVYYCVMTGTDFDYWGQGTLVTVSS

SEQ ID NO: 4665 - protein, 120 aa, Artificial Sequence
  source: /note="Description of Artificial Sequence: Synthetic polypeptide"
QVQLQESGPGLVKPSETLSLTCTVSGYPFSNFWITWIRQPPGKGLEWIGDIYPGSDNRNFNPSLKSRVTISVDTSKNQFSLKLSSVTAADTAVYYCAREAYYTNPGFAYWGQGTLVTVSS

SEQ ID NO: 4666 - protein, 120 aa, Artificial Sequence
  source: /note="Description of Artificial Sequence: Synthetic polypeptide"
QVQLQESGPGLVKPSETLSLTCTVSGYPFSNFWITWIRQPPGKGLEWIGDIYPGSDNSNYNPSLKSRVTISVDTSKNQFSLKLSSVTAADTAVYYCAREAYYTNPGFAYWGQGTLVTVSS

SEQ ID NO: 4667 - protein, 116 aa, Artificial Sequence
  source: /note="Description of Artificial Sequence: Synthetic polypeptide"
QVQLQESGPGLVKPSETLSLTCTVSGYSFTGYYMHWIRQPPGKGLEWIGRVNPNNGGTSYNPSLKSRVTISVDTSKNQFSLKLSSVTAADTAVYYCVLTGGYFDYWGQGTLVTVSS

SEQ ID NO: 4668 - protein, 119 aa, Artificial Sequence
  source: /note="Description of Artificial Sequence: Synthetic polypeptide"
QVQLQESGPGLVKPSETLSLTCTVSGYTFSDYYIHWIRQPPGKGLEWIGYIYPNNGDNGYNPSLKSRVTISVDTSKNQFSLKLSSVTAADTAVYYCARRGYYGGSYDYWGQGTLVTVSS

SEQ ID NO: 4669 - protein, 125 aa, Artificial Sequence
  source: /note="Description of Artificial Sequence: Synthetic polypeptide"
QVQLQESGPGLVKPSETLSLTCTVSGYTFTDYEMHWIRQPPGKGLEWIGVIDPETGGTAYNPSLKSRVTISVDTSKNQFSLKLSSVTAADTAVYYCTSPDYYGSSYPLYYAMDYWGQGTLVTVSS

SEQ ID NO: 4670 - protein, 119 aa, Artificial Sequence
  source: /note="Description of Artificial Sequence: Synthetic polypeptide"
QVQLQESGPGLVKPSETLSLTCTVSGYTFTEYTMHWIRQPPGKGLEWIGGINPNNGGTSYKPSLKSRVTISVDTSKNQFSLKLSSVTAADTAVYYCARGGSHYYAMDYWGQGTLVTVSS

SEQ ID NO: 4671 - protein, 119 aa, Artificial Sequence
  source: /note="Description of Artificial Sequence: Synthetic polypeptide"
QVQLQESGPGLVKPSETLSLTCTVSGYTFTEYTMHWIRQPPGKGLEWIGGINPNNGGTSYSPSLKSRVTISVDTSKNQFSLKLSSVTAADTAVYYCARGGSHYYAMDYWGQGTLVTVSS

SEQ ID NO: 4672 - protein, 116 aa, Artificial Sequence
  source: /note="Description of Artificial Sequence: Synthetic polypeptide"
QVQLQESGPGLVKPSETLSLTCTVSGYTFTTYWIHWIRQPPGKGLEWIGRNDPNSGGSNYNPSLKSRVTISVDTSKNQFSLKLSSVTAADTAVYYCVRTNWDGDFWGQGTLVTVSS

SEQ ID NO: 4673 - protein, 116 aa, Artificial Sequence
  source: /note="Description of Artificial Sequence: Synthetic polypeptide"
QVQLQESGPGLVKPSETLSLTCTVSGYTVSRYWMHWIRQPPGKGLEWIGRIDPNSGGTKYNPSLKSRVTISVDTSKNQFSLKLSSVTAADTAVYYCVLTGTDFDYWGQGTLVTVSS

SEQ ID NO: 4674 - protein, 121 aa, Artificial Sequence
  source: /note="Description of Artificial Sequence: Synthetic polypeptide"
QVQLQESGPGLVKPSQTLSLTCTVSGFNFNTYAMKWIRQPPGKGLEWIARIRSNSNDYATNYSPSLKSRVTISVDTSKNQFSLKLSSVTAADTAVYYCVGHKINNYPFAHWGQGTLVTVSS

SEQ ID NO: 4675 - protein, 122 aa, Artificial Sequence
  source: /note="Description of Artificial Sequence: Synthetic polypeptide"
QVQLQESGPGLVKPSQTLSLTCTVSGFSFNTYAMNWIRQPPGKGLEWIARIRSKSNNYATYYAPSLKSRVTISVDTSKNQFSLKLSSVTAADTAVYYCVRHGDGNLWYIDVWGQGTLVTVSS

SEQ ID NO: 4676 - protein, 121 aa, Artificial Sequence
  source: /note="Description of Artificial Sequence: Synthetic polypeptide"
  VARIANT (55)..(55): /replace="Gln"
  VARIANT (100)..(100): /replace="Gln"
  VARIANT (102)..(102): /replace="Gln"
  SITE (1)..(121): /note="Variant residues given in the sequence have no preference with respect to those in the annotations for variant positions"
QVQLQESGPGLVKPSQTLSLTCTVSGFTFNTYSMNWIRQPPGKGLEWVAHIKTKENNFATFYAPSLKSRVTISVDTSKNQFSLKLSSVTAADTAVYYCVEHESNNYPFAYWGQGTLVTVSS

SEQ ID NO: 4677 - protein, 122 aa, Artificial Sequence
  source: /note="Description of Artificial Sequence: Synthetic polypeptide"
QVQLQESGPGLVKPSQTLSLTCTVSGFTFSDAWMDWIRQPPGKGLEWVAEIRNKINNHATYYAPSLKSRVTISVDTSKNQFSLKLSSVTAADTAVYYCTSLYDGSYLRFAYWGQGTLVTVSS

SEQ ID NO: 4678 - protein, 119 aa, Artificial Sequence
  source: /note="Description of Artificial Sequence: Synthetic polypeptide"
QVQLQESGPGLVKPSQTLSLTCTVSGFTLSSYAMSWIRQPPGKGLEWVASISRGGSTYYPPSLKSRVTISVDTSKNQFSLKLSSVTAADTAVYYCTRGYGYYRTPFANWGQGTLVTVSS

SEQ ID NO: 4679 - protein, 120 aa, Artificial Sequence
  source: /note="Description of Artificial Sequence: Synthetic polypeptide"
QVQLQESGPGLVKPSQTLSLTCTVSGGSISSGGYYWSWIRQHPGKGLEWIGNIYYSGSTVYNPSLKSRVTISVDTSKNQFSLKLSSVTAADTAVYYCARGLYGYGVLDVWGQGTMVTVSS

SEQ ID NO: 4680 - protein, 118 aa, Artificial Sequence
  source: /note="Description of Artificial Sequence: Synthetic polypeptide"
QVQLQESGPGLVKPSQTLSLTCTVSGGSISSGGYYWSWIRQHPGKGLEWIGYIYYSGSTVYNPSLKSRVTISVDTSKNQFSLKLSSVTAADTAVYYCARVSSSWYKAWGQGTMVTVSS

SEQ ID NO: 4681 - protein, 126 aa, Artificial Sequence
  source: /note="Description of Artificial Sequence: Synthetic polypeptide"
QVQLQESGPGLVKPSQTLSLTCTVSGYAFSNYWMSWIRQPPGKGLEWIGQIYPGDGDTKYNPSLKSRVTISVDTSKNQFSLKLSSVTAADTAVYYCSREKGADYYGSTYSAWFSYWGQGTLVTVSS

SEQ ID NO: 4682 - protein, 123 aa, Artificial Sequence
  source: /note="Description of Artificial Sequence: Synthetic polypeptide"
QVQLQESGPGLVKPSQTLSLTCTVSGYAFSSSWMNWIRQPPGKGLEWIGRIYPGDGDTNYNPSLKSRVTISVDTSKNQFSLKLSSVTAADTAVYYCARLLRNQPGESYAMDYWGQGTLVTVSS

SEQ ID NO: 4683 - protein, 116 aa, Artificial Sequence
  source: /note="Description of Artificial Sequence: Synthetic polypeptide"
QVQLQESGPGLVKPSQTLSLTCTVSGYIFTTYWIHWIRQPPGKGLEWIGRIDPNNGDTNYNPSLKSRVTISVDTSKNQFSLKLSSVTAADTAVYYCVMTGTDFDYWGQGTLVTVSS

SEQ ID NO: 4684 - protein, 119 aa, Artificial Sequence
  source: /note="Description of Artificial Sequence: Synthetic polypeptide"
QVQLQESGPGLVKPSQTLSLTCTVSGYTFSDYYIHWIRQPPGKGLEWIGYIYPNNGDNGYNPSLKSRVTISVDTSKNQFSLKLSSVTAADTAVYYCARRGYYGGSYDYWGQGTLVTVSS

SEQ ID NO: 4685 - protein, 116 aa, Artificial Sequence
  source: /note="Description of Artificial Sequence: Synthetic polypeptide"
QVQLQESGPGLVKPSQTLSLTCTVSGYTFTTYWIHWIRQPPGKGLEWIGRNDPNSGGSNYNPSLKSRVTISVDTSKNQFSLKLSSVTAADTAVYYCVRTNWDGDFWGQGTLVTVSS

SEQ ID NO: 4686 - protein, 116 aa, Artificial Sequence
  source: /note="Description of Artificial Sequence: Synthetic polypeptide"
QVQLQESGPGLVKPSQTLSLTCTVSGYTVSRYWMHWIRQPPGKGLEWIGRIDPNSGGTKYNPSLKSRVTISVDTSKNQFSLKLSSVTAADTAVYYCVLTGTDFDYWGQGTLVTVSS

SEQ ID NO: 4687 - protein, 119 aa, Artificial Sequence
  source: /note="Description of Artificial Sequence: Synthetic polypeptide"
QVQLQESGPGLVQPSQSLSIICTVSAFSLTNYAVHWIRQSPGKGLEWLGVIWSGGSTAFNAAFISRLNISKDNSKSQVFFKMNSLQSDDTAIYYCATHYYRSTYAFSYWGQGTLVTVSA

SEQ ID NO: 4688 - protein, 120 aa, Artificial Sequence
  source: /note="Description of Artificial Sequence: Synthetic polypeptide"
QVQLQQPGAELVKPGASVKVSCKASGYTFTAYWMHWVKEKPGQGLEWIGRTHPSDSDTNYNHNFKGKATLTVDKSSSTAYMQLNSLTSEDSAVYYCATYSNYVTGAMDSWGQGTSVTVSS

SEQ ID NO: 4689 - protein, 116 aa, Artificial Sequence
  source: /note="Description of Artificial Sequence: Synthetic polypeptide"
QVQLQQSGAELVKPGASVKLSCKASGYIFTTYWIHWVKQRPGRGPEWIGRIDPNNGDTNYNEKFKTKATLTVDKPSSTADMQLSSLTSEDSAVYYCVMTGTDFDYWGQGTTLTVSS

SEQ ID NO: 4690 - protein, 116 aa, Artificial Sequence
  source: /note="Description of Artificial Sequence: Synthetic polypeptide"
QVQLQQSGAELVKPGASVKLSCKASGYTVSRYWMHWVKQRPGRGLEWIGRIDPNSGGTKYNEKFKTKATLTVDKPSSTAYMQVSSLTSEDSAVYYCVLTGTDFDYWGQGTTLTVSS

SEQ ID NO: 4691 - protein, 120 aa, Artificial Sequence
  source: /note="Description of Artificial Sequence: Synthetic polypeptide"
QVQLQQSGAELVKPGASVKMSCKTSGYPFSNFWITWVKQRPGQGLVWIGDIYPGSDNSNYNEKFKTKATLTVDTSSSTAYMHLSSLTSEDSAVYFCAREAYYTNPGFAYWGQGTLVTVST

SEQ ID NO: 4692 - protein, 116 aa, Artificial Sequence
  source: /note="Description of Artificial Sequence: Synthetic polypeptide"
QVQLQQSGAELVKPGASVKVSCKASGYTFTNYWIHWVKQRPGQGLEWIGRIHPSDSDINYNQKFKGKATLTVDKSSSTAYMQILSSLTSEDSAVYYCVKTGTSFASWSQGTLVTVS

SEQ ID NO: 4693 - protein, 125 aa, Artificial Sequence
  source: /note="Description of Artificial Sequence: Synthetic polypeptide"
QVQLQQSGAELVRPGASVTLSCKASGYTFTDYEMHWVKQTPVHGLEWIGVIDPETGGTAYNQKFKGKAILTADKSSSTAYMELRSLTSEDSAVYYCTSPDYYGSSYPLYYAMDYWGQGTSVTVSS

SEQ ID NO: 4694 - protein, 120 aa, Artificial Sequence
  source: /note="Description of Artificial Sequence: Synthetic polypeptide"
QVQLQQSGAEVVKPGASVKMSCKTSGYPFSNFWITWVKQRPGQGLVWIGDIYPGSDNRNFNERFKTKATLTVDTSSSTAYMHLSSLTSEDSAVYFCAREAYYTNPGFAYWGQGTLVTVSA

SEQ ID NO: 4695 - protein, 116 aa, Artificial Sequence
  source: /note="Description of Artificial Sequence: Synthetic polypeptide"
  VARIANT (91)..(91): /replace="Gln"
  SITE (1)..(116): /note="Variant residues given in the sequence have no preference with respect to those in the annotations for variant positions"
QVQLQQSGAVLVKPGASVKLSCKASGYTFTTYWIHWVKQRPGRGPEWIGRNDPNSGGSNYNEKFRNKAILTVDKPSSTAYMQLNSLTSEDEAVYYCVRTNWDGDFWGQGTTLTVSS

SEQ ID NO: 4696 - protein, 116 aa, Artificial Sequence
  source: /note="Description of Artificial Sequence: Synthetic polypeptide"
QVQLQQSGPDLVKPGASVKISCKASGYSFTGYYMHWVKQSHGKSLEWIGRVNPNNGGTSYNQKFKGKAILTVDKSSSTAYMELRSLTSEDSAVYYCVLTGGYFDYWGQGTTLTVSS

SEQ ID NO: 4697 - protein, 119 aa, Artificial Sequence
  source: /note="Description of Artificial Sequence: Synthetic polypeptide"
QVQLQQSGPELVKPGASVKISCKTSGYTFTEYTMHWVKQSHGKSLEWIGGINPNNGGTSYKQKFKGKATLTVDRSSSTAYMELRSLTSEDSAVYYCARGGSHYYAMDYWGQGTSVTVSS

SEQ ID NO: 4698 - protein, 116 aa, Artificial Sequence
  source: /note="Description of Artificial Sequence: Synthetic polypeptide"
QVQLQQSGPELVKPGASVQMSCEASGYTFTDYNIHWVKQSHGKSLEWIGYINPNNGGTTYNQKFKGKATLTVNKSSSTAYIELRSLTSEDSAVYHCATTYVSFSYWGQGTLVTVSA

SEQ ID NO: 4699 - protein, 119 aa, Artificial Sequence
  source: /note="Description of Artificial Sequence: Synthetic polypeptide"
QVQLQQSGRELVKPGASVKMSCMSSGYSFTDYNIHWVIQSHGESLEWIGYINPNSDNTRYIQKFKGKATLTVNKSSSTAYMELRSLTSEDSAVYYCTRGFSNLGAMDYWGQGTSVTVSS

SEQ ID NO: 4700 - protein, 114 aa, Artificial Sequence
  source: /note="Description of Artificial Sequence: Synthetic polypeptide"
QVQLQQSVAELVRPGASVKLSCTASGFNIKNTYIHWVKQRPEQGLEWIGRIDPAIGNTNYAPKFQATATITVATSSNSAYLQLSSLASEDTAIYYCVSPGMDYWGHGTSVTVSS

SEQ ID NO: 4701 - protein, 123 aa, Artificial Sequence
  source: /note="Description of Artificial Sequence: Synthetic polypeptide"
QVQLQQWGAGLLKPSETLSLTCAVYGGSFSGYYWSWIRQPPGKGLEWIGEIDHSGSTKYNPSLKSRVTISVDTSKNQFSLKLSSVTAADTAVYYCARVGVVVGRPGYSAFDIWGQGTMVTVSS

SEQ ID NO: 4702 - protein, 113 aa, Artificial Sequence
  source: /note="Description of Artificial Sequence: Synthetic polypeptide"
  VARIANT (95)..(95): /replace="Gln"
  SITE (1)..(113): /note="Variant residues given in the sequence have no preference with respect to those in the annotations for variant positions"
QVQLQQYGPELVKPGASVKMSCKVSGYTFSDYYIHWMKQSHGKSLEWIGYIYPNNGDNGYNQEFKGKATLTVDKSSSTAYMELRSLTFEDSAVYECARRGYYGGSYDYWGQGT

SEQ ID NO: 4703 - protein, 121 aa, Artificial Sequence
  source: /note="Description of Artificial Sequence: Synthetic polypeptide"
QVQLVESGGGVVQPGRSLRLSCAASGFNFNTYAMKWVRQAPGKGLEWIARIRSNSNDYATNYSDSVKGRFTISRDNSKNTLYLQMNSLRAEDTAVYYCVGHKINNYPFAHWGQGTLVTVSS

SEQ ID NO: 4704 - protein, 122 aa, Artificial Sequence
  source: /note="Description of Artificial Sequence: Synthetic polypeptide"
QVQLVESGGGVVQPGRSLRLSCAASGFNFNTYAMNWVRQAPGKGLEWVARIRSKSNNYATYYADSVKGRFTISRDNSKNTLYLQMNSLRAEDTAVYYCVRHYSNYGWGFAYWGQGTLVTVSS

SEQ ID NO: 4705 - protein, 121 aa, Artificial Sequence
  source: /note="Description of Artificial Sequence: Synthetic polypeptide"
QVQLVESGGGVVQPGRSLRLSCAASGFRFNTYAMTWVRQAPGKGLEWEGVIRRKSSNFATLYADSVKGRFTISRDNSKNTLYLQMNSLRAEDTAVYYCVRHKSNKYPFVYWGQGTLVTVSS

SEQ ID NO: 4706 - protein, 122 aa, Artificial Sequence
  source: /note="Description of Artificial Sequence: Synthetic polypeptide"
QVQLVESGGGVVQPGRSLRLSCAASGFSFNTYAMNWVRQAPGKGLEWIARIRSKSNNYATYYADSVKGRFTISRDNSKNTLYLQMNSLRAEDTAVYYCVRHGDGNLWYIDVWGQGTLVTVSS

SEQ ID NO: 4707 - protein, 121 aa, Artificial Sequence
  source: /note="Description of Artificial Sequence: Synthetic polypeptide"
  VARIANT (55)..(55): /replace="Gln"
  VARIANT (100)..(100): /replace="Gln"
  VARIANT (102)..(102): /replace="Gln"
  SITE (1)..(121): /note="Variant residues given in the sequence have no preference with respect to those in the annotations for variant positions"
QVQLVESGGGVVQPGRSLRLSCAASGFTFNTYSMNWVRQAPGKGLEWVAHIKTKENNFATFYADSVKGRFTISRDNSKNTLYLQMNSLRAEDTAVYYCVEHESNNYPFAYWGQGTLVTVSS

SEQ ID NO: 4708 - protein, 122 aa, Artificial Sequence
  source: /note="Description of Artificial Sequence: Synthetic polypeptide"
QVQLVESGGGVVQPGRSLRLSCAASGFTFSDAWMDWVRQAPGKGLEWVAEIRNKINNHATYYADSVKGRFTISRDNSKNTLYLQMNSLRAEDTAVYYCTSLYDGSYLRFAYWGQGTLVTVSS

SEQ ID NO: 4709 - protein, 122 aa, Artificial Sequence
  source: /note="Description of Artificial Sequence: Synthetic polypeptide"
QVQLVESGGGVVQPGRSLRLSCAASGFTFSDAWMDWVRQAPGKGLEWWVAEIRNKVNNHATYYDSVKGRFTISRDNSKNTLYLQMNSLRAEDTAVYYCCTSLYDGYYLRFAWGQGTLVTVSS

SEQ ID NO: 4710 - protein, 116 aa, Artificial Sequence
  source: /note="Description of Artificial Sequence: Synthetic polypeptide"
QVQLVESGGGVVQPGRSLRLSCAASGFTFSDAWMGWVRQAPGKGLEWVAEIRDKVKNHATYYADSVKGRFTISRDNSKNTLYLQMNSLRAEDTAVYYCRLGVFDYWGQGTLVTVSS

SEQ ID NO: 4711 - protein, 116 aa, Artificial Sequence
  source: /note="Description of Artificial Sequence: Synthetic polypeptide"
QVQLVESGGGVVQPGRSLRLSCAASGFTFSSYGMHWVRQAPGKGLEWVALIWYDGSNKYYADSVKGRFTISRDNSKNTLYLQMNSLRAEDTAVYYCAKPGSMTDYWGQGTLVTVSS

SEQ ID NO: 4712 - protein, 121 aa, Artificial Sequence
  source: /note="Description of Artificial Sequence: Synthetic polypeptide"
QVQLVESGGGVVQPGRSLRLSCAASGFTFSSYGMHWVRQAPGKGLEWVALIWYDGSNKYYADSVKGRFTISRDNSKNTLYLQMNSLRAEDTAVYYCARRRDGYYDEVFDIWGQGTMVTVSS

SEQ ID NO: 4713 - protein, 122 aa, Artificial Sequence
  source: /note="Description of Artificial Sequence: Synthetic polypeptide"
QVQLVESGGGVVQPGRSLRLSCAASGFTFSSYGMHWVRQAPGKGLEWVAVISYDGSNKYYADSVKGRFTISRDNSKNTLYLQMNSLRAEDTAVYYCAKDGVYYGLGNWFDPWGQGTLVTVSS

SEQ ID NO: 4714 - protein, 117 aa, Artificial Sequence
  source: /note="Description of Artificial Sequence: Synthetic polypeptide"
QVQLVESGGGVVQPGRSLRLSCAASGFTFSSYGMHWVRQAPGKGLEWVAVISYDGSNKYYADSVKGRFTISRDNSKNTLYLQMNSLRAEDTAVYYCARAGGHLFDYWGQGTLVTVSS

SEQ ID NO: 4715 - protein, 122 aa, Artificial Sequence
  source: /note="Description of Artificial Sequence: Synthetic polypeptide"
QVQLVESGGGVVQPGRSLRLSCAASGFTFSSYGMHWVRQAPGKGLEWVAVISYDGSNKYYADSVKGRFTISRDNSKNTLYLQMNSLRAEDTAVYYCARDRGGEYVDFAFDIWGQGTMVTVSS

SEQ ID NO: 4716 - protein, 117 aa, Artificial Sequence
  source: /note="Description of Artificial Sequence: Synthetic polypeptide"
QVQLVESGGGVVQPGRSLRLSCAASGFTFSSYGMHWVRQAPGKGLEWVAVISYDGSNKYYADSVKGRFTISRDNSKNTLYLQMNSLRAEDTAVYYCARGPPHEMDYWGQGTLVTVSS

SEQ ID NO: 4717 - protein, 121 aa, Artificial Sequence
  source: /note="Description of Artificial Sequence: Synthetic polypeptide"
QVQLVESGGGVVQPGRSLRLSCAASGFTFSSYGMHWVRQAPGKGLEWVAVISYDGSNKYYADSVKGRFTISRDNSKNTLYLQMNSLRAEDTAVYYCARGQYYGGSGWFDPWGQGTLVTVSS

SEQ ID NO: 4718 - protein, 124 aa, Artificial Sequence
  source: /note="Description of Artificial Sequence: Synthetic polypeptide"
QVQLVESGGGVVQPGRSLRLSCAASGFTFSSYGMHWVRQAPGKGLEWVAVIWYDGSNKYYADSVKGRFTISRDNSKNTLYLQMNSLRAEDTAVYYCAKDLGGYYGGAAYGMDVWGQGTTVTVSS

SEQ ID NO: 4719 - protein, 119 aa, Artificial Sequence
  source: /note="Description of Artificial Sequence: Synthetic polypeptide"
QVQLVESGGGVVQPGRSLRLSCAASGFTFSSYGMHWVRQAPGKGLEWVAVIWYDGSNKYYADSVKGRFTISRDNSKNTLYLQMNSLRAEDTAVYYCARTPYPWIYFDLWGRGTLVTVSS

SEQ ID NO: 4720 - protein, 125 aa, Artificial Sequence
  source: /note="Description of Artificial Sequence: Synthetic polypeptide"
QVQLVESGGGVVQPGRSLRLSCAASGFTFSTYGMHWVRQAPGKGLEWVAVIWYDGSNKYYADSVKGRFTISRDNSKNTLYLQMNSLRAEDTAVYYCARGAPVDYGGIEPEYFQHWGQGTLVTVSS

SEQ ID NO: 4721 - protein, 122 aa, Artificial Sequence
  source: /note="Description of Artificial Sequence: Synthetic polypeptide"
QVQLVESGGGVVQPGRSLRLSCAASGFTFSTYGMHWVRQAPGKGLEWVAVIWYDGSNKYYADSVKGRFTISRDNSKNTLYLQMNSLRAEDTAVYYCARGTGAAAASPAFDIWGQGTMVTVSS

SEQ ID NO: 4722 - protein, 119 aa, Artificial Sequence
  source: /note="Description of Artificial Sequence: Synthetic polypeptide"
QVQLVESGGGVVQPGRSLRLSCAASGFTLSSYAMSWVRQAPGKGLEWVASISRGGSTYYPDSVKGRFTISRDNSKNTLYLQMNSLRAEDTAVYYCTRGYGYYRTPFANWGQGTLVTVSS

SEQ ID NO: 4723 - protein, 121 aa, Artificial Sequence
  source: /note="Description of Artificial Sequence: Synthetic polypeptide"
QVQLVESGGGVVQPGRSLRLSCAASGLTSNTYTQTWVRQAPGKGLEWESVIRSKSNNFSTLYADSVKGRFTISRDNSKNTLYLQMNSLRAEDTAVYYCVRHKSNRYPGVYWGQGTLVTVSS

SEQ ID NO: 4724 - protein, 126 aa, Artificial Sequence
  source: /note="Description of Artificial Sequence: Synthetic polypeptide"
QVQLVESGGGVVQPGRSLRLSCAASGYAFSNYWMSWVRQAPGKGLEWIGQIYPGDGDTKYNDSVKGRFTISRDNSKNTLYLQMNSLRAEDTAVYYCSREKGADYYGSTYSAWFSYWGQGTLVTVSS

SEQ ID NO: 4725 - protein, 123 aa, Artificial Sequence
  source: /note="Description of Artificial Sequence: Synthetic polypeptide"
QVQLVESGGGVVQPGRSLRLSCAASGYAFSSSWMNWVRQAPGKGLEWIGRIYPGDGDTNYNDSVKGRFTISRDNSKNTLYLQMNSLRAEDTAVYYCARLLRNQPGESYAMDYWGQGTLVTVSS

SEQ ID NO: 4726 - protein, 116 aa, Artificial Sequence
  source: /note="Description of Artificial Sequence: Synthetic polypeptide"
QVQLVESGGGVVQPGRSLRLSCAASGYIFTTYWIHWVRQAPGKGLEWIGRIDPNNGDTNYNDSVKGRFTISRDNSKNTLYLQMNSLRAEDTAVYYCVMTGTDFDYWGQGTLVTVSS

SEQ ID NO: 4727 - protein, 120 aa, Artificial Sequence
  source: /note="Description of Artificial Sequence: Synthetic polypeptide"
QVQLVESGGGVVQPGRSLRLSCAASGYPFSNFWITWVRQAPGKGLEWIGDIYPGSDNRNFNDSVKGRFTISRDNSKNTLYLQMNSLRAEDTAVYYCAREAYYTNPGFAYWGQGTLVTVSS

SEQ ID NO: 4728 - protein, 120 aa, Artificial Sequence
  source: /note="Description of Artificial Sequence: Synthetic polypeptide"
QVQLVESGGGVVQPGRSLRLSCAASGYPFSNFWITWVRQAPGKGLEWIGDIYPGSDNSNYNDSVKGRFTISRDNSKNTLYLQMNSLRAEDTAVYYCAREAYYTNPGFAYWGQGTLVTVSS

SEQ ID NO: 4729 - protein, 116 aa, Artificial Sequence
  source: /note="Description of Artificial Sequence: Synthetic polypeptide"
QVQLVESGGGVVQPGRSLRLSCAASGYSFTGYYMHWVRQAPGKGLEWIGRVNPNNGGTSYNDSVKGRFTISRDNSKNTLYLQMNSLRAEDTAVYYCVLTGGYFDYWGQGTLVTVSS

SEQ ID NO: 4730 - protein, 119 aa, Artificial Sequence
  source: /note="Description of Artificial Sequence: Synthetic polypeptide"
QVQLVESGGGVVQPGRSLRLSCAASGYTFSDYYIHWVRQAPGKGLEWIGYIYPNNGDNGYNDSVKGRFTISRDNSKNTLYLQMNSLRAEDTAVYYCARRGYYGGSYDYWGQGTLVTVSS

SEQ ID NO: 4731 - protein, 125 aa, Artificial Sequence
  source: /note="Description of Artificial Sequence: Synthetic polypeptide"
QVQLVESGGGVVQPGRSLRLSCAASGYTFTDYEMHWVRQAPGKGLEWIGVIDPETGGTAYNDSVKGRFTISRDNSKNTLYLQMNSLRAEDTAVYYCTSPDYYGSSYPLYYAMDYWGQGTLVTVSS

SEQ ID NO: 4732 - protein, 119 aa, Artificial Sequence
  source: /note="Description of Artificial Sequence: Synthetic polypeptide"
QVQLVESGGGVVQPGRSLRLSCAASGYTFTEYTMHWVRQAPGKGLEWIGGINPNNGGTSYKDSVKGRFTISRDNSKNTLYLQMNSLRAEDTAVYYCARGGSHYYAMDYWGQGTLVTVSS

SEQ ID NO: 4733 - protein, 119 aa, Artificial Sequence
  source: /note="Description of Artificial Sequence: Synthetic polypeptide"
QVQLVESGGGVVQPGRSLRLSCAASGYTFTEYTMHWVRQAPGKGLEWIGGINPNNGGTSYSDSVKGRFTISRDNSKNTLYLQMNSLRAEDTAVYYCARGGSHYYAMDYWGQGTLVTVSS

SEQ ID NO: 4734 - protein, 116 aa, Artificial Sequence
  source: /note="Description of Artificial Sequence: Synthetic polypeptide"
QVQLVESGGGVVQPGRSLRLSCAASGYTFTTYWIHWVRQAPGKGLEWIGRNDPNSGGSNYNDSVKGRFTISRDNSKNTLYLQMNSLRAEDTAVYYCVRTNWDGDFWGQGTLVTVSS

SEQ ID NO: 4735 - protein, 116 aa, Artificial Sequence
  source: /note="Description of Artificial Sequence: Synthetic polypeptide"
QVQLVESGGGVVQPGRSLRLSCAASGYTVSRYWMHWVRQAPGKGLEWIGRIDPNSGGTKYNDSVKGRFTISRDNSKNTLYLQMNSLRAEDTAVYYCVLTGTDFDYWGQGTLVTVSS

SEQ ID NO: 4736 - protein, 123 aa, Artificial Sequence
  source: /note="Description of Artificial Sequence: Synthetic polypeptide"
QVQLVQSGAEVKKPGASLKISCKASGYAFSSSWMNWVRQAPGQGLEWIGRIYPGDGDTNYAQKFQGRATLTADTSTSTAYMELSSLRSEDTAVYYCARLLRNQPGESYAMDYWGQGALVTVSS

SEQ ID NO: 4737 - protein, 123 aa, Artificial Sequence
  source: /note="Description of Artificial Sequence: Synthetic polypeptide"
QVQLVQSGAEVKKPGASLKISCKASGYAFSSSWMNWVRQAPGQGLEWIGRIYPGDGDTNYNGEFRVRATLTADTSTSTAYMELSSLRSEDTAVYYCARLLRNQPGESYAMDYWGQGALVTVSS

SEQ ID NO: 4738 - protein, 123 aa, Artificial Sequence
  source: /note="Description of Artificial Sequence: Synthetic polypeptide"
QVQLVQSGAEVKKPGASLKVSCKASGYAFSSSWMNWVRQAPGQRLEWIGRIYPGDGDTNYAQKFQGRATLTADTSASTAYMELSSLRSEDTAVYFCARLLRNQPGESYAMDYWGQGTLVTVSS

SEQ ID NO: 4739 - protein, 123 aa, Artificial Sequence
  source: /note="Description of Artificial Sequence: Synthetic polypeptide"
QVQLVQSGAEVKKPGASLKVSCKASGYAFSSSWMNWVRQAPGQRLEWIGRIYPGDGDTNYNGEFRVRATLTADTSASTAYMELSSLRSEDTAVYFCARLLRNQPGESYAMDYWGQGTLVTVSS

SEQ ID NO: 4740 - protein, 121 aa, Artificial Sequence
  source: /note="Description of Artificial Sequence: Synthetic polypeptide"
QVQLVQSGAEVKKPGASVKVSCKASGFNFNTYAMKWVRQAPGQGLEWIARIRSNSNDYATNYSQKFQGRVTMTRDTSTSTVYMELSSLRSEDTAVYYCVGHKINNYPFAHWGQGTLVTVSS

SEQ ID NO: 4741 - protein, 122 aa, Artificial Sequence
  source: /note="Description of Artificial Sequence: Synthetic polypeptide"
QVQLVQSGAEVKKPGASVKVSCKASGFNFNTYAMNWVRQAPGQGLEWVARIRSKSNNYATYYAQKFQGRVTMTRDTSTSTVYMELSSLRSEDTAVYYCVRHYSNYGWGFAYWGQGTLVTVSS

SEQ ID NO: 4742 - protein, 121 aa, Artificial Sequence
  source: /note="Description of Artificial Sequence: Synthetic polypeptide"
QVQLVQSGAEVKKPGASVKVSCKASGFRFNTYAMTWVRQAPGQGLEWEGVIRRKSSNFATLYAQKFQGRVTMTRDTSTSTVYMELSSLRSEDTAVYYCVRHKSNKYPFVYWGQGTLVTVSS

SEQ ID NO: 4743 - protein, 122 aa, Artificial Sequence
  source: /note="Description of Artificial Sequence: Synthetic polypeptide"
QVQLVQSGAEVKKPGASVKVSCKASGFSFNTYAMNWVRQAPGQGLEWIARIRSKSNNYATYYAQKFQGRVTMTRDTSTSTVYMELSSLRSEDTAVYYCVRHGDGNLWYIDVWGQGTLVTVSS

SEQ ID NO: 4744 - protein, 121 aa, Artificial Sequence
  source: /note="Description of Artificial Sequence: Synthetic polypeptide"
  VARIANT (55)..(55): /replace="Gln"
  VARIANT (100)..(100): /replace="Gln"
  VARIANT (102)..(102): /replace="Gln"
  SITE (1)..(121): /note="Variant residues given in the sequence have no preference with respect to those in the annotations for variant positions"
QVQLVQSGAEVKKPGASVKVSCKASGFTFNTYSMNWVRQAPGQGLEWVAHIKTKENNFATFYAQKFQGRVTMTRDTSTSTVYMELSSLRSEDTAVYYCVEHESNNYPFAYWGQGTLVTVSS

SEQ ID NO: 4745 - protein, 122 aa, Artificial Sequence
  source: /note="Description of Artificial Sequence: Synthetic polypeptide"
QVQLVQSGAEVKKPGASVKVSCKASGFTFSDAWMDWVRQAPGQGLEWVAEIRNKINNHATYYAQKFQGRVTMTRDTSTSTVYMELSSLRSEDTAVYYCTSLYDGSYLRFAYWGQGTLVTVSS

SEQ ID NO: 4746 - protein, 122 aa, Artificial Sequence
  source: /note="Description of Artificial Sequence: Synthetic polypeptide"
QVQLVQSGAEVKKPGASVKVSCKASGFTFSDAWMDWVRQAPGQGLEWWVAEIRNKVNNHATYYQKFQGRVTMTRDTSTSTVYMELSSLRSEDTAVYYCCTSLYDGYYLRFAWGQGTLVTVSS

SEQ ID NO: 4747 - protein, 116 aa, Artificial Sequence
  source: /note="Description of Artificial Sequence: Synthetic polypeptide"
QVQLVQSGAEVKKPGASVKVSCKASGFTFSDAWMGWVRQAPGQGLEWVAEIRDKVKNHATYYAQKFQGRVTMTRDTSTSTVYMELSSLRSEDTAVYYCRLGVFDYWGQGTLVTVSS

SEQ ID NO: 4748 - protein, 119 aa, Artificial Sequence
  source: /note="Description of Artificial Sequence: Synthetic polypeptide"
QVQLVQSGAEVKKPGASVKVSCKASGFTLSSYAMSWVRQAPGQGLEWVASISRGGSTYYPQKFQGRVTMTRDTSTSTVYMELSSLRSEDTAVYYCTRGYGYYRTPFANWGQGTLVTVSS

SEQ ID NO: 4749 - protein, 121 aa, Artificial Sequence
  source: /note="Description of Artificial Sequence: Synthetic polypeptide"
QVQLVQSGAEVKKPGASVKVSCKASGLTSNTYTQTWVRQAPGQGLEWESVIRSKSNNFSTLYAQKFQGRVTMTRDTSTSTVYMELSSLRSEDTAVYYCVRHKSNRYPGVYWGQGTLVTVSS

SEQ ID NO: 4750 - protein, 126 aa, Artificial Sequence
  source: /note="Description of Artificial Sequence: Synthetic polypeptide"
QVQLVQSGAEVKKPGASVKVSCKASGYAFSNYWMSWVRQAPGQGLEWIGQIYPGDGDTKYNQKFQGRVTMTRDTSTSTVYMELSSLRSEDTAVYYCSREKGADYYGSTYSAWFSYWGQGTLVTVSS

SEQ ID NO: 4751 - protein, 123 aa, Artificial Sequence
  source: /note="Description of Artificial Sequence: Synthetic polypeptide"
QVQLVQSGAEVKKPGASVKVSCKASGYAFSSQWMNWVRQAPGQRLEWIGRIYPGEGDTNYAGKFQGRVTITADTSASTAYMELSSLRSEDTAVYYCARLLRNQPGESYAMDYWGQGTLVTVSS

SEQ ID NO: 4752 - protein, 123 aa, Artificial Sequence
  source: /note="Description of Artificial Sequence: Synthetic polypeptide"
QVQLVQSGAEVKKPGASVKVSCKASGYAFSSQWMNWVRQAPGQRLEWIGRIYPGGGDTNYAGKFQGRVTITADTSASTAYMELSSLRSEDTAVYYCARLLRNQPGESYAMDYWGQGTLVTVSS

SEQ ID NO: 4753 - protein, 123 aa, Artificial Sequence
  source: /note="Description of Artificial Sequence: Synthetic polypeptide"
QVQLVQSGAEVKKPGASVKVSCKASGYAFSSSWMNWVRQAPGQGLEWIGRIYPGDGDTNYAQKFQGRATLTADTSTSTAYMELSSLRSEDTAVYFCARLLRNQPGESYAMDYWGQGTLVTVSS

SEQ ID NO: 4754 - protein, 123 aa, Artificial Sequence
  source: /note="Description of Artificial Sequence: Synthetic polypeptide"
QVQLVQSGAEVKKPGASVKVSCKASGYAFSSSWMNWVRQAPGQGLEWIGRIYPGDGDTNYAQKFQGRATMTADTSTSTAYMELSSLRSEDTAVYYCARLLRNQPGESYAMDYWGQGTLVTVSS

SEQ ID NO: 4755 - protein, 123 aa, Artificial Sequence
  source: /note="Description of Artificial Sequence: Synthetic polypeptide"
QVQLVQSGAEVKKPGASVKVSCKASGYAFSSSWMNWVRQAPGQGLEWIGRIYPGDGDTNYNGEFRVRATLTADTSTSTAYMELSSLRSEDTAVYFCARLLRNQPGESYAMDYWGQGTLVTVSS

SEQ ID NO: 4756 - protein, 123 aa, Artificial Sequence
  source: /note="Description of Artificial Sequence: Synthetic polypeptide"
QVQLVQSGAEVKKPGASVKVSCKASGYAFSSSWMNWVRQAPGQGLEWIGRIYPGDGDTNYNQKFQGRVTMTRDTSTSTVYMELSSLRSEDTAVYYCARLLRNQPGESYAMDYWGQGTLVTVSS

SEQ ID NO: 4757 - protein, 123 aa, Artificial Sequence
  source: /note="Description of Artificial Sequence: Synthetic polypeptide"
QVQLVQSGAEVKKPGASVKVSCKASGYAFSSSWMNWVRQAPGQGLEWMGRIYPGDGDTNYAQKFQGRVTMTADTSTSTAYMELSSLRSEDTAVYYCARLLRNQPGESYAMDYWGQGTLVTVSS

SEQ ID NO: 4758 - protein, 123 aa, Artificial Sequence
  source: /note="Description of Artificial Sequence: Synthetic polypeptide"
QVQLVQSGAEVKKPGASVKVSCKASGYAFSSSWMNWVRQAPGQGLEWMGRIYPGDGDTNYNGEFRVRVTMTRDTSTSTVYMELSSLRSEDTAVYYCARLLRNQPGESYAMDYWGQGTLVTVSS

SEQ ID NO: 4759 - protein, 123 aa, Artificial Sequence
  source: /note="Description of Artificial Sequence: Synthetic polypeptide"
QVQLVQSGAEVKKPGASVKVSCKASGYAFSSSWMNWVRQAPGQRLEWIGRIYPGDGDTNYAQKFQGRATITADTSASTAYMELSSLRSEDTAVYFCARLLRNQPGESYAMDYWGQGTLVTVSS

SEQ ID NO: 4760 - protein, 123 aa, Artificial Sequence
  source: /note="Description of Artificial Sequence: Synthetic polypeptide"
QVQLVQSGAEVKKPGASVKVSCKASGYAFSSSWMNWVRQAPGQRLEWIGRIYPGDGDTNYAQKFQGRVTITADTSASTAYMELSSLRSEDTAVYYCARLLRNQPGESYAMDYWGQGTLVTVSS

SEQ ID NO: 4761 - protein, 123 aa, Artificial Sequence
  source: /note="Description of Artificial Sequence: Synthetic polypeptide"
QVQLVQSGAEVKKPGASVKVSCKASGYAFSSSWMNWVRQAPGQRLEWIGRIYPGDGDTNYARKFQGRVTITADTSASTAYMELSSLRSEDTAVYYCARLLRNQPGASYAMDYWGQGTLVTVSS

SEQ ID NO: 4762 - protein, 123 aa, Artificial Sequence
  source: /note="Description of Artificial Sequence: Synthetic polypeptide"
QVQLVQSGAEVKKPGASVKVSCKASGYAFSSSWMNWVRQAPGQRLEWMGRIYPGDGDTNYAQKFQGRVTITRDTSASTAYMELSSLRSEDTAVYYCARLLRNQPGESYAMDYWGQGTLVTVSS

SEQ ID NO: 4763 - protein, 123 aa, Artificial Sequence
  source: /note="Description of Artificial Sequence: Synthetic polypeptide"
QVQLVQSGAEVKKPGASVKVSCKASGYAFWSSWMNWVRQAPGQRLEWIGRIYPGDGDTNYAQKFQGRVTITADTSASTAYMELSSLRSEDTAVYYCARLLRNQPGESYAHDYWGQGTLVTVSS

SEQ ID NO: 4764 - protein, 116 aa, Artificial Sequence
  source: /note="Description of Artificial Sequence: Synthetic polypeptide"
QVQLVQSGAEVKKPGASVKVSCKASGYIFTTYWIHWVRQAPGQGLEWIGRIDPNNGDTNYNQKFQGRVTMTRDTSTSTVYMELSSLRSEDTAVYYCVMTGTDFDYWGQGTLVTVSS

SEQ ID NO: 4765 - protein, 120 aa, Artificial Sequence
  source: /note="Description of Artificial Sequence: Synthetic polypeptide"
QVQLVQSGAEVKKPGASVKVSCKASGYPFSNFWITWVRQAPGQGLEWIGDIYPGSDNRNFNQKFQGRVTMTRDTSTSTVYMELSSLRSEDTAVYYCAREAYYTNPGFAYWGQGTLVTVSS

SEQ ID NO: 4766 - protein, 120 aa, Artificial Sequence
  source: /note="Description of Artificial Sequence: Synthetic polypeptide"
QVQLVQSGAEVKKPGASVKVSCKASGYPFSNFWITWVRQAPGQGLEWIGDIYPGSDNSNYNQKFQGRVTMTRDTSTSTVYMELSSLRSEDTAVYYCAREAYYTNPGFAYWGQGTLVTVSS

SEQ ID NO: 4767 - protein, 116 aa, Artificial Sequence
  source: /note="Description of Artificial Sequence: Synthetic polypeptide"
QVQLVQSGAEVKKPGASVKVSCKASGYSFTGYYMHWVRQAPGQGLEWIGRVNPNNGGTSYNQKFQGRVTMTRDTSTSTVYMELSSLRSEDTAVYYCVLTGGYFDYWGQGTLVTVSS

SEQ ID NO: 4768 - protein, 119 aa, Artificial Sequence
  source: /note="Description of Artificial Sequence: Synthetic polypeptide"
QVQLVQSGAEVKKPGASVKVSCKASGYTFSDYYIHWVRQAPGQGLEWIGYIYPNNGDNGYNQKFQGRVTMTRDTSTSTVYMELSSLRSEDTAVYYCARRGYYGGSYDYWGQGTLVTVSS

SEQ ID NO: 4769 - protein, 125 aa, Artificial Sequence
  source: /note="Description of Artificial Sequence: Synthetic polypeptide"
QVQLVQSGAEVKKPGASVKVSCKASGYTFTDYEMHWVRQAPGQGLEWIGVIDPETGGTAYNQKFQGRVTMTRDTSTSTVYMELSSLRSEDTAVYYCTSPDYYGSSYPLYYAMDYWGQGTLVTVSS

SEQ ID NO: 4770 - protein, 119 aa, Artificial Sequence
  source: /note="Description of Artificial Sequence: Synthetic polypeptide"
QVQLVQSGAEVKKPGASVKVSCKASGYTFTEYTMHWVRQAPGQGLEWIGGINPNNGGTSYKQKFQGRVTMTRDTSTSTVYMELSSLRSEDTAVYYCARGGSHYYAMDYWGQGTLVTVSS

SEQ ID NO: 4771 - protein, 119 aa, Artificial Sequence
  source: /note="Description of Artificial Sequence: Synthetic polypeptide"
QVQLVQSGAEVKKPGASVKVSCKASGYTFTEYTMHWVRQAPGQGLEWIGGINPNNGGTSYSQKFQGRVTMTRDTSTSTVYMELSSLRSEDTAVYYCARGGSHYYAMDYWGQGTLVTVSS

SEQ ID NO: 4772 - protein, 117 aa, Artificial Sequence
  source: /note="Description of Artificial Sequence: Synthetic polypeptide"
QVQLVQSGAEVKKPGASVKVSCKASGYTFTGSYMHWVRQAPGQGLEWMGWINPNSGGTNYAQKFQGRVTMTRDTSISTAYMELSRLRSDDTAVYYCARAGHKTHDYWGQGTLVTVSS

SEQ ID NO: 4773 - protein, 117 aa, Artificial Sequence
  source: /note="Description of Artificial Sequence: Synthetic polypeptide"
QVQLVQSGAEVKKPGASVKVSCKASGYTFTGSYMHWVRQAPGQGLEWMGWINPNSGGTNYAQKFQGRVTMTRDTSISTAYMELSRLRSDDTAVYYCARAKSVDHDYWGQGTLVTVSS

SEQ ID NO: 4774 - protein, 119 aa, Artificial Sequence
  source: /note="Description of Artificial Sequence: Synthetic polypeptide"
QVQLVQSGAEVKKPGASVKVSCKASGYTFTGSYMHWVRQAPGQGLEWMGWINPNSGGTNYAQKFQGRVTMTRDTSISTAYMELSRLRSDDTAVYYCARGGVWYSLFDIWGQGTMVTVSS

SEQ ID NO: 4775 - protein, 120 aa, Artificial Sequence
  source: /note="Description of Artificial Sequence: Synthetic polypeptide"
QVQLVQSGAEVKKPGASVKVSCKASGYTFTGSYMHWVRQAPGQGLEWMGWINPNSGGTNYAQKFQGRVTMTRDTSISTAYMELSRLRSDDTAVYYCARGPLYHPMIFDYWGQGTLVTVSS

SEQ ID NO: 4776 - protein, 115 aa, Artificial Sequence
  source: /note="Description of Artificial Sequence: Synthetic polypeptide"
QVQLVQSGAEVKKPGASVKVSCKASGYTFTGYYMHWVRQAPGQGLEWMGSINPNSGGTNYAQKFQGRVTMTRDTSISTAYMELSRLRSDDTAVYYCARASSVDNWGQGTLVTVSS

SEQ ID NO: 4777 - protein, 121 aa, Artificial Sequence
  source: /note="Description of Artificial Sequence: Synthetic polypeptide"
QVQLVQSGAEVKKPGASVKVSCKASGYTFTGYYMHWVRQAPGQGLEWMGWINPNSGGTNYAQKFQGRVTMTRDTSISTAYMELSRLRSDDTAVYYCARDLGYSSLLALDIWGQGTMVTVSS

SEQ ID NO: 4778 - protein, 116 aa, Artificial Sequence
  source: /note="Description of Artificial Sequence: Synthetic polypeptide"
QVQLVQSGAEVKKPGASVKVSCKASGYTFTGYYMHWVRQAPGQGLEWMGWINPNSGGTSYAQKFQGRVTMTRDTSISTAYMELSRLRSDDTAVYYCARASKMGDDWGQGTLVTVSS

SEQ ID NO: 4779 - protein, 126 aa, Artificial Sequence
  source: /note="Description of Artificial Sequence: Synthetic polypeptide"
QVQLVQSGAEVKKPGASVKVSCKASGYTFTNYGISWVRQAPGQGLEWMGWISAYNGNTNYAQKLQGRVTMTTDTSTSTAYMELRSLRSDDTAVYYCARGPTKAYYGSGSYVVFDPWGQGTLVTVSS

SEQ ID NO: 4780 - protein, 120 aa, Artificial Sequence
  source: /note="Description of Artificial Sequence: Synthetic polypeptide"
QVQLVQSGAEVKKPGASVKVSCKASGYTFTSYGIHWVRQAPGQGLEWMGWISAYNGNTNYAQKLQGRVTMTTDTSTSTAYMELRSLRSDDTAVYYCARGGVPRVSYFQHWGQGTLVTVSS

SEQ ID NO: 4781 - protein, 118 aa, Artificial Sequence
  source: /note="Description of Artificial Sequence: Synthetic polypeptide"
QVQLVQSGAEVKKPGASVKVSCKASGYTFTSYGISWVRQAPGQGLEWMGWISAYNGNTNYAQKLQGRVTMTTDTSTSTAYMELRSLRSDDTAVYYCARGPSHYYDLAWGQGTLVTVSS

SEQ ID NO: 4782 - protein, 120 aa, Artificial Sequence
  source: /note="Description of Artificial Sequence: Synthetic polypeptide"
QVQLVQSGAEVKKPGASVKVSCKASGYTFTSYGISWVRQAPGQGLEWMGWISTYNGNTNYAQKLQGRVTMTTDTSTSTAYMELRSLRSDDTAVYYCARGSGSGYDSWYDWGQGTLVTVSS

SEQ ID NO: 4783 - protein, 120 aa, Artificial Sequence
  source: /note="Description of Artificial Sequence: Synthetic polypeptide"
QVQLVQSGAEVKKPGASVKVSCKASGYTFTSYYIHWVRQAPGQGLEWMGIINPSGGSTSYAQKFQGRVTMTRDTSTSTVYMELSSLRSEDTAVYYCARAPQESPYVFDIWGQGTMVTVSS

SEQ ID NO: 4784 - protein, 123 aa, Artificial Sequence
  source: /note="Description of Artificial Sequence: Synthetic polypeptide"
QVQLVQSGAEVKKPGASVKVSCKASGYTFTSYYIHWVRQAPGQGLEWMGIINPSGGSTSYAQKFQGRVTMTRDTSTSTVYMELSSLRSEDTAVYYCAREADDSSGYPLGLDVWGQGTMVTVSS

SEQ ID NO: 4785 - protein, 120 aa, Artificial Sequence
  source: /note="Description of Artificial Sequence: Synthetic polypeptide"
QVQLVQSGAEVKKPGASVKVSCKASGYTFTSYYMHWVRQAPGQGLEWMGIINPGGGSTSYAQKFQGRVTMTRDTSTSTVYMELSSLRSEDTAVYYCARGSPTYGYLYDPWGQGTLVTVSS

SEQ ID NO: 4786 - protein, 122 aa, Artificial Sequence
  source: /note="Description of Artificial Sequence: Synthetic polypeptide"
QVQLVQSGAEVKKPGASVKVSCKASGYTFTSYYMHWVRQAPGQGLEWMGIINPSGGSTSYAQKFQGRVTMTRDTSTSTVYMELSSLRSEDTAVYYCARDISTHDYDLAFDIWGQGTMVTVSS

SEQ ID NO: 4787 - protein, 124 aa, Artificial Sequence
  source: /note="Description of Artificial Sequence: Synthetic polypeptide"
QVQLVQSGAEVKKPGASVKVSCKASGYTFTSYYMHWVRQAPGQGLEWMGIINPSGGSTSYAQKFQGRVTMTRDTSTSTVYMELSSLRSEDTAVYYCARGPGYTTALDYYYMDVWGKGTTVTVSS

SEQ ID NO: 4788 - protein, 121 aa, Artificial Sequence
  source: /note="Description of Artificial Sequence: Synthetic polypeptide"
QVQLVQSGAEVKKPGASVKVSCKASGYTFTSYYMHWVRQAPGQGLEWMGIINPSGGSTSYAQKFQGRVTMTRDTSTSTVYMELSSLRSEDTAVYYCARGVGGQDYYYMDVWGKGTTVTVSS

SEQ ID NO: 4789 - protein, 116 aa, Artificial Sequence
  source: /note="Description of Artificial Sequence: Synthetic polypeptide"
QVQLVQSGAEVKKPGASVKVSCKASGYTFTSYYMHWVRQAPGQGLEWMGIINPSGGSTSYAQKFQGRVTMTRDTSTSTVYMELSSLRSEDTAVYYCARPAKTADYWGQGTLVTVSS

SEQ ID NO: 4790 - protein, 116 aa, Artificial Sequence
  source: /note="Description of Artificial Sequence: Synthetic polypeptide"
QVQLVQSGAEVKKPGASVKVSCKASGYTFTSYYMHWVRQAPGQGLEWMGIINPSGGSTTYAQKFQGRVTMTRDTSTSTVYMELSSLRSEDTAVYYCARPGKSMDVWGQGTTVTVSS

SEQ ID NO: 4791 - protein, 117 aa, Artificial Sequence
  source: /note="Description of Artificial Sequence: Synthetic polypeptide"
QVQLVQSGAEVKKPGASVKVSCKASGYTFTSYYMHWVRQAPGQGLEWMGIINPSGGSTTYAQKFQGRVTMTRDTSTSTVYMELSSLRSEDTAVYYCARTSSKERDYWGQGTLVTVSS

SEQ ID NO: 4792 - protein, 116 aa, Artificial Sequence
  source: /note="Description of Artificial Sequence: Synthetic polypeptide"
QVQLVQSGAEVKKPGASVKVSCKASGYTFTTYWIHWVRQAPGQGLEWIGRNDPNSGGSNYNQKFQGRVTMTRDTSTSTVYMELSSLRSEDTAVYYCVRTNWDGDFWGQGTLVTVSS

SEQ ID NO: 4793 - protein, 116 aa, Artificial Sequence
  source: /note="Description of Artificial Sequence: Synthetic polypeptide"
QVQLVQSGAEVKKPGASVKVSCKASGYTVSRYWMHWVRQAPGQGLEWIGRIDPNSGGTKYNQKFQGRVTMTRDTSTSTVYMELSSLRSEDTAVYYCVLTGTDFDYWGQGTLVTVSS

SEQ ID NO: 4794 - protein, 121 aa, Artificial Sequence
  source: /note="Description of Artificial Sequence: Synthetic polypeptide"
QVQLVQSGAEVKKPGSSVKVSCKASGFNFNTYAMKWVRQAPGQGLEWIARIRSNSNDYATNYSQKFQGRVTITADESTSTAYMELSSLRSEDTAVYYCVGHKINNYPFAHWGQGTLVTVSS

SEQ ID NO: 4795 - protein, 122 aa, Artificial Sequence
  source: /note="Description of Artificial Sequence: Synthetic polypeptide"
QVQLVQSGAEVKKPGSSVKVSCKASGFNFNTYAMNWVRQAPGQGLEWVARIRSKSNNYATYYAQKFQGRVTITADESTSTAYMELSSLRSEDTAVYYCVRHYSNYGWGFAYWGQGTLVTVSS

SEQ ID NO: 4796 - protein, 121 aa, Artificial Sequence
  source: /note="Description of Artificial Sequence: Synthetic polypeptide"
QVQLVQSGAEVKKPGSSVKVSCKASGFRFNTYAMTWVRQAPGQGLEWEGVIRRKSSNFATLYAQKFQGRVTITADESTSTAYMELSSLRSEDTAVYYCVRHKSNKYPFVYWGQGTLVTVSS

SEQ ID NO: 4797 - protein, 122 aa, Artificial Sequence
  source: /note="Description of Artificial Sequence: Synthetic polypeptide"
QVQLVQSGAEVKKPGSSVKVSCKASGFSFNTYAMNWVRQAPGQGLEWIARIRSKSNNYATYYAQKFQGRVTITADESTSTAYMELSSLRSEDTAVYYCVRHGDGNLWYIDVWGQGTLVTVSS

SEQ ID NO: 4798 - protein, 121 aa, Artificial Sequence
  source: /note="Description of Artificial Sequence: Synthetic polypeptide"
  VARIANT (55)..(55): /replace="Gln"
  VARIANT (100)..(100): /replace="Gln"
  VARIANT (102)..(102): /replace="Gln"
  SITE (1)..(121): /note="Variant residues given in the sequence have no preference with respect to those in the annotations for variant positions"
QVQLVQSGAEVKKPGSSVKVSCKASGFTFNTYSMNWVRQAPGQGLEWVAHIKTKENNFATFYAQKFQGRVTITADESTSTAYMELSSLRSEDTAVYYCVEHESNNYPFAYWGQGTLVTVSS

SEQ ID NO: 4799 - protein, 122 aa, Artificial Sequence
  source: /note="Description of Artificial Sequence: Synthetic polypeptide"
QVQLVQSGAEVKKPGSSVKVSCKASGFTFSDAWMDWVRQAPGQGLEWVAEIRNKINNHATYYAQKFQGRVTITADESTSTAYMELSSLRSEDTAVYYCTSLYDGSYLRFAYWGQGTLVTVSS

SEQ ID NO: 4800 - protein, 122 aa, Artificial Sequence
  source: /note="Description of Artificial Sequence: Synthetic polypeptide"
QVQLVQSGAEVKKPGSSVKVSCKASGFTFSDAWMDWVRQAPGQGLEWWVAEIRNKVNNHATYYQKFQGRVTITADESTSTAYMELSSLRSEDTAVYYCCTSLYDGYYLRFAWGQGTLVTVSS

SEQ ID NO: 4801 - protein, 116 aa, Artificial Sequence
  source: /note="Description of Artificial Sequence: Synthetic polypeptide"
QVQLVQSGAEVKKPGSSVKVSCKASGFTFSDAWMGWVRQAPGQGLEWVAEIRDKVKNHATYYAQKFQGRVTITADESTSTAYMELSSLRSEDTAVYYCRLGVFDYWGQGTLVTVSS

SEQ ID NO: 4802 - protein, 119 aa, Artificial Sequence
  source: /note="Description of Artificial Sequence: Synthetic polypeptide"
QVQLVQSGAEVKKPGSSVKVSCKASGFTLSSYAMSWVRQAPGQGLEWVASISRGGSTYYPQKFQGRVTITADESTSTAYMELSSLRSEDTAVYYCTRGYGYYRTPFANWGQGTLVTVSS

SEQ ID NO: 4803 - protein, 123 aa, Artificial Sequence
  source: /note="Description of Artificial Sequence: Synthetic polypeptide"
QVQLVQSGAEVKKPGSSVKVSCKASGGTFSSYAISWVRQAPGQGLEWMGGIIPIFGTANYAQKFQGRVTITADESTSTAYMELSSLRSEDTAVYYCARDSGNYDYWSGALRYWGQGTLVTVSS

SEQ ID NO: 4804 - protein, 118 aa, Artificial Sequence
  source: /note="Description of Artificial Sequence: Synthetic polypeptide"
QVQLVQSGAEVKKPGSSVKVSCKASGGTFSSYAISWVRQAPGQGLEWMGGIIPIFGTANYAQKFQGRVTITADESTSTAYMELSSLRSEDTAVYYCAREQYHVGMDVWGKGTTVTVSS

SEQ ID NO: 4805 - protein, 122 aa, Artificial Sequence
  source: /note="Description of Artificial Sequence: Synthetic polypeptide"
QVQLVQSGAEVKKPGSSVKVSCKASGGTFSSYAISWVRQAPGQGLEWMGGIIPIFGTANYAQKFQGRVTITADESTSTAYMELSSLRSEDTAVYYCARGGGTFWSGSWALYWGQGTLVTVSS

SEQ ID NO: 4806 - protein, 117 aa, Artificial Sequence
  source: /note="Description of Artificial Sequence: Synthetic polypeptide"
QVQLVQSGAEVKKPGSSVKVSCKASGGTFSSYAISWVRQAPGQGLEWMGGIIPIFGTASYAQKFQGRVTITADESTSTAYMELSSLRSEDTAVYYCARGVDSIMDYWGQGTLVTVSS

SEQ ID NO: 4807 - protein, 121 aa, Artificial Sequence
  source: /note="Description of Artificial Sequence: Synthetic polypeptide"
QVQLVQSGAEVKKPGSSVKVSCKASGLTSNTYTQTWVRQAPGQGLEWESVIRSKSNNFSTLYAQKFQGRVTITADESTSTAYMELSSLRSEDTAVYYCVRHKSNRYPGVYWGQGTLVTVSS

SEQ ID NO: 4808 - protein, 123 aa, Artificial Sequence
  source: /note="Description of Artificial Sequence: Synthetic polypeptide"
QVQLVQSGAEVKKPGSSVKVSCKASGYAFSLSWMNWVRQAPGQGLEWMGRIYPGDGDTNYAQKFRGRVTITADESTSTAYMELSSLRSEDTAVYYCARLLRNQPGESYAMDYWGQGTLVTVSS

SEQ ID NO: 4809 - protein, 123 aa, Artificial Sequence
  source: /note="Description of Artificial Sequence: Synthetic polypeptide"
QVQLVQSGAEVKKPGSSVKVSCKASGYAFSLSWMNWVRQAPGQGLEWMGRIYPGDGDTNYARKFQGRVTITADESTSTAYMELSSLRSEDTAVYYCARLLRNQPGSSYAMDYWGQGTLVTVSS

SEQ ID NO: 4810 - protein, 126 aa, Artificial Sequence
  source: /note="Description of Artificial Sequence: Synthetic polypeptide"
QVQLVQSGAEVKKPGSSVKVSCKASGYAFSNYWMSWVRQAPGQGLEWIGQIYPGDGDTKYNQKFQGRVTITADESTSTAYMELSSLRSEDTAVYYCSREKGADYYGSTYSAWFSYWGQGTLVTVSS

SEQ ID NO: 4811 - protein, 123 aa, Artificial Sequence
  source: /note="Description of Artificial Sequence: Synthetic polypeptide"
QVQLVQSGAEVKKPGSSVKVSCKASGYAFSRSWMNWVRQAPGQGLEWMGRIYPGDGDTNYAQKFQGRVTITADESTSTAYMELSSLRSEDTAVYYCARLLRNQPGASYAMDYWGQGTLVTVSS

SEQ ID NO: 4812 - protein, 123 aa, Artificial Sequence
  source: /note="Description of Artificial Sequence: Synthetic polypeptide"
QVQLVQSGAEVKKPGSSVKVSCKASGYAFSSDWMNWVRQAPGQGLEWMGRIYPGDGDTNYAQKFQGRVTITADESTSTAYMELSSLRSEDTAVYYCARLLRNQPGESYAMDYWGQGTLVTVSS

SEQ ID NO: 4813 - protein, 123 aa, Artificial Sequence
  source: /note="Description of Artificial Sequence: Synthetic polypeptide"
QVQLVQSGAEVKKPGSSVKVSCKASGYAFSSDWMNWVRQAPGQGLEWMGRIYPGDGDTNYARKFQGRVTITADESTSTAYMELSSLRSEDTAVYYCARLLRNQPGESYAMDYWGQGTLVTVSS

SEQ ID NO: 4814 - protein, 123 aa, Artificial Sequence
  source: /note="Description of Artificial Sequence: Synthetic polypeptide"
QVQLVQSGAEVKKPGSSVKVSCKASGYAFSSDWMNWVRQAPGQGLEWMGRIYPGEGDTNYARKFHGRVTITADESTSTAYMELSSLRSEDTAVYYCARLLRNKPGESYAMDYWGQGTLVTVSS

SEQ ID NO: 4815 - protein, 123 aa, Artificial Sequence
  source: /note="Description of Artificial Sequence: Synthetic polypeptide"
QVQLVQSGAEVKKPGSSVKVSCKASGYAFSSDWMNWVRQAPGQGLEWMGRIYPGEGDTNYARKFQGRVTITADESTSTAYMELSSLRSEDTAVYYCARLLRNKPGESYAMDYWGQGTLVTVSS

SEQ ID NO: 4816 - protein, 123 aa, Artificial Sequence
  source: /note="Description of Artificial Sequence: Synthetic polypeptide"
QVQLVQSGAEVKKPGSSVKVSCKASGYAFSSEWMNWVRQAPGQGLEWMGRIYPGDGDTNYAQKFQGRVTITADESTSTAYMELSSLRSEDTAVYYCARLLRNQPGESYAMDYWGQGTLVTVSS

SEQ ID NO: 4817 - protein, 123 aa, Artificial Sequence
  source: /note="Description of Artificial Sequence: Synthetic polypeptide"
QVQLVQSGAEVKKPGSSVKVSCKASGYAFSSHWMNWVRQAPGQGLEWMGRIYPGDGDTNYAHKFQGRVTITADESTSTAYMELSSLRSEDTAVYYCARLLRNQPGESYAMDYWGQGTLVTVSS

SEQ ID NO: 4818 - protein, 123 aa, Artificial Sequence
  source: /note="Description of Artificial Sequence: Synthetic polypeptide"
QVQLVQSGAEVKKPGSSVKVSCKASGYAFSSHWMNWVRQAPGQGLEWMGRIYPGDGDTNYAQKFKGRVTITADESTSTAYMELSSLRSEDTAVYYCARLLRNQPGESYAMDYWGQGTLVTVSS

SEQ ID NO: 4819 - protein, 123 aa, Artificial Sequence
  source: /note="Description of Artificial Sequence: Synthetic polypeptide"
QVQLVQSGAEVKKPGSSVKVSCKASGYAFSSHWMNWVRQAPGQGLEWMGRIYPGDGDTNYAQKFQGRVTITADESTSTAYMELSSLRSEDTAVYYCARLLRNQPGESYAMDYWGQGTLVTVSS

SEQ ID NO: 4820 - protein, 123 aa, Artificial Sequence
  source: /note="Description of Artificial Sequence: Synthetic polypeptide"
QVQLVQSGAEVKKPGSSVKVSCKASGYAFSSHWMNWVRQAPGQGLEWMGRIYPGDGDTNYAQKFRGRVTITADESTSTAYMELSSLRSEDTAVYYCARLLRNQPGASYAMDYWGQGTLVTVSS

SEQ ID NO: 4821 - protein, 123 aa, Artificial Sequence
  source: /note="Description of Artificial Sequence: Synthetic polypeptide"
QVQLVQSGAEVKKPGSSVKVSCKASGYAFSSHWMNWVRQAPGQGLEWMGRIYPGDGDTNYAQKRQGRVTITADESTSTAYMELSSLRSEDTAVYYCARLLRNQPGESYAMDYWGQGTLVTVSS

SEQ ID NO: 4822 - protein, 123 aa, Artificial Sequence
  source: /note="Description of Artificial Sequence: Synthetic polypeptide"
QVQLVQSGAEVKKPGSSVKVSCKASGYAFSSHWMNWVRQAPGQGLEWMGRIYPGDGDTNYAQKWQGRVTITADESTSTAYMELSSLRSEDTAVYYCARLLRNQPGSSYAMDYWGQGTLVTVSS

SEQ ID NO: 4823 - protein, 123 aa, Artificial Sequence
  source: /note="Description of Artificial Sequence: Synthetic polypeptide"
QVQLVQSGAEVKKPGSSVKVSCKASGYAFSSHWMNWVRQAPGQGLEWMGRIYPGDGDTNYARKFQGRVTITADESTSTAYMELSSLRSEDTAVYYCARLLRNQPGESYAMDYWGQGTLVTVSS

SEQ ID NO: 4824 - protein, 123 aa, Artificial Sequence
  source: /note="Description of Artificial Sequence: Synthetic polypeptide"
QVQLVQSGAEVKKPGSSVKVSCKASGYAFSSHWMNWVRQAPGQGLEWMGRIYPGDGDTNYAWKFQGRVTITADESTSTAYMELSSLRSEDTAVYYCARLLRNQPGESYAMDYWGQGTLVTVSS

SEQ ID NO: 4825 - protein, 123 aa, Artificial Sequence
  source: /note="Description of Artificial Sequence: Synthetic polypeptide"
QVQLVQSGAEVKKPGSSVKVSCKASGYAFSSHWMNWVRQAPGQGLEWMGRIYPGDGDTNYAYKFQGRVTITADESTSTAYMELSSLRSEDTAVYYCARLLRNQPGESYAMDYWGQGTLVTVSS

SEQ ID NO: 4826 - protein, 123 aa, Artificial Sequence
  source: /note="Description of Artificial Sequence: Synthetic polypeptide"
QVQLVQSGAEVKKPGSSVKVSCKASGYAFSSHWMNWVRQAPGQGLEWMGRIYPGDGQTNYAQKRQGRVTITADESTSTAYMELSSLRSEDTAVYYCARLLRNQPGESYAMDYWGQGTLVTVSS

SEQ ID NO: 4827 - protein, 123 aa, Artificial Sequence
  source: /note="Description of Artificial Sequence: Synthetic polypeptide"
QVQLVQSGAEVKKPGSSVKVSCKASGYAFSSHWMNWVRQAPGQGLEWMGRIYPGEGDTNYAQKFHGRVTITADESTSTAYMELSSLRSEDTAVYYCARLLRNKPGESYAMDYWGQGTLVTVSS

SEQ ID NO: 4828 - protein, 123 aa, Artificial Sequence
  source: /note="Description of Artificial Sequence: Synthetic polypeptide"
QVQLVQSGAEVKKPGSSVKVSCKASGYAFSSHWMNWVRQAPGQGLEWMGRIYPGEGDTNYAQKFHGRVTITADESTSTAYMELSSLRSEDTAVYYCARLLRNQPGESYAMDYWGQGTLVTVSS

SEQ ID NO: 4829 - protein, 123 aa, Artificial Sequence
  source: /note="Description of Artificial Sequence: Synthetic polypeptide"
QVQLVQSGAEVKKPGSSVKVSCKASGYAFSSHWMNWVRQAPGQGLEWMGRIYPGEGDTNYAQKFRGRVTITADESTSTAYMELSSLRSEDTAVYYCARLLRNQPGASYAMDYWGQGTLVTVSS

SEQ ID NO: 4830 - protein, 123 aa, Artificial Sequence
  source: /note="Description of Artificial Sequence: Synthetic polypeptide"
QVQLVQSGAEVKKPGSSVKVSCKASGYAFSSHWMNWVRQAPGQGLEWMGRIYPGEGQTNYAQKRQGRVTITADESTSTAYMELSSLRSEDTAVYYCARLLRNQPGESYAMDYWGQGTLVTVSS

SEQ ID NO: 4831 - protein, 123 aa, Artificial Sequence
  source: /note="Description of Artificial Sequence: Synthetic polypeptide"
QVQLVQSGAEVKKPGSSVKVSCKASGYAFSSHWMNWVRQAPGQGLEWMGRIYPGGGDTNYAQKFQGRVTITADESTSTAYMELSSLRSEDTAVYYCARLLRNQPGESYAMDYWGQGTLVTVSS

SEQ ID NO: 4832 - protein, 123 aa, Artificial Sequence
  source: /note="Description of Artificial Sequence: Synthetic polypeptide"
QVQLVQSGAEVKKPGSSVKVSCKASGYAFSSHWMNWVRQAPGQGLEWMGRIYPGGGDTNYAQKFRGRVTITADESTSTAYMELSSLRSEDTAVYYCARLLRNQPGASYAMDYWGQGTLVTVSS

SEQ ID NO: 4833 - protein, 123 aa, Artificial Sequence
  source: /note="Description of Artificial Sequence: Synthetic polypeptide"
QVQLVQSGAEVKKPGSSVKVSCKASGYAFSSHWMNWVRQAPGQGLEWMGRIYPGGGDTNYAQKFRGRVTITADESTSTAYMELSSLRSEDTAVYYCARLLRNQPGESYAMDYWGQGTLVTVSS

SEQ ID NO: 4834 - protein, 123 aa, Artificial Sequence
  source: /note="Description of Artificial Sequence: Synthetic polypeptide"
QVQLVQSGAEVKKPGSSVKVSCKASGYAFSSHWMNWVRQAPGQGLEWMGRIYPGGGDTNYAQKRQGRVTITADESTSTAYMELSSLRSEDTAVYYCARLLRNQPGESYAMDYWGQGTLVTVSS

SEQ ID NO: 4835 - protein, 123 aa, Artificial Sequence
  source: /note="Description of Artificial Sequence: Synthetic polypeptide"
QVQLVQSGAEVKKPGSSVKVSCKASGYAFSSHWMNWVRQAPGQGLEWMGRIYPGGGDTNYARKFRGRVTITADESTSTAYMELSSLRSEDTAVYYCARLLRNQPGASYAMDYWGQGTLVTVSS

SEQ ID NO: 4836 - protein, 123 aa, Artificial Sequence
  source: /note="Description of Artificial Sequence: Synthetic polypeptide"
QVQLVQSGAEVKKPGSSVKVSCKASGYAFSSHWMNWVRQAPGQGLEWMGRIYPGQGDTNYAQKFQGRVTITADESTSTAYMELSSLRSEDTAVYYCARLLRNQPGESYAMDYWGQGTLVTVSS

SEQ ID NO: 4837 - protein, 123 aa, Artificial Sequence
  source: /note="Description of Artificial Sequence: Synthetic polypeptide"
QVQLVQSGAEVKKPGSSVKVSCKASGYAFSSHWMNWVRQAPGQGLEWMGRIYPGVGDTNYAQKFQGRVTITADESTSTAYMELSSLRSEDTAVYYCARLLRNQPGESYAMDYWGQGTLVTVSS

SEQ ID NO: 4838 - protein, 123 aa, Artificial Sequence
  source: /note="Description of Artificial Sequence: Synthetic polypeptide"
QVQLVQSGAEVKKPGSSVKVSCKASGYAFSSQWMNWVRQAPGQGLEWMGRIYPGDGDTNYAQKFQGRVTITADESTSTAYMELSSLRSEDTAVYYCARLLRNQPGESYAMDYWGQGTLVTVSS

SEQ ID NO: 4839 - protein, 123 aa, Artificial Sequence
  source: /note="Description of Artificial Sequence: Synthetic polypeptide"
QVQLVQSGAEVKKPGSSVKVSCKASGYAFSSQWMNWVRQAPGQGLEWMGRIYPGDGDTNYAWKFQGRVTITADESTSTAYMELSSLRSEDTAVYYCARLLRNQPGESYAMDYWGQGTLVTVSS

SEQ ID NO: 4840 - protein, 123 aa, Artificial Sequence
  source: /note="Description of Artificial Sequence: Synthetic polypeptide"
QVQLVQSGAEVKKPGSSVKVSCKASGYAFSSQWMNWVRQAPGQGLEWMGRIYPGEGDTNYARKFQGRVTITADESTSTAYMELSSLRSEDTAVYYCARLLRNQPGESYAMDYWGQGTLVTVSS

SEQ ID NO: 4841 - protein, 123 aa, Artificial Sequence
  source: /note="Description of Artificial Sequence: Synthetic polypeptide"
QVQLVQSGAEVKKPGSSVKVSCKASGYAFSSQWMNWVRQAPGQGLEWMGRIYPGGGDTNYARKFQGRVTITADESTSTAYMELSSLRSEDTAVYYCARLLRNQPGESYAMDYWGQGTLVTVSS

SEQ ID NO: 4842 - protein, 123 aa, Artificial Sequence
  source: /note="Description of Artificial Sequence: Synthetic polypeptide"
QVQLVQSGAEVKKPGSSVKVSCKASGYAFSSSWMNWVRQAPGQGLEWIGRIYPGDGDTNYAQKFQGRATITADTSTSTAYMELSSLRSEDTAVYFCARLLRNQPGESYAMDYWGQGTLVTVSS

SEQ ID NO: 4843 - protein, 123 aa, Artificial Sequence
  source: /note="Description of Artificial Sequence: Synthetic polypeptide"
QVQLVQSGAEVKKPGSSVKVSCKASGYAFSSSWMNWVRQAPGQGLEWIGRIYPGDGDTNYAQKFQGRATLTADTSTTTAYMELSSLRSEDTAVYFCARLLRNQPGESYAMDYWGQGTLVTVSS

SEQ ID NO: 4844 - protein, 123 aa, Artificial Sequence
  source: /note="Description of Artificial Sequence: Synthetic polypeptide"
QVQLVQSGAEVKKPGSSVKVSCKASGYAFSSSWMNWVRQAPGQGLEWIGRIYPGDGDTNYNGEFRVRATLTADTSTTTAYMELSSLRSEDTAVYFCARLLRNQPGESYAMDYWGQGTLVTVSS

SEQ ID NO: 4845 - protein, 123 aa, Artificial Sequence
  source: /note="Description of Artificial Sequence: Synthetic polypeptide"
QVQLVQSGAEVKKPGSSVKVSCKASGYAFSSSWMNWVRQAPGQGLEWIGRIYPGDGDTNYNQKFQGRVTITADESTSTAYMELSSLRSEDTAVYYCARLLRNQPGESYAMDYWGQGTLVTVSS

SEQ ID NO: 4846 - protein, 123 aa, Artificial Sequence
  source: /note="Description of Artificial Sequence: Synthetic polypeptide"
QVQLVQSGAEVKKPGSSVKVSCKASGYAFSSSWMNWVRQAPGQGLEWMGRIYPGDGDTNYAQKFQGRATITADTSTSTAYMELSSLRSEDTAVYYCARLLRNQPGESYAMDYWGQGTLVTVSS

SEQ ID NO: 4847 - protein, 123 aa, Artificial Sequence
  source: /note="Description of Artificial Sequence: Synthetic polypeptide"
QVQLVQSGAEVKKPGSSVKVSCKASGYAFSSSWMNWVRQAPGQGLEWMGRIYPGDGDTNYAQKFQGRVTITADESTSTAYMELSSLRSEDTAVYYCARLLRNQPGESYAMDYWGQGTLVTVSS

SEQ ID NO: 4848 - protein, 123 aa, Artificial Sequence
  source: /note="Description of Artificial Sequence: Synthetic polypeptide"
QVQLVQSGAEVKKPGSSVKVSCKASGYAFSSSWMNWVRQAPGQGLEWMGRIYPGEGDTNYAQKFQGRVTITADESTSTAYMELSSLRSEDTAVYYCARLLRNQPGESYAMDYWGQGTLVTVSS

SEQ ID NO: 4849 - protein, 123 aa, Artificial Sequence
  source: /note="Description of Artificial Sequence: Synthetic polypeptide"
QVQLVQSGAEVKKPGSSVKVSCKASGYAFSSSWMNWVRQAPGQGLEWMGRIYPGGGDTNYAQKFQGRVTITADESTSTAYMELSSLRSEDTAVYYCARLLRNQPGESYAMDYWGQGTLVTVSS

SEQ ID NO: 4850 - protein, 123 aa, Artificial Sequence
  source: /note="Description of Artificial Sequence: Synthetic polypeptide"
QVQLVQSGAEVKKPGSSVKVSCKASGYAFSSSWMNWVRQAPGQGLEWMGRIYPGQGDTNYAQKFQGRVTITADESTSTAYMELSSLRSEDTAVYYCARLLRNQPGESYAMDYWGQGTLVTVSS

SEQ ID NO: 4851 - protein, 116 aa, Artificial Sequence
  source: /note="Description of Artificial Sequence: Synthetic polypeptide"
QVQLVQSGAEVKKPGSSVKVSCKASGYIFTTYWIHWVRQAPGQGLEWIGRIDPNNGDTNYNQKFQGRVTITADESTSTAYMELSSLRSEDTAVYYCVMTGTDFDYWGQGTLVTVSS

SEQ ID NO: 4852 - protein, 120 aa, Artificial Sequence
  source: /note="Description of Artificial Sequence: Synthetic polypeptide"
QVQLVQSGAEVKKPGSSVKVSCKASGYPFSNFWITWVRQAPGQGLEWIGDIYPGSDNRNFNQKFQGRVTITADESTSTAYMELSSLRSEDTAVYYCAREAYYTNPGFAYWGQGTLVTVSS

SEQ ID NO: 4853 - protein, 120 aa, Artificial Sequence
  source: /note="Description of Artificial Sequence: Synthetic polypeptide"
QVQLVQSGAEVKKPGSSVKVSCKASGYPFSNFWITWVRQAPGQGLEWIGDIYPGSDNSNYNQKFQGRVTITADESTSTAYMELSSLRSEDTAVYYCAREAYYTNPGFAYWGQGTLVTVSS

SEQ ID NO: 4854 - protein, 116 aa, Artificial Sequence
  source: /note="Description of Artificial Sequence: Synthetic polypeptide"
QVQLVQSGAEVKKPGSSVKVSCKASGYSFTGYYMHWVRQAPGQGLEWIGRVNPNNGGTSYNQKFQGRVTITADESTSTAYMELSSLRSEDTAVYYCVLTGGYFDYWGQGTLVTVSS

SEQ ID NO: 4855 - protein, 119 aa, Artificial Sequence
  source: /note="Description of Artificial Sequence: Synthetic polypeptide"
QVQLVQSGAEVKKPGSSVKVSCKASGYTFSDYYIHWVRQAPGQGLEWIGYIYPNNGDNGYNQKFQGRVTITADESTSTAYMELSSLRSEDTAVYYCARRGYYGGSYDYWGQGTLVTVSS

SEQ ID NO: 4856 - protein, 125 aa, Artificial Sequence
  source: /note="Description of Artificial Sequence: Synthetic polypeptide"
QVQLVQSGAEVKKPGSSVKVSCKASGYTFTDYEMHWVRQAPGQGLEWIGVIDPETGGTAYNQKFQGRVTITADESTSTAYMELSSLRSEDTAVYYCTSPDYYGSSYPLYYAMDYWGQGTLVTVSS

SEQ ID NO: 4857 - protein, 119 aa, Artificial Sequence
  source: /note="Description of Artificial Sequence: Synthetic polypeptide"
QVQLVQSGAEVKKPGSSVKVSCKASGYTFTEYTMHWVRQAPGQGLEWIGGINPNNGGTSYKQKFQGRVTITADESTSTAYMELSSLRSEDTAVYYCARGGSHYYAMDYWGQGTLVTVSS

SEQ ID NO: 4858 - protein, 119 aa, Artificial Sequence
  source: /note="Description of Artificial Sequence: Synthetic polypeptide"
QVQLVQSGAEVKKPGSSVKVSCKASGYTFTEYTMHWVRQAPGQGLEWIGGINPNNGGTSYSQKFQGRVTITADESTSTAYMELSSLRSEDTAVYYCARGGSHYYAMDYWGQGTLVTVSS

SEQ ID NO: 4859 - protein, 116 aa, Artificial Sequence
  source: /note="Description of Artificial Sequence: Synthetic polypeptide"
QVQLVQSGAEVKKPGSSVKVSCKASGYTFTTYWIHWVRQAPGQGLEWIGRNDPNSGGSNYNQKFQGRVTITADESTSTAYMELSSLRSEDTAVYYCVRTNWDGDFWGQGTLVTVSS

SEQ ID NO: 4860 - protein, 116 aa, Artificial Sequence
  source: /note="Description of Artificial Sequence: Synthetic polypeptide"
QVQLVQSGAEVKKPGSSVKVSCKASGYTVSRYWMHWVRQAPGQGLEWIGRIDPNSGGTKYNQKFQGRVTITADESTSTAYMELSSLRSEDTAVYYCVLTGTDFDYWGQGTLVTVSS

SEQ ID NO: 4861 - protein, 123 aa, Artificial Sequence
  source: /note="Description of Artificial Sequence: Synthetic polypeptide"
QVQLVQSGAEVVKPGASLKISCKASGYAFSSSWMNWVRQAPGQGLEWIGRIYPGDGDTNYNQKFQGRATLTADTSTSTAYMELSSLRSEDTAVYFCARLLRNQPGESYAMDYWGQGALVTVSS

SEQ ID NO: 4862 - protein, 113 aa, Artificial Sequence
  source: /note="Description of Artificial Sequence: Synthetic polypeptide"
WRIGQGKGSLKLARAARGFRFNTYAMTRVRQGPGKGREWEGVIRRKSSNFATLYADSVKDRFRASRDDSESMLYVQMSNWKQEDTAMYYGVRHKSNKYPFVYWGQGTLVTVSA

SEQ ID NO: 4863 - protein, 122 aa, Artificial Sequence
  source: /note="Description of Artificial Sequence: Synthetic polypeptide"
  VARIANT (1)..(1): /replace="Gln"
  SITE (1)..(122): /note="Variant residues given in the sequence have no preference with respect to those in the annotations for variant positions"
EVQLVESGGGLVQPKGSLKLSCAASGFSFNTYAMNWVRQAPGKGLEWIARIRSKSNNYATYYADSVKDRFTCSRDDSENMFYLQLSSLKTEDTAIYYCVRHGDGNLWYIDVWGTGTTVTVSS

SEQ ID NO: 4864 - protein, 123 aa, Artificial Sequence
  source: /note="Description of Artificial Sequence: Synthetic polypeptide"
  MOD_RES (1)..(5): Any amino acid
XXXXXQSGTELARPGASVKMPCKASGYTFTSATMHWVKQRPGQGLEWIGYINPNSGYSKYNQKFKDKATLTADKSSSTAYMQLSSLTSEESAVYYCARWGIDGNYGGGFFDVWGTGTTVTVSS

SEQ ID NO: 4865 - protein, 123 aa, Artificial Sequence [sequence omitted]

SEQ ID NO: 4866 - protein, 121 aa, Artificial Sequence
  source: /note="Description of Artificial Sequence: Synthetic polypeptide"
EVQLVQSGAEVKKPGATVKISCKASGFNIKDTYMHWVQQAPGKGLEWIGRIDPASGDTKYDPKFQVRATITADTSTNTAYLELSSLRSEDTAVYYCADGMWVSTGYALDFWGQGTLVTVSS

SEQ ID NO: 4867 - protein, 121 aa, Artificial Sequence
  source: /note="Description of Artificial Sequence: Synthetic polypeptide"
EVQLVQSGAEVKKPGATVKISCKASGFNIKDTYMHWVQQAPGKGLEWMGRIDPASGDTKYDPKFQVRVTITADTSTDTAYMELSSLRSEDTAVYYCADGMWVSTGYALDFWGQGTLVTVSS

SEQ ID NO: 4868 - protein, 121 aa, Artificial Sequence
  source: /note="Description of Artificial Sequence: Synthetic polypeptide"
EVQLVQSGAEVKKPGATVKISCKVSGFNIKDTYMHWVQQAPGKGLEWMGRIDPASGDTKYDPKFQVRVTITADTSTDTAYMELSSLRSEDTAVYYCATGMWVSTGYALDFWGQGTLVTVSS

SEQ ID NO: 4869 - protein, 98 aa, Homo sapiens
EVQLVQSGAEVKKPGATVKISCKVSGYTFTDYYMHWVQQAPGKGLEWMGLVDPEDGETIYAEKFQGRVTITADTSTDTAYMELSSLRSEDTAVYYCAT

SEQ ID NO: 4870 - protein, 474 aa, Artificial Sequence
  source: /note="Description of Artificial Sequence: Synthetic polypeptide"
  MOD_RES (471)..(474): Any amino acid
MGWSCIILFLVATATGVHSQVQLVQSGAEVKKPGASVKVSCKGSGYTFTSYWMHWVRQAPGQRLEWIGEIDPSESNTNYNQKFKGRVTLTVDISASTAYMELSSLRSEDTAVYYCARGGYDGWDYAIDYWGQGTLVTVSSASTKGPSVFPLAPSSKSTSGGTAALGCLVKDYFPEPVTVSWNSGALTSGVHTFPAVLQSSGLYSLSSVVTVPSSSLGTQTYICNVNHKPSNTKVDKKVEPKSCDKTHTCPPCPAPELAGAPSVFLFPPKPKDTLMISRTPEVTCVVVDVSHEDPEVKFNWYVDGVEVHNAKTKPREEQYNSTYRVVSVLTVLHQDWLNGKEYKCKVSNKALPAPIEKTISKAKGQPREPQVYTLPPSRDELTKNQVSLTCLVKGFYPSDIAVEWESNGQPENNYKTTPPVLDSDGSFFLYSKLTVDKSRWQQGNVFSCSVMHEALHNHYTQKSLSLSPGKXXXX

SEQ ID NO: 4871 - protein, 125 aa, Artificial Sequence
  source: /note="Description of Artificial Sequence: Synthetic polypeptide"
  VARIANT (1)..(1): /replace="pyroglutamic acid"
  MOD_RES (124)..(125): Any amino acid
  SITE (1)..(125): /note="Variant residues given in the sequence have no preference with respect to those in the annotations for variant positions"
EVQLVQSGAEVKKPGASVKVSCKASGFNIKDTYIHWVRQAPGQRLEWMGRIDPANGYTKYDPKFQGRVTITADTSASTAYMELSSLRSEDTAVYYCAREGYYGNYGVYAMDYWGQGTLVTVSSXX

SEQ ID NO: 4872 - DNA, 387 bp, Homo sapiens
atggaagccccagctcagcttctcttcctcctgctactctggctcccagataccaccggagaaattgtgttgacacagtctccagccaccctgtctttgtctccaggggaaagagccaccctctcctgcagggccagtcagagtgttagcagctacttagcctggtaccaacagaaacctggccaggctcccaggctcctcatctatgatgcatccaacagggccactggcatcccagccaggttcagtggcagtgggtctgggacagacttcactctcaccatcagcagcctagagcctgaagattttgcagtttattactgtcagcagcgtagcaactggcctccattcactttcggccctgggaccaaagtggatatcaaacgt

SEQ ID NO: 4873 - DNA, 321 bp, Artificial Sequence
  source: /note="Description of Artificial Sequence: Synthetic polynucleotide"
gacatccagatgacccagtctccatcctccctgtctgcatctgtaggggacagagtcaccatcacttgtcgggcaagtcagggcatcagaaattacttagcctggtatcagcaaaaaccagggaaagcccctaagctcctgatctatgctgcatccactttgcaatcaggggtcccatctcggttcagtggcagtggatctgggacagatttcactctcaccatcagcagcctacagcctgaagatgttgcaacttattactgtcaaaggtataaccgtgcaccgtatacttttggccaggggaccaaggtggaaatcaaa

SEQ ID NO: 4874 - DNA, 321 bp, Mus sp.
  CDS (1)..(321)
gacatcttgctgactcagtctccagccatcctgtctgtgagtccaggagaaagagtcagtttctcctgcagggccagtcagttcgttggctcaagcatccactggtatcagcaaagaacaaatggttctccaaggcttctcataaagtatgcttctgagtctatgtctgggatcccttccaggtttagtggcagtggatcagggacagattttactcttagcatcaacactgtggagtctgaagatattgcagattattactgtcaacaaagtcatagctggccattcacgttcggctcggggacaaatttggaagtaaaa

SEQ ID NO: 4875 - protein, 214 aa, Artificial Sequence [sequence omitted]

SEQ ID NO: 4876 - protein, 109 aa, Artificial Sequence
  source: /note="Description of Artificial Sequence: Synthetic polypeptide"
DIQMTQSPSSLSASVGDRVTITCRASQDVNTAVAWYQQKPGKAPKLLIYSASFLYSGVPSRFSGSRSGTDFTLTISSLQPEDFATYYCQQHYTTPPTFGQGTKVEIKRT

SEQ ID NO: 4877 - protein, 110 aa, Homo sapiens
QSELTQPPSASGTPGQRVTISCSGSSSNIGRNYVYWYQQVPGTAPKLLIYSNNQRPSGVPDRFSGSKSGTSASLVISGLRSEDEADYYCAAWDASLRGVFGGGTKLTVLG

SEQ ID NO: 4878 - protein, 10 aa, Artificial Sequence
  source: /note="Description of Artificial Sequence: Synthetic peptide"
EQKLISEEDL

SEQ ID NO: 4879 - protein, 115 aa, Homo sapiens
DIVMTQTPLSLPVTPGEPASISCRSSKSLLHSNGITYLYWYLQKPGQSPQLLIYQMSNLVSGVPDRFSGSGSGTDFTLKISRVEAEDVGVYYCAQNLELPYTFGGGTKVEIKRTV

SEQ ID NO: 4880 - protein, 112 aa, Homo sapiens
GPELVKPGASVKISCKASGYAFSYSWMNWVKLRPGQGLEWIGRIFPGDGDTDYNGKFKGKATLTADKSSNTAYMQLTSLTSVDSAVYLCARNVFDGYWLVYWGQGTLVTVSA

SEQ ID NO: 4881 - protein, 103 aa, Homo sapiens
NPVTLGTSASISCRSSKSLLHSNGITYLYWYLQKPGQSPQLLIYQMSNLVSGVPDRFSSSGSGTDFTLRISRVEAEDVGVYYCAQNLELPYTFGGGTKLEIKR

SEQ ID NO: 4882 - protein, 111 aa, Mus musculus
  MOD_RES (69)..(69): Any amino acid
DFQIQQSLASLVVSMGQRAAISFRASKRVSTSVHSYMHWYQQKPGQPPKLIIYLASSLESGVRARFSGXGWGTDFTLNIHPVEEEDGATYYCQHSREVPLTFGGGTKLEMK

SEQ ID NO: 4883 - protein, 107 aa, Artificial Sequence
  source: /note="Description of Artificial Sequence: Synthetic polypeptide"
DIQLTQSPSFLSASVGDRVTITCKASQDINKYLSWYQQKPGKAPKLLIYRANRLVDGVPSRFSGSGSGTEFTLTISSLQPEDFATYYCLQYDEFPLTFGQGTKVEIK

SEQ ID NO: 4884 - protein, 111 aa, Artificial Sequence
  source: /note="Description of Artificial Sequence: Synthetic polypeptide"
DIQLTQSPSFLSASVGDRVTITCRASKRVSTSVHSYMHWYQQKPGKAPKLLIYLASSLESGVPSRFSGSGSGTEFTLTISSLQPEDFATYYCQHSREVPLTFGQGTKVEIK

SEQ ID NO: 4885 - protein, 114 aa, Artificial Sequence
  source: /note="Description of Artificial Sequence: Synthetic polypeptide"
  MOD_RES (100)..(100): Any amino acid
DIQLTQSPSFLSASVGDRVTITCRASKSVSTSGYSYMHWYQQKPGKAPKLLIYLVSNLESGVPSRFSGSGSGTEFTLTISSLQPEDFATYYCNLLLSAHXGAYTFGQGTKVEIK

SEQ ID NO: 4886 - protein, 109 aa, Artificial Sequence
  source: /note="Description of Artificial Sequence: Synthetic polypeptide"
DIQLTQSPSFLSASVGDRVTITCRASQSVSTSTYSYMHWYQQKPGKAPKLLIYYNLECGVPSRFSGSGSGTEFTLTISSLQPEDFATYYCQHSWEIPLTFGQGTKVEIK

SEQ ID NO: 4887 - protein, 109 aa, Artificial Sequence
  source: /note="Description of Artificial Sequence: Synthetic polypeptide"
DIQLTQSPSFLSASVGDRVTITCRASQSVSTSTYSYMHWYQQKPGKAPKLLIYYNLESGVPSRFSGSGSGTEFTLTISSLQPEDFATYYCQRSWEIPLTFGQGTKVEIK

SEQ ID NO: 4888 - protein, 111 aa, Artificial Sequence
  source: /note="Description of Artificial Sequence: Synthetic polypeptide"
  MOD_RES (60)..(60): Any amino acid
DIQLTQSPSFLSASVGDRVTITCRPSKRISAYVFSYMHWYQQKPGKAPKLLIYLSCNLEXGVPSRFSGSGSGTEFTLTISSLQPEDFATYYCQHSRELPLTFGQGTKVEIK

SEQ ID NO: 4889 - protein, 106 aa, Artificial Sequence
  source: /note="Description of Artificial Sequence: Synthetic polypeptide"
DIQLTQSPSSLSASVGDRVTITCQASQDISNFLNWYQQKPGKAPKLLIYDASNLETGVPSRFSGSGSGTDFTFTISSLQPEDIATYYCQQYSDLPTFGGGTKVEIK

SEQ ID NO: 4890 - protein, 107 aa, Artificial Sequence
  source: /note="Description of Artificial Sequence: Synthetic polypeptide"
DIQLTQSPSSLSASVGDRVTITCRASQSISSYLNWYQQKPGKAPKLLIYAASSLQSGVPSRFSGSGSGTDFTLTISSLQPEDFATYYCQQSVHVPITFGGGTKVEIK

SEQ ID NO: 4891 - protein, 107 aa, Artificial Sequence
  source: /note="Description of Artificial Sequence: Synthetic polypeptide"
DIQLTQSPSSVSASVGDRVTITCRASQGISSWLAWYQQKPGKAPKLLIYAASSLQSGVPSRFSGSGSGTDFTLTISSLQPEDFATYYCQQAYALPPTFGGGTKVEIK

SEQ ID NO: 4892 - protein, 163 aa, Artificial Sequence
  source: /note="Description of Artificial Sequence: Synthetic polypeptide"
DIQLTQSPSTLSASVGDRVTITCRASESLDNYGIRFLTWFQQKPGKAPKLLMYAASNQGSGVPSRFSGSGSGTEFTLTISSLQPDDFATYYCQQTKEVPWSFGQGTKVEVKRTVAAPSVFIFPPSDEQLKSGTASVVCLLNNFYPREAKVQWKVDNALQSGNS

SEQ ID NO: 4893 - protein, 111 aa, Artificial Sequence
  source: /note="Description of Artificial Sequence: Synthetic polypeptide"
DIQMTQSPSSLPASVGDRVTITCRASQSVGTSTYSYMHWYQQKPGKAPKLLIKYASNLGSGVPSRFSGSGSGTDFTLTISSLQPEDFATYYCQHSWEIPLTFGQGTKLEIK

SEQ ID NO: 4894 - protein, 107 aa, Artificial Sequence
  source: /note="Description of Artificial Sequence: Synthetic polypeptide"
DIQMTQSPSSLSASVGDRVTITCKASQDINKYLSWYQQKPGKAPKLLIYRANRLVDGVPSRFSGSGSGTDFTFTISSLQPEDIATYYCLQYDEFPLTFGQGTKVEIK

SEQ ID NO: 4895 - protein, 107 aa, Artificial Sequence
  source: /note="Description of Artificial Sequence: Synthetic polypeptide"
DIQMTQSPSSLSASVGDRVTITCKASQDINKYLSWYQQKPGKAPKLLIYRANRLVDGVPSRFSGSGSGTDFTLTISSLQPEDFATYYCLQYDEFPLTFGQGTKVEIK

SEQ ID NO: 4896 - protein, 107 aa, Artificial Sequence
  source: /note="Description of Artificial Sequence: Synthetic polypeptide"
DIQMTQSPSSLSASVGDRVTITCQASQDISNYLNWYQQKPGKAPKLLIYDASNLATGVPSRFSGSGSGTDFTFTISSLQPEDIATYYCQQYVNLPLTFGGGTKVEIK

SEQ ID NO: 4897 - protein, 107 aa, Artificial Sequence
  source: /note="Description of Artificial Sequence: Synthetic polypeptide"
DIQMTQSPSSLSASVGDRVTITCQASQDISNYLNWYQQKPGKAPKLLIYDASNLETGVPSRFSGSGSGTDFTFTISSLQPEDIATYYCQQDVNLPPTFGGGTKVEIK

SEQ ID NO: 4898 - protein, 106 aa, Artificial Sequence
  source: /note="Description of Artificial Sequence: Synthetic polypeptide"
DIQMTQSPSSLSASVGDRVTITCQASQDISNYLNWYQQKPGKAPKLLIYDASNLETGVPSRFSGSGSGTDFTFTISSLQPEDIATYYCQQYADFPTFGGGTKVEIK

SEQ ID NO: 4899 - protein, 107 aa, Artificial Sequence
  source: /note="Description of Artificial Sequence: Synthetic polypeptide"
DIQMTQSPSSLSASVGDRVTITCQASQDISNYLNWYQQKPGKAPKLLIYDASNLETGVPSRFSGSGSGTDFTFTISSLQPEDIATYYCQQYALLPLTFGGGTKVEIK

SEQ ID NO: 4900 - protein, 106 aa, Artificial Sequence
  source: /note="Description of Artificial Sequence: Synthetic polypeptide"
DIQMTQSPSSLSASVGDRVTITCQASQDISNYLNWYQQKPGKAPKLLIYDASNLETGVPSRFSGSGSGTDFTFTISSLQPEDIATYYCQQYSDLPTFGGGTKVEIK

SEQ ID NO: 4901 - protein, 106 aa, Artificial Sequence
  source: /note="Description of Artificial Sequence: Synthetic polypeptide"
DIQMTQSPSSLSASVGDRVTITCQASQDISNYLNWYQQKPGKAPKLLIYDASNLETGVPSRFSGSGSGTDFTFTISSLQPEDIATYYCQQYVDLPTFGGGTKVEIK

SEQ ID NO: 4902 - protein, 106 aa, Artificial Sequence
  source: /note="Description of Artificial Sequence: Synthetic polypeptide"
DIQMTQSPSSLSASVGDRVTITCQASQDITNYLNWYQQKPGKAPKLLIYDASNLETGVPSRFSGSGSGTDFTFTISSLQPEDIATYYCQQYADLPTFGGGTKVEIK

SEQ ID NO: 4903 - protein, 106 aa, Artificial Sequence
  source: /note="Description of Artificial Sequence: Synthetic polypeptide"
DIQMTQSPSSLSASVGDRVTITCQASQDITNYLNWYQQKPGKAPKLLIYDASNLETGVPSRFSGSRSGTDFTFTISSLQPEDIATYYCQQYHDFPTFGGGTKVEIK

SEQ ID NO: 4904 - protein, 163 aa, Artificial Sequence
  source: /note="Description of Artificial Sequence: Synthetic polypeptide"
DIQMTQSPSSLSASVGDRVTITCRASESVDNYGISFMNWFQQKPGKAPKLLIYAASNQGSGVPSRFSGSGSGTDFTLTISSLQPDDFATYYCQQSKEVPWTFGQGTKVEIKRTVAAPSVFIFPPSDEQLKSGTASVVCLLNNFYPREAKVQWKVDNALQSGNS

SEQ ID NO: 4905 - protein, 111 aa, Artificial Sequence
  source: /note="Description of Artificial Sequence: Synthetic polypeptide"
DIQMTQSPSSLSASVGDRVTITCRASKRVSTSVHSYMHWYQQKPGKAPKLLIYLASSLESGVPSRFSGSGSGTDFTFTISSLQPEDIATYYCQHSREVPLTFGQGTKVEIK

SEQ ID NO: 4906 - protein, 111 aa, Artificial Sequence
  source: /note="Description of Artificial Sequence: Synthetic polypeptide"
DIQMTQSPSSLSASVGDRVTITCRASKRVSTSVHSYMHWYQQKPGKAPKLLIYLASSLESGVPSRFSGSGSGTDFTLTISSLQPEDFATYYCQHSREVPLTFGQGTKVEIK

SEQ ID NO: 4907 - protein, 111 aa, Artificial Sequence
  source: /note="Description of Artificial Sequence: Synthetic polypeptide"
DIQMTQSPSSLSASVGDRVTITCRASKSVSTSGHSYMHWYQQKPGKAPKLLIYLASSLESGVPSRFSGSGSGTDFTLTISSLQPEDFATYYCQHSRELPLTFGQGTKVEIK

SEQ ID NO: 4908 - protein, 114 aa, Artificial Sequence
  source: /note="Description of Artificial Sequence: Synthetic polypeptide"
  MOD_RES (100)..(100): Any amino acid
DIQMTQSPSSLSASVGDRVTITCRASKSVSTSGYSYMHWYQQKPGKAPKLLIYLVSNLESGVPSRFSGSGSGTDFTFTISSLQPEDIATYYCNLLLSAHXGAYTFGQGTKVEIK

SEQ ID NO: 4909 - protein, 114 aa, Artificial Sequence
  source: /note="Description of Artificial Sequence: Synthetic polypeptide"
  MOD_RES (100)..(100): Any amino acid
DIQMTQSPSSLSASVGDRVTITCRASKSVSTSGYSYMHWYQQKPGKAPKLLIYLVSNLESGVPSRFSGSGSGTDFTLTISSLQPEDFATYYCNLLLSAHXGAYTFGQGTKVEIK

SEQ ID NO: 4910 - protein, 111 aa, Artificial Sequence
  source: /note="Description of Artificial Sequence: Synthetic polypeptide"
DIQMTQSPSSLSASVGDRVTITCRASQDVSTSTYSYMHWYQQKPGKAPKLLIKYASNLESGVPSRFSGSGSGTDFTLTISSLQPEDFATYYCQHSWEIPLTFGQGTKLEIK

SEQ ID NO: 4911 - protein, 111 aa, Artificial Sequence
  source: /note="Description of Artificial Sequence: Synthetic polypeptide"
DIQMTQSPSSLSASVGDRVTITCRASQDVSTSTYSYMHWYQQKPGKAPKLLIKYVSNLESGVPSRFSGSGSGTDFTLTISSLQPEDFATYYCQHSWEIPLTFGQGTKLEIK

SEQ ID NO: 4912 - protein, 111 aa, Artificial Sequence
  source: /note="Description of Artificial Sequence: Synthetic polypeptide"
DIQMTQSPSSLSASVGDRVTITCRASQDVSTSTYSYMHWYQRKPGKAPKLLIKYASNLESGVPSRFSGSGSGTDFTLTISSLQPEDFATYYCQHSWEIPLTFGQGTKLEIK

SEQ ID NO: 4913 - protein, 107 aa, Artificial Sequence
  source: /note="Description of Artificial Sequence: Synthetic polypeptide"
DIQMTQSPSSLSASVGDRVTITCRASQSISRYLNWYQQKPGKAPKLLIYAASSLQSGVPSRFSGSGSGTDFTLTISSLQPEDFATYYCQQQFLTPITFGGGTKVEIK

SEQ ID NO: 4914 - protein, 107 aa, Artificial Sequence
  source: /note="Description of Artificial Sequence: Synthetic polypeptide"
DIQMTQSPSSLSASVGDRVTITCRASQSISSYLNWYQQKPGKAPKLLIYAASSLQSGVPSRFSGSGSGTDFTLTISSLQPEDFATYYCQQAYLVPLTFGGGTKVEIK

SEQ ID NO: 4915 - protein, 107 aa, Artificial Sequence
  source: /note="Description of Artificial Sequence: Synthetic polypeptide"
DIQMTQSPSSLSASVGDRVTITCRASQSISSYLNWYQQKPGKAPKLLIYAASSLQSGVPSRFSGSGSGTDFTLTISSLQPEDFATYYCQQAYSVPITFGGGTKVEIK

SEQ ID NO: 4916 - protein, 107 aa, Artificial Sequence
  source: /note="Description of Artificial Sequence: Synthetic polypeptide"
DIQMTQSPSSLSASVGDRVTITCRASQSISSYLNWYQQKPGKAPKLLIYAASSLQSGVPSRFSGSGSGTDFTLTISSLQPEDFATYYCQQAYYPPWTFGGGTKVEIK

SEQ ID NO: 4917 - protein, 107 aa, Artificial Sequence
  source: /note="Description of Artificial Sequence: Synthetic polypeptide"
DIQMTQSPSSLSASVGDRVTITCRASQSISSYLNWYQQKPGKAPKLLIYAASSLQSGVPSRFSGSGSGTDFTLTISSLQPEDFATYYCQQGYDPPLTFGGGTKVEIK

SEQ ID NO: 4918 - protein, 107 aa, Artificial Sequence
  source: /note="Description of Artificial Sequence: Synthetic polypeptide"
DIQMTQSPSSLSASVGDRVTITCRASQSISSYLNWYQQKPGKAPKLLIYAASSLQSGVPSRFSGSGSGTDFTLTISSLQPEDFATYYCQQGYDTPITFGGGTKVEIK

SEQ ID NO: 4919 - protein, 107 aa, Artificial Sequence
  source: /note="Description of Artificial Sequence: Synthetic polypeptide"
DIQMTQSPSSLSASVGDRVTITCRASQSISSYLNWYQQKPGKAPKLLIYAASSLQSGVPSRFSGSGSGTDFTLTISSLQPEDFATYYCQQHYDIPLTFGGGTKVEIK

SEQ ID NO: 4920 - protein, 107 aa, Artificial Sequence
  source: /note="Description of Artificial Sequence: Synthetic polypeptide"
DIQMTQSPSSLSASVGDRVTITCRASQSISSYLNWYQQKPGKAPKLLIYAASSLQSGVPSRFSGSGSGTDFTLTISSLQPEDFATYYCQQLSDTPITFGGGTKVEIK

SEQ ID NO: 4921 - protein, 107 aa, Artificial Sequence
  source: /note="Description of Artificial Sequence: Synthetic polypeptide"
DIQMTQSPSSLSASVGDRVTITCRASQSISSYLNWYQQKPGKAPKLLIYAASSLQSGVPSRFSGSGSGTDFTLTISSLQPEDFATYYCQQQYDLPITFGGGTKVEIK

SEQ ID NO: 4922 - protein, 107 aa, Artificial Sequence
  source: /note="Description of Artificial Sequence: Synthetic polypeptide"
DIQMTQSPSSLSASVGDRVTITCRASQSISSYLNWYQQKPGKAPKLLIYAASSLQSGVPSRFSGSGSGTDFTLTISSLQPEDFATYYCQQQYTLPPTFGGGTKVEIK

SEQ ID NO: 4923 - protein, 107 aa, Artificial Sequence
  source: /note="Description of Artificial Sequence: Synthetic polypeptide"
DIQMTQSPSSLSASVGDRVTITCRASQSISSYLNWYQQKPGKAPKLLIYAASSLQSGVPSRFSGSGSGTDFTLTISSLQPEDFATYYCQQSVTPPLTFGGGTKVEIK

SEQ ID NO: 4924 - protein, 107 aa, Artificial Sequence
  source: /note="Description of Artificial Sequence: Synthetic polypeptide"
DIQMTQSPSSLSASVGDRVTITCRASQSISSYLNWYQQKPGKAPKLLIYAASSLQSGVPSRFSGSGSGTDFTLTISSLQPEDFATYYCQQTYRTPLTFGGGTKVEIK

SEQ ID NO: 4925 - protein, 107 aa, Artificial Sequence
  source: /note="Description of Artificial Sequence: Synthetic polypeptide"
DIQMTQSPSSLSASVGDRVTITCRASQSISSYLNWYQQKPGKAPKLLIYAASSLQSGVPSRFSGSGSGTDFTLTISSLQPEDFATYYCQQVLHTPLTFGGGTKVEIK

SEQ ID NO: 4926 - protein, 107 aa, Artificial Sequence
  source: /note="Description of Artificial Sequence: Synthetic polypeptide"
DIQMTQSPSSLSASVGDRVTITCRASQSISSYLNWYQQKPGKAPKLLIYAASSLQSGVPSRFSGSGSGTDFTLTISSLQPEDFATYYCQQVYHTPLTFGGGTKVEIK

SEQ ID NO: 4927 - protein, 107 aa, Artificial Sequence
  source: /note="Description of Artificial Sequence: Synthetic polypeptide"
DIQMTQSPSSLSASVGDRVTITCRASQSISSYLNWYQQKPGKAPKLLIYGASSLQSGVPSRFSGSGSGTDFTLTISSLQPEDFATYYCQQASSSPPTFGGGTKVEIK

SEQ ID NO: 4928 - protein, 107 aa, Artificial Sequence
  source: /note="Description of Artificial Sequence: Synthetic polypeptide"
DIQMTQSPSSLSASVGDRVTITCRASQSISSYLNWYQQKPGKAPKLLIYGASSLQSGVPSRFSGSGSGTDFTLTISSLQPEDFATYYCQQGYDVPITFGGGTKVEIK

SEQ ID NO: 4929 - protein, 107 aa, Artificial Sequence
  source: /note="Description of Artificial Sequence: Synthetic polypeptide"
DIQMTQSPSSLSASVGDRVTITCRASQSISSYLNWYQQKPGKAPKLLIYGASSLQSGVPSRFSGSGSGTDFTLTISSLQPEDFATYYCQQQYLTPLTFGGGTKVEIK

SEQ ID NO: 4930 - protein, 107 aa, Artificial Sequence
  source: /note="Description of Artificial Sequence: Synthetic polypeptide"
DIQMTQSPSSLSASVGDRVTITCRASQSISSYLNWYQQKPGKAPKLLIYGASSLQSGVPSRFSGSGSGTDFTLTISSLQPEDFATYYCQQYFIIPLTFGGGTKVEIK

SEQ ID NO: 4931 - protein, 111 aa, Artificial Sequence
  source: /note="Description of Artificial Sequence: Synthetic polypeptide"
DIQMTQSPSSLSASVGDRVTITCRASQSVGTSTYSYMHWYQQKPGKAPKLLIKYASALESGVPSRFSGSGSGTDFTLTISSLQPEDFATYYCQHSWEIPLTFGQGTKLEIK

SEQ ID NO: 4932 - protein, 111 aa, Artificial Sequence
  source: /note="Description of Artificial Sequence: Synthetic polypeptide"
DIQMTQSPSSLSASVGDRVTITCRASQSVGTSTYSYMHWYQQKPGKAPKLLIKYASNLESGVPSRFSGSGSGTDFTLTISSLQPEDFATYYCQHSWEIPLTFGQGTKLEIK

SEQ ID NO: 4933 - protein, 111 aa, Artificial Sequence
  source: /note="Description of Artificial Sequence: Synthetic polypeptide"
DIQMTQSPSSLSASVGDRVTITCRASQSVSASTYSYMHWYQQKPGKAPKLLIKYASNLESGVPSRFSGSGSGTDFTLTISSLQPEDLATYYCQHSWEIPLTFGQGTKLEIK

SEQ ID NO: 4934 - protein, 111 aa, Artificial Sequence
  source: /note="Description of Artificial Sequence: Synthetic polypeptide"
DIQMTQSPSSLSASVGDRVTITCRASQSVSTSTYSYMHWYQQKPGKAPKLLIKYASNLESGVPSRFSGSGSGTDFTLTISSLQPEDFATYYCQHSWEIPLTFGQGTKLEIK

SEQ ID NO: 4935 - protein, 111 aa, Artificial Sequence
  source: /note="Description of Artificial Sequence: Synthetic polypeptide"
DIQMTQSPSSLSASVGDRVTITCRASQSVSTSTYSYMHWYQQKPGKAPKLLIYYASNLESGVPSRFSGSGSGTDFTLTISSLQPEDFATYYCQHSWEIPLTFGQGTKLEIK

SEQ ID NO: 4936 - protein, 109 aa, Artificial Sequence
  source: /note="Description of Artificial Sequence: Synthetic polypeptide"
DIQMTQSPSSLSASVGDRVTITCRASQSVSTSTYSYMHWYQQKPGKAPKLLIYYNLECGVPSRFSGSGSGTDFTFTISSLQPEDIATYYCQHSWEIPLTFGQGTKVEIK

SEQ ID NO: 4937 - protein, 109 aa, Artificial Sequence
  source: /note="Description of Artificial Sequence: Synthetic polypeptide"
DIQMTQSPSSLSASVGDRVTITCRASQSVSTSTYSYMHWYQQKPGKAPKLLIYYNLECGVPSRFSGSGSGTDFTLTISSLQPEDFATYYCQHSWEIPLTFGQGTKVEIK

SEQ ID NO: 4938 - protein, 109 aa, Artificial Sequence
  source: /note="Description of Artificial Sequence: Synthetic polypeptide"
DIQMTQSPSSLSASVGDRVTITCRASQSVSTSTYSYMHWYQQKPGKAPKLLIYYNLESGVPSRFSGSGSGTDFTFTISSLQPEDIATYYCQRSWEIPLTFGQGTKVEIK

SEQ ID NO: 4939 - protein, 109 aa, Artificial Sequence
  source: /note="Description of Artificial Sequence: Synthetic polypeptide"
DIQMTQSPSSLSASVGDRVTITCRASQSVSTSTYSYMHWYQQKPGKAPKLLIYYNLESGVPSRFSGSGSGTDFTLTISSLQPEDFATYYCQRSWEIPLTFGQGTKVEIK

SEQ ID NO: 4940 - protein, 111 aa, Artificial Sequence
  source: /note="Description of Artificial Sequence: Synthetic polypeptide"
  MOD_RES (60)..(60): Any amino acid
DIQMTQSPSSLSASVGDRVTITCRPSKRISAYVFSYMHWYQQKPGKAPKLLIYLSCNLEXGVPSRFSGSGSGTDFTFTISSLQPEDIATYYCQHSRELPLTFGQGTKVEIK

SEQ ID NO: 4941 - protein, 111 aa, Artificial Sequence
  source: /note="Description of Artificial Sequence: Synthetic polypeptide"
  MOD_RES (60)..(60): Any amino acid
DIQMTQSPSSLSASVGDRVTITCRPSKRISAYVFSYMHWYQQKPGKAPKLLIYLSCNLEXGVPSRFSGSGSGTDFTLTISSLQPEDFATYYCQHSRELPLTFGQGTKVEIK

SEQ ID NO: 4942 - protein, 108 aa, Artificial Sequence
  source: /note="Description of Artificial Sequence: Synthetic polypeptide"
DIQMTQSPSSVSASVGDRVTITCRASQGIDSWLAWYQQKPGKAPKLLIYAASSLQSGVPSRFSGSGSGTDFTLTISSLQPEDFATYYCQQASAHPPWTFGGGTKVEIK

SEQ ID NO: 4943 - protein, 106 aa, Artificial Sequence
  source: /note="Description of Artificial Sequence: Synthetic polypeptide"
DIQMTQSPSSVSASVGDRVTITCRASQGISSWLAWYQQKPGKAPKLLIYAASNLQSGVPSRFSGSGSGTDFTLTISSLQPEDFATYYCQQGNAHPTFGGGTKVEIK

SEQ ID NO: 4944 - protein, 107 aa, Artificial Sequence
  source: /note="Description of Artificial Sequence: Synthetic polypeptide"
DIQMTQSPSSVSASVGDRVTITCRASQGISSWLAWYQQKPGKAPKLLIYAASNLQSGVPSRFSGSGSGTDFTLTISSLQPEDFATYYCQQSRVFPWTFGGGTKVEIK

SEQ ID NO: 4945 - protein, 107 aa, Artificial Sequence
  source: /note="Description of Artificial Sequence: Synthetic polypeptide"
DIQMTQSPSSVSASVGDRVTITCRASQGISSWLAWYQQKPGKAPKLLIYAASSLQSGVPSRFSGSGSGTDFTLTISSLQPEDFATYYCQQAFDFPITFGGGTKVEIK

SEQ ID NO: 4946 - protein, 106 aa, Artificial Sequence
  source: /note="Description of Artificial Sequence: Synthetic polypeptide"
DIQMTQSPSSVSASVGDRVTITCRASQGISSWLAWYQQKPGKAPKLLIYAASSLQSGVPSRFSGSGSGTDFTLTISSLQPEDFATYYCQQANYFPTFGGGTKVEIK

SEQ ID NO: 4947 - protein, 107 aa, Artificial Sequence
  source: /note="Description of Artificial Sequence: Synthetic polypeptide"
DIQMTQSPSSVSASVGDRVTITCRASQGISSWLAWYQQKPGKAPKLLIYAASSLQSGVPSRFSGSGSGTDFTLTISSLQPEDFATYYCQQANYHPLTFGGGTKVEIK

SEQ ID NO: 4948 - protein, 107 aa, Artificial Sequence
  source: /note="Description of Artificial Sequence: Synthetic polypeptide"
DIQMTQSPSSVSASVGDRVTITCRASQGISSWLAWYQQKPGKAPKLLIYAASSLQSGVPSRFSGSGSGTDFTLTISSLQPEDFATYYCQQASSFPLTFGGGTKVEIK

SEQ ID NO: 4949 - protein, 106 aa, Artificial Sequence
  source: /note="Description of Artificial Sequence: Synthetic polypeptide"
DIQMTQSPSSVSASVGDRVTITCRASQGISSWLAWYQQKPGKAPKLLIYAASSLQSGVPSRFSGSGSGTDFTLTISSLQPEDFATYYCQQAYSFPTFGGGTKVEIK

SEQ ID NO: 4950 - protein, 107 aa, Artificial Sequence
  source: /note="Description of Artificial Sequence: Synthetic polypeptide"
DIQMTQSPSSVSASVGDRVTITCRASQGISSWLAWYQQKPGKAPKLLIYAASSLQSGVPSRFSGSGSGTDFTLTISSLQPEDFATYYCQQENSYPLTFGGGTKVEIK

SEQ ID NO: 4951 - protein, 106 aa, Artificial Sequence
  source: /note="Description of Artificial Sequence: Synthetic polypeptide"
DIQMTQSPSSVSASVGDRVTITCRASQGISSWLAWYQQKPGKAPKLLIYAASSLQSGVPSRFSGSGSGTDFTLTISSLQPEDFATYYCQQINAHPTFGGGTKVEIK

SEQ ID NO: 4952 - protein, 107 aa, Artificial Sequence
  source: /note="Description of Artificial Sequence: Synthetic polypeptide"
DIQMTQSPSTLSASVGDRVTITCKASQDINKYLSWYQQKPGKAPKLLIYRANRLVDGVPSRFSGSGSGTEFTLTISSLQPDDFATYYCLQYDEFPLTFGQGTKVEIK

SEQ ID NO: 4953 - protein, 111 aa, Artificial Sequence
  source: /note="Description of Artificial Sequence: Synthetic polypeptide"
DIQMTQSPSTLSASVGDRVTITCRASKRVSTSVHSYMHWYQQKPGKAPKLLIYLASSLESGVPSRFSGSGSGTEFTLTISSLQPDDFATYYCQHSREVPLTFGQGTKVEIK

SEQ ID NO: 4954 - protein, 111 aa, Artificial Sequence
  source: /note="Description of Artificial Sequence: Synthetic polypeptide"
DIQMTQSPSTLSASVGDRVTITCRASKSVSTSGHSYMHWYQQKPGKAPKLLIYLASSLESGVPSRFSGSGSGTEFTLTISSLQPDDFATYYCQHSRELPLTFGQGTKVEIK

SEQ ID NO: 4955 - protein, 114 aa, Artificial Sequence
  source: /note="Description of Artificial Sequence: Synthetic polypeptide"
  MOD_RES (100)..(100): Any amino acid
DIQMTQSPSTLSASVGDRVTITCRASKSVSTSGYSYMHWYQQKPGKAPKLLIYLVSNLESGVPSRFSGSGSGTEFTLTISSLQPDDFATYYCNLLLSAHXGAYTFGQGTKVEIK

SEQ ID NO: 4956 - protein, 107 aa, Artificial Sequence
  source: /note="Description of Artificial Sequence: Synthetic polypeptide"
DIQMTQSPSTLSASVGDRVTITCRASQSISSWLAWYQQKPGKAPKLLIYDASSLESGVPSRFSGSGSGTEFTLTISSLQPDDFATYYCQQARSYPPTFGGGTKVEIK

SEQ ID NO: 4957 - protein, 107 aa, Artificial Sequence
  source: /note="Description of Artificial Sequence: Synthetic polypeptide"
DIQMTQSPSTLSASVGDRVTITCRASQSISSWLAWYQQKPGKAPKLLIYDASSLESGVPSRFSGSGSGTEFTLTISSLQPDDFATYYCQQVNRYPFTFGGGTKVEIK

SEQ ID NO: 4958 - protein, 109 aa, Artificial Sequence
  source: /note="Description of Artificial Sequence: Synthetic polypeptide"
DIQMTQSPSTLSASVGDRVTITCRASQSVSTSTYSYMHWYQQKPGKAPKLLIYYNLECGVPSRFSGSGSGTEFTLTISSLQPDDFATYYCQHSWEIPLTFGQGTKVEIK

SEQ ID NO: 4959 - protein, 109 aa, Artificial Sequence
  source: /note="Description of Artificial Sequence: Synthetic polypeptide"
DIQMTQSPSTLSASVGDRVTITCRASQSVSTSTYSYMHWYQQKPGKAPKLLIYYNLESGVPSRFSGSGSGTEFTLTISSLQPDDFATYYCQRSWEIPLTFGQGTKVEIK

SEQ ID NO: 4960 - protein, 111 aa, Artificial Sequence
  source: /note="Description of Artificial Sequence: Synthetic polypeptide"
  MOD_RES (60)..(60): Any amino acid
DIQMTQSPSTLSASVGDRVTITCRPSKRISAYVFSYMHWYQQKPGKAPKLLIYLSCNLEXGVPSRFSGSGSGTEFTLTISSLQPDDFATYYCQHSRELPLTFGQGTKVEIK

SEQ ID NO: 4961 - protein, 110 aa, Mus musculus
  MOD_RES (71)..(71): Any amino acid
  MOD_RES (96)..(96): Any amino acid
DIVLTQSPASLAVSLGQRATISYRASKSVSTSGYSYMHWNQQKPGQPPRLLIYLVSNLESGVPARFSGSGXWDRLHPQHPSCGGGGCCNLLLSAHXGAYTFGGGTKLEIK

SEQ ID NO: 4962 - protein, 111 aa, Mus musculus
DIVLTQSPASLAVSLGQRATMSCRASQSVSTSTYSYMHWYQQKPGQPPKLLIKYASNLESGVPARFSGSGSGTDFTLNIHPVEEEDTATYYCQHSWEIPLTFGAGTKLELK

SEQ ID NO: 4963 - protein, 109 aa, Mus musculus
DIVLTQSPASLAVSLGQRATMSCRASQSVSTSTYSYMHWYQQKPGQPPKLLIKYNLESGVPARFSGSGSGTDFTLNIHPVEEEDTATYYCQHSWEIPLTFGAGTKLELK

SEQ ID NO: 4964 - protein, 111 aa, Artificial Sequence
  source: /note="Description of Artificial Sequence: Synthetic polypeptide"
DIVLTQSPDSLAVSLGERATIDCKASQDVSTSTYSYMHWYQQKPGQPPKLLIKYASNLESGVPDRFSGSGSGTDFTLTISSLQAEDVAVYYCQHSWEIPLTFGQGTKLEIK

SEQ ID NO: 4965 - protein, 113 aa, Artificial Sequence
  source: /note="Description of Artificial Sequence: Synthetic polypeptide"
DIVLTQSPDSLAVSLGERATINCKSSQSVLYSSNNKNYLAWYQQKPGQAPRLLIYGASSRATGIPDRFSGSGSGTDFTLTISRLEPEDFAVYYCQQDYVSPLTFGGGTKVEIK

SEQ ID NO: 4966 - protein, 111 aa, Artificial Sequence
  source: /note="Description of Artificial Sequence: Synthetic polypeptide"
DIVLTQSPDSLAVSLGERATINCRASQDVSTSTYSYMHWYQQKPGQPPKLLIKYAFNLESGVPDRFSGSGSGTDFTLTISSLQAEDVAVYYCQHSWEIPLEFGQGTKLEIK

SEQ ID NO: 4967 - protein, 111 aa, Artificial Sequence
  source: /note="Description of Artificial Sequence: Synthetic polypeptide"
DIVLTQSPDSLAVSLGERATINCRASQDVSTSTYSYMHWYQQKPGQPPKLLIKYASFLESGVPDRFSGSGSGTDFTLTISSLQAEDVAVYYCQHSWEIPLTFGQGTKLEIK

SEQ ID NO: 4968 - protein, 111 aa, Artificial Sequence
  source: /note="Description of Artificial Sequence: Synthetic polypeptide"
DIVLTQSPDSLAVSLGERATINCRASQDVSTSTYSYMHWYQQKPGQPPKLLIKYASNLESGVPDRFSGSGSGTDFTLTISSLQAEDVAVYYCQHSWEIPLTFGQGTKLEIK

SEQ ID NO: 4969 - protein, 111 aa, Artificial Sequence
  source: /note="Description of Artificial Sequence: Synthetic polypeptide"
DIVLTQSPDSLAVSLGERATINCRASQDVSTSTYSYMHWYQQKPGQPPKLLIKYASNLESGVPDRFSGSGSGTDFTLTISSLQAEDVAVYYCQHSWELPLTFGQGTKLEIK

SEQ ID NO: 4970 - protein, 111 aa, Artificial Sequence
  source: /note="Description of Artificial Sequence: Synthetic polypeptide"
DIVLTQSPDSLAVSLGERATINCRASQDVSTSTYSYMHWYQQKPGQPPKLLIKYASNVESGVPDRFSGSGSGTDFTLTISSLQAEDVAVYYCQHSWAIPLTFGQGTKLEIK

SEQ ID NO: 4971 - protein, 111 aa, Artificial Sequence
  source: /note="Description of Artificial Sequence: Synthetic polypeptide"
DIVLTQSPDSLAVSLGERATINCRASQDVSTSTYSYMHWYQQKPGQPPKLLIKYASNVESGVPDRFSGSGSGTDFTLTISSLQAEDVAVYYCQHSWEIPLTFGQGTKLEIE

SEQ ID NO: 4972 - protein, 111 aa, Artificial Sequence
  source: /note="Description of Artificial Sequence: Synthetic polypeptide"
DIVLTQSPDSLAVSLGERATINCRASQDVSTSTYSYMHWYQQKPGQPPKLLIKYASYLESGVPDRFSGSGSGTDFTLTISSLQAEDVAVYYCEHSWEIPLTFGQGTKLEIK

SEQ ID NO: 4973 - protein, 111 aa, Artificial Sequence
  source: /note="Description of Artificial Sequence: Synthetic polypeptide"
DIVLTQSPDSLAVSLGERATINCRASQSVGTSTYSYMHWYQQKPGQPPKLLIKYASNLESGVPDRFSGSGSGTDFTLTISSLQAEDVAVYYCQHSWEIPLTFGQGTKLEIK

SEQ ID NO: 4974 - protein, 111 aa, Artificial Sequence
  source: /note="Description of Artificial Sequence: Synthetic polypeptide"
DIVLTQSPDSLAVSLGERATINCRASQSVGTSTYSYMHWYQQKPGQPPKLLIKYASNLNSGVPDRFSGSGSGTDFTLTISSLQAEDVAVYYCQHSEEIPLTFGQGTKLEIK

SEQ ID NO: 4975 - protein, 111 aa, Artificial Sequence
  source: /note="Description of Artificial Sequence: Synthetic polypeptide"
DIVLTQSPDSLAVSLGERATINCRASQSVHTSTYSYMHWYQQKPGQPPKLLIKYASNLESGVPDRFSGSGSGTDFTLTISSLQAEDVAVYYCQHSWEIPLTFGQGTKLEIK

SEQ ID NO: 4976 - protein, 111 aa, Artificial Sequence
  source: /note="Description of Artificial Sequence: Synthetic polypeptide"
DIVLTQSPDSLAVSLGERATINCRASQSVSTSTYSYMHWYQQKPGQPPKLLIKYASNLESGVPDRFSGSGSGTDFTLTISSLQAEDVAVYYCQHSEEIPLTFGQGTKLEIK

SEQ ID NO: 4977 - protein, 111 aa, Artificial Sequence
  source: /note="Description of Artificial Sequence: Synthetic polypeptide"
DIVLTQSPDSLAVSLGERATINCRASQSVSTSTYSYMHWYQQKPGQPPKLLIKYASNLESGVPDRFSGSGSGTDFTLTISSLQAEDVAVYYCQHSWEIPLTFGQGTKLEIK

SEQ ID NO: 4978 - protein, 111 aa, Artificial Sequence
  source: /note="Description of Artificial Sequence: Synthetic polypeptide"
DIVLTQSPDSLAVSLGERATINCRASQSVSTSTYSYMHWYQQKPGQPPKLLIKYESNLESGVPDRFSGSGSGTDFTLTISSLQAEDVAVYYCQHSWEIPLTFGQGTKLEIK

SEQ ID NO: 4979 - protein, 111 aa, Artificial Sequence
  source: /note="Description of Artificial Sequence: Synthetic polypeptide"
DIVLTQSPDSLAVSLGERATINCRGSQSVSTSTYSYMHWYQQKPGQPPKLLIKYESNLESGVPDRFSGSGSGTDFTLTISSLQAEDVAVYYCQHSWEIPLTFGQGTKLEIK

SEQ ID NO: 4980 - protein, 111 aa, Artificial Sequence
  source: /note="Description of Artificial Sequence: Synthetic polypeptide"
DIVLTQSPDSLAVSLGERATINCRVSQDVSTSTYSYMHWYQQKPGQPPKLLIKYASNLESGVPDRFSGSGSGTDFTLTISSLQAEDVAVYYCQHSWEIPLTFGQGTKLEIK

SEQ ID NO: 4981 - protein, 107 aa, Artificial Sequence
  source: /note="Description of Artificial Sequence: Synthetic polypeptide"
DIVMTQSPDSLAVSLGERATINCKASQDINKYLSWYQQKPGQPPKLLIYRANRLVDGVPDRFSGSGSGTDFTLTISSLQAEDVAVYYCLQYDEFPLTFGQGTKVEIK

SEQ ID NO: 4982 - protein, 113 aa, Artificial Sequence
  source: /note="Description of Artificial Sequence: Synthetic polypeptide"
DIVMTQSPDSLAVSLGERATINCKSSQSVLYSSNNKNYLAWYQQKPGQAPRLLIYGASSRATGIPDRFSGSGSGTDFTLTISRLEPEDFAVYYCQQDYNSPLTFGGGTKVEIK

SEQ ID NO: 4983 - protein, 113 aa, Artificial Sequence
  source: /note="Description of Artificial Sequence: Synthetic polypeptide"
DIVMTQSPDSLAVSLGERATINCKSSQSVLYSSNNKNYLAWYQQKPGQAPRLLIYGASSRATGIPDRFSGSGSGTDFTLTISRLEPEDFAVYYCQQDYSSPLTFGGGTKVEIK

SEQ ID NO: 4984 - protein, 113 aa, Artificial Sequence
  source: /note="Description of Artificial Sequence: Synthetic polypeptide"
DIVMTQSPDSLAVSLGERATINCKSSQSVLYSSNNKNYLAWYQQKPGQPPKLLIYWASTRESGVPDRFSGSGSGTDFTLTISRLEPEDFAVYYCQQLYRSPPTFGGGTKVEIK

SEQ ID NO: 4985 - protein, 113 aa, Artificial Sequence
  source: /note="Description of Artificial Sequence: Synthetic polypeptide"
DIVMTQSPDSLAVSLGERATINCKSSQSVLYSSNNKNYLAWYQQKPGQPPKLLIYWASTRESGVPDRFSGSGSGTDFTLTISSLQAEDVAVYYCQQDFSDPITFGGGTKVEIK

SEQ ID NO: 4986 - protein, 113 aa, Artificial Sequence
  source: /note="Description of Artificial Sequence: Synthetic polypeptide"
DIVMTQSPDSLAVSLGERATINCKSSQSVLYSSNNKNYLAWYQQKPGQPPKLLIYWASTRESGVPDRFSGSGSGTDFTLTISSLQAEDVAVYYCQQDFVKPLTFGGGTKVEIK

SEQ ID NO: 4987 - protein, 113 aa, Artificial Sequence
  source: /note="Description of Artificial Sequence: Synthetic polypeptide"
DIVMTQSPDSLAVSLGERATINCKSSQSVLYSSNNKNYLAWYQQKPGQPPKLLIYWASTRESGVPDRFSGSGSGTDFTLTISSLQAEDVAVYYCQQDYLSPITFGGGTKVEIK

SEQ ID NO: 4988 - protein, 113 aa, Artificial Sequence
  source: /note="Description of Artificial Sequence: Synthetic polypeptide"
DIVMTQSPDSLAVSLGERATINCKSSQSVLYSSNNKNYLAWYQQKPGQPPKLLIYWASTRESGVPDRFSGSGSGTDFTLTISSLQAEDVAVYYCQQHYYHPPTFGGGTKVEIK

SEQ ID NO: 4989 - protein, 113 aa, Artificial Sequence
  source: /note="Description of Artificial Sequence: Synthetic polypeptide"
DIVMTQSPDSLAVSLGERATINCKSSQSVLYSSNNKNYLAWYQQKPGQPPKLLIYWASTRESGVPDRFSGSGSGTDFTLTISSLQAEDVAVYYCQQLYSDPPTFGGGTKVEIK

SEQ ID NO: 4990 - protein, 113 aa, Artificial Sequence
  source: /note="Description of Artificial Sequence: Synthetic polypeptide"
DIVMTQSPDSLAVSLGERATINCKSSQSVLYSSNNKNYLAWYQQKPGQPPKLLIYWASTRESGVPDRFSGSGSGTDFTLTISSLQAEDVAVYYCQQSYVHPPTFGGGTKVEIK

SEQ ID NO: 4991 - protein, 111 aa, Artificial Sequence
  source: /note="Description of Artificial Sequence: Synthetic polypeptide"
DIVMTQSPDSLAVSLGERATINCRASKRVSTSVHSYMHWYQQKPGQPPKLLIYLASSLESGVPDRFSGSGSGTDFTLTISSLQAEDVAVYYCQHSREVPLTFGQGTKVEIK

SEQ ID NO: 4992 - protein, 111 aa, Artificial Sequence
  source: /note="Description of Artificial Sequence: Synthetic polypeptide"
DIVMTQSPDSLAVSLGERATINCRASKSVSTSGHSYMHWYQQKPGQPPKLLIYLASSLESGVPDRFSGSGSGTDFTLTISSLQAEDVAVYYCQHSRELPLTFGQGTKVEIK

SEQ ID NO: 4993 - protein, 114 aa, Artificial Sequence
  source: /note="Description of Artificial Sequence: Synthetic polypeptide"
  MOD_RES (100)..(100): Any amino acid
DIVMTQSPDSLAVSLGERATINCRASKSVSTSGYSYMHWYQQKPGQPPKLLIYLVSNLESGVPDRFSGSGSGTDFTLTISSLQAEDVAVYYCNLLLSAHXGAYTFGQGTKVEIK

SEQ ID NO: 4994 - protein, 109 aa, Artificial Sequence
  source: /note="Description of Artificial Sequence: Synthetic polypeptide"
DIVMTQSPDSLAVSLGERATINCRASQSVSTSTYSYMHWYQQKPGQPPKLLIYYNLECGVPDRFSGSGSGTDFTLTISSLQAEDVAVYYCQHSWEIPLTFGQGTKVEIK

SEQ ID NO: 4995 - protein, 109 aa, Artificial Sequence
  source: /note="Description of Artificial Sequence: Synthetic polypeptide"
DIVMTQSPDSLAVSLGERATINCRASQSVSTSTYSYMHWYQQKPGQPPKLLIYYNLESGVPDRFSGSGSGTDFTLTISSLQAEDVAVYYCQRSWEIPLTFGQGTKVEIK

SEQ ID NO: 4996 - protein, 111 aa, Artificial Sequence
  source: /note="Description of Artificial Sequence: Synthetic polypeptide"
  MOD_RES (60)..(60): Any amino acid
DIVMTQSPDSLAVSLGERATINCRPSKRISAYVFSYMHWYQQKPGQPPKLLIYLSCNLEXGVPDRFSGSGSGTDFTLTISSLQAEDVAVYYCQHSRELPLTFGQGTKVEIK

SEQ ID NO: 4997 - protein, 107 aa, Artificial Sequence
  source: /note="Description of Artificial Sequence: Synthetic polypeptide"
DIVMTQSPLSLPVTPGEPASISCKASQDINKYLSWYLQKPGQSPQLLIYRANRLVDGVPDRFSGSGSGTDFTLKISRVEAEDVGVYYCLQYDEFPLTFGQGTKVEIK

SEQ ID NO: 4998 - protein, 111 aa, Artificial Sequence
  source: /note="Description of Artificial Sequence: Synthetic polypeptide"
DIVMTQSPLSLPVTPGEPASISCRASKRVSTSVHSYMHWYLQKPGQSPQLLIYLASSLESGVPDRFSGSGSGTDFTLKISRVEAEDVGVYYCQHSREVPLTFGQGTKVEIK

SEQ ID NO: 4999 - protein, 111 aa, Artificial Sequence
  source: /note="Description of Artificial Sequence: Synthetic polypeptide"
DIVMTQSPLSLPVTPGEPASISCRASKSVSTSGHSYMHWYLQKPGQSPQLLIYLASSLESGVPDRFSGSGSGTDFTLKISRVEAEDVGVYYCQHSRELPLTFGQGTKVEIK

SEQ ID NO: 5000 - protein, 114 aa, Artificial Sequence
  source: /note="Description of Artificial Sequence: Synthetic polypeptide"
  MOD_RES (100)..(100): Any amino acid
DIVMTQSPLSLPVTPGEPASISCRASKSVSTSGYSYMHWYLQKPGQSPQLLIYLVSNLESGVPDRFSGSGSGTDFTLKISRVEAEDVGVYYCNLLLSAHXGAYTFGQGTKVEIK

SEQ ID NO: 5001 - protein, 109 aa, Artificial Sequence
  source: /note="Description of Artificial Sequence: Synthetic polypeptide"
DIVMTQSPLSLPVTPGEPASISCRASQSVSTSTYSYMHWYLQKPGQSPQLLIYYNLECGVPDRFSGSGSGTDFTLKISRVEAEDVGVYYCQHSWEIPLTFGQGTKVEIK

SEQ ID NO: 5002 - protein, 109 aa, Artificial Sequence
  source: /note="Description of Artificial Sequence: Synthetic polypeptide"
DIVMTQSPLSLPVTPGEPASISCRASQSVSTSTYSYMHWYLQKPGQSPQLLIYYNLESGVPDRFSGSGSGTDFTLKISRVEAEDVGVYYCQRSWEIPLTFGQGTKVEIK

SEQ ID NO: 5003 - protein, 111 aa, Artificial Sequence
  source: /note="Description of Artificial Sequence: Synthetic polypeptide"
  MOD_RES (60)..(60): Any amino acid
DIVMTQSPLSLPVTPGEPASISCRPSKRISAYVFSYMHWYLQKPGQSPQLLIYLSCNLEXGVPDRFSGSGSGTDFTLKISRVEAEDVGVYYCQHSRELPLTFGQGTKVEIK

SEQ ID NO: 5004 - protein, 112 aa, Artificial Sequence
  source: /note="Description of Artificial Sequence: Synthetic polypeptide"
DIVMTQSPLSLPVTPGEPASISCRSSQSLLHSNGYNYLDWYLQKPGQSPQLLIYLASNRASGVPDRFSGSGSGTDFTLKISRVEAEDVGVYYCLQALGPPLTFGGGTKVEIK

SEQ ID NO: 5005 - protein, 113 aa, Artificial Sequence
  source: /note="Description of Artificial Sequence: Synthetic polypeptide"
DIVMTQSPLSLPVTPGEPASISCRSSQSLLHSNGYNYLDWYLQKPGQSPQLLIYLGSNRASGVPDRFSGSGSGTDFTLKISRVEAEDVGVYYCMQKKQTPPITFGGGTKVEIK

SEQ ID NO: 5006 - protein, 112 aa, Artificial Sequence
  source: /note="Description of Artificial Sequence: Synthetic polypeptide"
DIVMTQSPLSLPVTPGEPASISCRSSQSLLHSNGYNYLDWYLQKPGQSPQLLIYLGSNRASGVPDRFSGSGSGTDFTLKISRVEAEDVGVYYCMQKLGLPPTFGGGTKVEIK

SEQ ID NO: 5007 - protein, 111 aa, Mus musculus
  MOD_RES (3)..(3): Any amino acid
  MOD_RES (60)..(60): Any amino acid
DLXLTQSLASLVVCMGQRAAISFRPSKRISAYVFSYMHWYQQKPGQPPKLIIYLSCNLEXGVRARLSGRRWVTDFTLNIHPAEEEDGATYYCQHSRELPLTFGGGTKLEMK

SEQ ID NO: 5008 - protein, 107 aa, Artificial Sequence
  source: /note="Description of Artificial Sequence: Synthetic polypeptide"
DVVMTQSPLSLPVTLGQPASISCKASQDINKYLSWFQQRPGQSPRRLIYRANRLVDGVPDRFSGSGSGTDFTLKISRVEAEDVGVYYCLQYDEFPLTFGQGTKVEIK

SEQ ID NO: 5009 - protein, 111 aa, Artificial Sequence
  source: /note="Description of Artificial Sequence: Synthetic polypeptide"
DVVMTQSPLSLPVTLGQPASISCRASKRVSTSVHSYMHWFQQRPGQSPRRLIYLASSLESGVPDRFSGSGSGTDFTLKISRVEAEDVGVYYCQHSREVPLTFGQGTKVEIK

SEQ ID NO: 5010 - protein, 111 aa, Artificial Sequence
  source: /note="Description of Artificial Sequence: Synthetic polypeptide"
DVVMTQSPLSLPVTLGQPASISCRASKSVSTSGHSYMHWFQQRPGQSPRRLIYLASSLESGVPDRFSGSGSGTDFTLKISRVEAEDVGVYYCQHSRELPLTFGQGTKVEIK

SEQ ID NO: 5011 - protein, 114 aa, Artificial Sequence
  source: /note="Description of Artificial Sequence: Synthetic polypeptide"
  MOD_RES (100)..(100): Any amino acid
DVVMTQSPLSLPVTLGQPASISCRASKSVSTSGYSYMHWFQQRPGQSPRRLIYLVSNLESGVPDRFSGSGSGTDFTLKISRVEAEDVGVYYCNLLLSAHXGAYTFGQGTKVEIK

SEQ ID NO: 5012 - protein, 109 aa, Artificial Sequence
  source: /note="Description of Artificial Sequence: Synthetic polypeptide"
DVVMTQSPLSLPVTLGQPASISCRASQSVSTSTYSYMHWFQQRPGQSPRRLIYYNLECGVPDRFSGSGSGTDFTLKISRVEAEDVGVYYCQHSWEIPLTFGQGTKVEIK

SEQ ID NO: 5013 - protein, 109 aa, Artificial Sequence
  source: /note="Description of Artificial Sequence: Synthetic polypeptide"
DVVMTQSPLSLPVTLGQPASISCRASQSVSTSTYSYMHWFQQRPGQSPRRLIYYNLESGVPDRFSGSGSGTDFTLKISRVEAEDVGVYYCQRSWEIPLTFGQGTKVEIK

SEQ ID NO: 5014 - protein, 111 aa, Artificial Sequence
  source: /note="Description of Artificial Sequence: Synthetic polypeptide"
  MOD_RES (60)..(60): Any amino acid
DVVMTQSPLSLPVTLGQPASISCRPSKRISAYVFSYMHWFQQRPGQSPRRLIYLSCNLEXGVPDRFSGSGSGTDFTLKISRVEAEDVGVYYCQHSRELPLTFGQGTKVEIK

SEQ ID NO: 5015 - protein, 107 aa, Artificial Sequence
  source: /note="Description of Artificial Sequence: Synthetic polypeptide"
EIVLTQSPATLSLSPGERATLSCKASQDINKYLSWYQQKPGQAPRLLIYRANRLVDGIPARFSGSGSGTDFTLTISSLEPEDFAVYYCLQYDEFPLTFGQGTKVEIK

SEQ ID NO: 5016 - protein, 111 aa, Artificial Sequence
  source: /note="Description of Artificial Sequence: Synthetic polypeptide"
EIVLTQSPATLSLSPGERATLSCRASKRVSTSVHSYMHWYQQKPGQAPRLLIYLASSLESGIPARFSGSGSGTDFTLTISSLEPEDFAVYYCQHSREVPLTFGQGTKVEIK

SEQ ID NO: 5017 - protein, 114 aa, Artificial Sequence
  source: /note="Description of Artificial Sequence: Synthetic polypeptide"
  MOD_RES (100)..(100): Any amino acid
EIVLTQSPATLSLSPGERATLSCRASKSVSTSGYSYMHWYQQKPGQAPRLLIYLVSNLESGIPARFSGSGSGTDFTLTISSLEPEDFAVYYCNLLLSAHXGAYTFGQGTKVEIK

SEQ ID NO: 5018 - protein, 108 aa, Artificial Sequence
  source: /note="Description of Artificial Sequence: Synthetic polypeptide"
EIVLTQSPATLSLSPGERATLSCRASQSVSSYLAWYQQKPGQAPRLLIYDASKRATGIPARFSGSGSGTDFTLTISSLEPEDFAVYYCQQSIVWPPFTFGGGTKVEIK

SEQ ID NO: 5019 - protein, 108 aa, Artificial Sequence
  source: /note="Description of Artificial Sequence: Synthetic polypeptide"
EIVLTQSPATLSLSPGERATLSCRASQSVSSYLAWYQQKPGQAPRLLIYDASNRATGIPARFSGSGSGTDFTLTISSLEPEDFAVYYCQQAYVVPPRTFGGGTKVEIK

SEQ ID NO: 5020 - protein, 106 aa, Artificial Sequence
  source: /note="Description of Artificial Sequence: Synthetic polypeptide"
EIVLTQSPATLSLSPGERATLSCRASQSVSSYLAWYQQKPGQAPRLLIYDASNRATGIPARFSGSGSGTDFTLTISSLEPEDFAVYYCQQFSNYPTFGGGTKVEIK

SEQ ID NO: 5021 - protein, 107 aa, Artificial Sequence
  source: /note="Description of Artificial Sequence: Synthetic polypeptide"
EIVLTQSPATLSLSPGERATLSCRASQSVSSYLAWYQQKPGQAPRLLIYDASNRATGIPARFSGSGSGTDFTLTISSLEPEDFAVYYCQQHANHPPTFGGGTKVEIK

SEQ ID NO: 5022 - protein, 106 aa, Artificial Sequence
  source: /note="Description of Artificial Sequence: Synthetic polypeptide"
EIVLTQSPATLSLSPGERATLSCRASQSVSSYLAWYQQKPGQAPRLLIYDASNRATGIPARFSGSGSGTDFTLTISSLEPEDFAVYYCQQSDNLPTFGGGTKVEIK

SEQ ID NO: 5023 - protein, 107 aa, Artificial Sequence
  source: /note="Description of Artificial Sequence: Synthetic polypeptide"
EIVLTQSPATLSLSPGERATLSCRASQSVSSYLAWYQQKPGQAPRLLIYDASNRATGIPARFSGSGSGTDFTLTISSLEPEDFAVYYCQQYYFWPLTFGGGTKVEIK

SEQ ID NO: 5024 - protein, 107 aa, Artificial Sequence
  source: /note="Description of Artificial Sequence: Synthetic polypeptide"
EIVLTQSPATLSLSPGERATLSCRASQSVSSYLAWYQQKPGQAPRLLIYDSSNRATGIPARFSGSGSGTDFTLTISSLEPEDFAVYYCQQYSTLPLTFGGGTKVEIK

SEQ ID NO: 5025 - protein, 109 aa, Artificial Sequence
  source: /note="Description of Artificial Sequence: Synthetic polypeptide"
EIVLTQSPATLSLSPGERATLSCRASQSVSTSTYSYMHWYQQKPGQAPRLLIYYNLECGIPARFSGSGSGTDFTLTISSLEPEDFAVYYCQHSWEIPLTFGQGTKVEIK

SEQ ID NO: 5026 - protein, 109 aa, Artificial Sequence
  source: /note="Description of Artificial Sequence: Synthetic polypeptide"
EIVLTQSPATLSLSPGERATLSCRASQSVSTSTYSYMHWYQQKPGQAPRLLIYYNLESGIPARFSGSGSGTDFTLTISSLEPEDFAVYYCQRSWEIPLTFGQGTKVEIK

SEQ ID NO: 5027 - protein, 111 aa, Artificial Sequence
  source: /note="Description of Artificial Sequence: Synthetic polypeptide"
  MOD_RES (60)..(60): Any amino acid
EIVLTQSPATLSLSPGERATLSCRPSKRISAYVFSYMHWYQQKPGQAPRLLIYLSCNLEXGIPARFSGSGSGTDFTLTISSLEPEDFAVYYCQHSRELPLTFGQGTKVEIK

SEQ ID NO: 5028 - protein, 107 aa, Artificial Sequence
  source: /note="Description of Artificial Sequence: Synthetic polypeptide"
EIVLTQSPATLSVSPGERATLSCRASQSVGSNLAWYQQKPGQAPRLLIYGASTRATGIPARFSGSGSGTEFTLTISSLQSEDFAVYYCQQYNAWPLTFGGGTKVEIK

SEQ ID NO: 5029 - protein, 107 aa, Artificial Sequence
  source: /note="Description of Artificial Sequence: Synthetic polypeptide"
EIVLTQSPGTLSLSPGERATLSCKASQDINKYLSWYQQKPGQAPRLLIYRANRLVDGIPDRFSGSGSGTDFTLTISRLEPEDFAVYYCLQYDEFPLTFGQGTKVEIK

SEQ ID NO: 5030 - protein, 111 aa, Artificial Sequence
  source: /note="Description of Artificial Sequence: Synthetic polypeptide"
EIVLTQSPGTLSLSPGERATLSCRASKRVSTSVHSYMHWYQQKPGQAPRLLIYLASSLESGIPDRFSGSGSGTDFTLTISRLEPEDFAVYYCQHSREVPLTFGQGTKVEIK

SEQ ID NO: 5031 - protein, 114 aa, Artificial Sequence
  source: /note="Description of Artificial Sequence: Synthetic polypeptide"
  MOD_RES (100)..(100): Any amino acid
EIVLTQSPGTLSLSPGERATLSCRASKSVSTSGYSYMHWYQQKPGQAPRLLIYLVSNLESGIPDRFSGSGSGTDFTLTISRLEPEDFAVYYCNLLLSAHXGAYTFGQGTKVEIK

SEQ ID NO: 5032 - protein, 107 aa, Artificial Sequence
  source: /note="Description of Artificial Sequence: Synthetic polypeptide"
EIVLTQSPGTLSLSPGERATLSCRASQSVSSSFLAWYQQKPGQAPRLLIYGASSRATGIPDRFSGSGSGTDFTLTISRLEPEDFAVYYCQQFGDLPTFGGGTKVEIK

SEQ ID NO: 5033 - protein, 107 aa, Artificial Sequence
  source: /note="Description of Artificial Sequence: Synthetic polypeptide"
EIVLTQSPGTLSLSPGERATLSCRASQSVSSSFLAWYQQKPGQAPRLLIYGASSRATGIPDRFSGSGSGTDFTLTISRLEPEDFAVYYCQQSEDWPTFGGGTKVEIK

SEQ ID NO: 5034 - protein, 107 aa, Artificial Sequence
  source: /note="Description of Artificial Sequence: Synthetic polypeptide"
EIVLTQSPGTLSLSPGERATLSCRASQSVSSSFLAWYQQKPGQAPRLLIYGASSRATGIPDRFSGSGSGTDFTLTISRLEPEDFAVYYCQQSQLRPTFGGGTKVEIK

SEQ ID NO: 5035 - protein, 108 aa, Artificial Sequence
  source: /note="Description of Artificial Sequence: Synthetic polypeptide"
EIVLTQSPGTLSLSPGERATLSCRASQSVSSSFLAWYQQKPGQAPRLLIYGASSRATGIPDRFSGSGSGTDFTLTISRLEPEDFAVYYCQQVASPPPTFGGGTKVEIK

SEQ ID NO: 5036 - protein, 108 aa, Artificial Sequence
  source: /note="Description of Artificial Sequence: Synthetic polypeptide"
EIVLTQSPGTLSLSPGERATLSCRASQSVSSSFLAWYQQKPGQAPRLLIYGASSRATGIPDRFSGSGSGTDFTLTISRLEPEDFAVYYCQQVDSYPPTFGGGTKVEIK

SEQ ID NO: 5037 - protein, 108 aa, Artificial Sequence
  source: /note="Description of Artificial Sequence: Synthetic polypeptide"
EIVLTQSPGTLSLSPGERATLSCRASQSVSSSFLAWYQQKPGQAPRLLIYGASSRATGIPDRFSGSGSGTDFTLTISRLEPEDFAVYYCQQVSSFPPTFGGGTKVEIK

SEQ ID NO: 5038 - protein, 108 aa, Artificial Sequence
  source: /note="Description of Artificial Sequence: Synthetic polypeptide"
EIVLTQSPGTLSLSPGERATLSCRASQSVSSSYLAWYQQKPGQAPRLLIYGASSRATGIPDRFSGSGSGTDFTLTISRLEPEDFAVYYCQEYGISPYTFGGGTKVEIK

SEQ ID NO: 5039 - protein, 108 aa, Artificial Sequence
  source: /note="Description of Artificial Sequence: Synthetic polypeptide"
EIVLTQSPGTLSLSPGERATLSCRASQSVSSSYLAWYQQKPGQAPRLLIYGASSRATGIPDRFSGSGSGTDFTLTISRLEPEDFAVYYCQQFAFLPPTFGGGTKVEIK

SEQ ID NO: 5040 - protein, 108 aa, Artificial Sequence
  source: /note="Description of Artificial Sequence: Synthetic polypeptide"
EIVLTQSPGTLSLSPGERATLSCRASQSVSSSYLAWYQQKPGQAPRLLIYGASSRATGIPDRFSGSGSGTDFTLTISRLEPEDFAVYYCQQYDNYPPTFGGGTKVEIK

SEQ ID NO: 5041 - protein, 108 aa, Artificial Sequence
  source: /note="Description of Artificial Sequence: Synthetic polypeptide"
EIVLTQSPGTLSLSPGERATLSCRASQSVSSSYLAWYQQKPGQAPRLLIYGASSRATGIPDRFSGSGSGTDFTLTISRLEPEDFAVYYCQQYYGLPLTFGGGTKVEIK

SEQ ID NO: 5042 - protein, 109 aa, Artificial Sequence
  source: /note="Description of Artificial Sequence: Synthetic polypeptide"
EIVLTQSPGTLSLSPGERATLSCRASQSVSTSTYSYMHWYQQKPGQAPRLLIYYNLECGIPDRFSGSGSGTDFTLTISRLEPEDFAVYYCQHSWEIPLTFGQGTKVEIK

SEQ ID NO: 5043 - protein, 109 aa, Artificial Sequence
  source: /note="Description of Artificial Sequence: Synthetic polypeptide"
EIVLTQSPGTLSLSPGERATLSCRASQSVSTSTYSYMHWYQQKPGQAPRLLIYYNLESGIPDRFSGSGSGTDFTLTISRLEPEDFAVYYCQRSWEIPLTFGQGTKVEIK

SEQ ID NO: 5044 - protein, 111 aa, Artificial Sequence
  source: /note="Description of Artificial Sequence: Synthetic polypeptide"
  MOD_RES (60)..(60): Any amino acid
EIVLTQSPGTLSLSPGERATLSCRPSKRISAYVFSYMHWYQQKPGQAPRLLIYLSCNLEXGIPDRFSGSGSGTDFTLTISRLEPEDFAVYYCQHSRELPLTFGQGTKVEIK

SEQ ID NO: 5045 - protein, 107 aa, Artificial Sequence
  source: /note="Description of Artificial Sequence: Synthetic polypeptide"
EIVMTQSPATLSLSPGERATLSCRASQSVSSYLAWYQQKPGQAPRLLIYDASNRATGIPARFSGSGSGTDFTLTISSLEPEDFAVYYCQQLSVFPPTFGGGTKVEIK

SEQ ID NO: 5046 - protein, 107 aa, Artificial Sequence
  source: /note="Description of Artificial Sequence: Synthetic polypeptide"
EIVMTQSPATLSVSPGERATLSCKASQDINKYLSWYQQKPGQAPRLLIYRANRLVDGIPARFSGSGSGTEFTLTISSLQSEDFAVYYCLQYDEFPLTFGQGTKVEIK

SEQ ID NO: 5047 - protein, 111 aa, Artificial Sequence
  source: /note="Description of Artificial Sequence: Synthetic polypeptide"
EIVMTQSPATLSVSPGERATLSCRASKRVSTSVHSYMHWYQQKPGQAPRLLIYLASSLESGIPARFSGSGSGTEFTLTISSLQSEDFAVYYCQHSREVPLTFGQGTKVEIK

SEQ ID NO: 5048 - protein, 114 aa, Artificial Sequence
  source: /note="Description of Artificial Sequence: Synthetic polypeptide"
  MOD_RES (100)..(100): Any amino acid
EIVMTQSPATLSVSPGERATLSCRASKSVSTSGYSYMHWYQQKPGQAPRLLIYLVSNLESGIPARFSGSGSGTEFTLTISSLQSEDFAVYYCNLLLSAHXGAYTFGQGTKVEIK

SEQ ID NO: 5049 - protein, 107 aa, Artificial Sequence
  source: /note="Description of Artificial Sequence: Synthetic polypeptide"
EIVMTQSPATLSVSPGERATLSCRASQSVSSNLAWYQQKPGQAPRLLIYGASTRATGIPARFSGSGSGTEFTLTISSLQSEDFAVYYCQQFSNWPLTFGGGTKVEIK

SEQ ID NO: 5050 - protein, 107 aa, Artificial Sequence
  source: /note="Description of Artificial Sequence: Synthetic polypeptide"
EIVMTQSPATLSVSPGERATLSCRASQSVSSNLAWYQQKPGQAPRLLIYGASTRATGIPARFSGSGSGTEFTLTISSLQSEDFAVYYCQQYDVWPITFGGGTKVEIK

SEQ ID NO: 5051 - protein, 106 aa, Artificial Sequence
  source: /note="Description of Artificial Sequence: Synthetic polypeptide"
EIVMTQSPATLSVSPGERATLSCRASQSVSSNLAWYQQKPGQAPRLLIYGASTRATGIPARFSGSGSGTEFTLTISSLQSEDFAVYYCQQYFDLPTFGGGTKVEIK

SEQ ID NO: 5052 - protein, 107 aa, Artificial Sequence
  source: /note="Description of Artificial Sequence: Synthetic polypeptide"
EIVMTQSPATLSVSPGERATLSCRASQSVSSNLAWYQQKPGQAPRLLIYGASTRATGIPARFSGSGSGTEFTLTISSLQSEDFAVYYCQQYVNLPITFGGGTKVEIK

SEQ ID NO: 5053 - protein, 107 aa, Artificial Sequence
  source: /note="Description of Artificial Sequence: Synthetic polypeptide"
EIVMTQSPATLSVSPGERATLSCRASQSVSSNLAWYQQKPGQAPRLLIYSASTRATGIPARFSGSGSGTEFTLTISSLQSEDFAVYYCQQYIVLPITFGGGTKVEIK

SEQ ID NO: 5054 - protein, 109 aa, Artificial Sequence
  source: /note="Description of Artificial Sequence: Synthetic polypeptide"
EIVMTQSPATLSVSPGERATLSCRASQSVSTSTYSYMHWYQQKPGQAPRLLIYYNLECGIPARFSGSGSGTEFTLTISSLQSEDFAVYYCQHSWEIPLTFGQGTKVEIK

SEQ ID NO: 5055 - protein, 109 aa, Artificial Sequence
  source: /note="Description of Artificial Sequence: Synthetic polypeptide"
EIVMTQSPATLSVSPGERATLSCRASQSVSTSTYSYMHWYQQKPGQAPRLLIYYNLESGIPARFSGSGSGTEFTLTISSLQSEDFAVYYCQRSWEIPLTFGQGTKVEIK

SEQ ID NO: 5056 - protein, 111 aa, Artificial Sequence
  source: /note="Description of Artificial Sequence: Synthetic polypeptide"
  MOD_RES (60)..(60): Any amino acid
EIVMTQSPATLSVSPGERATLSCRPSKRISAYVFSYMHWYQQKPGQAPRLLIYLSCNLEXGIPARFSGSGSGTEFTLTISSLQSEDFAVYYCQHSRELPLTFGQGTKVEIK

SEQ ID NO: 5057 - protein, 111 aa, Artificial Sequence
  source: /note="Description of Artificial Sequence: Synthetic polypeptide"
GIQMTQSPSSLSASVGDRVTITCRASQSVGTSTYSYMHWYQQKPGKAPKLLIKYAVNLESGVPSRFSGSGSGTDFTLTISSLQPEDFATYYCQHSWEIPLTFGQGTKLEIK

SEQ ID NO: 5058 - protein, 115 aa, Mus musculus
QLVLTQSSSASFSLGASAKLTCTLSSQHSTYTIEWYQQQPLKPPKYVMELKKDGSHSTGDGIPDRFSGSSSGADRYLSISNIQPEDEAIYICGVGDTIKEQFVYVFGGGTKVTVL

SEQ ID NO: 5059 - protein, 106 aa, Mus musculus
  MOD_RES (1)..(1): Any amino acid
  MOD_RES (66)..(66): Any amino acid
XTQSLASLAVSLGQRATMSCRASQSVSTSTYSYMHWYQQKPGQPPKLLIKYNLECGVPARFSGSGXGTDFTLNIHPVEEEDSATYYCQHSWEIPLTFGGGTKLEMK

SEQ ID NO: 5060 - protein, 139 aa, Artificial Sequence
  source: /note="Description of Artificial Sequence: Synthetic polypeptide"
PSSLSASVGDRVTITCRASQSINSYLDWYQQKPGKAPKLLIYAASSLQSGVPSRFSGSGSGTDFTLTISSLQPEDFATYYCQQYYSTPFTFGPGTKVEIKRTVAAPSVFIFPPSDEQLKSGTASVVCLLNNFYPREAKV

SEQ ID NO: 5061 - protein, 114 aa, Artificial Sequence
  source: /note="Description of Artificial Sequence: Synthetic polypeptide"
  MOD_RES (113)..(114): Any amino acid
DIVLTQSPLSLAVSLGQPAIISCKASQSVSFAGTSLMHWYHQKPGQQPRLLIYRASNLEAGVPDRFSGSGSKTDFTLTISPVEAEDAATYYCQQSREYPYTFGGGTKLEIKRXX

SEQ ID NO: 5062 - protein, 11 aa, Homo sapiens
RASQDVNTAVA

SEQ ID NO: 5063 - protein, 107 aa, Artificial Sequence [sequence omitted]

SEQ ID NO: 5064 - protein, 107 aa, Artificial Sequence
  source: /note="Description of Artificial Sequence: Synthetic polypeptide"
DIQMTQSPSSLSASVGDRVTITCRASQSISNYLAWYQQKPGKAPKLLIYAASSLESGVPSRFSGSGSGTDFTLTISSLQPEDFATYYCQQYNSLPWTFGQGTKVEIK

SEQ ID NO: 5065 - protein, 107 aa, Mus musculus
DTVMTQSHKIMSTSVGDRVSITCKASQDVSIGVAWYQQRPGQSPKLLIYSASYRYTGVPDRFTGSGSGTDFTFTISSVQAEDLAVYYCQQYYIYPYTFGGGTKLEIK

SEQ ID NO: 5066 - protein, 107 aa, Homo sapiens
AIQLTQSPSSLSASVGDRVTITCRASQGISSALAWYQQKPGKAPKLLIYDASSLESGVPSRFSGSGSGTDFTLTISSLQPEDFATYYCQQFNSYPFTFGPGTKVDIK

SEQ ID NO: 5067 - protein, 107 aa, Homo sapiens
DIQMTQSPSSLSASVGDRVSITCRASQGISSWLAWYQQKPEKAPKSLIYAASNLRSGVPSRFSGSGSGTDFTLTISSLQPEDFATYYCQQYYSYPRTFGQGTKVEIK

SEQ ID NO: 5068 - protein, 107 aa, Homo sapiens
DIQMTQSPSSLSASVGDRVTITCRASQGISSWLAWYQQKPEKAPKSLIYAASSLQSGVPSRFSGSGSGTDFTLTISSLQPEDFATYYCQQYNSYPYTFGQGTKLEIK

SEQ ID NO: 5069 - protein, 107 aa, Homo sapiens
DIQMTQSPSSLSASVGDRVTITCRASQGISSWLAWYQQKPEKAPKSLIYAASSLQSGVPSRFSGSGSGTDFTLTISSLQPEDFATYYCQQYYSYPRTFGQGTKVEIK

SEQ ID NO: 5070 - protein, 114 aa, Artificial Sequence
  source: /note="Description of Artificial Sequence: Synthetic polypeptide"
  MOD_RES (112)..(114): Any amino acid
EIVLTQSPATLSLSPGERATLSCRASKGVSTSGYSYLHWYQQKPGQAPRLLIYLASYLESGVPARFSGSGSGTDFTLTISSLEPEDFAVYYCQHSRDLPLTFGGGTKVEIKXXX

SEQ ID NO: 5071 - protein, 107 aa, Homo sapiens
EIVLTQSPATLSLSPGERATLSCRASQSVSSYLAWYQQKPGQAPRLIIYDASNRATGIPARFSGSGSGTDFTLTISSLEPEDFAVYYCQQRSNWPLTFGGGTKVEIK

SEQ ID NO: 5072 - protein, 107 aa, Homo sapiens
EIVLTQSPATLSLSPGERATLSCRASQSVSSYLAWYQQKPGQAPRLLIYDASNRATGIPARFSGSGSGTDFTLTISSLEPEDFAVYYCQQRSNWPLTFGGGTKVEIK

SEQ ID NO: 5073 - protein, 106 aa, Homo sapiens
EIVLTQSPATLSLSPGERATLSCRASQSVSSYLAWYQQKPGQAPRLLIYDASNRATGIPARFSGSGSGTDFTLTISSLEPEDFAVYYCQQRSNWPTFGQGTKVEIK

SEQ ID NO: 5074 - protein, 106 aa, Homo sapiens
EIVLTQSPATLSLSPGERATLSCRASQSVSSYLAWYQQKPGQAPRLLIYDASNRATGIPARFSGSGSGTDFTLTISSLEPEDFAVYYCQQRSNWPTFGQGTRLEIK

SEQ ID NO: 5075 - protein, 107 aa, Homo sapiens [sequence omitted]

SEQ ID NO: 5076 - protein, 107 aa, Homo sapiens
EIVLTQSPATLSLSPGERATLSCRASQSVSSYLAWYQQKPGQAPRLLIYDTSNRATGIPARFSGSGSGTDFTLTISSLEPEDFAVYYCQQRSNWPLTFGGGTKVEIK

SEQ ID NO: 5077 - protein, 107 aa, Homo sapiens
EIVLTQSPATLSLSPGERATLSCRASQSVSSYLVWYQQKPGQAPRLLIYDASNRATGIPARFSGSGSGTDFTLTISSLEPEDFAVYYCQQRSNWPRTFGQGTKVEIK

SEQ ID NO: 5078 - protein, 106 aa, Homo sapiens
EIVLTQSPGTLSLSPGERATLSCRASQSVSSSYLAWYQQKPGQAPRLLIYGASSRATGIPDRFSGSGSGTDFTLTISRLEPEDFAVYYCQQYGSSPFGGGTKVEIK

SEQ ID NO: 5079 - protein, 108 aa, Homo sapiens
EIVLTQSPGTLSLSPGERATLSCRASQSVSSSYLAWYQQKPGQAPRLLIYGASSRATGIPDRFSGSGSGTDFTLTISRLEPEDFAVYYCQQYGSSPWTFGQGTKVEIK

SEQ ID NO: 5080 - protein, 116 aa, Oryctolagus cuniculus
MDTRAPTQLLGLLLLWLPGARCALVMTQTPSSTSTAVGGTVTIKCQASQSISVYLAWYQQKPGQPPKLLIYSASTLASGVPSRFKGSRSGTEYTLTISGVQREDAATYYCLGSAGS

SEQ ID NO: 5081 - protein, 108 aa, Artificial Sequence
  source: /note="Description of Artificial Sequence: Synthetic polypeptide"
EIVLTQSPGTLSLSPGERATLSCRASQRVSSSYLAWYQQKPGQAPRLLIYDASSRATGIPDRFSGSGSGTDFTLTISRLEPEDFAVYYCQQYGSLPWTFGQGTKVEIK

SEQ ID NO: 5082 - protein, 11 aa, Artificial Sequence
  source: /note="Description of Artificial Sequence: Synthetic peptide"
FGQGTKVEIKR

SEQ ID NO: 5083 - protein, 10 aa, Artificial Sequence
  source: /note="Description of Artificial Sequence: Synthetic peptide"
FGTGTKVTVL

SEQ ID NO: 5084 - protein, 32 aa, Artificial Sequence
  source: /note="Description of Artificial Sequence: Synthetic polypeptide"
GVSNRFSGSKSGNTASLTISGLQAEDEADYYC

SEQ ID NO: 5085 - protein, 9 aa, Artificial Sequence
  source: /note="Description of Artificial Sequence: Synthetic peptide"
QQYLYHPAT

SEQ ID NO: 5086 - protein, 22 aa, Artificial Sequence
  source: /note="Description of Artificial Sequence: Synthetic peptide"
QSALTQPASVSGSPGQSITISC

SEQ ID NO: 5087 - protein, 11 aa, Artificial Sequence
  source: /note="Description of Artificial Sequence: Synthetic peptide"
RASQDVSTAVA

SEQ ID NO: 5088 - protein, 10 aa, Artificial Sequence
  source: /note="Description of Artificial Sequence: Synthetic peptide"
  VARIANT (3)..(3): /replace="Tyr"
  VARIANT (5)..(5): /replace="Ser"
  VARIANT (6)..(6): /replace="Thr" or "Ser"
  VARIANT (7)..(7): /replace="Ser"
  VARIANT (8)..(8): /replace="Thr"
  SITE (1)..(10): /note="Variant residues given in the sequence have no preference with respect to those in the annotations for variant positions"
SSFTNRGIRV

SEQ ID NO: 5089 - protein, 10 aa, Artificial Sequence
  source: /note="Description of Artificial Sequence: Synthetic peptide"
SSYTSSSTRV

SEQ ID NO: 5090 - protein, 14 aa, Artificial Sequence
  source: /note="Description of Artificial Sequence: Synthetic peptide"
TGTSSDVGAYNYVS

SEQ ID NO: 5091 - protein, 14 aa, Artificial Sequence
  source: /note="Description of Artificial Sequence: Synthetic peptide"
  VARIANT (4)..(4): /replace="Ser"
  VARIANT (5)..(5): /replace="Arg" or "Ser"
  VARIANT (9)..(9): /replace="Gly"
  SITE (1)..(14): /note="Variant residues given in the sequence have no preference with respect to those in the annotations for variant positions"
TGTNTDVGAYNYVS

SEQ ID NO: 5092 - protein, 15 aa, Artificial Sequence
  source: /note="Description of Artificial Sequence: Synthetic peptide"
WYQQHPGKAPKLMIY

SEQ ID NO: 5093 - protein, 7 aa, Artificial Sequence
  source: /note="Description of Artificial Sequence: Synthetic peptide"
  VARIANT (1)..(1): /replace="Asp"
  VARIANT (3)..(3): /replace="Asn" or "Ser"
  VARIANT (4)..(4): /replace="His" or "Asn"
  SITE (1)..(7): /note="Variant residues given in the sequence have no preference with respect to those in the annotations for variant positions"
EVIDRPS

SEQ ID NO: 5094 - protein, 107 aa, Artificial Sequence
  source: /note="Description of Artificial Sequence: Synthetic polypeptide"
DIQMTQSQKFMSTSVGDRVSVTCKASQNVGTNVAWYQQKPGQSPKALIYSASYRYSGVPDRFTGSGSGTDFTLNISNVQSEDLAEYFCQQFNSYPYTFGGGTKLEIK

SEQ ID NO: 5095 - protein, 106 aa, Artificial Sequence
  source: /note="Description of Artificial Sequence: Synthetic polypeptide"
DIVLTQSPTLMSASPGEKVTMTCSASSSVSYMYWYQQKPRSSPKPLIYLTSNLASGVPARFSGSGSGTSYSLTISSMEAEDAATYYCQQWSSNPLTFGAGTKLELK

SEQ ID NO: 5096 - protein, 107 aa, Artificial Sequence
  source: /note="Description of Artificial Sequence: Synthetic polypeptide"
DIVMIQSQKFMSTSVGDRVSVTCKASQNVDTNVAWYQQKPGQSPKALIYSASYRYSGVPDRFTGSGSGTDFTLTISNVQSEDLAEYFCQQYNSFPLTFGSGTKLEIK

SEQ ID NO: 5097 - protein, 107 aa, Artificial Sequence
  source: /note="Description of Artificial Sequence: Synthetic polypeptide"
DIVMTQSQKFMSTSVGDRVSVTCKASHNVGTSVAWYQQKPGQSPKSLIYSASYRYSGVPDRFTGSGSGTDFTLTISNVQSEDLAEYFCQQYNSYPLTFGSGTKLEIK

SEQ ID NO: 5098 - protein, 107 aa, Artificial Sequence
  source: /note="Description of Artificial Sequence: Synthetic polypeptide"
DIVMTQSQKFMSTSVGDRVSVTCKASQNVDTNVAWYQQKPGQSPKALIYSASYRYSGVPDRFTGSGSGTDFTLTISNVQSEDLAEYFCQQYNSYPYTFGGGTKLEIK

SEQ ID NO: 5099 - protein, 107 aa, Artificial Sequence
  source: /note="Description of Artificial Sequence: Synthetic polypeptide"
DIVMTQSQKFMSTSVGDRVSVTCKASQNVGTNVAWYRQKPGQSPKALIYSASYRYNGVPDRFTGSGSGTDFTLTISNVQSEDLAEYFCQQYNSYPYTFGGGTKLEIK

SEQ ID NO: 5100 - protein, 107 aa, Artificial Sequence
  source: /note="Description of Artificial Sequence: Synthetic polypeptide"
DIVMTQSQKFMSTSVGDRVSVTCKASQNVGTYVAWYQQKPGQSPKALIYSASYRYSGVPDRFTGSGSGTDFTLNISNVQSEDLAEYFCQQFNSYPYTFGGGTKLEIK

SEQ ID NO: 5101 - protein, 112 aa, Artificial Sequence
  source: /note="Description of Artificial Sequence: Synthetic polypeptide"
DVLMTQTPLSLLVSLGDQASISCRSSQSIVHSNGNTYLEWYLQKPGQSPKLLIYKVSIRFSGVPDRFSGSGSGTDFTLKISRVEAEDLGVYYCFQGSHVPWTFGGGTKLEIK

SEQ ID NO: 5102 - protein, 112 aa, Artificial Sequence
  source: /note="Description of Artificial Sequence: Synthetic polypeptide"
DVLMTQTPLSLPVSLGDQASISCRCSQSIVHSNGNTYLEWYLQKPGQSPKLLIYRVSNRFSGVPDRFSGSGSGTDFTLKISRVEAEDLGVYYCFQGSHVPWTFGGGTKLEIK

SEQ ID NO: 5103 - protein, 112 aa, Artificial Sequence
  source: /note="Description of Artificial Sequence: Synthetic polypeptide"
DVLMTQTPLSLPVSLGDQASISCRSSQSILHSNGNTYLEWYLQKPGQSPKLLIYKVSNRFSGVPDRFSGCGSGTDFTLKISRVEPEDLGVYYCFQGSHVPWTFGGGTKLEIK

SEQ ID NO: 5104 - protein, 112 aa, Artificial Sequence
  source: /note="Description of Artificial Sequence: Synthetic polypeptide"
DVLMTQTPLSLPVSLGDQASISCRSSQSIVHSNGNTYLEWYLQKPGQSPKLLIYKVSNRFSGVPDRFSGSGSGTDFTLKISRVEAEDLGVYYCFQGSHVPWTFGGGTKLEIK

SEQ ID NO: 5105 - protein, 112 aa, Artificial Sequence
  source: /note="Description of Artificial Sequence: Synthetic polypeptide"
DVLMTQTPLSLPVSLGDQASISCRSSQTIVHSNGNTYLEWYLQKPGQSPKLLIYKVSNRFSGVPDRFSGSGSGTDFTLKISRVEAEDLGVYYCFQGSHVPWTFGGGTKLEIK

SEQ ID NO: 5106 - protein, 110 aa, Artificial Sequence
  source: /note="Description of Artificial Sequence: Synthetic polypeptide"
QAVVTQESALTTSPGETVTLTCRSSTGAVTTSNYANWVQEKPDHLFTGLIGTTNNRAPGVPARFSGSLIGDKAALTITGAQTEDEAIYFCALWYSNHLVFGGGTKLTVLG

SEQ ID NO: 5107 - protein, 107 aa, Artificial Sequence
  source: /note="Description of Artificial Sequence: Synthetic polypeptide"
DIQLTQSPSFLSASVGDRVTITCKASDHINNWLAWYQQKPGKAPKLLIYGATSLETGVPSRFSGSGSGTEFTLTISSLQPEDFATYYCHQYWNTPYTFGQGTKVEIK

SEQ ID NO: 5108 - protein, 107 aa, Artificial Sequence
  source: /note="Description of Artificial Sequence: Synthetic polypeptide"
DIQLTQSPSFLSASVGDRVTITCKASQKVGTNVAWYQQKPGKAPKLLIYSASTRHRGVPSRFSGSGSGTEFTLTISSLQPEDFATYYCHQGNSVQYTFGQGTKVEIK

SEQ ID NO: 5109 - protein, 107 aa, Artificial Sequence
  source: /note="Description of Artificial Sequence: Synthetic polypeptide"
DIQLTQSPSFLSASVGDRVTITCLASQTIGTWLAWYQQKPGKAPKLLIYAATSLADGVPSRFSGSGSGTEFTLTISSLQPEDFATYYCQQLYSTPYTFGQGTKVEIK

SEQ ID NO: 5110 - protein, 107 aa, Artificial Sequence
  source: /note="Description of Artificial Sequence: Synthetic polypeptide"
  MOD_RES (31)..(31): Any amino acid
DIQLTQSPSFLSASVGDRVTITCRASQDISXYLNWYQQKPGKAPKLLIYLSSRLHSGVPSRFSGSGSGTEFTLTISSLQPEDFATYYCQQGHTGAWTFGQGTKVEIK

SEQ ID NO: 5111 - protein, 107 aa, Artificial Sequence
  source: /note="Description of Artificial Sequence: Synthetic polypeptide"
DIQLTQSPSFLSASVGDRVTITCRASQSIREYLHWYQQKPGKAPKLLIYFASQSICGVPSRFSGSGSGTEFTLTISSLQPEDFATYYCQKAHNFPYTFGQGTKVEIK

SEQ ID NO: 5112 - protein, 107 aa, Artificial Sequence
  source: /note="Description of Artificial Sequence: Synthetic polypeptide"
DIQLTQSPSFLSASVGDRVTITCRASQSISDYLHWYQQKPGKAPKLLIYYASQSISGVPSRFSGSGSGTEFTLTISSLQPEDFATYYCQKGLNFPLTFGQGTKVEIK

SEQ ID NO: 5113 - protein, 107 aa, Artificial Sequence
  source: /note="Description of Artificial Sequence: Synthetic polypeptide"
DIQLTQSPSFLSASVGDRVTITCRASQSISEYLHWYQQKPGKAPKLLIYFASQSICGVPSRFSGSGSGTEFTLTISSLQPEDFATYYCQNGHNFPYTFGQGTKVEIK

SEQ ID NO: 5114 - protein, 112 aa, Artificial Sequence
  source: /note="Description of Artificial Sequence: Synthetic polypeptide"
  MOD_RES (61)..(61): Any amino acid
DIQLTQSPSFLSASVGDRVTITCRSSQSLVHSTGNIYLHWYQQKPGKAPKLLIYKVSNRFXGVPSRFSGSGSGTEFTLTISSLQPEDFATYYCSQNTHVPYTFGQGTKVEIK

SEQ ID NO: 5115 - protein, 112 aa, Artificial Sequence
  source: /note="Description of Artificial Sequence: Synthetic polypeptide"
DIQLTQSPSFLSASVGDRVTITCRSSQSLVHSTGNTYLHWYQQKPGKAPKLLIYKVSNRFCGVPSRFSGSGSGTEFTLTISSLQPEDFATYYCSQNTHVPYTFGQGTKVEIK

SEQ ID NO: 5116 - protein, 112 aa, Artificial Sequence
  source: /note="Description of Artificial Sequence: Synthetic polypeptide"
DIQLTQSPSFLSASVGDRVTITCRSSQSLVHSTGNTYLHWYQQKPGKAPKLLIYKVSNRFSGVPSRFSGSGSGTEFTLTISSLQPEDFATYYCSQNTHVPYTFGQGTKVEIK

SEQ ID NO: 5117 - protein, 106 aa, Artificial Sequence
  source: /note="Description of Artificial Sequence: Synthetic polypeptide"
DIQLTQSPSFLSASVGDRVTITCSANSSFIYMYWYQQKPGKAPKLLIYDTSNLASGVPSRFSGSGSGTEFTLTISSLQPEDFATYYCQQWSSSPLTFGQGTKVEIK

SEQ ID NO: 5118 - protein, 106 aa, Artificial Sequence
  source: /note="Description of Artificial Sequence: Synthetic polypeptide"
DIQLTQSPSFLSASVGDRVTITCSANSSFTYMYWYQQKPGKAPKLLIYDTSNLASGVPSRFSGSGSGTEFTLTISSLQPEDFATYYCQQWSSSPLTFGQGTKVEIK

SEQ ID NO: 5119 - protein, 107 aa, Artificial Sequence
  source: /note="Description of Artificial Sequence: Synthetic polypeptide"
  MOD_RES (20)..(20): Any amino acid
  MOD_RES (47)..(47): Any amino acid
DIQMTQFPATLSGTPGDRVXLSRRASQSIREYLHWYQQKSHESPRLXIKFASQSICGIPSRFSGSGSGSDFTLSINTVEPEDVGVYYCQKAHNFPYTFGGGTKLEIK

SEQ ID NO: 5120 - protein, 107 aa, Artificial Sequence
  source: /note="Description of Artificial Sequence: Synthetic polypeptide"
DIQMTQFPATLSVTPGDRVSLSCRASQSISDYLHWYQHKSHESPRLLIKYASQSISGIPSRFSGSGSGWDFTLSINSVEPEDVGIYYCQKGLNFPLTFGGGTKLEMK

SEQ ID NO: 5121 - protein, 107 aa, Artificial Sequence
  source: /note="Description of Artificial Sequence: Synthetic polypeptide"
DIQMTQSLSYLSVSLGGRVTITCKASDHINNWLAWYQQKPGNAPRLLISGATSLETGFPSRFSGSGSGKDYTLSITSLQTEDVATYYCHQYWNTPYTFGGGTRLEIK

SEQ ID NO: 5122 - protein, 107 aa, Artificial Sequence
  source: /note="Description of Artificial Sequence: Synthetic polypeptide"
DIQMTQSPASQSASLGESVTITCLASQTIGTWLAWYQQKPGKSPQLLIYAATSLADGVPSRFSGSGSGTKFSFKISSLQAEDFVSYYCQQLYSTPYTFGGGTKLEIK

SEQ ID NO: 5123 - protein, 107 aa, Artificial Sequence
  source: /note="Description of Artificial Sequence: Synthetic polypeptide"
DIQMTQSPSSLSASVGDRVTITCKASDHINNWLAWYQQKPGKAPKLLIYGATSLETGVPSRFSGSGSGTDFTFTISSLQPEDIATYYCHQYWNTPYTFGQGTKVEIK

SEQ ID NO: 5124 - protein, 107 aa, Artificial Sequence
  source: /note="Description of Artificial Sequence: Synthetic polypeptide"
DIQMTQSPSSLSASVGDRVTITCKASDHINNWLAWYQQKPGKAPKLLIYGATSLETGVPSRFSGSGSGTDFTLTISSLQPEDFATYYCHQYWNTPYTFGQGTKVEIK

SEQ ID NO: 5125 - protein, 107 aa, Artificial Sequence
  source: /note="Description of Artificial Sequence: Synthetic polypeptide"
DIQMTQSPSSLSASVGDRVTITCKASQKVGTNVAWYQQKPGKAPKLLIYSASTRHRGVPSRFSGSGSGTDFTFTISSLQPEDIATYYCHQGNSVQYTFGQGTKVEIK

SEQ ID NO: 5126 - protein, 107 aa, Artificial Sequence
  source: /note="Description of Artificial Sequence: Synthetic polypeptide"
DIQMTQSPSSLSASVGDRVTITCKASQKVGTNVAWYQQKPGKAPKLLIYSASTRHRGVPSRFSGSGSGTDFTLTISSLQPEDFATYYCHQGNSVQYTFGQGTKVEIK

SEQ ID NO: 5127 - protein, 107 aa, Artificial Sequence
  source: /note="Description of Artificial Sequence: Synthetic polypeptide"
DIQMTQSPSSLSASVGDRVTITCLASQTIGTWLAWYQQKPGKAPKLLIYAATSLADGVPSRFSGSGSGTDFTFTISSLQPEDIATYYCQQLYSTPYTFGQGTKVEIK

SEQ ID NO: 5128 - protein, 107 aa, Artificial Sequence
  source: /note="Description of Artificial Sequence: Synthetic polypeptide"
DIQMTQSPSSLSASVGDRVTITCLASQTIGTWLAWYQQKPGKAPKLLIYAATSLADGVPSRFSGSGSGTDFTLTISSLQPEDFATYYCQQLYSTPYTFGQGTKVEIK

SEQ ID NO: 5129 - protein, 107 aa, Artificial Sequence
  source: /note="Description of Artificial Sequence: Synthetic polypeptide"
DIQMTQSPSSLSASVGDRVTITCRASQDINTYLNWYQQKPGKAPKLLIYYTSRLHSGVPSRFSGSGSGTDFTLTISSLQPEDFATYYCQQGNTLPWTFGQGTKLEIK

SEQ ID NO: 5130 - protein, 107 aa, Artificial Sequence
  source: /note="Description of Artificial Sequence: Synthetic polypeptide"
DIQMTQSPSSLSASVGDRVTITCRASQDINTYLNWYQQKPGKAPKLLIYYTSRLHSGVPSRFSGSGSGTDYTLTISSLQPEDFATYYCQQGNTLPWTFGQGTKLEIK

SEQ ID NO: 5131 - protein, 107 aa, Artificial Sequence
  source: /note="Description of Artificial Sequence: Synthetic polypeptide"
  MOD_RES (31)..(31): Any amino acid
DIQMTQSPSSLSASVGDRVTITCRASQDISXYLNWYQQKPGKAPKLLIYLSSRLHSGVPSRFSGSGSGTDFTFTISSLQPEDIATYYCQQGHTGAWTFGQGTKVEIK

SEQ ID NO: 5132 - protein, 107 aa, Artificial Sequence
  source: /note="Description of Artificial Sequence: Synthetic polypeptide"
  MOD_RES (31)..(31): Any amino acid
DIQMTQSPSSLSASVGDRVTITCRASQDISXYLNWYQQKPGKAPKLLIYLSSRLHSGVPSRFSGSGSGTDFTLTISSLQPEDFATYYCQQGHTGAWTFGQGTKVEIK

SEQ ID NO: 5133 - protein, 107 aa, Artificial Sequence
  source: /note="Description of Artificial Sequence: Synthetic polypeptide"
DIQMTQSPSSLSASVGDRVTITCRASQSIREYLHWYQQKPGKAPKLLIYFASQSICGVPSRFSGSGSGTDFTFTISSLQPEDIATYYCQKAHNFPYTFGQGTKVEIK

SEQ ID NO: 5134 - protein, 107 aa, Artificial Sequence
  source: /note="Description of Artificial Sequence: Synthetic polypeptide"
DIQMTQSPSSLSASVGDRVTITCRASQSIREYLHWYQQKPGKAPKLLIYFASQSICGVPSRFSGSGSGTDFTLTISSLQPEDFATYYCQKAHNFPYTFGQGTKVEIK

SEQ ID NO: 5135 - protein, 107 aa, Artificial Sequence
  source: /note="Description of Artificial Sequence: Synthetic polypeptide"
DIQMTQSPSSLSASVGDRVTITCRASQSISDYLHWYQQKPGKAPKLLIYYASQSISGVPSRFSGSGSGTDFTFTISSLQPEDIATYYCQKGLNFPLTFGQGTKVEIK

SEQ ID NO: 5136 - protein, 107 aa, Artificial Sequence
  source: /note="Description of Artificial Sequence: Synthetic polypeptide"
DIQMTQSPSSLSASVGDRVTITCRASQSISDYLHWYQQKPGKAPKLLIYYASQSISGVPSRFSGSGSGTDFTLTISSLQPEDFATYYCQKGLNFPLTFGQGTKVEIK

SEQ ID NO: 5137 - protein, 107 aa, Artificial Sequence
  source: /note="Description of Artificial Sequence: Synthetic polypeptide"
DIQMTQSPSSLSASVGDRVTITCRASQSISEYLHWYQQKPGKAPKLLIYFASQSICGVPSRFSGSGSGTDFTFTISSLQPEDIATYYCQNGHNFPYTFGQGTKVEIK

SEQ ID NO: 5138 - protein, 107 aa, Artificial Sequence
  source: /note="Description of Artificial Sequence: Synthetic polypeptide"
DIQMTQSPSSLSASVGDRVTITCRASQSISEYLHWYQQKPGKAPKLLIYFASQSICGVPSRFSGSGSGTDFTLTISSLQPEDFATYYCQNGHNFPYTFGQGTKVEIK

SEQ ID NO: 5139 - protein, 94 aa, Artificial Sequence
  source: /note="Description of Artificial Sequence: Synthetic polypeptide"
DIQMTQSPSSLSASVGDRVTITCRASQSISSYLNWYQQKPGKAPKLLIYAASSLQSGVPSRFSGSGSGTDFTLTISSLQPEDFATYYCQQSYST

SEQ ID NO: 5140 - protein, 112 aa, Artificial Sequence
  source: /note="Description of Artificial Sequence: Synthetic polypeptide"
  MOD_RES (61)..(61): Any amino acid
DIQMTQSPSSLSASVGDRVTITCRSSQSLVHSTGNIYLHWYQQKPGKAPKLLIYKVSNRFXGVPSRFSGSGSGTDFTFTISSLQPEDIATYYCSQNTHVPYTFGQGTKVEIK

SEQ ID NO: 5141 - protein, 112 aa, Artificial Sequence
  source: /note="Description of Artificial Sequence: Synthetic polypeptide"
  MOD_RES (61)..(61): Any amino acid
DIQMTQSPSSLSASVGDRVTITCRSSQSLVHSTGNIYLHWYQQKPGKAPKLLIYKVSNRFXGVPSRFSGSGSGTDFTLTISSLQPEDFATYYCSQNTHVPYTFGQGTKVEIK

SEQ ID NO: 5142 - protein, 112 aa, Artificial Sequence
  source: /note="Description of Artificial Sequence: Synthetic polypeptide"
DIQMTQSPSSLSASVGDRVTITCRSSQSLVHSTGNTYLHWYQQKPGKAPKLLIYKVSNRFCGVPSRFSGSGSGTDFTFTISSLQPEDIATYYCSQNTHVPYTFGQGTKVEIK

SEQ ID NO: 5143 - protein, 112 aa, Artificial Sequence
  source: /note="Description of Artificial Sequence: Synthetic polypeptide"
DIQMTQSPSSLSASVGDRVTITCRSSQSLVHSTGNTYLHWYQQKPGKAPKLLIYKVSNRFCGVPSRFSGSGSGTDFTLTISSLQPEDFATYYCSQNTHVPYTFGQGTKVEIK

SEQ ID NO: 5144 - protein, 112 aa, Artificial Sequence
  source: /note="Description of Artificial Sequence: Synthetic polypeptide"
DIQMTQSPSSLSASVGDRVTITCRSSQSLVHSTGNTYLHWYQQKPGKAPKLLIYKVSNRFSGVPSRFSGSGSGTDFTFTISSLQPEDIATYYCSQNTHVPYTFGQGTKVEIK

SEQ ID NO: 5145 - protein, 112 aa, Artificial Sequence
  source: /note="Description of Artificial Sequence: Synthetic polypeptide"
DIQMTQSPSSLSASVGDRVTITCRSSQSLVHSTGNTYLHWYQQKPGKAPKLLIYKVSNRFSGVPSRFSGSGSGTDFTLTISSLQPEDFATYYCSQNTHVPYTFGQGTKVEIK

SEQ ID NO: 5146 - protein, 106 aa, Artificial Sequence
  source: /note="Description of Artificial Sequence: Synthetic polypeptide"
DIQMTQSPSSLSASVGDRVTITCSANSSFIYMYWYQQKPGKAPKLLIYDTSNLASGVPSRFSGSGSGTDFTFTISSLQPEDIATYYCQQWSSSPLTFGQGTKVEIK

SEQ ID NO: 5147 - protein, 106 aa, Artificial Sequence
  source: /note="Description of Artificial Sequence: Synthetic polypeptide"
DIQMTQSPSSLSASVGDRVTITCSANSSFIYMYWYQQKPGKAPKLLIYDTSNLASGVPSRFSGSGSGTDFTLTISSLQPEDFATYYCQQWSSSPLTFGQGTKVEIK

SEQ ID NO: 5148 - protein, 106 aa, Artificial Sequence
  source: /note="Description of Artificial Sequence: Synthetic polypeptide"
DIQMTQSPSSLSASVGDRVTITCSANSSFTYMYWYQQKPGKAPKLLIYDTSNLASGVPSRFSGSGSGTDFTFTISSLQPEDIATYYCQQWSSSPLTFGQGTKVEIK

SEQ ID NO: 5149 - protein, 106 aa, Artificial Sequence
  source: /note="Description of Artificial Sequence: Synthetic polypeptide"
DIQMTQSPSSLSASVGDRVTITCSANSSFTYMYWYQQKPGKAPKLLIYDTSNLASGVPSRFSGSGSGTDFTLTISSLQPEDFATYYCQQWSSSPLTFGQGTKVEIK

SEQ ID NO: 5150 - protein, 107 aa, Artificial Sequence
  source: /note="Description of Artificial Sequence: Synthetic polypeptide"
DIQMTQSPSTLSASVGDRVTITCKASDHINNWLAWYQQKPGKAPKLLIYGATSLETGVPSRFSGSGSGTEFTLTISSLQPDDFATYYCHQYWNTPYTFGQGTKVEIK

SEQ ID NO: 5151 - protein, 107 aa, Artificial Sequence
  source: /note="Description of Artificial Sequence: Synthetic polypeptide"
DIQMTQSPSTLSASVGDRVTITCKASQKVGTNVAWYQQKPGKAPKLLIYSASTRHRGVPSRFSGSGSGTEFTLTISSLQPDDFATYYCHQGNSVQYTFGQGTKVEIK

SEQ ID NO: 5152 - protein, 107 aa, Artificial Sequence
  source: /note="Description of Artificial Sequence: Synthetic polypeptide"
DIQMTQSPSTLSASVGDRVTITCLASQTIGTWLAWYQQKPGKAPKLLIYAATSLADGVPSRFSGSGSGTEFTLTISSLQPDDFATYYCQQLYSTPYTFGQGTKVEIK

SEQ ID NO: 5153 - protein, 107 aa, Artificial Sequence
  source: /note="Description of Artificial Sequence: Synthetic polypeptide"
  MOD_RES (31)..(31): Any amino acid
DIQMTQSPSTLSASVGDRVTITCRASQDISXYLNWYQQKPGKAPKLLIYLSSRLHSGVPSRFSGSGSGTEFTLTISSLQPDDFATYYCQQGHTGAWTFGQGTKVEIK

SEQ ID NO: 5154 - protein, 107 aa, Artificial Sequence
  source: /note="Description of Artificial Sequence: Synthetic polypeptide"
DIQMTQSPSTLSASVGDRVTITCRASQSIREYLHWYQQKPGKAPKLLIYFASQSICGVPSRFSGSGSGTEFTLTISSLQPDDFATYYCQKAHNFPYTFGQGTKVEIK

SEQ ID NO: 5155 - protein, 107 aa, Artificial Sequence
  source: /note="Description of Artificial Sequence: Synthetic polypeptide"
DIQMTQSPSTLSASVGDRVTITCRASQSISDYLHWYQQKPGKAPKLLIYYASQSISGVPSRFSGSGSGTEFTLTISSLQPDDFATYYCQKGLNFPLTFGQGTKVEIK

SEQ ID NO: 5156 - protein, 107 aa, Artificial Sequence
  source: /note="Description of Artificial Sequence: Synthetic polypeptide"
DIQMTQSPSTLSASVGDRVTITCRASQSISEYLHWYQQKPGKAPKLLIYFASQSICGVPSRFSGSGSGTEFTLTISSLQPDDFATYYCQNGHNFPYTFGQGTKVEIK

SEQ ID NO: 5157 - protein, 112 aa, Artificial Sequence
  source: /note="Description of Artificial Sequence: Synthetic polypeptide"
  MOD_RES (61)..(61): Any amino acid
DIQMTQSPSTLSASVGDRVTITCRSSQSLVHSTGNIYLHWYQQKPGKAPKLLIYKVSNRFXGVPSRFSGSGSGTEFTLTISSLQPDDFATYYCSQNTHVPYTFGQGTKVEIK

SEQ ID NO: 5158 - protein, 112 aa, Artificial Sequence
  source: /note="Description of Artificial Sequence: Synthetic polypeptide"
DIQMTQSPSTLSASVGDRVTITCRSSQSLVHSTGNTYLHWYQQKPGKAPKLLIYKVSNRFCGVPSRFSGSGSGTEFTLTISSLQPDDFATYYCSQNTHVPYTFGQGTKVEIK

SEQ ID NO: 5159 - protein, 112 aa, Artificial Sequence
  source: /note="Description of Artificial Sequence: Synthetic polypeptide"
DIQMTQSPSTLSASVGDRVTITCRSSQSLVHSTGNTYLHWYQQKPGKAPKLLIYKVSNRFSGVPSRFSGSGSGTEFTLTISSLQPDDFATYYCSQNTHVPYTFGQGTKVEIK

SEQ ID NO: 5160 - protein, 106 aa, Artificial Sequence
  source: /note="Description of Artificial Sequence: Synthetic polypeptide"
DIQMTQSPSTLSASVGDRVTITCSANSSFIYMYWYQQKPGKAPKLLIYDTSNLASGVPSRFSGSGSGTEFTLTISSLQPDDFATYYCQQWSSSPLTFGQGTKVEIK

SEQ ID NO: 5161 - protein, 106 aa, Artificial Sequence
  source: /note="Description of Artificial Sequence: Synthetic polypeptide"
DIQMTQSPSTLSASVGDRVTITCSANSSFTYMYWYQQKPGKAPKLLIYDTSNLASGVPSRFSGSGSGTEFTLTISSLQPDDFATYYCQQWSSSPLTFGQGTKVEIK

SEQ ID NO: 5162 - protein, 107 aa, Artificial Sequence
  source: /note="Description of Artificial Sequence: Synthetic polypeptide"
  MOD_RES (7)..(7): Any amino acid
DIQMTQXPATLSVTPGDRVSLSCRASQSISEYLHWYHQKSHESPRLLIKFASQSICGIPSRFSGSGSGSDFTLTINSVEPEDVGVYYCQNGHNFPYTFGGGTKLEIK

SEQ ID NO: 5163 - protein, 107 aa, Artificial Sequence
  source: /note="Description of Artificial Sequence: Synthetic polypeptide"
DIVMTQSPDSLAVSLGERATINCKASDHINNWLAWYQQKPGQPPKLLIYGATSLETGVPDRFSGSGSGTDFTLTISSLQAEDVAVYYCHQYWNTPYTFGQGTKVEIK

SEQ ID NO: 5164 - protein, 107 aa, Artificial Sequence
  source: /note="Description of Artificial Sequence: Synthetic polypeptide"
DIVMTQSPDSLAVSLGERATINCKASQKVGTNVAWYQQKPGQPPKLLIYSASTRHRGVPDRFSGSGSGTDFTLTISSLQAEDVAVYYCHQGNSVQYTFGQGTKVEIK

SEQ ID NO: 5165 - protein, 107 aa, Artificial Sequence
  source: /note="Description of Artificial Sequence: Synthetic polypeptide"
DIVMTQSPDSLAVSLGERATINCLASQTIGTWLAWYQQKPGQPPKLLIYAATSLADGVPDRFSGSGSGTDFTLTISSLQAEDVAVYYCQQLYSTPYTFGQGTKVEIK

SEQ ID NO: 5166 - protein, 107 aa, Artificial Sequence
  source: /note="Description of Artificial Sequence: Synthetic polypeptide"
  MOD_RES (31)..(31): Any amino acid
DIVMTQSPDSLAVSLGERATINCRASQDISXYLNWYQQKPGQPPKLLIYLSSRLHSGVPDRFSGSGSGTDFTLTISSLQAEDVAVYYCQQGHTGAWTFGQGTKVEIK

SEQ ID NO: 5167 - protein, 107 aa, Artificial Sequence
  source: /note="Description of Artificial Sequence: Synthetic polypeptide"
DIVMTQSPDSLAVSLGERATINCRASQSIREYLHWYQQKPGQPPKLLIYFASQSICGVPDRFSGSGSGTDFTLTISSLQAEDVAVYYCQKAHNFPYTFGQGTKVEIK

SEQ ID NO: 5168 - protein, 107 aa, Artificial Sequence
  source: /note="Description of Artificial Sequence: Synthetic polypeptide"
DIVMTQSPDSLAVSLGERATINCRASQSISDYLHWYQQKPGQPPKLLIYYASQSISGVPDRFSGSGSGTDFTLTISSLQAEDVAVYYCQKGLNFPLTFGQGTKVEIK

SEQ ID NO: 5169 - protein, 107 aa, Artificial Sequence
  source: /note="Description of Artificial Sequence: Synthetic polypeptide"
DIVMTQSPDSLAVSLGERATINCRASQSISEYLHWYQQKPGQPPKLLIYFASQSICGVPDRFSGSGSGTDFTLTISSLQAEDVAVYYCQNGHNFPYTFGQGTKVEIK

SEQ ID NO: 5170 - protein, 112 aa, Artificial Sequence
  source: /note="Description of Artificial Sequence: Synthetic polypeptide"
  MOD_RES (61)..(61): Any amino acid
DIVMTQSPDSLAVSLGERATINCRSSQSLVHSTGNIYLHWYQQKPGQPPKLLIYKVSNRFXGVPDRFSGSGSGTDFTLTISSLQAEDVAVYYCSQNTHVPYTFGQGTKVEIK

SEQ ID NO: 5171 - protein, 112 aa, Artificial Sequence
  source: /note="Description of Artificial Sequence: Synthetic polypeptide"
DIVMTQSPDSLAVSLGERATINCRSSQSLVHSTGNTYLHWYQQKPGQPPKLLIYKVSNRFCGVPDRFSGSGSGTDFTLTISSLQAEDVAVYYCSQNTHVPYTFGQGTKVEIK

SEQ ID NO: 5172 - protein, 112 aa, Artificial Sequence
  source: /note="Description of Artificial Sequence: Synthetic polypeptide"
DIVMTQSPDSLAVSLGERATINCRSSQSLVHSTGNTYLHWYQQKPGQPPKLLIYKVSNRFSGVPDRFSGSGSGTDFTLTISSLQAEDVAVYYCSQNTHVPYTFGQGTKVEIK

SEQ ID NO: 5173 - protein, 106 aa, Artificial Sequence
  source: /note="Description of Artificial Sequence: Synthetic polypeptide"
DIVMTQSPDSLAVSLGERATINCSANSSFIYMYWYQQKPGQPPKLLIYDTSNLASGVPDRFSGSGSGTDFTLTISSLQAEDVAVYYCQQWSSSPLTFGQGTKVEIK

SEQ ID NO: 5174 - protein, 106 aa, Artificial Sequence
  source: /note="Description of Artificial Sequence: Synthetic polypeptide"
DIVMTQSPDSLAVSLGERATINCSANSSFTYMYWYQQKPGQPPKLLIYDTSNLASGVPDRFSGSGSGTDFTLTISSLQAEDVAVYYCQQWSSSPLTFGQGTKVEIK

SEQ ID NO: 5175 - protein, 107 aa, Artificial Sequence
  source: /note="Description of Artificial Sequence: Synthetic polypeptide"
DIVMTQSPLSLPVTPGEPASISCKASDHINNWLAWYLQKPGQSPQLLIYGATSLETGVPDRFSGSGSGTDFTLKISRVEAEDVGVYYCHQYWNTPYTFGQGTKVEIK

SEQ ID NO: 5176 - protein, 107 aa, Artificial Sequence
  source: /note="Description of Artificial Sequence: Synthetic polypeptide"
DIVMTQSPLSLPVTPGEPASISCKASQKVGTNVAWYLQKPGQSPQLLIYSASTRHRGVPDRFSGSGSGTDFTLKISRVEAEDVGVYYCHQGNSVQYTFGQGTKVEIK

SEQ ID NO: 5177 - protein, 107 aa, Artificial Sequence
  source: /note="Description of Artificial Sequence: Synthetic polypeptide"
DIVMTQSPLSLPVTPGEPASISCLASQTIGTWLAWYLQKPGQSPQLLIYAATSLADGVPDRFSGSGSGTDFTLKISRVEAEDVGVYYCQQLYSTPYTFGQGTKVEIK

SEQ ID NO: 5178 - protein, 107 aa, Artificial Sequence
  source: /note="Description of Artificial Sequence: Synthetic polypeptide"
  MOD_RES (31)..(31): Any amino acid
DIVMTQSPLSLPVTPGEPASISCRASQDISXYLNWYLQKPGQSPQLLIYLSSRLHSGVPDRFSGSGSGTDFTLKISRVEAEDVGVYYCQQGHTGAWTFGQGTKVEIK

SEQ ID NO: 5179 - protein, 107 aa, Artificial Sequence
  source: /note="Description of Artificial Sequence: Synthetic polypeptide"
DIVMTQSPLSLPVTPGEPASISCRASQSIREYLHWYLQKPGQSPQLLIYFASQSICGVPDRFSGSGSGTDFTLKISRVEAEDVGVYYCQKAHNFPYTFGQGTKVEIK

SEQ ID NO: 5180 - protein, 107 aa, Artificial Sequence
  source: /note="Description of Artificial Sequence: Synthetic polypeptide"
DIVMTQSPLSLPVTPGEPASISCRASQSISDYLHWYLQKPGQSPQLLIYYASQSISGVPDRFSGSGSGTDFTLKISRVEAEDVGVYYCQKGLNFPLTFGQGTKVEIK

SEQ ID NO: 5181 - protein, 107 aa, Artificial Sequence
  source: /note="Description of Artificial Sequence: Synthetic polypeptide"
DIVMTQSPLSLPVTPGEPASISCRASQSISEYLHWYLQKPGQSPQLLIYFASQSICGVPDRFSGSGSGTDFTLKISRVEAEDVGVYYCQNGHNFPYTFGQGTKVEIK

SEQ ID NO: 5182 - protein, 112 aa, Artificial Sequence
  source: /note="Description of Artificial Sequence: Synthetic polypeptide"
  MOD_RES (61)..(61): Any amino acid
DIVMTQSPLSLPVTPGEPASISCRSSQSLVHSTGNIYLHWYLQKPGQSPQLLIYKVSNRFXGVPDRFSGSGSGTDFTLKISRVEAEDVGVYYCSQNTHVPYTFGQGTKVEIK

SEQ ID NO: 5183 - protein, 112 aa, Artificial Sequence
  source: /note="Description of Artificial Sequence: Synthetic polypeptide"
DIVMTQSPLSLPVTPGEPASISCRSSQSLVHSTGNTYLHWYLQKPGQSPQLLIYKVSNRFCGVPDRFSGSGSGTDFTLKISRVEAEDVGVYYCSQNTHVPYTFGQGTKVEIK

SEQ ID NO: 5184 - protein, 112 aa, Artificial Sequence
  source: /note="Description of Artificial Sequence: Synthetic polypeptide"
DIVMTQSPLSLPVTPGEPASISCRSSQSLVHSTGNTYLHWYLQKPGQSPQLLIYKVSNRFSGVPDRFSGSGSGTDFTLKISRVEAEDVGVYYCSQNTHVPYTFGQGTKVEIK

SEQ ID NO: 5185 - protein, 106 aa, Artificial Sequence
  source: /note="Description of Artificial Sequence: Synthetic polypeptide"
DIVMTQSPLSLPVTPGEPASISCSANSSFIYMYWYLQKPGQSPQLLIYDTSNLASGVPDRFSGSGSGTDFTLKISRVEAEDVGVYYCQQWSSSPLTFGQGTKVEIK

SEQ ID NO: 5186 - protein, 106 aa, Artificial Sequence
  source: /note="Description of Artificial Sequence: Synthetic polypeptide"
DIVMTQSPLSLPVTPGEPASISCSANSSFTYMYWYLQKPGQSPQLLIYDTSNLASGVPDRFSGSGSGTDFTLKISRVEAEDVGVYYCQQWSSSPLTFGQGTKVEIK

SEQ ID NO: 5187 - protein, 112 aa, Artificial Sequence
  source: /note="Description of Artificial Sequence: Synthetic polypeptide"
DVLMTQTPLSLPVSLGDQASISCRSSQSLVHSTGNTYLHWYLQKPGQSPKLLIYKVSNRFSGVPDRFSGSGAGTDFTLKISRVEAEDLGVYFCSQNTHVPYTFGGGTKLEIK

SEQ ID NO: 5188 - protein, 107 aa, Artificial Sequence
  source: /note="Description of Artificial Sequence: Synthetic polypeptide"
DVQMTQSPSSLSASVGDRVTITCRASQDINTYLNWYQQKPGKAPKLLIYYTSRLHSGVPSRFSGSGSGTDYTLTISSLQPEDFATYYCQQGNTLPWTFGQGTKLEIK

SEQ ID NO: 5189 - protein, 107 aa, Artificial Sequence
  source: /note="Description of Artificial Sequence: Synthetic polypeptide"
DVQMTQTTSSLSASLGDRVTISCRASQDINTYLNWYQQKPDGTVKLLIYYTSRLHSGVPSRFSGSGSGTDYSLTISNLEQEDIATYFCQQGNTLPWTFGGGTKLEIK

SEQ ID NO: 5190 - protein, 107 aa, Artificial Sequence
  source: /note="Description of Artificial Sequence: Synthetic polypeptide"
DVVMTQSPLSLPVTLGQPASISCKASDHINNWLAWFQQRPGQSPRRLIYGATSLETGVPDRFSGSGSGTDFTLKISRVEAEDVGVYYCHQYWNTPYTFGQGTKVEIK

SEQ ID NO: 5191 - protein, 107 aa, Artificial Sequence
  source: /note="Description of Artificial Sequence: Synthetic polypeptide"
DVVMTQSPLSLPVTLGQPASISCKASQKVGTNVAWFQQRPGQSPRRLIYSASTRHRGVPDRFSGSGSGTDFTLKISRVEAEDVGVYYCHQGNSVQYTFGQGTKVEIK

SEQ ID NO: 5192 - protein, 107 aa, Artificial Sequence
  source: /note="Description of Artificial Sequence: Synthetic polypeptide"
DVVMTQSPLSLPVTLGQPASISCLASQTIGTWLAWFQQRPGQSPRRLIYAATSLADGVPDRFSGSGSGTDFTLKISRVEAEDVGVYYCQQLYSTPYTFGQGTKVEIK

SEQ ID NO: 5193 - protein, 107 aa, Artificial Sequence
  source: /note="Description of Artificial Sequence: Synthetic polypeptide"
  MOD_RES (31)..(31): Any amino acid
DVVMTQSPLSLPVTLGQPASISCRASQDISXYLNWFQQRPGQSPRRLIYLSSRLHSGVPDRFSGSGSGTDFTLKISRVEAEDVGVYYCQQGHTGAWTFGQGTKVEIK

SEQ ID NO: 5194 - protein, 107 aa, Artificial Sequence
  source: /note="Description of Artificial Sequence: Synthetic polypeptide"
DVVMTQSPLSLPVTLGQPASISCRASQSIREYLHWFQQRPGQSPRRLIYFASQSICGVPDRFSGSGSGTDFTLKISRVEAEDVGVYYCQKAHNFPYTFGQGTKVEIK

SEQ ID NO: 5195 - protein, 107 aa, Artificial Sequence
  source: /note="Description of Artificial Sequence: Synthetic polypeptide"
DVVMTQSPLSLPVTLGQPASISCRASQSISDYLHWFQQRPGQSPRRLIYYASQSISGVPDRFSGSGSGTDFTLKISRVEAEDVGVYYCQKGLNFPLTFGQGTKVEIK

SEQ ID NO: 5196 - protein, 107 aa, Artificial Sequence
  source: /note="Description of Artificial Sequence: Synthetic polypeptide"
DVVMTQSPLSLPVTLGQPASISCRASQSISEYLHWFQQRPGQSPRRLIYFASQSICGVPDRFSGSGSGTDFTLKISRVEAEDVGVYYCQNGHNFPYTFGQGTKVEIK

SEQ ID NO: 5197 - protein, 112 aa, Artificial Sequence
  source: /note="Description of Artificial Sequence: Synthetic polypeptide"
  MOD_RES (61)..(61): Any amino acid
DVVMTQSPLSLPVTLGQPASISCRSSQSLVHSTGNIYLHWFQQRPGQSPRRLIYKVSNRFXGVPDRFSGSGSGTDFTLKISRVEAEDVGVYYCSQNTHVPYTFGQGTKVEIK

SEQ ID NO: 5198 - protein, 112 aa, Artificial Sequence
  source: /note="Description of Artificial Sequence: Synthetic polypeptide"
DVVMTQSPLSLPVTLGQPASISCRSSQSLVHSTGNTYLHWFQQRPGQSPRRLIYKVSNRFCGVPDRFSGSGSGTDFTLKISRVEAEDVGVYYCSQNTHVPYTFGQGTKVEIK

SEQ ID NO: 5199 - protein, 112 aa, Artificial Sequence
  source: /note="Description of Artificial Sequence: Synthetic polypeptide"
DVVMTQSPLSLPVTLGQPASISCRSSQSLVHSTGNTYLHWFQQRPGQSPRRLIYKVSNRFSGVPDRFSGSGSGTDFTLKISRVEAEDVGVYYCSQNTHVPYTFGQGTKVEIK

SEQ ID NO: 5200 - protein, 106 aa, Artificial Sequence
  source: /note="Description of Artificial Sequence: Synthetic polypeptide"
DVVMTQSPLSLPVTLGQPASISCSANSSFIYMYWFQQRPGQSPRRLIYDTSNLASGVPDRFSGSGSGTDFTLKISRVEAEDVGVYYCQQWSSSPLTFGQGTKVEIK

SEQ ID NO: 5201 - protein, 106 aa, Artificial Sequence
  source: /note="Description of Artificial Sequence: Synthetic polypeptide"
DVVMTQSPLSLPVTLGQPASISCSANSSFTYMYWFQQRPGQSPRRLIYDTSNLASGVPDRFSGSGSGTDFTLKISRVEAEDVGVYYCQQWSSSPLTFGQGTKVEIK

SEQ ID NO: 5202 - protein, 112 aa, Artificial Sequence
  source: /note="Description of Artificial Sequence: Synthetic polypeptide"
  MOD_RES (61)..(61): Any amino acid
DVVMTQTPLSLPVSLGDQASISCRSSQSLVHSTGNIYLHWYLQKPGQSPKLLIYKVSNRFXGVPDRFSGSGSGTDFTLKISRVEAEDLGVYFCSQNTHVPYTFGGGTKLEIK

SEQ ID NO: 5203 - protein, 112 aa, Artificial Sequence
  source: /note="Description of Artificial Sequence: Synthetic polypeptide"
  MOD_RES (3)..(3): Any amino acid
DVXMTQTPLSLPVSLGDQASISCRSSQSLVHSTGNTYLHWYLQKPGQSPKLLIYKVSNRFCGVPDRFSGSGAGTDFTLKISRVEAEDLGVYFCSQNTHVPYTFGGGTKLEIK

SEQ ID NO: 5204 - protein, 112 aa, Artificial Sequence
  source: /note="Description of Artificial Sequence: Synthetic polypeptide"
  MOD_RES (3)..(3): Any amino acid
DVXMTQTPLSLPVSLGDQASISCRSSQSLVHSTGNTYLHWYLQKPGQSPKLLIYKVSNRFSGVPDRFSGSGAGTDFTLKISRVEAEDLGVYFCSQNTHVPYTFGGGTKLEIK

SEQ ID NO: 5205 - protein, 107 aa, Artificial Sequence
  source: /note="Description of Artificial Sequence: Synthetic polypeptide"
EIVLTQSPATLSLSPGERATLSCKASDHINNWLAWYQQKPGQAPRLLIYGATSLETGIPARFSGSGSGTDFTLTISSLEPEDFAVYYCHQYWNTPYTFGQGTKVEIK

SEQ ID NO: 5206 - protein, 107 aa, Artificial Sequence
  source: /note="Description of Artificial Sequence: Synthetic polypeptide"
EIVLTQSPATLSLSPGERATLSCKASQKVGTNVAWYQQKPGQAPRLLIYSASTRHRGIPARFSGSGSGTDFTLTISSLEPEDFAVYYCHQGNSVQYTFGQGTKVEIK

SEQ ID NO: 5207 - protein, 107 aa, Artificial Sequence
  source: /note="Description of Artificial Sequence: Synthetic polypeptide"
EIVLTQSPATLSLSPGERATLSCLASQTIGTWLAWYQQKPGQAPRLLIYAATSLADGIPARFSGSGSGTDFTLTISSLEPEDFAVYYCQQLYSTPYTFGQGTKVEIK

SEQ ID NO: 5208 - protein, 107 aa, Artificial Sequence
  source: /note="Description of Artificial Sequence: Synthetic polypeptide"
  MOD_RES (31)..(31): Any amino acid
EIVLTQSPATLSLSPGERATLSCRASQDISXYLNWYQQKPGQAPRLLIYLSSRLHSGIPARFSGSGSGTDFTLTISSLEPEDFAVYYCQQGHTGAWTFGQGTKVEIK

SEQ ID NO: 5209 - protein, 107 aa, Artificial Sequence
  source: /note="Description of Artificial Sequence: Synthetic polypeptide"
EIVLTQSPATLSLSPGERATLSCRASQSIREYLHWYQQKPGQAPRLLIYFASQSICGIPARFSGSGSGTDFTLTISSLEPEDFAVYYCQKAHNFPYTFGQGTKVEIK

SEQ ID NO: 5210 - protein, 107 aa, Artificial Sequence
  source: /note="Description of Artificial Sequence: Synthetic polypeptide"
EIVLTQSPATLSLSPGERATLSCRASQSISDYLHWYQQKPGQAPRLLIYYASQSISGIPARFSGSGSGTDFTLTISSLEPEDFAVYYCQKGLNFPLTFGQGTKVEIK

SEQ ID NO: 5211 - protein, 107 aa, Artificial Sequence
  source: /note="Description of Artificial Sequence: Synthetic polypeptide"
EIVLTQSPATLSLSPGERATLSCRASQSISEYLHWYQQKPGQAPRLLIYFASQSICGIPARFSGSGSGTDFTLTISSLEPEDFAVYYCQNGHNFPYTFGQGTKVEIK

SEQ ID NO: 5212 - protein, 95 aa, Artificial Sequence
  source: /note="Description of Artificial Sequence: Synthetic polypeptide"
EIVLTQSPATLSLSPGERATLSCRASQSVSSYLAWYQQKPGQAPRLLIYDASNRATGIPARFSGSGSGTDFTLTISSLEPEDFAVYYCQQRSNWP

SEQ ID NO: 5213 - protein, 106 aa, Artificial Sequence
  source: /note="Description of Artificial Sequence: Synthetic polypeptide"
EIVLTQSPATLSLSPGERATLSCRASQSVSSYLAWYQQKPGQAPRLLIYDASNRATGIPARFSGSGSGTDFTLTISSLEPEDFAVYYCQQRSNWPPFGQGTKLEIK

SEQ ID NO: 5214 - protein, 112 aa, Artificial Sequence
  source: /note="Description of Artificial Sequence: Synthetic polypeptide"
  MOD_RES (61)..(61): Any amino acid
EIVLTQSPATLSLSPGERATLSCRSSQSLVHSTGNIYLHWYQQKPGQAPRLLIYKVSNRFXGIPARFSGSGSGTDFTLTISSLEPEDFAVYYCSQNTHVPYTFGQGTKVEIK

SEQ ID NO: 5215 - protein, 112 aa, Artificial Sequence
  source: /note="Description of Artificial Sequence: Synthetic polypeptide"
EIVLTQSPATLSLSPGERATLSCRSSQSLVHSTGNTYLHWYQQKPGQAPRLLIYKVSNRFCGIPARFSGSGSGTDFTLTISSLEPEDFAVYYCSQNTHVPYTFGQGTKVEIK

SEQ ID NO: 5216 - protein, 112 aa, Artificial Sequence
  source: /note="Description of Artificial Sequence: Synthetic polypeptide"
EIVLTQSPATLSLSPGERATLSCRSSQSLVHSTGNTYLHWYQQKPGQAPRLLIYKVSNRFSGIPARFSGSGSGTDFTLTISSLEPEDFAVYYCSQNTHVPYTFGQGTKVEIK

SEQ ID NO: 5217 - protein, 106 aa, Artificial Sequence
  source: /note="Description of Artificial Sequence: Synthetic polypeptide"
EIVLTQSPATLSLSPGERATLSCSANSSFIYMYWYQQKPGQAPRLLIYDTSNLASGIPARFSGSGSGTDFTLTISSLEPEDFAVYYCQQWSSSPLTFGQGTKVEIK

SEQ ID NO: 5218 - protein, 106 aa, Artificial Sequence
  source: /note="Description of Artificial Sequence: Synthetic polypeptide"
EIVLTQSPATLSLSPGERATLSCSANSSFTYMYWYQQKPGQAPRLLIYDTSNLASGIPARFSGSGSGTDFTLTISSLEPEDFAVYYCQQWSSSPLTFGQGTKLEIK

SEQ ID NO: 5219 - protein, 106 aa, Artificial Sequence
  source: /note="Description of Artificial Sequence: Synthetic polypeptide"
EIVLTQSPATLSLSPGERATLSCSANSSFTYMYWYQQKPGQAPRLLIYDTSNLASGIPARFSGSGSGTDFTLTISSLEPEDFAVYYCQQWSSSPLTFGQGTKVEIK

SEQ ID NO: 5220 - protein, 106 aa, Artificial Sequence
  source: /note="Description of Artificial Sequence: Synthetic polypeptide"
EIVLTQSPATLSLSPGERVTMSCSANSSFTYMYWYQQKPGQAPRLLIFDTSNLASGVPARFSGSGSGTDYTLTISSMEPEDFAVYYCQQWSSSPLTFGQGTKLELK

SEQ ID NO: 5221 - protein, 106 aa, Artificial Sequence
  source: /note="Description of Artificial Sequence: Synthetic polypeptide"
EIVLTQSPATLSLSPGERVTMSCSANSSFTYMYWYQQKPGQAPRLLIYDTSNLASGVPARFSGSGSGTDYTLTISSMEPEDFAVYYCQQWSSSPLTFGQGTKLEIK

SEQ ID NO: 5222 - protein, 107 aa, Artificial Sequence
  source: /note="Description of Artificial Sequence: Synthetic polypeptide"
EIVLTQSPGTLSLSPGERATLSCKASDHINNWLAWYQQKPGQAPRLLIYGATSLETGIPDRFSGSGSGTDFTLTISRLEPEDFAVYYCHQYWNTPYTFGQGTKVEIK

SEQ ID NO: 5223 - protein, 107 aa, Artificial Sequence
  source: /note="Description of Artificial Sequence: Synthetic polypeptide"
EIVLTQSPGTLSLSPGERATLSCKASQKVGTNVAWYQQKPGQAPRLLIYSASTRHRGIPDRFSGSGSGTDFTLTISRLEPEDFAVYYCHQGNSVQYTFGQGTKVEIK

SEQ ID NO: 5224 - protein, 107 aa, Artificial Sequence
  source: /note="Description of Artificial Sequence: Synthetic polypeptide"
EIVLTQSPGTLSLSPGERATLSCLASQTIGTWLAWYQQKPGQAPRLLIYAATSLADGIPDRFSGSGSGTDFTLTISRLEPEDFAVYYCQQLYSTPYTFGQGTKVEIK

SEQ ID NO: 5225 - protein, 107 aa, Artificial Sequence
  source: /note="Description of Artificial Sequence: Synthetic polypeptide"
  MOD_RES (31)..(31): Any amino acid
EIVLTQSPGTLSLSPGERATLSCRASQDISXYLNWYQQKPGQAPRLLIYLSSRLHSGIPDRFSGSGSGTDFTLTISRLEPEDFAVYYCQQGHTGAWTFGQGTKVEIK

SEQ ID NO: 5226 - protein, 107 aa, Artificial Sequence
  source: /note="Description of Artificial Sequence: Synthetic polypeptide"
EIVLTQSPGTLSLSPGERATLSCRASQSIREYLHWYQQKPGQAPRLLIYFASQSICGIPDRFSGSGSGTDFTLTISRLEPEDFAVYYCQKAHNFPYTFGQGTKVEIK

SEQ ID NO: 5227 - protein, 107 aa, Artificial Sequence
  source: /note="Description of Artificial Sequence: Synthetic polypeptide"
EIVLTQSPGTLSLSPGERATLSCRASQSISDYLHWYQQKPGQAPRLLIYYASQSISGIPDRFSGSGSGTDFTLTISRLEPEDFAVYYCQKGLNFPLTFGQGTKVEIK

SEQ ID NO: 5228 - protein, 107 aa, Artificial Sequence
  source: /note="Description of Artificial Sequence: Synthetic polypeptide"
EIVLTQSPGTLSLSPGERATLSCRASQSISEYLHWYQQKPGQAPRLLIYFASQSICGIPDRFSGSGSGTDFTLTISRLEPEDFAVYYCQNGHNFPYTFGQGTKVEIK

SEQ ID NO: 5229 - protein, 112 aa, Artificial Sequence
  source: /note="Description of Artificial Sequence: Synthetic polypeptide"
  MOD_RES (61)..(61): Any amino acid
EIVLTQSPGTLSLSPGERATLSCRSSQSLVHSTGNIYLHWYQQKPGQAPRLLIYKVSNRFXGIPDRFSGSGSGTDFTLTISRLEPEDFAVYYCSQNTHVPYTFGQGTKVEIK

SEQ ID NO: 5230 - protein, 112 aa, Artificial Sequence
  source: /note="Description of Artificial Sequence: Synthetic polypeptide"
EIVLTQSPGTLSLSPGERATLSCRSSQSLVHSTGNTYLHWYQQKPGQAPRLLIYKVSNRFCGIPDRFSGSGSGTDFTLTISRLEPEDFAVYYCSQNTHVPYTFGQGTKVEIK

SEQ ID NO: 5231 - protein, 112 aa, Artificial Sequence
  source: /note="Description of Artificial Sequence: Synthetic polypeptide"
EIVLTQSPGTLSLSPGERATLSCRSSQSLVHSTGNTYLHWYQQKPGQAPRLLIYKVSNRFSGIPDRFSGSGSGTDFTLTISRLEPEDFAVYYCSQNTHVPYTFGQGTKVEIK

SEQ ID NO: 5232 - protein, 106 aa, Artificial Sequence
  source: /note="Description of Artificial Sequence: Synthetic polypeptide"
EIVLTQSPGTLSLSPGERATLSCSANSSFIYMYWYQQKPGQAPRLLIYDTSNLASGIPDRFSGSGSGTDFTLTISRLEPEDFAVYYCQQWSSSPLTFGQGTKVEIK

SEQ ID NO: 5233 - protein, 106 aa, Artificial Sequence
  source: /note="Description of Artificial Sequence: Synthetic polypeptide"
EIVLTQSPGTLSLSPGERATLSCSANSSFTYMYWYQQKPGQAPRLLIYDTSNLASGIPDRFSGSGSGTDFTLTISRLEPEDFAVYYCQQWSSSPLTFGQGTKVEIK

SEQ ID NO: 5234 - protein, 107 aa, Artificial Sequence
  source: /note="Description of Artificial Sequence: Synthetic polypeptide"
EIVMTQSPATLSVSPGERATLSCKASDHINNWLAWYQQKPGQAPRLLIYGATSLETGIPARFSGSGSGTEFTLTISSLQSEDFAVYYCHQYWNTPYTFGQGTKVEIK

SEQ ID NO: 5235 - protein, 107 aa, Artificial Sequence
  source: /note="Description of Artificial Sequence: Synthetic polypeptide"
EIVMTQSPATLSVSPGERATLSCKASQKVGTNVAWYQQKPGQAPRLLIYSASTRHRGIPARFSGSGSGTEFTLTISSLQSEDFAVYYCHQGNSVQYTFGQGTKVEIK

SEQ ID NO: 5236 - protein, 107 aa, Artificial Sequence
  source: /note="Description of Artificial Sequence: Synthetic polypeptide"
EIVMTQSPATLSVSPGERATLSCLASQTIGTWLAWYQQKPGQAPRLLIYAATSLADGIPARFSGSGSGTEFTLTISSLQSEDFAVYYCQQLYSTPYTFGQGTKVEIK

SEQ ID NO: 5237 - protein, 107 aa, Artificial Sequence
  source: /note="Description of Artificial Sequence: Synthetic polypeptide"
  MOD_RES (31)..(31): Any amino acid
EIVMTQSPATLSVSPGERATLSCRASQDISXYLNWYQQKPGQAPRLLIYLSSRLHSGIPARFSGSGSGTEFTLTISSLQSEDFAVYYCQQGHTGAWTFGQGTKVEIK

SEQ ID NO: 5238 - protein, 107 aa, Artificial Sequence
  source: /note="Description of Artificial Sequence: Synthetic polypeptide"
EIVMTQSPATLSVSPGERATLSCRASQSIREYLHWYQQKPGQAPRLLIYFASQSICGIPARFSGSGSGTEFTLTISSLQSEDFAVYYCQKAHNFPYTFGQGTKVEIK

SEQ ID NO: 5239 - protein, 107 aa, Artificial Sequence
  source: /note="Description of Artificial Sequence: Synthetic polypeptide"
EIVMTQSPATLSVSPGERATLSCRASQSISDYLHWYQQKPGQAPRLLIYYASQSISGIPARFSGSGSGTEFTLTISSLQSEDFAVYYCQKGLNFPLTFGQGTKVEIK

SEQ ID NO: 5240 - protein, 107 aa, Artificial Sequence
  source: /note="Description of Artificial Sequence: Synthetic polypeptide"
EIVMTQSPATLSVSPGERATLSCRASQSISEYLHWYQQKPGQAPRLLIYFASQSICGIPARFSGSGSGTEFTLTISSLQSEDFAVYYCQNGHNFPYTFGQGTKVEIK

SEQ ID NO: 5241 - protein, 112 aa, Artificial Sequence
  source: /note="Description of Artificial Sequence: Synthetic polypeptide"
  MOD_RES (61)..(61): Any amino acid
EIVMTQSPATLSVSPGERATLSCRSSQSLVHSTGNIYLHWYQQKPGQAPRLLIYKVSNRFXGIPARFSGSGSGTEFTLTISSLQSEDFAVYYCSQNTHVPYTFGQGTKVEIK

SEQ ID NO: 5242 - protein, 112 aa, Artificial Sequence
  source: /note="Description of Artificial Sequence: Synthetic polypeptide"
EIVMTQSPATLSVSPGERATLSCRSSQSLVHSTGNTYLHWYQQKPGQAPRLLIYKVSNRFCGIPARFSGSGSGTEFTLTISSLQSEDFAVYYCSQNTHVPYTFGQGTKVEIK

SEQ ID NO: 5243 - protein, 112 aa, Artificial Sequence
  source: /note="Description of Artificial Sequence: Synthetic polypeptide"
EIVMTQSPATLSVSPGERATLSCRSSQSLVHSTGNTYLHWYQQKPGQAPRLLIYKVSNRFSGIPARFSGSGSGTEFTLTISSLQSEDFAVYYCSQNTHVPYTFGQGTKVEIK

SEQ ID NO: 5244 - protein, 106 aa, Artificial Sequence
  source: /note="Description of Artificial Sequence: Synthetic polypeptide"
EIVMTQSPATLSVSPGERATLSCSANSSFIYMYWYQQKPGQAPRLLIYDTSNLASGIPARFSGSGSGTEFTLTISSLQSEDFAVYYCQQWSSSPLTFGQGTKVEIK

SEQ ID NO: 5245 - protein, 106 aa, Artificial Sequence
  source: /note="Description of Artificial Sequence: Synthetic polypeptide"
EIVMTQSPATLSVSPGERATLSCSANSSFTYMYWYQQKPGQAPRLLIYDTSNLASGIPARFSGSGSGTEFTLTISSLQSEDFAVYYCQQWSSSPLTFGQGTKVEIK

SEQ ID NO: 5246 - protein, 108 aa, Artificial Sequence
  source: /note="Description of Artificial Sequence: Synthetic polypeptide"
  MOD_RES (2)..(2): Any amino acid
GXQNVLTQSPAILSASPGEKVTMTCSANSSFTYMYWYQQKPGSSPRLLIFDTSNLASGVPIRFSGSGSGTSYSLTISRMEAEDTATYYCQQWSSSPLTFGAGTKLELK

SEQ ID NO: 5247 - protein, 106 aa, Artificial Sequence
  source: /note="Description of Artificial Sequence: Synthetic polypeptide"
  MOD_RES (2)..(2): Any amino acid
  MOD_RES (77)..(77): Any amino acid
  MOD_RES (86)..(86): Any amino acid
NXMTQFQKFMSTSVGDRVSLTCKASQKVGTNVAGFQQKPGHSPKAGIYSASTRHRGVQDRFTARGLGSDFILPITTXQLEDLAEYXCHQGNSVQYTFGGGTKLEIK

SEQ ID NO: 5248 - protein, 106 aa, Artificial Sequence
  source: /note="Description of Artificial Sequence: Synthetic polypeptide"
QIVLTQSPAILSASPGEKVTMTCSANSSFTYMYWYQQKPGSSPRLLIFDTSNLASGVPIRFSGSGSGTSYSLTISRMEAEDTATYYCQQWSSSPLTFGAGTKLELK

SEQ ID NO: 5249 - protein, 104 aa, Artificial Sequence
  source: /note="Description of Artificial Sequence: Synthetic polypeptide"
VLTQSPAIMSASPGEKVTMTCSANSSFIYMYWYQQKPGSSPRLLIFDTSNLASGVPIRFSGSGSGTSYSLTISRMEAEDTATYYCQQWSSSPLTFGGGTKLELK

SEQ ID NO: 5250 - protein, 105 aa, Artificial Sequence
  source: /note="Description of Artificial Sequence: Synthetic polypeptide"
  MOD_RES (1)..(1): Any amino acid
  MOD_RES (29)..(29): Any amino acid
  MOD_RES (56)..(56): Any amino acid
  MOD_RES (63)..(63): Any amino acid
XMTQFTSSMSGSEGDRVTISHRASQDISXYLNWYEQKADGTANLIIYLSSRLHSGXPSRLSGXGWVTDYFLPIHTSEQEDRGSYFCQQGHTGAWTFGGGTKLEIK

SEQ ID NO: 5251 - protein, 12 aa, Artificial Sequence
  source: /note="Description of Artificial Sequence: Synthetic peptide"
YTFGQGTKLEIK

SEQ ID NO: 5252 - protein, 107 aa, Artificial Sequence
  source: /note="Description of Artificial Sequence: Synthetic polypeptide"
DIQKPQSPFYMCVSGGETISISSHTTRGIYWYKGGSAEKPEKPFKLEIYCARNGEGGAPSRFSGRGSGTDFSLTINRGESEDCAEYYCAQFYQFPWTFGGGTKLEIK

SEQ ID NO: 5253 - protein, 107 aa, Artificial Sequence
  source: /note="Description of Artificial Sequence: Synthetic polypeptide"
DIQLTQSPSFLSASVGDRVTITCHTTRGIYWYKGWYQQKPGKAPKLLIYCARNGEGGVPSRFSGSGSGTEFTLTISSLQPEDFATYYCAQFYQFPWTFGQGTKVEIK

SEQ ID NO: 5254 - protein, 112 aa, Artificial Sequence
  source: /note="Description of Artificial Sequence: Synthetic polypeptide"
DIQLTQSPSFLSASVGDRVTITCKSSQSLLDSDGKTYLNWYQQKPGKAPKLLIYLVCKLDSGVPSRFSGSGSGTEFTLTISSLQPEDFATYYCWQGTHFPQTFGQGTKVEIK

SEQ ID NO: 5255 - protein, 112 aa, Artificial Sequence
  source: /note="Description of Artificial Sequence: Synthetic polypeptide"
DIQLTQSPSFLSASVGDRVTITCKSSQSLLYTNGKTYLNWYQQKPGKAPKLLIYLVSKLESGVPSRFSGSGSGTEFTLTISSLQPEDFATYYCLQAPHFPLTFGQGTKVEIK

SEQ ID NO: 5256 - protein, 112 aa, Artificial Sequence
  source: /note="Description of Artificial Sequence: Synthetic polypeptide"
DIQLTQSPSFLSASVGDRVTITCKSSQSLLYTNGKTYLNWYQQKPGKAPKLLIYLVSKLESGVPSRFSGSGSGTEFTLTISSLQPEDFATYYCLQATHFPLTFGQGTKVEIK

SEQ ID NO: 5257 - protein, 107 aa, Artificial Sequence
  source: /note="Description of Artificial Sequence: Synthetic polypeptide"
DIQLTQSPSFLSASVGDRVTITCRASQEISGYLGWYQQKPGKAPKLLIYSTSTLDSGVPSRFSGSGSGTEFTLTISSLQPEDFATYYCLQYASYPPTFGQGTKVEIK

SEQ ID NO: 5258 - protein, 107 aa, Artificial Sequence
  source: /note="Description of Artificial Sequence: Synthetic polypeptide"
DIQMTQSPSSLSASLGERVSLTCRASQEISGYLGWLQQKPDGTIKRLIFSTSTLDSGVPKRFSGSRSGSDYSLTISSLESEDFADYYCLQYASYPPTFGGGTKLEIK

SEQ ID NO: 5259 - protein, 107 aa, Artificial Sequence
  source: /note="Description of Artificial Sequence: Synthetic polypeptide"
DIQMTQSPSSLSASVGDRVTITCHTTRGIYWYKGWYQQKPGKAPKLLIYCARNGEGGVPSRFSGSGSGTDFTFTISSLQPEDIATYYCAQFYQFPWTFGQGTKVEIK

SEQ ID NO: 5260 - protein, 107 aa, Artificial Sequence
  source: /note="Description of Artificial Sequence: Synthetic polypeptide"
DIQMTQSPSSLSASVGDRVTITCHTTRGIYWYKGWYQQKPGKAPKLLIYCARNGEGGVPSRFSGSGSGTDFTLTISSLQPEDFATYYCAQFYQFPWTFGQGTKVEIK

SEQ ID NO: 5261 - protein, 112 aa, Artificial Sequence
  source: /note="Description of Artificial Sequence: Synthetic polypeptide"
DIQMTQSPSSLSASVGDRVTITCKSSQSLLDSDGKTYLNWYQQKPGKAPKLLIYLVCKLDSGVPSRFSGSGSGTDFTFTISSLQPEDIATYYCWQGTHFPQTFGQGTKVEIK

SEQ ID NO: 5262 - protein, 112 aa, Artificial Sequence
  source: /note="Description of Artificial Sequence: Synthetic polypeptide"
DIQMTQSPSSLSASVGDRVTITCKSSQSLLDSDGKTYLNWYQQKPGKAPKLLIYLVCKLDSGVPSRFSGSGSGTDFTLTISSLQPEDFATYYCWQGTHFPQTFGQGTKVEIK

SEQ ID NO: 5263 - protein, 112 aa, Artificial Sequence
  source: /note="Description of Artificial Sequence: Synthetic polypeptide"
DIQMTQSPSSLSASVGDRVTITCKSSQSLLYTNGKTYLNWYQQKPGKAPKLLIYLVSKLESGVPSRFSGSGSGTDFTFTISSLQPEDIATYYCLQAPHFPLTFGQGTKVEIK

SEQ ID NO: 5264 - protein, 112 aa, Artificial Sequence
  source: /note="Description of Artificial Sequence: Synthetic polypeptide"
DIQMTQSPSSLSASVGDRVTITCKSSQSLLYTNGKTYLNWYQQKPGKAPKLLIYLVSKLESGVPSRFSGSGSGTDFTFTISSLQPEDIATYYCLQATHFPLTFGQGTKVEIK

SEQ ID NO: 5265 - protein, 112 aa, Artificial Sequence
  source: /note="Description of Artificial Sequence: Synthetic polypeptide"
DIQMTQSPSSLSASVGDRVTITCKSSQSLLYTNGKTYLNWYQQKPGKAPKLLIYLVSKLESGVPSRFSGSGSGTDFTLTISSLQPEDFATYYCLQAPHFPLTFGQGTKVEIK

SEQ ID NO: 5266 - protein, 112 aa, Artificial Sequence
  source: /note="Description of Artificial Sequence: Synthetic polypeptide"
DIQMTQSPSSLSASVGDRVTITCKSSQSLLYTNGKTYLNWYQQKPGKAPKLLIYLVSKLESGVPSRFSGSGSGTDFTLTISSLQPEDFATYYCLQATHFPLTFGQGTKVEIK

SEQ ID NO: 5267 - protein, 107 aa, Artificial Sequence
  source: /note="Description of Artificial Sequence: Synthetic polypeptide"
DIQMTQSPSSLSASVGDRVTITCRASQEISGYLGWYQQKPGKAPKLLIYSTSTLDSGVPSRFSGSGSGTDFTFTISSLQPEDIATYYCLQYASYPPTFGQGTKVEIK

SEQ ID NO: 5268 - protein, 107 aa, Artificial Sequence
  source: /note="Description of Artificial Sequence: Synthetic polypeptide"
DIQMTQSPSSLSASVGDRVTITCRASQEISGYLGWYQQKPGKAPKLLIYSTSTLDSGVPSRFSGSGSGTDFTLTISSLQPEDFATYYCLQYASYPPTFGQGTKVEIK

SEQ ID NO: 5269 - protein, 107 aa, Artificial Sequence
  source: /note="Description of Artificial Sequence: Synthetic polypeptide"
DIQMTQSPSTLSASVGDRVTITCHTTRGIYWYKGWYQQKPGKAPKLLIYCARNGEGGVPSRFSGSGSGTEFTLTISSLQPDDFATYYCAQFYQFPWTFGQGTKVEIK

SEQ ID NO: 5270 - protein, 112 aa, Artificial Sequence
  source: /note="Description of Artificial Sequence: Synthetic polypeptide"
DIQMTQSPSTLSASVGDRVTITCKSSQSLLDSDGKTYLNWYQQKPGKAPKLLIYLVCKLDSGVPSRFSGSGSGTEFTLTISSLQPDDFATYYCWQGTHFPQTFGQGTKVEIK

SEQ ID NO: 5271 - protein, 112 aa, Artificial Sequence
  source: /note="Description of Artificial Sequence: Synthetic polypeptide"
DIQMTQSPSTLSASVGDRVTITCKSSQSLLYTNGKTYLNWYQQKPGKAPKLLIYLVSKLESGVPSRFSGSGSGTEFTLTISSLQPDDFATYYCLQAPHFPLTFGQGTKVEIK

SEQ ID NO: 5272 - protein, 112 aa, Artificial Sequence
  source: /note="Description of Artificial Sequence: Synthetic polypeptide"
DIQMTQSPSTLSASVGDRVTITCKSSQSLLYTNGKTYLNWYQQKPGKAPKLLIYLVSKLESGVPSRFSGSGSGTEFTLTISSLQPDDFATYYCLQATHFPLTFGQGTKVEIK

SEQ ID NO: 5273 - protein, 107 aa, Artificial Sequence
  source: /note="Description of Artificial Sequence: Synthetic polypeptide"
DIQMTQSPSTLSASVGDRVTITCRASQEISGYLGWYQQKPGKAPKLLIYSTSTLDSGVPSRFSGSGSGTEFTLTISSLQPDDFATYYCLQYASYPPTFGQGTKVEIK

SEQ ID NO: 5274 - protein, 107 aa, Artificial Sequence
  source: /note="Description of Artificial Sequence: Synthetic polypeptide"
DIVMTQSPDSLAVSLGERATINCHTTRGIYWYKGWYQQKPGQPPKLLIYCARNGEGGVPDRFSGSGSGTDFTLTISSLQAEDVAVYYCAQFYQFPWTFGQGTKVEIK

SEQ ID NO: 5275 - protein, 112 aa, Artificial Sequence
  source: /note="Description of Artificial Sequence: Synthetic polypeptide"
DIVMTQSPDSLAVSLGERATINCKSSQSLLDSDGKTYLNWYQQKPGQPPKLLIYLVCKLDSGVPDRFSGSGSGTDFTLTISSLQAEDVAVYYCWQGTHFPQTFGQGTKVEIK

SEQ ID NO: 5276 - protein, 112 aa, Artificial Sequence
  source: /note="Description of Artificial Sequence: Synthetic polypeptide"
DIVMTQSPDSLAVSLGERATINCKSSQSLLYTNGKTYLNWYQQKPGQPPKLLIYLVSKLESGVPDRFSGSGSGTDFTLTISSLQAEDVAVYYCLQAPHFPLTFGQGTKVEIK

SEQ ID NO: 5277 - protein, 112 aa, Artificial Sequence
  source: /note="Description of Artificial Sequence: Synthetic polypeptide"
DIVMTQSPDSLAVSLGERATINCKSSQSLLYTNGKTYLNWYQQKPGQPPKLLIYLVSKLESGVPDRFSGSGSGTDFTLTISSLQAEDVAVYYCLQATHFPLTFGQGTKVEIK

SEQ ID NO: 5278 - protein, 107 aa, Artificial Sequence
  source: /note="Description of Artificial Sequence: Synthetic polypeptide"
DIVMTQSPDSLAVSLGERATINCRASQEISGYLGWYQQKPGQPPKLLIYSTSTLDSGVPDRFSGSGSGTDFTLTISSLQAEDVAVYYCLQYASYPPTFGQGTKVEIK

SEQ ID NO: 5279 - protein, 107 aa, Artificial Sequence
  source: /note="Description of Artificial Sequence: Synthetic polypeptide"
DIVMTQSPLSLPVTPGEPASISCHTTRGIYWYKGWYLQKPGQSPQLLIYCARNGEGGVPDRFSGSGSGTDFTLKISRVEAEDVGVYYCAQFYQFPWTFGQGTKVEIK

SEQ ID NO: 5280 - protein, 112 aa, Artificial Sequence
  source: /note="Description of Artificial Sequence: Synthetic polypeptide"
DIVMTQSPLSLPVTPGEPASISCKSSQSLLDSDGKTYLNWYLQKPGQSPQLLIYLVCKLDSGVPDRFSGSGSGTDFTLKISRVEAEDVGVYYCWQGTHFPQTFGQGTKVEIK

SEQ ID NO: 5281 - protein, 112 aa, Artificial Sequence
  source: /note="Description of Artificial Sequence: Synthetic polypeptide"
DIVMTQSPLSLPVTPGEPASISCKSSQSLLYTNGKTYLNWYLQKPGQSPQLLIYLVSKLESGVPDRFSGSGSGTDFTLKISRVEAEDVGVYYCLQAPHFPLTFGQGTKVEIK

SEQ ID NO: 5282 - protein, 112 aa, Artificial Sequence
  source: /note="Description of Artificial Sequence: Synthetic polypeptide"
DIVMTQSPLSLPVTPGEPASISCKSSQSLLYTNGKTYLNWYLQKPGQSPQLLIYLVSKLESGVPDRFSGSGSGTDFTLKISRVEAEDVGVYYCLQATHFPLTFGQGTKVEIK

SEQ ID NO: 5283 - protein, 107 aa, Artificial Sequence
  source: /note="Description of Artificial Sequence: Synthetic polypeptide"
DIVMTQSPLSLPVTPGEPASISCRASQEISGYLGWYLQKPGQSPQLLIYSTSTLDSGVPDRFSGSGSGTDFTLKISRVEAEDVGVYYCLQYASYPPTFGQGTKVEIK

SEQ ID NO: 5284 - protein, 107 aa, Artificial Sequence
  source: /note="Description of Artificial Sequence: Synthetic polypeptide"
DVVMTQSPLSLPVTLGQPASISCHTTRGIYWYKGWFQQRPGQSPRRLIYCARNGEGGVPDRFSGSGSGTDFTLKISRVEAEDVGVYYCAQFYQFPWTFGQGTKVEIK

SEQ ID NO: 5285 - protein, 112 aa, Artificial Sequence
  source: /note="Description of Artificial Sequence: Synthetic polypeptide"
DVVMTQSPLSLPVTLGQPASISCKSSQSLLDSDGKTYLNWFQQRPGQSPRRLIYLVCKLDSGVPDRFSGSGSGTDFTLKISRVEAEDVGVYYCWQGTHFPQTFGQGTKVEIK

SEQ ID NO: 5286 - protein, 112 aa, Artificial Sequence
  source: /note="Description of Artificial Sequence: Synthetic polypeptide"
DVVMTQSPLSLPVTLGQPASISCKSSQSLLYTNGKTYLNWFQQRPGQSPRRLIYLVSKLESGVPDRFSGSGSGTDFTLKISRVEAEDVGVYYCLQAPHFPLTFGQGTKVEIK

SEQ ID NO: 5287 - protein, 112 aa, Artificial Sequence
  source: /note="Description of Artificial Sequence: Synthetic polypeptide"
DVVMTQSPLSLPVTLGQPASISCKSSQSLLYTNGKTYLNWFQQRPGQSPRRLIYLVSKLESGVPDRFSGSGSGTDFTLKISRVEAEDVGVYYCLQATHFPLTFGQGTKVEIK

SEQ ID NO: 5288 - protein, 107 aa, Artificial Sequence
  source: /note="Description of Artificial Sequence: Synthetic polypeptide"
DVVMTQSPLSLPVTLGQPASISCRASQEISGYLGWFQQRPGQSPRRLIYSTSTLDSGVPDRFSGSGSGTDFTLKISRVEAEDVGVYYCLQYASYPPTFGQGTKVEIK

SEQ ID NO: 5289 - protein, 112 aa, Artificial Sequence
  source: /note="Description of Artificial Sequence: Synthetic polypeptide"
DVVMTQTPLTLSVTIGQPASISCKSSQSLLDSDGKTYLNWLLQRPGQSPKRLIYLVCKLDSGVPDRFTGSGSGTDFTLKISRVEAEDLGVYYCWQGTHFPQTFGGGTKLEIK

SEQ ID NO: 5290 - protein, 107 aa, Artificial Sequence
  source: /note="Description of Artificial Sequence: Synthetic polypeptide"
EIVLTQSPATLSLSPGERATLSCHTTRGIYWYKGWYQQKPGQAPRLLIYCARNGEGGIPARFSGSGSGTDFTLTISSLEPEDFAVYYCAQFYQFPWTFGQGTKVEIK

SEQ ID NO: 5291 - protein, 112 aa, Artificial Sequence
  source: /note="Description of Artificial Sequence: Synthetic polypeptide"
EIVLTQSPATLSLSPGERATLSCKSSQSLLDSDGKTYLNWYQQKPGQAPRLLIYLVCKLDSGIPARFSGSGSGTDFTLTISSLEPEDFAVYYCWQGTHFPQTFGQGTKVEIK

SEQ ID NO: 5292 - protein, 112 aa, Artificial Sequence
  source: /note="Description of Artificial Sequence: Synthetic polypeptide"
EIVLTQSPATLSLSPGERATLSCKSSQSLLYTNGKTYLNWYQQKPGQAPRLLIYLVSKLESGIPARFSGSGSGTDFTLTISSLEPEDFAVYYCLQAPHFPLTFGQGTKVEIK

SEQ ID NO: 5293 - protein, 112 aa, Artificial Sequence
  source: /note="Description of Artificial Sequence: Synthetic polypeptide"
EIVLTQSPATLSLSPGERATLSCKSSQSLLYTNGKTYLNWYQQKPGQAPRLLIYLVSKLESGIPARFSGSGSGTDFTLTISSLEPEDFAVYYCLQATHFPLTFGQGTKVEIK

SEQ ID NO: 5294 - protein, 107 aa, Artificial Sequence
  source: /note="Description of Artificial Sequence: Synthetic polypeptide"
EIVLTQSPATLSLSPGERATLSCRASQEISGYLGWYQQKPGQAPRLLIYSTSTLDSGIPARFSGSGSGTDFTLTISSLEPEDFAVYYCLQYASYPPTFGQGTKVEIK

SEQ ID NO: 5295 - protein, 107 aa, Artificial Sequence
  source: /note="Description of Artificial Sequence: Synthetic polypeptide"
EIVLTQSPGTLSLSPGERATLSCHTTRGIYWYKGWYQQKPGQAPRLLIYCARNGEGGIPDRFSGSGSGTDFTLTISRLEPEDFAVYYCAQFYQFPWTFGQGTKVEIK

SEQ ID NO: 5296 - protein, 112 aa, Artificial Sequence
  source: /note="Description of Artificial Sequence: Synthetic polypeptide"
EIVLTQSPGTLSLSPGERATLSCKSSQSLLDSDGKTYLNWYQQKPGQAPRLLIYLVCKLDSGIPDRFSGSGSGTDFTLTISRLEPEDFAVYYCWQGTHFPQTFGQGTKVEIK

SEQ ID NO: 5297 - protein, 112 aa, Artificial Sequence
  source: /note="Description of Artificial Sequence: Synthetic polypeptide"
EIVLTQSPGTLSLSPGERATLSCKSSQSLLYTNGKTYLNWYQQKPGQAPRLLIYLVSKLESGIPDRFSGSGSGTDFTLTISRLEPEDFAVYYCLQAPHFPLTFGQGTKVEIK

SEQ ID NO: 5298 - protein, 112 aa, Artificial Sequence
  source: /note="Description of Artificial Sequence: Synthetic polypeptide"
EIVLTQSPGTLSLSPGERATLSCKSSQSLLYTNGKTYLNWYQQKPGQAPRLLIYLVSKLESGIPDRFSGSGSGTDFTLTISRLEPEDFAVYYCLQATHFPLTFGQGTKVEIK

SEQ ID NO: 5299 - protein, 107 aa, Artificial Sequence
  source: /note="Description of Artificial Sequence: Synthetic polypeptide"
EIVLTQSPGTLSLSPGERATLSCRASQEISGYLGWYQQKPGQAPRLLIYSTSTLDSGIPDRFSGSGSGTDFTLTISRLEPEDFAVYYCLQYASYPPTFGQGTKVEIK

SEQ ID NO: 5300 - protein, 107 aa, Artificial Sequence
  source: /note="Description of Artificial Sequence: Synthetic polypeptide"
EIVMTQSPATLSVSPGERATLSCHTTRGIYWYKGWYQQKPGQAPRLLIYCARNGEGGIPARFSGSGSGTEFTLTISSLQSEDFAVYYCAQFYQFPWTFGQGTKVEIK

SEQ ID NO: 5301 - protein, 112 aa, Artificial Sequence
  source: /note="Description of Artificial Sequence: Synthetic polypeptide"
EIVMTQSPATLSVSPGERATLSCKSSQSLLDSDGKTYLNWYQQKPGQAPRLLIYLVCKLDSGIPARFSGSGSGTEFTLTISSLQSEDFAVYYCWQGTHFPQTFGQGTKVEIK

SEQ ID NO: 5302 - protein, 112 aa, Artificial Sequence
  source: /note="Description of Artificial Sequence: Synthetic polypeptide"
EIVMTQSPATLSVSPGERATLSCKSSQSLLYTNGKTYLNWYQQKPGQAPRLLIYLVSKLESGIPARFSGSGSGTEFTLTISSLQSEDFAVYYCLQAPHFPLTFGQGTKVEIK

SEQ ID NO: 5303 - protein, 112 aa, Artificial Sequence
  source: /note="Description of Artificial Sequence: Synthetic polypeptide"
EIVMTQSPATLSVSPGERATLSCKSSQSLLYTNGKTYLNWYQQKPGQAPRLLIYLVSKLESGIPARFSGSGSGTEFTLTISSLQSEDFAVYYCLQATHFPLTFGQGTKVEIK

SEQ ID NO: 5304 - protein, 107 aa, Artificial Sequence
  source: /note="Description of Artificial Sequence: Synthetic polypeptide"
EIVMTQSPATLSVSPGERATLSCRASQEISGYLGWYQQKPGQAPRLLIYSTSTLDSGIPARFSGSGSGTEFTLTISSLQSEDFAVYYCLQYASYPPTFGQGTKVEIK

SEQ ID NO: 5305 - protein, 112 aa, Artificial Sequence
  source: /note="Description of Artificial Sequence: Synthetic polypeptide"
NVVMTQTPLTLSVTLGQPASISCKSSQSLLYTNGKTYLNWLLQRPGQSPKLLIYLVSKLESGVPDRFSGSGSGTDFTLKINRVEAEDLGVYYCLQATHFPLTFGAGTKLELK

SEQ ID NO: 5306 - protein, 112 aa, Artificial Sequence
  source: /note="Description of Artificial Sequence: Synthetic polypeptide"
  MOD_RES (3)..(3): Any amino acid
NVXMTQTPLTLSVTLGQPASISCKSSQSLLYTNGKTYLNWLLQRPGQSPKLLIYLVSKLESGVPDRFSGSGSGTDFTLKINRVEAEDLGVYFCLQAPHFPLTFGGGTKLEMK

SEQ ID NO: 5307 - protein, 107 aa, Artificial Sequence
  source: /note="Description of Artificial Sequence: Synthetic polypeptide"
DILLTQSPAILSVSPGERVSFSCRASQTIGTSIHWYQQRTNGSPRLLIKYASESISGIPSRFSGSGSGTDFTLSINSVESEDIADYYCQQTNSWPLTFGAGTKLELK

SEQ ID NO: 5308 - protein, 114 aa, Artificial Sequence
  source: /note="Description of Artificial Sequence: Synthetic polypeptide"
  MOD_RES (112)..(114): Any amino acid
DIVLTQSPASLAVSLGQRATISCRASKSVSSSGYSYMHWYQQKPGQPPKLLIYLASNLESGVPARFSGSGSGTDFTLNIHPVEEEDAATYYCQHNRELPCTFGGGTKLEIKXXX

SEQ ID NO: 5309 - protein, 114 aa, Artificial Sequence
  source: /note="Description of Artificial Sequence: Synthetic polypeptide"
  MOD_RES (112)..(114): Any amino acid
DIVLTQSPASLAVSLGQRATISCRASQSVSTSSYSYMHWYQQKPGQPPKLLIKYASNLESGVPARFSGSGSGTDFTLNIHPVEEEDTATYYCQHNWEIPWTFGGGTKLEIKXXX

SEQ ID NO: 5310 - protein, 110 aa, Artificial Sequence
  source: /note="Description of Artificial Sequence: Synthetic polypeptide"
  MOD_RES (108)..(110): Any amino acid
DIVMTQSPATLSVTPGDRVSLSCRASQSISDSLHWYHQKSHESPRLLIKYASQSISGIPSRFSAGGSGSDFTLTINSVEPEDVGVYYCQNGHSLPWTFGGGTKLEIKXXX

SEQ ID NO: 5311 - protein, 110 aa, Artificial Sequence
  source: /note="Description of Artificial Sequence: Synthetic polypeptide"
  MOD_RES (108)..(110): Any amino acid
DIVMTQSQKFMSTSVGDRVSITCKASQNVPTAVAWYQQKPGQSPKALIYLASNRHTGVPDRFTGSGSGTDFTLTITNVQSEDLADYFCLQHWNYPRTFGGGTKLEIKXXX

SEQ ID NO: 5312 - protein, 115 aa, Artificial Sequence
  source: /note="Description of Artificial Sequence: Synthetic polypeptide"
  MOD_RES (113)..(115): Any amino acid
NIMMTQSPSFLAVSAGEKVTMSCKSSQSIFSGSNQKNYLAWYQQKPGQSPKLLIYWASTRESGVPDRFTGSGSGTDFTLTISSVQAEDLAVYYCHQHLSSCTFGGGTKLEIKXXX

SEQ ID NO: 5313 - protein, 108 aa, Artificial Sequence
  source: /note="Description of Artificial Sequence: Synthetic polypeptide"
  MOD_RES (107)..(108): Any amino acid
QIVLSQSPAILSASPGEKVTMTCRASSSVSYMHWYQQKPGSSPKPWIYVTSNLASGVPTRFSGSGSGTSYSLTISRVEAEDAATYYCQQWSSNPRTFGGGTKLEIKXX

SEQ ID NO: 5314 - protein, 107 aa, Artificial Sequence
  source: /note="Description of Artificial Sequence: Synthetic polypeptide"
DIQMTQSPSSLSASVGDRVTITCRASQSISSYLNWYQQKPGKAPKLLIYAASSLQSGVPSRFSGSGSGTDFTLTISSLQPEDFATYYCQQKASLPFTFGGGTKVEIK

SEQ ID NO: 5315 - protein, 107 aa, Artificial Sequence
  source: /note="Description of Artificial Sequence: Synthetic polypeptide"
DIQMTQSPSSLSASVGDRVTITCRASQSISSYLNWYQQKPGKAPKLLIYAASSLQSGVPSRFSGSGSGTDFTLTISSLQPEDFATYYCQQSDVSPITFGGGTKVEIK

SEQ ID NO: 5316 - protein, 107 aa, Artificial Sequence
  source: /note="Description of Artificial Sequence: Synthetic polypeptide"
DIQMTQSPSSLSASVGDRVTITCRASQSISSYLNWYQQKPGKAPKLLIYGASSLQSGVPSRFSGSGSGTDFTLTISSLQPEDFATYYCQQHYVGPFTFGGGTKVEIK

SEQ ID NO: 5317 - protein, 107 aa, Artificial Sequence
  source: /note="Description of Artificial Sequence: Synthetic polypeptide"
DIQMTQSPSSLSASVGDRVTITCRASQSISSYLNWYQQKPGKAPKLLIYSASSLQSGVPSRFSGSGSGTDFTLTISSLQPEDFATYYCQQTDGKPPTFGGGTKVEIK

SEQ ID NO: 5318 - protein, 106 aa, Artificial Sequence
  source: /note="Description of Artificial Sequence: Synthetic polypeptide"
DIQMTQSPSTLSASVGDRVTITCRASQSISSWLAWYQQKPGKAPKLLIYKASSLESGVPSRFSGSGSGTEFTLTISSLQPDDFATYYCQQADGHITFGGGTKVEIK

SEQ ID NO: 5319 - protein, 112 aa, Artificial Sequence
  source: /note="Description of Artificial Sequence: Synthetic polypeptide"
DIVMTQSPLSLPVTPGEPASISCRSSQSLLHSNGYNYLDWYLQKPGQSPQLLIYLGSNRASGVPDRFSGSGSGTDFTLKISRVEAEDVGVYYCMQALGPPITFGGGTKVEIK

SEQ ID NO: 5320 - protein, 112 aa, Artificial Sequence
  source: /note="Description of Artificial Sequence: Synthetic polypeptide"
DIVMTQSPLSLPVTPGEPASISCRSSQSLLHSNGYNYLDWYLQKPGQSPQLLIYLGSNRASGVPDRFSGSGSGTDFTLKISRVEAEDVGVYYCMQQQETPLTFGGGTKVEIK

SEQ ID NO: 5321 - protein, 113 aa, Artificial Sequence
  source: /note="Description of Artificial Sequence: Synthetic polypeptide"
DIVMTQSPLSLPVTPGEPASISCRSSQSLLHSNGYNYLDWYLQKPGQSPQLLIYLGSNRASGVPDRFSGSGSGTDFTLKISRVEAEDVGVYYCMQRIQGPPRTFGGGTKVEIK

SEQ ID NO: 5322 - protein, 112 aa, Artificial Sequence
  source: /note="Description of Artificial Sequence: Synthetic polypeptide"
DIVMTQSPLSLPVTPGEPASISCRSSQSLLHSNGYNYLDWYLQKPGQSPQLLIYLGSNRASGVPDRFSGSGSGTDFTLKISRVEAEDVGVYYCMQVSTEPPTFGGGTKVEIK

SEQ ID NO: 5323 - protein, 107 aa, Artificial Sequence
  source: /note="Description of Artificial Sequence: Synthetic polypeptide"
EIVLTQSPATLSLSPGERATLSCRASQSVSSYLAWYQQKPGQAPRLLIYDASKRATGIPARFSGSGSGTDFTLTISSLEPEDFAVYYCQQRSNYPITFGGGTKVEIK

SEQ ID NO: 5324 - protein, 108 aa, Artificial Sequence
  source: /note="Description of Artificial Sequence: Synthetic polypeptide"
EIVLTQSPATLSLSPGERATLSCRASQSVSSYLAWYQQKPGQAPRLLIYDASNRATGIPARFSGSGSGTDFTLTISSLEPEDFAVYYCQQGANAPPRTFGGGTKVEIK

SEQ ID NO: 5325 - protein, 108 aa, Artificial Sequence
  source: /note="Description of Artificial Sequence: Synthetic polypeptide"
EIVLTQSPGTLSLSPGERATLSCRASQSVSSSYLAWYQQKPGQAPRLLIYGASSRATGIPDRFSGSGSGTDFTLTISRLEPEDFAVYYCEQYGGSPITFGGGTKVEIK

SEQ ID NO: 5326 - protein, 108 aa, Artificial Sequence
  source: /note="Description of Artificial Sequence: Synthetic polypeptide"
EIVLTQSPGTLSLSPGERATLSCRASQSVSSSYLAWYQQKPGQAPRLLIYGASSRATGIPDRFSGSGSGTDFTLTISRLEPEDFAVYYCQQSHVSPWTFGGGTKVEIK

SEQ ID NO: 5327 - protein, 107 aa, Artificial Sequence
  source: /note="Description of Artificial Sequence: Synthetic polypeptide"
EIVMTQSPATLSVSPGERATLSCRASQSVSSNLAWYQQKPGQAPRLLIYGASTRATGIPARFSGSGSGTEFTLTISSLQSEDFAVYYCQQARLGPWTFGGGTKVEIK

SEQ ID NO: 5328 - protein, 108 aa, Artificial Sequence
  source: /note="Description of Artificial Sequence: Synthetic polypeptide"
EIVMTQSPGTLSLSPGERATLSCRASQSVSSSYLAWYQQKPGQAPRLLIYGASSRATGIPDRFSGSGSGTDFTLTISRLEPEDFAVYYCQQYDGFPITFGGGTKVEIK

SEQ ID NO: 5329 - protein, 108 aa, Artificial Sequence
  source: /note="Description of Artificial Sequence: Synthetic polypeptide"
DIQMTQSPSSLSASVGDRVTITCRASQGIRNYLAWYQQKPGKAPKLLIYAASTLQSGVPSRFSGSGSGTDFTLTISSLQPEDVATYYCQRYNRAPYTFGQGTKVEIKR

SEQ ID NO: 5330 - protein, 107 aa, Mus sp.
DILLTQSPAILSVSPGERVSFSCRASQFVGSSIHWYQQRTNGSPRLLIKYASESMSGIPSRFSGSGSGTDFTLSINTVESEDIADYYCQQSHSWPFTFGSGTNLEVK

SEQ ID NO: 5331 - protein, 107 aa, Artificial Sequence
  source: /note="Description of Artificial Sequence: Synthetic polypeptide"
DIQMTQSPSSLSASIGDRVTITCRASQGIRNYLAWYQQKPGKAPKLLIYAASTLQSGVPSRFSGSGSGTDFTLTISSLQPEDVATYYCQKYNSAPYAFGQGTKVEIK

SEQ ID NO: 5332 - protein, 107 aa, Artificial Sequence [sequence omitted]

SEQ ID NO: 5333 - protein, 108 aa, Homo sapiens
  SITE (1)..(23): /note="framework 1"
  SITE (24)..(34): /note="complementarity determining region 1 (CDR1)."
  SITE (35)..(49): /note="framework 2"
  SITE (50)..(56): /note="complementarity determining region 2 (CDR2)."
  SITE (57)..(88): /note="framework 3"
  SITE (89)..(98): /note="complementarity determining region 3 (CDR3)."
  SITE (99)..(108): /note="J3 region"
EIVLTQSPATLSLSPGERATLSCRASQSVYSYLAWYQQKPGQAPRLLIYDASNRATGIPARFSGSGSGTDFTLTISSLEPEDFAVYYCQQRSNWPPFTFGPGTKVDIK

SEQ ID NO: 5334 - protein, 32 aa, Homo sapiens
  MOD_RES (21)..(32): Any amino acid
MEAPAQLLFLLLLWLPDTTGXXXXXXXXXXXX

SEQ ID NO: 5335 - protein, 105 aa, Artificial Sequence
  source: /note="Description of Artificial Sequence: Synthetic polypeptide"
DIQLTQSPSFLSASVGDRVTITCKASSNVNYMSWYQQKPGKAPKLLIYFTSNLPSGVPSRFSGSGSGTEFTLTISSLQPEDFATYYCSGEVTQFTFGQGTKVEIK

SEQ ID NO: 5336 - protein, 112 aa, Artificial Sequence
  source: /note="Description of Artificial Sequence: Synthetic polypeptide"
DIQLTQSPSFLSASVGDRVTITCKSSQSLLDSDGKTYLNWYQQKPGKAPKLLIYLVSKLDSGVPSRFSGSGSGTEFTLTISSLQPEDFATYYCWQGTHFPYTFGQGTKVEIK

SEQ ID NO: 5337 - protein, 113 aa, Artificial Sequence
  source: /note="Description of Artificial Sequence: Synthetic polypeptide"
DIQLTQSPSFLSASVGDRVTITCKSSQSLLNSGNQKKYLTWYQQKPGKAPKLLIYWASTRESGVPSRFSGSGSGTEFTLTISSLQPEDFATYYCQNDYGFPLTFGQGTKVEIK

SEQ ID NO: 5338 - protein, 113 aa, Artificial Sequence
  source: /note="Description of Artificial Sequence: Synthetic polypeptide"
DIQLTQSPSFLSASVGDRVTITCKSSQSLLYSGNQKNFLAWYQQKPGKAPKLLIYWASTRESGVPSRFSGSGSGTEFTLTISSLQPEDFATYYCQQYYSYPFTFGQGTKVEIK

SEQ ID NO: 5339 - protein, 112 aa, Artificial Sequence
  source: /note="Description of Artificial Sequence: Synthetic polypeptide"
DIQLTQSPSFLSASVGDRVTITCKSSQSLLYSNGKTFLSWYQQKPGKAPKLLIYLVSKLDSGVPSRFSGSGSGTEFTLTISSLQPEDFATYYCMQGTHFPLTFGQGTKVEIK

SEQ ID NO: 5340 - protein, 113 aa, Artificial Sequence
  source: /note="Description of Artificial Sequence: Synthetic polypeptide"
DIQLTQSPSFLSASVGDRVTITCKSSQSLLYSSDQKNYLAWYQQKPGKAPKLLIYWASTRESGVPSRFSGSGSGTEFTLTISSLQPEDFATYYCQQYYSYPLTFGQGTKVEIK

SEQ ID NO: 5341 - protein, 113 aa, Artificial Sequence
  source: /note="Description of Artificial Sequence: Synthetic polypeptide"
DIQLTQSPSFLSASVGDRVTITCKSSQSLLYSSNQKNCLAWYQQKPGKAPKLLIYWAFTRESGVPSRFSGSGSGTEFTLTISSLQPEDFATYYCQQYYSYPLTFGQGTKVEIK

SEQ ID NO: 5342 - protein, 113 aa, Artificial Sequence
  source: /note="Description of Artificial Sequence: Synthetic polypeptide"
DIQLTQSPSFLSASVGDRVTITCKSSQSLLYSSNQKNCLAWYQQKPGKAPKLLIYWASTRESGVPSRFSGSGSGTEFTLTISSLQPEDFATYYCQQYYSYPLTFGQGTKVEIK

SEQ ID NO: 5343 - protein, 112 aa, Artificial Sequence
  source: /note="Description of Artificial Sequence: Synthetic polypeptide"
DIQLTQSPSFLSASVGDRVTITCKSSQSVFYSSNQKNYLAWYQQKPGKAPKLLIYWASTRESGVPSRFSGSGSGTEFTLTISSLQPEDFATYYCHQYLSSLTFGQGTKVEIK

SEQ ID NO: 5344 - protein, 108 aa, Artificial Sequence
  source: /note="Description of Artificial Sequence: Synthetic polypeptide"
DIQLTQSPSFLSASVGDRVTITCRASENIYSFLAWYQQKPGKAPKLLIYNSKTFAEGVPSRFSGSGSGTEFTLTISSLQPEDFATYYCQHHYGTPPWTFGQGTKVEIK

SEQ ID NO: 5345 - protein, 107 aa, Artificial Sequence
  source: /note="Description of Artificial Sequence: Synthetic polypeptide"
DIQLTQSPSFLSASVGDRVTITCRASENIYSYLAWYQQKPGKAPKLLIYKAKTLAEGVPSRFSGSGSGTEFTLTISSLQPEDFATYYCQHHYGTPFTFGQGTKVEIK

SEQ ID NO: 5346 - protein, 112 aa, Artificial Sequence
  source: /note="Description of Artificial Sequence: Synthetic polypeptide"
DIQLTQSPSFLSASVGDRVTITCRFSQSLVHSNGNTYLHWYQQKPGKAPKLLIYKVSNRFSGVPSRFSGSGSGTEFTLTISSLQPEDFATYYCSQSTRVPPTFGQGTKVEIK

SEQ ID NO: 5347 - protein, 112 aa, Artificial Sequence
  source: /note="Description of Artificial Sequence: Synthetic polypeptide"
DIQLTQSPSFLSASVGDRVTITCRSSQSLVHSNGNTYLHWYQQKPGKAPKLLIYKVSNRFSGVPSRFSGSGSGTEFTLTISSLQPEDFATYYCSQSTHVPLTFGQGTKVEIK

SEQ ID NO: 5348 - protein, 112 aa, Artificial Sequence
  source: /note="Description of Artificial Sequence: Synthetic polypeptide"
DIQLTQSPSFLSASVGDRVTITCRSSQSLVHSNGNTYLHWYQQKPGKAPKLLIYKVSNRFSGVPSRFSGSGSGTEFTLTISSLQPEDFATYYCSQSTHVPPTFGQGTKVEIK

SEQ ID NO: 5349 - protein, 112 aa, Artificial Sequence
  source: /note="Description of Artificial Sequence: Synthetic polypeptide"
DIQLTQSPSFLSASVGDRVTITCRSSQSLVHSNGYTYLHWYQQKPGKAPKLLIYKVSNRFSGVPSRFSGSGSGTEFTLTISSLQPEDFATYYCSQSTRVPYTFGQGTKVEIK

SEQ ID NO: 5350 - protein, 112 aa, Artificial Sequence
  source: /note="Description of Artificial Sequence: Synthetic polypeptide"
DIQLTQSPSFLSASVGDRVTITCRSSQTIIHSNGNTYLEWYQQKPGKAPKLLIYKVSNRFCGVPSRFSGSGSGTEFTLTISSLQPEDFATYYCFQGSHVPYTFGQGTKVEIK

SEQ ID NO: 5351 - protein, 112 aa, Artificial Sequence
  source: /note="Description of Artificial Sequence: Synthetic polypeptide"
DIQLTQSPSFLSASVGDRVTITCRSSQTIIHSNGNTYLEWYQQKPGKAPKLLIYKVSNRFSGVPSRFSGSGSGTEFTLTISSLQPEDFATYYCFQGSHVPYTFGQGTKVEIK

SEQ ID NO: 5352 - protein, 107 aa, Artificial Sequence
  source: /note="Description of Artificial Sequence: Synthetic polypeptide"
DIQLTQSPSFLSASVGDRVTITCRTSENVYSNLAWYQQKPGKAPKLLIYAATNLADGVPSRFSGSGSGTEFTLTISSLQPEDFATYYCHHFWGTPYTFGQGTKVEIK

SEQ ID NO: 5353 - protein, 106 aa, Artificial Sequence
  source: /note="Description of Artificial Sequence: Synthetic polypeptide"
DIQLTQSPSFLSASVGDRVTITCSASSSVSYMYWYQQKPGKAPKLLIYLTSILASGVPSRFSGSGSGTEFTLTISSLQPEDFATYYCQQWSFNPYTFGQGTKVEIK

SEQ ID NO: 5354 - protein, 107 aa, Artificial Sequence
  source: /note="Description of Artificial Sequence: Synthetic polypeptide"
DIQLTQSPSSLSASVGDRVTITCQASQDISNFLNWYQQKPGKAPKLLIYDASNLETGVPSRFSGSGSGTDFTFTISSLQPEDIATYYCQQPVDLPFTFGGGTKVEIK

SEQ ID NO: 5355 - protein, 108 aa, Artificial Sequence
  source: /note="Description of Artificial Sequence: Synthetic polypeptide"
DIQLTQSPSSVSASVGDRVTITCRASQDISSWLAWYQQKPGKAPKLLIYAASSLQSGVPSRFSGSGSGTDFTLTISSLQPEDFATYYCQQEVDYPPLTFGGGTKVEIK

SEQ ID NO: 5356 - protein, 107 aa, Artificial Sequence
  source: /note="Description of Artificial Sequence: Synthetic polypeptide"
  VARIANT (14)..(14): /replace="Gln"
  VARIANT (30)..(30): /replace="Gln"
  SITE (1)..(107): /note="Variant residues given in the sequence have no preference with respect to those in the annotations for variant positions"
DIQMTQFPASLAAEVGESVTITCRASENIEYSLAWYQQKQGKSPQLLIYNANSLEDGVPSRFSGSGSGTQYSMKINSMQPEDTAIYFCKQAYDVPWTFGGGTKLEIK

SEQ ID NO: 5357 - protein, 107 aa, Artificial Sequence
  source: /note="Description of Artificial Sequence: Synthetic polypeptide"
DIQMTQSPASLSVSVGETVTITCRTSENVYSNLAWYQQKQGKSPQLLVYAATNLADGVPSRFSASGSATQFSLKINSLQSADFGSYYCHHFWGTPYTFGGGTKLEMN

SEQ ID NO: 5358 - protein, 105 aa, Artificial Sequence
  source: /note="Description of Artificial Sequence: Synthetic polypeptide"
DIQMTQSPSSLSASVGDRVTITCKASSNVNYMSWYQQKPGKAPKLLIYFTSNLPSGVPSRFSGSGSGTDFTFTISSLQPEDIATYYCSGEVTQFTFGQGTKVEIK

SEQ ID NO: 5359 - protein, 105 aa, Artificial Sequence
  source: /note="Description of Artificial Sequence: Synthetic polypeptide"
DIQMTQSPSSLSASVGDRVTITCKASSNVNYMSWYQQKPGKAPKLLIYFTSNLPSGVPSRFSGSGSGTDFTLTISSLQPEDFATYYCSGEVTQFTFGQGTKVEIK

SEQ ID NO: 5360 - protein, 112 aa, Artificial Sequence
  source: /note="Description of Artificial Sequence: Synthetic polypeptide"
DIQMTQSPSSLSASVGDRVTITCKSSQSLLDSDGKTYLNWYQQKPGKAPKLLIYLVSKLDSGVPSRFSGSGSGTDFTFTISSLQPEDIATYYCWQGTHFPYTFGQGTKVEIK

SEQ ID NO: 5361 - protein, 112 aa, Artificial Sequence
  source: /note="Description of Artificial Sequence: Synthetic polypeptide"
DIQMTQSPSSLSASVGDRVTITCKSSQSLLDSDGKTYLNWYQQKPGKAPKLLIYLVSKLDSGVPSRFSGSGSGTDFTLTISSLQPEDFATYYCWQGTHFPYTFGQGTKVEIK

SEQ ID NO: 5362 - protein, 113 aa, Artificial Sequence
  source: /note="Description of Artificial Sequence: Synthetic polypeptide"
DIQMTQSPSSLSASVGDRVTITCKSSQSLLNSGNQKKYLTWYQQKPGKAPKLLIYWASTRESGVPSRFSGSGSGTDFTFTISSLQPEDIATYYCQNDYGFPLTFGQGTKVEIK

SEQ ID NO: 5363 - protein, 113 aa, Artificial Sequence
  source: /note="Description of Artificial Sequence: Synthetic polypeptide"
DIQMTQSPSSLSASVGDRVTITCKSSQSLLNSGNQKKYLTWYQQKPGKAPKLLIYWASTRESGVPSRFSGSGSGTDFTLTISSLQPEDFATYYCQNDYGFPLTFGQGTKVEIK

SEQ ID NO: 5364 - protein, 113 aa, Artificial Sequence
  source: /note="Description of Artificial Sequence: Synthetic polypeptide"
DIQMTQSPSSLSASVGDRVTITCKSSQSLLYSGNQKNFLAWYQQKPGKAPKLLIYWASTRESGVPSRFSGSGSGTDFTFTISSLQPEDIATYYCQQYYSYPFTFGQGTKVEIK

SEQ ID NO: 5365 - protein, 113 aa, Artificial Sequence
  source: /note="Description of Artificial Sequence: Synthetic polypeptide"
DIQMTQSPSSLSASVGDRVTITCKSSQSLLYSGNQKNFLAWYQQKPGKAPKLLIYWASTRESGVPSRFSGSGSGTDFTLTISSLQPEDFATYYCQQYYSYPFTFGQGTKVEIK

SEQ ID NO: 5366 - protein, 112 aa, Artificial Sequence
  source: /note="Description of Artificial Sequence: Synthetic polypeptide"
DIQMTQSPSSLSASVGDRVTITCKSSQSLLYSNGKTFLSWYQQKPGKAPKLLIYLVSKLDSGVPSRFSGSGSGTDFTFTISSLQPEDIATYYCMQGTHFPLTFGQGTKVEIK

SEQ ID NO: 5367 - protein, 112 aa, Artificial Sequence
  source: /note="Description of Artificial Sequence: Synthetic polypeptide"
DIQMTQSPSSLSASVGDRVTITCKSSQSLLYSNGKTFLSWYQQKPGKAPKLLIYLVSKLDSGVPSRFSGSGSGTDFTLTISSLQPEDFATYYCMQGTHFPLTFGQGTKVEIK

SEQ ID NO: 5368 - protein, 113 aa, Artificial Sequence
  source: /note="Description of Artificial Sequence: Synthetic polypeptide"
DIQMTQSPSSLSASVGDRVTITCKSSQSLLYSSDQKNYLAWYQQKPGKAPKLLIYWASTRESGVPSRFSGSGSGTDFTFTISSLQPEDIATYYCQQYYSYPLTFGQGTKVEIK

SEQ ID NO: 5369 - protein, 113 aa, Artificial Sequence
  source: /note="Description of Artificial Sequence: Synthetic polypeptide"
DIQMTQSPSSLSASVGDRVTITCKSSQSLLYSSDQKNYLAWYQQKPGKAPKLLIYWASTRESGVPSRFSGSGSGTDFTLTISSLQPEDFATYYCQQYYSYPLTFGQGTKVEIK

SEQ ID NO: 5370 - protein, 113 aa, Artificial Sequence
  source: /note="Description of Artificial Sequence: Synthetic polypeptide"
DIQMTQSPSSLSASVGDRVTITCKSSQSLLYSSNQKNCLAWYQQKPGKAPKLLIYWAFTRESGVPSRFSGSGSGTDFTFTISSLQPEDIATYYCQQYYSYPLTFGQGTKVEIK

SEQ ID NO: 5371 - protein, 113 aa, Artificial Sequence
  source: /note="Description of Artificial Sequence: Synthetic polypeptide"
DIQMTQSPSSLSASVGDRVTITCKSSQSLLYSSNQKNCLAWYQQKPGKAPKLLIYWAFTRESGVPSRFSGSGSGTDFTLTISSLQPEDFATYYCQQYYSYPLTFGQGTKVEIK

SEQ ID NO: 5372 - protein, 113 aa, Artificial Sequence
  source: /note="Description of Artificial Sequence: Synthetic polypeptide"
DIQMTQSPSSLSASVGDRVTITCKSSQSLLYSSNQKNCLAWYQQKPGKAPKLLIYWASTRESGVPSRFSGSGSGTDFTFTISSLQPEDIATYYCQQYYSYPLTFGQGTKVEIK

SEQ ID NO: 5373 - protein, 113 aa, Artificial Sequence
  source: /note="Description of Artificial Sequence: Synthetic polypeptide"
DIQMTQSPSSLSASVGDRVTITCKSSQSLLYSSNQKNCLAWYQQKPGKAPKLLIYWASTRESGVPSRFSGSGSGTDFTLTISSLQPEDFATYYCQQYYSYPLTFGQGTKVEIK

SEQ ID NO: 5374 - protein, 112 aa, Artificial Sequence
  source: /note="Description of Artificial Sequence: Synthetic polypeptide"
DIQMTQSPSSLSASVGDRVTITCKSSQSVFYSSNQKNYLAWYQQKPGKAPKLLIYWASTRESGVPSRFSGSGSGTDFTFTISSLQPEDIATYYCHQYLSSLTFGQGTKVEIK

SEQ ID NO: 5375 - protein, 112 aa, Artificial Sequence
  source: /note="Description of Artificial Sequence: Synthetic polypeptide"
DIQMTQSPSSLSASVGDRVTITCKSSQSVFYSSNQKNYLAWYQQKPGKAPKLLIYWASTRESGVPSRFSGSGSGTDFTLTISSLQPEDFATYYCHQYLSSLTFGQGTKVEIK

SEQ ID NO: 5376 - protein, 107 aa, Artificial Sequence
  source: /note="Description of Artificial Sequence: Synthetic polypeptide"
DIQMTQSPSSLSASVGDRVTITCQASQDISNYLNWYQQKPGKAPKLLIYDASNLATGVPSRFSGSGSGTDFTFTISSLQPEDIATYYCQQPFNFPYTFGGGTKVEIK

SEQ ID NO: 5377 - protein, 106 aa, Artificial Sequence
  source: /note="Description of Artificial Sequence: Synthetic polypeptide"
DIQMTQSPSSLSASVGDRVTITCQASQDISNYLNWYQQKPGKAPKLLIYDASNLETGVPSRFSGSGSGTDFTFTISSLQPEDIATYYCQQFDTYPTFGGGTKVEIK

SEQ ID NO: 5378 - protein, 106 aa, Artificial Sequence
  source: /note="Description of Artificial Sequence: Synthetic polypeptide"
DIQMTQSPSSLSASVGDRVTITCQASQDISNYLNWYQQKPGKAPKLLIYDASNLETGVPSRFSGSGSGTDFTFTISSLQPEDIATYYCQQFFNFPTFGGGTKVEIK

SEQ ID NO: 5379 - protein, 107 aa, Artificial Sequence
  source: /note="Description of Artificial Sequence: Synthetic polypeptide"
DIQMTQSPSSLSASVGDRVTITCQASQDISNYLNWYQQKPGKAPKLLIYDASNLETGVPSRFSGSGSGTDFTFTISSLQPEDIATYYCQQFIDLPFTFGGGTKVEIK

SEQ ID NO: 5380 - protein, 106 aa, Artificial Sequence
  source: /note="Description of Artificial Sequence: Synthetic polypeptide"
DIQMTQSPSSLSASVGDRVTITCQASQDISNYLNWYQQKPGKAPKLLIYDASNLETGVPSRFSGSGSGTDFTFTISSLQPEDIATYYCQQFLNFPTFGGGTKVEIK

SEQ ID NO: 5381 - protein, 107 aa, Artificial Sequence
  source: /note="Description of Artificial Sequence: Synthetic polypeptide"
DIQMTQSPSSLSASVGDRVTITCQASQDISNYLNWYQQKPGKAPKLLIYDASNLETGVPSRFSGSGSGTDFTFTISSLQPEDIATYYCQQHIALPFTFGGGTKVEIK

SEQ ID NO: 5382 - protein, 107 aa, Artificial Sequence
  source: /note="Description of Artificial Sequence: Synthetic polypeptide"
DIQMTQSPSSLSASVGDRVTITCQASQDISNYLNWYQQKPGKAPKLLIYDASNLETGVPSRFSGSGSGTDFTFTISSLQPEDIATYYCQQVDNIPPTFGGGTKVEIK

SEQ ID NO: 5383 - protein, 107 aa, Artificial Sequence
  source: /note="Description of Artificial Sequence: Synthetic polypeptide"
DIQMTQSPSSLSASVGDRVTITCQASQDISNYLNWYQQKPGKAPKLLIYDASNLETGVPSRFSGSGSGTDFTFTISSLQPEDIATYYCQQYYDLPFTFGGGTKVEIK

SEQ ID NO: 5384 - protein, 107 aa, Artificial Sequence
  source: /note="Description of Artificial Sequence: Synthetic polypeptide"
DIQMTQSPSSLSASVGDRVTITCQASQDITNYLNWYQQKPGKAPKLLIYDASNLETGVPSRFSGSRSGTDFTFTISSLQPEDIATYYCQQDVNYPPTFGGGTKVEIK

SEQ ID NO: 5385 - protein, 108 aa, Artificial Sequence
  source: /note="Description of Artificial Sequence: Synthetic polypeptide"
DIQMTQSPSSLSASVGDRVTITCRASENIYSFLAWYQQKPGKAPKLLIYNSKTFAEGVPSRFSGSGSGTDFTFTISSLQPEDIATYYCQHHYGTPPWTFGQGTKVEIK

SEQ ID NO: 5386 - protein, 108 aa, Artificial Sequence
  source: /note="Description of Artificial Sequence: Synthetic polypeptide"
DIQMTQSPSSLSASVGDRVTITCRASENIYSFLAWYQQKPGKAPKLLIYNSKTFAEGVPSRFSGSGSGTDFTLTISSLQPEDFATYYCQHHYGTPPWTFGQGTKVEIK

SEQ ID NO: 5387 - protein, 107 aa, Artificial Sequence
  source: /note="Description of Artificial Sequence: Synthetic polypeptide"
DIQMTQSPSSLSASVGDRVTITCRASENIYSYLAWYQQKPGKAPKLLIYKAKTLAEGVPSRFSGSGSGTDFTFTISSLQPEDIATYYCQHHYGTPFTFGQGTKVEIK

SEQ ID NO: 5388 - protein, 107 aa, Artificial Sequence
  source: /note="Description of Artificial Sequence: Synthetic polypeptide"
DIQMTQSPSSLSASVGDRVTITCRASENIYSYLAWYQQKPGKAPKLLIYKAKTLAEGVPSRFSGSGSGTDFTLTISSLQPEDFATYYCQHHYGTPFTFGQGTKVEIK

SEQ ID NO: 5389 - protein, 107 aa, Artificial Sequence
  source: /note="Description of Artificial Sequence: Synthetic polypeptide"
DIQMTQSPSSLSASVGDRVTITCRASQSINSYLNWYQQKPGKAPKLLIYAASSLQSGVPSRFSGSGSGTDFTLTISSLQPEDFATYYCQQSDDDPFTFGGGTKVEIK

SEQ ID NO: 5390 - protein, 107 aa, Artificial Sequence
  source: /note="Description of Artificial Sequence: Synthetic polypeptide"
DIQMTQSPSSLSASVGDRVTITCRASQSISRYLNWYQQKPGKAPKLLIYAASSLQSGVPSRFSGSGSGTDFTLTISSLQPEDFATYYCQQVYSTPITFGGGTKVEIK

SEQ ID NO: 5391 - protein, 108 aa, Artificial Sequence
  source: /note="Description of Artificial Sequence: Synthetic polypeptide"
DIQMTQSPSSLSASVGDRVTITCRASQSISSYLNWYQQKPGKAPKLLIYAASSLQSGVPSRFSGSGSGTDFTLTISSLQPEDFATYYCQQAFSPPPWTFGGGTKVEIK

SEQ ID NO: 5392 - protein, 107 aa, Artificial Sequence
  source: /note="Description of Artificial Sequence: Synthetic polypeptide"
DIQMTQSPSSLSASVGDRVTITCRASQSISSYLNWYQQKPGKAPKLLIYAASSLQSGVPSRFSGSGSGTDFTLTISSLQPEDFATYYCQQEYAVPYTFGGGTKVEIK

SEQ ID NO: 5393 - protein, 106 aa, Artificial Sequence
  source: /note="Description of Artificial Sequence: Synthetic polypeptide"
DIQMTQSPSSLSASVGDRVTITCRASQSISSYLNWYQQKPGKAPKLLIYAASSLQSGVPSRFSGSGSGTDFTLTISSLQPEDFATYYCQQFDDVFTFGGGTKVEIK

SEQ ID NO: 5394 - protein, 107 aa, Artificial Sequence
  source: /note="Description of Artificial Sequence: Synthetic polypeptide"
DIQMTQSPSSLSASVGDRVTITCRASQSISSYLNWYQQKPGKAPKLLIYAASSLQSGVPSRFSGSGSGTDFTLTISSLQPEDFATYYCQQGYAAPITFGGGTKVEIK

SEQ ID NO: 5395 - protein, 107 aa, Artificial Sequence
  source: /note="Description of Artificial Sequence: Synthetic polypeptide"
DIQMTQSPSSLSASVGDRVTITCRASQSISSYLNWYQQKPGKAPKLLIYAASSLQSGVPSRFSGSGSGTDFTLTISSLQPEDFATYYCQQGYSAPITFGGGTKVEIK

SEQ ID NO: 5396 - protein, 107 aa, Artificial Sequence
  source: /note="Description of Artificial Sequence: Synthetic polypeptide"
DIQMTQSPSSLSASVGDRVTITCRASQSISSYLNWYQQKPGKAPKLLIYAASSLQSGVPSRFSGSGSGTDFTLTISSLQPEDFATYYCQQSDFPPWTFGGGTKVEIK

SEQ ID NO: 5397 - protein, 107 aa, Artificial Sequence
  source: /note="Description of Artificial Sequence: Synthetic polypeptide"
DIQMTQSPSSLSASVGDRVTITCRASQSISSYLNWYQQKPGKAPKLLIYAASSLQSGVPSRFSGSGSGTDFTLTISSLQPEDFATYYCQQSYDFPITFGGGTKVEIK

SEQ ID NO: 5398 - protein, 107 aa, Artificial Sequence
  source: /note="Description of Artificial Sequence: Synthetic polypeptide"
DIQMTQSPSSLSASVGDRVTITCRASQSISSYLNWYQQKPGKAPKLLIYAASSLQSGVPSRFSGSGSGTDFTLTISSLQPEDFATYYCQQVYSPPITFGGGTKVEIK

SEQ ID NO: 5399 - protein, 107 aa, Artificial Sequence
  source: /note="Description of Artificial Sequence: Synthetic polypeptide"
DIQMTQSPSSLSASVGDRVTITCRASQSISSYLNWYQQKPGKAPKLLIYGASSLQSGVPSRFSGSGSGTDFTLTISSLQPEDFATYYCQQIDDTPITFGGGTKVEIK

SEQ ID NO: 5400 - protein, 107 aa, Artificial Sequence
  source: /note="Description of Artificial Sequence: Synthetic polypeptide"
DIQMTQSPSSLSASVGDRVTITCRASQSISSYLNWYQQKPGKAPKLLIYGASSLQSGVPSRFSGSGSGTDFTLTISSLQPEDFATYYCQQVYITPITFGGGTKVEIK

SEQ ID NO: 5401 - protein, 112 aa, Artificial Sequence
  source: /note="Description of Artificial Sequence: Synthetic polypeptide"
DIQMTQSPSSLSASVGDRVTITCRFSQSLVHSNGNTYLHWYQQKPGKAPKLLIYKVSNRFSGVPSRFSGSGSGTDFTFTISSLQPEDIATYYCSQSTRVPPTFGQGTKVEIK

SEQ ID NO: 5402 - protein, 112 aa, Artificial Sequence
  source: /note="Description of Artificial Sequence: Synthetic polypeptide"
DIQMTQSPSSLSASVGDRVTITCRFSQSLVHSNGNTYLHWYQQKPGKAPKLLIYKVSNRFSGVPSRFSGSGSGTDFTLTISSLQPEDFATYYCSQSTRVPPTFGQGTKVEIK

SEQ ID NO: 5403 - protein, 112 aa, Artificial Sequence
  source: /note="Description of Artificial Sequence: Synthetic polypeptide"
DIQMTQSPSSLSASVGDRVTITCRSSQSLVHSNGNTYLHWYQQKPGKAPKLLIYKVSNRFSGVPSRFSGSGSGTDFTFTISSLQPEDIATYYCSQSTHVPLTFGQGTKVEIK

SEQ ID NO: 5404 - protein, 112 aa, Artificial Sequence
  source: /note="Description of Artificial Sequence: Synthetic polypeptide"
DIQMTQSPSSLSASVGDRVTITCRSSQSLVHSNGNTYLHWYQQKPGKAPKLLIYKVSNRFSGVPSRFSGSGSGTDFTFTISSLQPEDIATYYCSQSTHVPPTFGQGTKVEIK

SEQ ID NO: 5405 - protein, 112 aa, Artificial Sequence
  source: /note="Description of Artificial Sequence: Synthetic polypeptide"
DIQMTQSPSSLSASVGDRVTITCRSSQSLVHSNGNTYLHWYQQKPGKAPKLLIYKVSNRFSGVPSRFSGSGSGTDFTLTISSLQPEDFATYYCSQSTHVPLTFGQGTKVEIK

SEQ ID NO: 5406 - protein, 112 aa, Artificial Sequence
  source: /note="Description of Artificial Sequence: Synthetic polypeptide"
DIQMTQSPSSLSASVGDRVTITCRSSQSLVHSNGNTYLHWYQQKPGKAPKLLIYKVSNRFSGVPSRFSGSGSGTDFTLTISSLQPEDFATYYCSQSTHVPPTFGQGTKVEIK

SEQ ID NO: 5407 - protein, 112 aa, Artificial Sequence
  source: /note="Description of Artificial Sequence: Synthetic polypeptide"
DIQMTQSPSSLSASVGDRVTITCRSSQSLVHSNGYTYLHWYQQKPGKAPKLLIYKVSNRFSGVPSRFSGSGSGTDFTFTISSLQPEDIATYYCSQSTRVPYTFGQGTKVEIK

SEQ ID NO: 5408 - protein, 112 aa, Artificial Sequence
  source: /note="Description of Artificial Sequence: Synthetic polypeptide"
DIQMTQSPSSLSASVGDRVTITCRSSQSLVHSNGYTYLHWYQQKPGKAPKLLIYKVSNRFSGVPSRFSGSGSGTDFTLTISSLQPEDFATYYCSQSTRVPYTFGQGTKVEIK

SEQ ID NO: 5409 - protein, 112 aa, Artificial Sequence
  source: /note="Description of Artificial Sequence: Synthetic polypeptide"
DIQMTQSPSSLSASVGDRVTITCRSSQTIIHSNGNTYLEWYQQKPGKAPKLLIYKVSNRFCGVPSRFSGSGSGTDFTFTISSLQPEDIATYYCFQGSHVPYTFGQGTKVEIK

SEQ ID NO: 5410 - protein, 112 aa, Artificial Sequence
  source: /note="Description of Artificial Sequence: Synthetic polypeptide"
DIQMTQSPSSLSASVGDRVTITCRSSQTIIHSNGNTYLEWYQQKPGKAPKLLIYKVSNRFCGVPSRFSGSGSGTDFTLTISSLQPEDFATYYCFQGSHVPYTFGQGTKVEIK

SEQ ID NO: 5411 - protein, 112 aa, Artificial Sequence
  source: /note="Description of Artificial Sequence: Synthetic polypeptide"
DIQMTQSPSSLSASVGDRVTITCRSSQTIIHSNGNTYLEWYQQKPGKAPKLLIYKVSNRFSGVPSRFSGSGSGTDFTFTISSLQPEDIATYYCFQGSHVPYTFGQGTKVEIK

SEQ ID NO: 5412 - protein, 112 aa, Artificial Sequence
  source: /note="Description of Artificial Sequence: Synthetic polypeptide"
DIQMTQSPSSLSASVGDRVTITCRSSQTIIHSNGNTYLEWYQQKPGKAPKLLIYKVSNRFSGVPSRFSGSGSGTDFTLTISSLQPEDFATYYCFQGSHVPYTFGQGTKVEIK

SEQ ID NO: 5413 - protein, 107 aa, Artificial Sequence
  source: /note="Description of Artificial Sequence: Synthetic polypeptide"
DIQMTQSPSSLSASVGDRVTITCRTSENVYSNLAWYQQKPGKAPKLLIYAATNLADGVPSRFSGSGSGTDFTFTISSLQPEDIATYYCHHFWGTPYTFGQGTKVEIK

SEQ ID NO: 5414 - protein, 107 aa, Artificial Sequence
  source: /note="Description of Artificial Sequence: Synthetic polypeptide"
DIQMTQSPSSLSASVGDRVTITCRTSENVYSNLAWYQQKPGKAPKLLIYAATNLADGVPSRFSGSGSGTDFTLTISSLQPEDFATYYCHHFWGTPYTFGQGTKVEIK

SEQ ID NO: 5415 - protein, 106 aa, Artificial Sequence
  source: /note="Description of Artificial Sequence: Synthetic polypeptide"
DIQMTQSPSSLSASVGDRVTITCSASSSVSYMYWYQQKPGKAPKLLIYLTSILASGVPSRFSGSGSGTDFTFTISSLQPEDIATYYCQQWSFNPYTFGQGTKVEIK

SEQ ID NO: 5416 - protein, 106 aa, Artificial Sequence
  source: /note="Description of Artificial Sequence: Synthetic polypeptide"
DIQMTQSPSSLSASVGDRVTITCSASSSVSYMYWYQQKPGKAPKLLIYLTSILASGVPSRFSGSGSGTDFTLTISSLQPEDFATYYCQQWSFNPYTFGQGTKVEIK

SEQ ID NO: 5417 - protein, 107 aa, Artificial Sequence
  source: /note="Description of Artificial Sequence: Synthetic polypeptide"
DIQMTQSPSSVSASVGDRVTITCRASQGIDSWLAWYQQKPGKAPKLLIYAASSLQSGVPSRFSGSGSGTDFTLTISSLQPEDFATYYCQQAYSLPPTFGGGTKVEIK

SEQ ID NO: 5418 - protein, 107 aa, Artificial Sequence
  source: /note="Description of Artificial Sequence: Synthetic polypeptide"
DIQMTQSPSSVSASVGDRVTITCRASQGISSWLAWYQQKPGKAPKLLIYAASSLQSGVPSRFSGSGSGTDFTLTISSLQPEDFATYYCQQASTFPITFGGGTKVEIK

SEQ ID NO: 5419 - protein, 107 aa, Artificial Sequence
  source: /note="Description of Artificial Sequence: Synthetic polypeptide"
DIQMTQSPSSVSASVGDRVTITCRASQGISSWLAWYQQKPGKAPKLLIYAASSLQSGVPSRFSGSGSGTDFTLTISSLQPEDFATYYCQQRNSLPLTFGGGTKVEIK

SEQ ID NO: 5420 - protein, 105 aa, Artificial Sequence
  source: /note="Description of Artificial Sequence: Synthetic polypeptide"
DIQMTQSPSTLSASVGDRVTITCKASSNVNYMSWYQQKPGKAPKLLIYFTSNLPSGVPSRFSGSGSGTEFTLTISSLQPDDFATYYCSGEVTQFTFGQGTKVEIK

SEQ ID NO: 5421 - protein, 112 aa, Artificial Sequence
  source: /note="Description of Artificial Sequence: Synthetic polypeptide"
DIQMTQSPSTLSASVGDRVTITCKSSQSLLDSDGKTYLNWYQQKPGKAPKLLIYLVSKLDSGVPSRFSGSGSGTEFTLTISSLQPDDFATYYCWQGTHFPYTFGQGTKVEIK

SEQ ID NO: 5422 - protein, 113 aa, Artificial Sequence
  source: /note="Description of Artificial Sequence: Synthetic polypeptide"
DIQMTQSPSTLSASVGDRVTITCKSSQSLLNSGNQKKYLTWYQQKPGKAPKLLIYWASTRESGVPSRFSGSGSGTEFTLTISSLQPDDFATYYCQNDYGFPLTFGQGTKVEIK

SEQ ID NO: 5423 - protein, 113 aa, Artificial Sequence
  source: /note="Description of Artificial Sequence: Synthetic polypeptide"
DIQMTQSPSTLSASVGDRVTITCKSSQSLLYSGNQKNFLAWYQQKPGKAPKLLIYWASTRESGVPSRFSGSGSGTEFTLTISSLQPDDFATYYCQQYYSYPFTFGQGTKVEIK

SEQ ID NO: 5424 - protein, 112 aa, Artificial Sequence
  source: /note="Description of Artificial Sequence: Synthetic polypeptide"
DIQMTQSPSTLSASVGDRVTITCKSSQSLLYSNGKTFLSWYQQKPGKAPKLLIYLVSKLDSGVPSRFSGSGSGTEFTLTISSLQPDDFATYYCMQGTHFPLTFGQGTKVEIK

SEQ ID NO: 5425 - protein, 113 aa, Artificial Sequence
  source: /note="Description of Artificial Sequence: Synthetic polypeptide"
DIQMTQSPSTLSASVGDRVTITCKSSQSLLYSSDQKNYLAWYQQKPGKAPKLLIYWASTRESGVPSRFSGSGSGTEFTLTISSLQPDDFATYYCQQYYSYPLTFGQGTKVEIK

SEQ ID NO: 5426 - protein, 113 aa, Artificial Sequence
  source: /note="Description of Artificial Sequence: Synthetic polypeptide"
DIQMTQSPSTLSASVGDRVTITCKSSQSLLYSSNQKNCLAWYQQKPGKAPKLLIYWAFTRESGVPSRFSGSGSGTEFTLTISSLQPDDFATYYCQQYYSYPLTFGQGTKVEIK

SEQ ID NO: 5427 - protein, 113 aa, Artificial Sequence
  source: /note="Description of Artificial Sequence: Synthetic polypeptide"
DIQMTQSPSTLSASVGDRVTITCKSSQSLLYSSNQKNCLAWYQQKPGKAPKLLIYWASTRESGVPSRFSGSGSGTEFTLTISSLQPDDFATYYCQQYYSYPLTFGQGTKVEIK

SEQ ID NO: 5428 - protein, 112 aa, Artificial Sequence
  source: /note="Description of Artificial Sequence: Synthetic polypeptide"
DIQMTQSPSTLSASVGDRVTITCKSSQSVFYSSNQKNYLAWYQQKPGKAPKLLIYWASTRESGVPSRFSGSGSGTEFTLTISSLQPDDFATYYCHQYLSSLTFGQGTKVEIK

SEQ ID NO: 5429 - protein, 108 aa, Artificial Sequence
  source: /note="Description of Artificial Sequence: Synthetic polypeptide"
DIQMTQSPSTLSASVGDRVTITCRASENIYSFLAWYQQKPGKAPKLLIYNSKTFAEGVPSRFSGSGSGTEFTLTISSLQPDDFATYYCQHHYGTPPWTFGQGTKVEIK

SEQ ID NO: 5430 - protein, 107 aa, Artificial Sequence
  source: /note="Description of Artificial Sequence: Synthetic polypeptide"
DIQMTQSPSTLSASVGDRVTITCRASENIYSYLAWYQQKPGKAPKLLIYKAKTLAEGVPSRFSGSGSGTEFTLTISSLQPDDFATYYCQHHYGTPFTFGQGTKVEIK

SEQ ID NO: 5431 - protein, 108 aa, Artificial Sequence
  source: /note="Description of Artificial Sequence: Synthetic polypeptide"
DIQMTQSPSTLSASVGDRVTITCRASQSISSWLAWYQQKPGKAPKLLIYDASSLESGVPSRFSGSGSGTEFTLTISSLQPDDFATYYCLDYNSYSPITFGGGTKVEIK

SEQ ID NO: 5432 - protein, 107 aa, Artificial Sequence
  source: /note="Description of Artificial Sequence: Synthetic polypeptide"
DIQMTQSPSTLSASVGDRVTITCRASQSISSWLAWYQQKPGKAPKLLIYKASSLESGVPSRFSGSGSGTEFTLTISSLQPDDFATYYCQQLNSYSPTFGGGTKVEIK

SEQ ID NO: 5433 - protein, 112 aa, Artificial Sequence
  source: /note="Description of Artificial Sequence: Synthetic polypeptide"
DIQMTQSPSTLSASVGDRVTITCRFSQSLVHSNGNTYLHWYQQKPGKAPKLLIYKVSNRFSGVPSRFSGSGSGTEFTLTISSLQPDDFATYYCSQSTRVPPTFGQGTKVEIK

SEQ ID NO: 5434 - protein, 112 aa, Artificial Sequence
  source: /note="Description of Artificial Sequence: Synthetic polypeptide"
DIQMTQSPSTLSASVGDRVTITCRSSQSLVHSNGNTYLHWYQQKPGKAPKLLIYKVSNRFSGVPSRFSGSGSGTEFTLTISSLQPDDFATYYCSQSTHVPLTFGQGTKVEIK

SEQ ID NO: 5435 - protein, 112 aa, Artificial Sequence
  source: /note="Description of Artificial Sequence: Synthetic polypeptide"
DIQMTQSPSTLSASVGDRVTITCRSSQSLVHSNGNTYLHWYQQKPGKAPKLLIYKVSNRFSGVPSRFSGSGSGTEFTLTISSLQPDDFATYYCSQSTHVPPTFGQGTKVEIK

SEQ ID NO: 5436 - protein, 112 aa, Artificial Sequence
  source: /note="Description of Artificial Sequence: Synthetic polypeptide"
DIQMTQSPSTLSASVGDRVTITCRSSQSLVHSNGYTYLHWYQQKPGKAPKLLIYKVSNRFSGVPSRFSGSGSGTEFTLTISSLQPDDFATYYCSQSTRVPYTFGQGTKVEIK

SEQ ID NO: 5437 - protein, 112 aa, Artificial Sequence
  source: /note="Description of Artificial Sequence: Synthetic polypeptide"
DIQMTQSPSTLSASVGDRVTITCRSSQTIIHSNGNTYLEWYQQKPGKAPKLLIYKVSNRFCGVPSRFSGSGSGTEFTLTISSLQPDDFATYYCFQGSHVPYTFGQGTKVEIK

SEQ ID NO: 5438 - protein, 112 aa, Artificial Sequence
  source: /note="Description of Artificial Sequence: Synthetic polypeptide"
DIQMTQSPSTLSASVGDRVTITCRSSQTIIHSNGNTYLEWYQQKPGKAPKLLIYKVSNRFSGVPSRFSGSGSGTEFTLTISSLQPDDFATYYCFQGSHVPYTFGQGTKVEIK

SEQ ID NO: 5439 - protein, 107 aa, Artificial Sequence
  source: /note="Description of Artificial Sequence: Synthetic polypeptide"
DIQMTQSPSTLSASVGDRVTITCRTSENVYSNLAWYQQKPGKAPKLLIYAATNLADGVPSRFSGSGSGTEFTLTISSLQPDDFATYYCHHFWGTPYTFGQGTKVEIK

SEQ ID NO: 5440 - protein, 106 aa, Artificial Sequence
  source: /note="Description of Artificial Sequence: Synthetic polypeptide"
DIQMTQSPSTLSASVGDRVTITCSASSSVSYMYWYQQKPGKAPKLLIYLTSILASGVPSRFSGSGSGTEFTLTISSLQPDDFATYYCQQWSFNPYTFGQGTKVEIK

SEQ ID NO: 5441 - protein, 111 aa, Artificial Sequence
  source: /note="Description of Artificial Sequence: Synthetic polypeptide"
DIVLTQSPASLAVSLGQRATISCRASESVDYHGTSLMQWYQQKPGQPPKLLIYAASNVESGVPARFSGSGSGTDFSLNIHPVEEDDIAMYFCQQNRKILWTFGGGTKLEIK

SEQ ID NO: 5442 - protein, 113 aa, Artificial Sequence
  source: /note="Description of Artificial Sequence: Synthetic polypeptide"
DIVMSQSPSSLAVSVGEKVTMSCKSSQSLLYSSNQKNCLAWYQQKPGQSPKLLIYWASTRESGVPDRFTGSGSGTDFTLTISSVKAEDLAVYYCQQYYSYPLTFGAGTKLELK

SEQ ID NO: 5443 - protein, 108 aa, Artificial Sequence
  source: /note="Description of Artificial Sequence: Synthetic polypeptide"
DIVMTQSHKFMSTSIGARVSITCKASQDVRTAVAWYQQKPGQSPKLLIYSASYRYTGVPDRFTGSGFGTDFTFTISSVQAEDLAVYYCQQHYGTPPWTFGGGTKLEIK

SEQ ID NO: 5444 - protein, 108 aa, Artificial Sequence
  source: /note="Description of Artificial Sequence: Synthetic polypeptide"
DIVMTQSHKFMSTSIGARVSITCKASQDVRTAVAWYQQKPGQSPKLLIYSASYRYTGVPDRFTGSGSGTDFTFTISSVQAEDLAVYYCQQHYGTPPWTFGGGTKLEIK

SEQ ID NO: 5445 - protein, 107 aa, Artificial Sequence
  source: /note="Description of Artificial Sequence: Synthetic polypeptide"
DIVMTQSHKFMSTSVGDRVSITCKASQDVSTTVAWYQQKPGQSPKLLIYSASYRYTGVPDRFTGSGFGTDFTFTISSVQAEDLAVYYCQQHYSTPPTFGGGTKLEIK

SEQ ID NO: 5446 - protein, 107 aa, Artificial Sequence
  source: /note="Description of Artificial Sequence: Synthetic polypeptide"
DIVMTQSHKFMSTSVGDRVSITCKASQDVSTTVAWYQQKPGQSPKLLIYSASYRYTGVPDRFTGSGSGTDFTFTISSVQAEDLAVYYCQQHYSTPPTFGGGTKLEIK

SEQ ID NO: 5447 - protein, 106 aa, Artificial Sequence
  source: /note="Description of Artificial Sequence: Synthetic polypeptide"
DIVMTQSHKFMSTSVGDRVSITCKASQGVSTAVAWYQQKPGQSPKLLIYWASTRHTGVPDRFTGSGSGTDYTLTISSVQAEDLALYYCHQHYSTYTFGGGTKLEIK

SEQ ID NO: 5448 - protein, 105 aa, Artificial Sequence
  source: /note="Description of Artificial Sequence: Synthetic polypeptide"
DIVMTQSPDSLAVSLGERATINCKASSNVNYMSWYQQKPGQPPKLLIYFTSNLPSGVPDRFSGSGSGTDFTLTISSLQAEDVAVYYCSGEVTQFTFGQGTKVEIK

SEQ ID NO: 5449 - protein, 112 aa, Artificial Sequence
  source: /note="Description of Artificial Sequence: Synthetic polypeptide"
DIVMTQSPDSLAVSLGERATINCKSSQSLLDSDGKTYLNWYQQKPGQPPKLLIYLVSKLDSGVPDRFSGSGSGTDFTLTISSLQAEDVAVYYCWQGTHFPYTFGQGTKVEIK

SEQ ID NO: 5450 - protein, 113 aa, Artificial Sequence
  source: /note="Description of Artificial Sequence: Synthetic polypeptide"
DIVMTQSPDSLAVSLGERATINCKSSQSLLNSGNQKKYLTWYQQKPGQPPKLLIYWASTRESGVPDRFSGSGSGTDFTLTISSLQAEDVAVYYCQNDYGFPLTFGQGTKVEIK

SEQ ID NO: 5451 - protein, 113 aa, Artificial Sequence
  source: /note="Description of Artificial Sequence: Synthetic polypeptide"
DIVMTQSPDSLAVSLGERATINCKSSQSLLYSGNQKNFLAWYQQKPGQPPKLLIYWASTRESGVPDRFSGSGSGTDFTLTISSLQAEDVAVYYCQQYYSYPFTFGQGTKVEIK

SEQ ID NO: 5452 - protein, 112 aa, Artificial Sequence
  source: /note="Description of Artificial Sequence: Synthetic polypeptide"
DIVMTQSPDSLAVSLGERATINCKSSQSLLYSNGKTFLSWYQQKPGQPPKLLIYLVSKLDSGVPDRFSGSGSGTDFTLTISSLQAEDVAVYYCMQGTHFPLTFGQGTKVEIK

SEQ ID NO: 5453 - protein, 113 aa, Artificial Sequence
  source: /note="Description of Artificial Sequence: Synthetic polypeptide"
DIVMTQSPDSLAVSLGERATINCKSSQSLLYSSDQKNYLAWYQQKPGQPPKLLIYWASTRESGVPDRFSGSGSGTDFTLTISSLQAEDVAVYYCQQYYSYPLTFGQGTKVEIK

SEQ ID NO: 5454 - protein, 113 aa, Artificial Sequence
  source: /note="Description of Artificial Sequence: Synthetic polypeptide"
DIVMTQSPDSLAVSLGERATINCKSSQSLLYSSNQKNCLAWYQQKPGQPPKLLIYWAFTRESGVPDRFSGSGSGTDFTLTISSLQAEDVAVYYCQQYYSYPLTFGQGTKVEIK

SEQ ID NO: 5455 - protein, 113 aa, Artificial Sequence
  source: /note="Description of Artificial Sequence: Synthetic polypeptide"
DIVMTQSPDSLAVSLGERATINCKSSQSLLYSSNQKNCLAWYQQKPGQPPKLLIYWASTRESGVPDRFSGSGSGTDFTLTISSLQAEDVAVYYCQQYYSYPLTFGQGTKVEIK

SEQ ID NO: 5456 - protein, 112 aa, Artificial Sequence
  source: /note="Description of Artificial Sequence: Synthetic polypeptide"
DIVMTQSPDSLAVSLGERATINCKSSQSVFYSSNQKNYLAWYQQKPGQPPKLLIYWASTRESGVPDRFSGSGSGTDFTLTISSLQAEDVAVYYCHQYLSSLTFGQGTKVEIK

SEQ ID NO: 5457 - protein, 113 aa, Artificial Sequence
  source: /note="Description of Artificial Sequence: Synthetic polypeptide"
DIVMTQSPDSLAVSLGERATINCKSSQSVLYSSNNKNYLAWYQQKPGQPPKLLISWASTRESGVPDRFSGSGSGTDFTLTISSLQAEDVAVYYCQQAYLPPITFGGGTKVEIK

SEQ ID NO: 5458 - protein, 113 aa, Artificial Sequence
  source: /note="Description of Artificial Sequence: Synthetic polypeptide"
DIVMTQSPDSLAVSLGERATINCKSSQSVLYSSNNKNYLAWYQQKPGQPPKLLIYWASTRESGVPDRFSGSGSGTDFTLTISSLQAEDVAVYYCQQAYVVPPTFGGGTKVEIK

SEQ ID NO: 5459 - protein, 113 aa, Artificial Sequence
  source: /note="Description of Artificial Sequence: Synthetic polypeptide"
DIVMTQSPDSLAVSLGERATINCKSSQSVLYSSNNKNYLAWYQQKPGQPPKLLIYWASTRESGVPDRFSGSGSGTDFTLTISSLQAEDVAVYYCQQYHDAPITFGGGTKVEIK

SEQ ID NO: 5460 - protein, 108 aa, Artificial Sequence
  source: /note="Description of Artificial Sequence: Synthetic polypeptide"
DIVMTQSPDSLAVSLGERATINCRASENIYSFLAWYQQKPGQPPKLLIYNSKTFAEGVPDRFSGSGSGTDFTLTISSLQAEDVAVYYCQHHYGTPPWTFGQGTKVEIK

SEQ ID NO: 5461 - protein, 107 aa, Artificial Sequence
  source: /note="Description of Artificial Sequence: Synthetic polypeptide"
DIVMTQSPDSLAVSLGERATINCRASENIYSYLAWYQQKPGQPPKLLIYKAKTLAEGVPDRFSGSGSGTDFTLTISSLQAEDVAVYYCQHHYGTPFTFGQGTKVEIK

SEQ ID NO: 5462 - protein, 112 aa, Artificial Sequence
  source: /note="Description of Artificial Sequence: Synthetic polypeptide"
DIVMTQSPDSLAVSLGERATINCRFSQSLVHSNGNTYLHWYQQKPGQPPKLLIYKVSNRFSGVPDRFSGSGSGTDFTLTISSLQAEDVAVYYCSQSTRVPPTFGQGTKVEIK

SEQ ID NO: 5463 - protein, 112 aa, Artificial Sequence
  source: /note="Description of Artificial Sequence: Synthetic polypeptide"
DIVMTQSPDSLAVSLGERATINCRSSQSLVHSNGNTYLHWYQQKPGQPPKLLIYKVSNRFSGVPDRFSGSGSGTDFTLTISSLQAEDVAVYYCSQSTHVPLTFGQGTKVEIK

SEQ ID NO: 5464 - protein, 112 aa, Artificial Sequence
  source: /note="Description of Artificial Sequence: Synthetic polypeptide"
DIVMTQSPDSLAVSLGERATINCRSSQSLVHSNGNTYLHWYQQKPGQPPKLLIYKVSNRFSGVPDRFSGSGSGTDFTLTISSLQAEDVAVYYCSQSTHVPPTFGQGTKVEIK

SEQ ID NO: 5465 - protein, 112 aa, Artificial Sequence
  source: /note="Description of Artificial Sequence: Synthetic polypeptide"
DIVMTQSPDSLAVSLGERATINCRSSQSLVHSNGYTYLHWYQQKPGQPPKLLIYKVSNRFSGVPDRFSGSGSGTDFTLTISSLQAEDVAVYYCSQSTRVPYTFGQGTKVEIK

SEQ ID NO: 5466 - protein, 112 aa, Artificial Sequence
  source: /note="Description of Artificial Sequence: Synthetic polypeptide"
DIVMTQSPDSLAVSLGERATINCRSSQTIIHSNGNTYLEWYQQKPGQPPKLLIYKVSNRFCGVPDRFSGSGSGTDFTLTISSLQAEDVAVYYCFQGSHVPYTFGQGTKVEIK

SEQ ID NO: 5467 - protein, 112 aa, Artificial Sequence
  source: /note="Description of Artificial Sequence: Synthetic polypeptide"
DIVMTQSPDSLAVSLGERATINCRSSQTIIHSNGNTYLEWYQQKPGQPPKLLIYKVSNRFSGVPDRFSGSGSGTDFTLTISSLQAEDVAVYYCFQGSHVPYTFGQGTKVEIK

SEQ ID NO: 5468 - protein, 107 aa, Artificial Sequence
  source: /note="Description of Artificial Sequence: Synthetic polypeptide"
DIVMTQSPDSLAVSLGERATINCRTSENVYSNLAWYQQKPGQPPKLLIYAATNLADGVPDRFSGSGSGTDFTLTISSLQAEDVAVYYCHHFWGTPYTFGQGTKVEIK

SEQ ID NO: 5469 - protein, 106 aa, Artificial Sequence
  source: /note="Description of Artificial Sequence: Synthetic polypeptide"
DIVMTQSPDSLAVSLGERATINCSASSSVSYMYWYQQKPGQPPKLLIYLTSILASGVPDRFSGSGSGTDFTLTISSLQAEDVAVYYCQQWSFNPYTFGQGTKVEIK

SEQ ID NO: 5470 - protein, 107 aa, Artificial Sequence
  source: /note="Description of Artificial Sequence: Synthetic polypeptide"
DIVMTQSPKSMSMSVGERVTLTCKASENVVTYVSWYQQKPEQSPKLLIYGASNRYTGVPDRFTGSGSATDFTLTISSVQAEDLADYHCGQGYSYPYTFGGGTKLEIK

SEQ ID NO: 5471 - protein, 105 aa, Artificial Sequence
  source: /note="Description of Artificial Sequence: Synthetic polypeptide"
DIVMTQSPLSLPVTPGEPASISCKASSNVNYMSWYLQKPGQSPQLLIYFTSNLPSGVPDRFSGSGSGTDFTLKISRVEAEDVGVYYCSGEVTQFTFGQGTKVEIK

SEQ ID NO: 5472 - protein, 112 aa, Artificial Sequence
  source: /note="Description of Artificial Sequence: Synthetic polypeptide"
DIVMTQSPLSLPVTPGEPASISCKSSQSLLDSDGKTYLNWYLQKPGQSPQLLIYLVSKLDSGVPDRFSGSGSGTDFTLKISRVEAEDVGVYYCWQGTHFPYTFGQGTKVEIK

SEQ ID NO: 5473 - protein, 113 aa, Artificial Sequence
  source: /note="Description of Artificial Sequence: Synthetic polypeptide"
DIVMTQSPLSLPVTPGEPASISCKSSQSLLNSGNQKKYLTWYLQKPGQSPQLLIYWASTRESGVPDRFSGSGSGTDFTLKISRVEAEDVGVYYCQNDYGFPLTFGQGTKVEIK

SEQ ID NO: 5474 - protein, 113 aa, Artificial Sequence
  source: /note="Description of Artificial Sequence: Synthetic polypeptide"
DIVMTQSPLSLPVTPGEPASISCKSSQSLLYSGNQKNFLAWYLQKPGQSPQLLIYWASTRESGVPDRFSGSGSGTDFTLKISRVEAEDVGVYYCQQYYSYPFTFGQGTKVEIK

SEQ ID NO: 5475 - protein, 112 aa, Artificial Sequence
  source: /note="Description of Artificial Sequence: Synthetic polypeptide"
DIVMTQSPLSLPVTPGEPASISCKSSQSLLYSNGKTFLSWYLQKPGQSPQLLIYLVSKLDSGVPDRFSGSGSGTDFTLKISRVEAEDVGVYYCMQGTHFPLTFGQGTKVEIK

SEQ ID NO: 5476 - protein, 113 aa, Artificial Sequence
  source: /note="Description of Artificial Sequence: Synthetic polypeptide"
DIVMTQSPLSLPVTPGEPASISCKSSQSLLYSSDQKNYLAWYLQKPGQSPQLLIYWASTRESGVPDRFSGSGSGTDFTLKISRVEAEDVGVYYCQQYYSYPLTFGQGTKVEIK

SEQ ID NO: 5477 - protein, 113 aa, Artificial Sequence
  source: /note="Description of Artificial Sequence: Synthetic polypeptide"
DIVMTQSPLSLPVTPGEPASISCKSSQSLLYSSNQKNCLAWYLQKPGQSPQLLIYWAFTRESGVPDRFSGSGSGTDFTLKISRVEAEDVGVYYCQQYYSYPLTFGQGTKVEIK

SEQ ID NO: 5478 - protein, 113 aa, Artificial Sequence
  source: /note="Description of Artificial Sequence: Synthetic polypeptide"
DIVMTQSPLSLPVTPGEPASISCKSSQSLLYSSNQKNCLAWYLQKPGQSPQLLIYWASTRESGVPDRFSGSGSGTDFTLKISRVEAEDVGVYYCQQYYSYPLTFGQGTKVEIK

SEQ ID NO: 5479 - protein, 112 aa, Artificial Sequence
  source: /note="Description of Artificial Sequence: Synthetic polypeptide"
DIVMTQSPLSLPVTPGEPASISCKSSQSVFYSSNQKNYLAWYLQKPGQSPQLLIYWASTRESGVPDRFSGSGSGTDFTLKISRVEAEDVGVYYCHQYLSSLTFGQGTKVEIK

SEQ ID NO: 5480 - protein, 108 aa, Artificial Sequence
  source: /note="Description of Artificial Sequence: Synthetic polypeptide"
DIVMTQSPLSLPVTPGEPASISCRASENIYSFLAWYLQKPGQSPQLLIYNSKTFAEGVPDRFSGSGSGTDFTLKISRVEAEDVGVYYCQHHYGTPPWTFGQGTKVEIK

SEQ ID NO: 5481 - protein, 107 aa, Artificial Sequence
  source: /note="Description of Artificial Sequence: Synthetic polypeptide"
DIVMTQSPLSLPVTPGEPASISCRASENIYSYLAWYLQKPGQSPQLLIYKAKTLAEGVPDRFSGSGSGTDFTLKISRVEAEDVGVYYCQHHYGTPFTFGQGTKVEIK

SEQ ID NO: 5482 - protein, 112 aa, Artificial Sequence
  source: /note="Description of Artificial Sequence: Synthetic polypeptide"
DIVMTQSPLSLPVTPGEPASISCRFSQSLVHSNGNTYLHWYLQKPGQSPQLLIYKVSNRFSGVPDRFSGSGSGTDFTLKISRVEAEDVGVYYCSQSTRVPPTFGQGTKVEIK

SEQ ID NO: 5483 - protein, 112 aa, Artificial Sequence
  source: /note="Description of Artificial Sequence: Synthetic polypeptide"
DIVMTQSPLSLPVTPGEPASISCRSSQSLLHSNGYNYLDWYLQKPGQSPQLLIYLGSHRASGVPDRFSGSGSGTDFTLKISRVEAEDVGVYYCMQALESPRTFGGGTKVEIK

SEQ ID NO: 5484 - protein, 112 aa, Artificial Sequence
  source: /note="Description of Artificial Sequence: Synthetic polypeptide"
DIVMTQSPLSLPVTPGEPASISCRSSQSLVHSNGNTYLHWYLQKPGQSPQLLIYKVSNRFSGVPDRFSGSGSGTDFTLKISRVEAEDVGVYYCSQSTHVPLTFGQGTKVEIK

SEQ ID NO: 5485 - protein, 112 aa, Artificial Sequence
  source: /note="Description of Artificial Sequence: Synthetic polypeptide"
DIVMTQSPLSLPVTPGEPASISCRSSQSLVHSNGNTYLHWYLQKPGQSPQLLIYKVSNRFSGVPDRFSGSGSGTDFTLKISRVEAEDVGVYYCSQSTHVPPTFGQGTKVEIK

SEQ ID NO: 5486 - protein, 112 aa, Artificial Sequence
  source: /note="Description of Artificial Sequence: Synthetic polypeptide"
DIVMTQSPLSLPVTPGEPASISCRSSQSLVHSNGYTYLHWYLQKPGQSPQLLIYKVSNRFSGVPDRFSGSGSGTDFTLKISRVEAEDVGVYYCSQSTRVPYTFGGGTKVEIK

SEQ ID NO: 5487 - protein, 112 aa, Artificial Sequence
  source: /note="Description of Artificial Sequence: Synthetic polypeptide"
DIVMTQSPLSLPVTPGEPASISCRSSQSLVHSNGYTYLHWYLQKPGQSPQLLIYKVSNRFSGVPDRFSGSGSGTDFTLKISRVEAEDVGVYYCSQSTRVPYTFGQGTKVEIK

SEQ ID NO: 5488 - protein, 112 aa, Artificial Sequence
  source: /note="Description of Artificial Sequence: Synthetic polypeptide"
DIVMTQSPLSLPVTPGEPASISCRSSQTIIHSNGNTYLEWYLQKPGQSPQLLIYKVSNRFCGVPDRFSGSGSGTDFTLKISRVEAEDVGVYYCFQGSHVPYTFGQGTKVEIK

SEQ ID NO: 5489 - protein, 112 aa, Artificial Sequence
  source: /note="Description of Artificial Sequence: Synthetic polypeptide"
DIVMTQSPLSLPVTPGEPASISCRSSQTIIHSNGNTYLEWYLQKPGQSPQLLIYKVSNRFSGVPDRFSGSGSGTDFTLKISRVEAEDVGVYYCFQGSHVPYTFGQGTKVEIK

SEQ ID NO: 5490 - protein, 107 aa, Artificial Sequence
  source: /note="Description of Artificial Sequence: Synthetic polypeptide"
DIVMTQSPLSLPVTPGEPASISCRTSENVYSNLAWYLQKPGQSPQLLIYAATNLADGVPDRFSGSGSGTDFTLKISRVEAEDVGVYYCHHFWGTPYTFGQGTKVEIK

SEQ ID NO: 5491 - protein, 106 aa, Artificial Sequence
  source: /note="Description of Artificial Sequence: Synthetic polypeptide"
DIVMTQSPLSLPVTPGEPASISCSASSSVSYMYWYLQKPGQSPQLLIYLTSILASGVPDRFSGSGSGTDFTLKISRVEAEDVGVYYCQQWSFNPYTFGQGTKVEIK

SEQ ID NO: 5492 - protein, 113 aa, Artificial Sequence
  source: /note="Description of Artificial Sequence: Synthetic polypeptide"
  VARIANT (3)..(3): /replace="Gln"
  VARIANT (50)..(50): /replace="Gln"
  VARIANT (73)..(73): /replace="Gln"
  SITE (1)..(113): /note="Variant residues given in the sequence have no preference with respect to those in the annotations for variant positions"
DIEMTQSPSSLTVTAGEKVTMSCKSSQSLLNSGNQKKYLTWYQQKPGQPEKLLIYWASTRESGVRDRFTGSGEGTDFTLTISSVQGEDLAIYYCQNDYGFPLTFGGGTKLEMK

SEQ ID NO: 5493 - protein, 108 aa, Artificial Sequence
  source: /note="Description of Artificial Sequence: Synthetic polypeptide"
  VARIANT (3)..(3): /replace="Gln"
  SITE (1)..(108): /note="Variant residues given in the sequence have no preference with respect to those in the annotations for variant positions"
DIEVTQSPASLSASVGETVTITCRASENIYSFLAWYQLKQGKSPQLLVYNSKTFAEGVPSRFSGSGSGTQFSLRINSLQPEDFGSYYCQHHYGTPPWTFGGGTKLEIK

SEQ ID NO: 5494 - protein, 112 aa, Artificial Sequence
  source: /note="Description of Artificial Sequence: Synthetic polypeptide"
DVLMTQTPLSLPVSLGDQASISCRFSQSLVHSNGNTYLHWYLQKPGQSPKLLIYKVSNRFSGVPDRFSGSGSGTDFTLRISGVEAEDLGVYFCSQSTRVPPTFGGGTKLEIK

SEQ ID NO: 5495 - protein, 112 aa, Artificial Sequence
  source: /note="Description of Artificial Sequence: Synthetic polypeptide"
DVLMTQTPLSLPVSLGDQASISCRSSQSIVHSNGNTYLEWYLQKPGQSPKLLIYKVSNRFSGVPDRFSGSGSGTDFTLKISRVEAEDLGVYYCFQGSHVPFTFGSGTKLEIK

SEQ ID NO: 5496 - protein, 112 aa, Artificial Sequence
  source: /note="Description of Artificial Sequence: Synthetic polypeptide"
DVQMTQSPSSLSASVGDRVTITCRSSQSLVHSNGYTYLHWYQQKPGKSPKLLIYKVSNRFSGVPSRFSGSGSGTDFTLTISSLQPEDFATYYCSQSTRVPYTFGGGTKVEIK

SEQ ID NO: 5497 - protein, 112 aa, Artificial Sequence
  source: /note="Description of Artificial Sequence: Synthetic polypeptide"
DVVMTQSPDSLAVSLGERATINCRSSQSLVHSNGYTYLHWYQQKPGQSPKLLIYKVSNRFSGVPDRFSGSGSGTDFTLTISSLQAEDVAVYYCSQSTRVPYTFGGGTKVEIK

SEQ ID NO: 5498 - protein, 112 aa, Artificial Sequence
  source: /note="Description of Artificial Sequence: Synthetic polypeptide"
DVVMTQSPDSLAVSLGERATINCRSSQSLVHSNQYTYLHWYQQKPGQSPKLLIYKVSNRFSGVPDRFSGSGSGTDFTLTISSLQAEDVAVYYCSQSTRVPYTFGGGTKVEIK

SEQ ID NO: 5499 - protein, 112 aa, Artificial Sequence
  source: /note="Description of Artificial Sequence: Synthetic polypeptide"
DVVMTQSPDSLAVSLGERATINCRSSQSLVHSNRYTYLHWYQQKPGQSPKLLIYKVSNRFSGVPDRFSGSGSGTDFTLKISRVEAEDVGVYYCSQSTRVPYTFGQGTKLEIK

SEQ ID NO: 5500 - protein, 105 aa, Artificial Sequence
  source: /note="Description of Artificial Sequence: Synthetic polypeptide"
DVVMTQSPLSLPVTLGQPASISCKASSNVNYMSWFQQRPGQSPRRLIYFTSNLPSGVPDRFSGSGSGTDFTLKISRVEAEDVGVYYCSGEVTQFTFGQGTKVEIK

SEQ ID NO: 5501 - protein, 112 aa, Artificial Sequence
  source: /note="Description of Artificial Sequence: Synthetic polypeptide"
DVVMTQSPLSLPVTLGQPASISCKSSQSLLDSDGKTYLNWFQQRPGQSPRRLIYLVSKLDSGVPDRFSGSGSGTDFTLKISRVEAEDVGVYYCWQGTHFPYTFGQGTKVEIK

SEQ ID NO: 5502 - protein, 113 aa, Artificial Sequence
  source: /note="Description of Artificial Sequence: Synthetic polypeptide"
DVVMTQSPLSLPVTLGQPASISCKSSQSLLNSGNQKKYLTWFQQRPGQSPRRLIYWASTRESGVPDRFSGSGSGTDFTLKISRVEAEDVGVYYCQNDYGFPLTFGQGTKVEIK

SEQ ID NO: 5503 - protein, 113 aa, Artificial Sequence
  source: /note="Description of Artificial Sequence: Synthetic polypeptide"
DVVMTQSPLSLPVTLGQPASISCKSSQSLLYSGNQKNFLAWFQQRPGQSPRRLIYWASTRESGVPDRFSGSGSGTDFTLKISRVEAEDVGVYYCQQYYSYPFTFGQGTKVEIK

SEQ ID NO: 5504 - protein, 112 aa, Artificial Sequence
  source: /note="Description of Artificial Sequence: Synthetic polypeptide"
DVVMTQSPLSLPVTLGQPASISCKSSQSLLYSNGKTFLSWFQQRPGQSPRRLIYLVSKLDSGVPDRFSGSGSGTDFTLKISRVEAEDVGVYYCMQGTHFPLTFGQGTKVEIK

SEQ ID NO: 5505 - protein, 113 aa, Artificial Sequence
  source: /note="Description of Artificial Sequence: Synthetic polypeptide"
DVVMTQSPLSLPVTLGQPASISCKSSQSLLYSSDQKNYLAWFQQRPGQSPRRLIYWASTRESGVPDRFSGSGSGTDFTLKISRVEAEDVGVYYCQQYYSYPLTFGQGTKVEIK

SEQ ID NO: 5506 - protein, 113 aa, Artificial Sequence
  source: /note="Description of Artificial Sequence: Synthetic polypeptide"
DVVMTQSPLSLPVTLGQPASISCKSSQSLLYSSNQKNCLAWFQQRPGQSPRRLIYWAFTRESGVPDRFSGSGSGTDFTLKISRVEAEDVGVYYCQQYYSYPLTFGQGTKVEIK

SEQ ID NO: 5507 - protein, 113 aa, Artificial Sequence
  source: /note="Description of Artificial Sequence: Synthetic polypeptide"
DVVMTQSPLSLPVTLGQPASISCKSSQSLLYSSNQKNCLAWFQQRPGQSPRRLIYWASTRESGVPDRFSGSGSGTDFTLKISRVEAEDVGVYYCQQYYSYPLTFGQGTKVEIK

SEQ ID NO: 5508 - protein, 112 aa, Artificial Sequence
  source: /note="Description of Artificial Sequence: Synthetic polypeptide"
DVVMTQSPLSLPVTLGQPASISCKSSQSVFYSSNQKNYLAWFQQRPGQSPRRLIYWASTRESGVPDRFSGSGSGTDFTLKISRVEAEDVGVYYCHQYLSSLTFGQGTKVEIK

SEQ ID NO: 5509 - protein, 108 aa, Artificial Sequence
  source: /note="Description of Artificial Sequence: Synthetic polypeptide"
DVVMTQSPLSLPVTLGQPASISCRASENIYSFLAWFQQRPGQSPRRLIYNSKTFAEGVPDRFSGSGSGTDFTLKISRVEAEDVGVYYCQHHYGTPPWTFGQGTKVEIK

SEQ ID NO: 5510 - protein, 107 aa, Artificial Sequence
  source: /note="Description of Artificial Sequence: Synthetic polypeptide"
DVVMTQSPLSLPVTLGQPASISCRASENIYSYLAWFQQRPGQSPRRLIYKAKTLAEGVPDRFSGSGSGTDFTLKISRVEAEDVGVYYCQHHYGTPFTFGQGTKVEIK

SEQ ID NO: 5511 - protein, 112 aa, Artificial Sequence
  source: /note="Description of Artificial Sequence: Synthetic polypeptide"
DVVMTQSPLSLPVTLGQPASISCRFSQSLVHSNGNTYLHWFQQRPGQSPRRLIYKVSNRFSGVPDRFSGSGSGTDFTLKISRVEAEDVGVYYCSQSTRVPPTFGQGTKVEIK

SEQ ID NO: 5512 - protein, 112 aa, Artificial Sequence
  source: /note="Description of Artificial Sequence: Synthetic polypeptide"
DVVMTQSPLSLPVTLGQPASISCRSSQSLVHSNGNTYLHWFQQRPGQSPRRLIYKVSNRFSGVPDRFSGSGSGTDFTLKISRVEAEDVGVYYCSQSTHVPLTFGQGTKVEIK

SEQ ID NO: 5513 - protein, 112 aa, Artificial Sequence
  source: /note="Description of Artificial Sequence: Synthetic polypeptide"
DVVMTQSPLSLPVTLGQPASISCRSSQSLVHSNGNTYLHWFQQRPGQSPRRLIYKVSNRFSGVPDRFSGSGSGTDFTLKISRVEAEDVGVYYCSQSTHVPPTFGQGTKVEIK

SEQ ID NO: 5514 - protein, 112 aa, Artificial Sequence
  source: /note="Description of Artificial Sequence: Synthetic polypeptide"
DVVMTQSPLSLPVTLGQPASISCRSSQSLVHSNGYTYLHWFQQRPGQSPRRLIYKVSNRFSGVPDRFSGSGSGTDFTLKISRVEAEDVGVYYCSQSTRVPYTFGQGTKVEIK

SEQ ID NO: 5515 - protein, 112 aa, Artificial Sequence
  source: /note="Description of Artificial Sequence: Synthetic polypeptide"
DVVMTQSPLSLPVTLGQPASISCRSSQTIIHSNGNTYLEWFQQRPGQSPRRLIYKVSNRFCGVPDRFSGSGSGTDFTLKISRVEAEDVGVYYCFQGSHVPYTFGQGTKVEIK

SEQ ID NO: 5516 - protein, 112 aa, Artificial Sequence
  source: /note="Description of Artificial Sequence: Synthetic polypeptide"
DVVMTQSPLSLPVTLGQPASISCRSSQTIIHSNGNTYLEWFQQRPGQSPRRLIYKVSNRFSGVPDRFSGSGSGTDFTLKISRVEAEDVGVYYCFQGSHVPYTFGQGTKVEIK

SEQ ID NO: 5517 - protein, 107 aa, Artificial Sequence
  source: /note="Description of Artificial Sequence: Synthetic polypeptide"
DVVMTQSPLSLPVTLGQPASISCRTSENVYSNLAWFQQRPGQSPRRLIYAATNLADGVPDRFSGSGSGTDFTLKISRVEAEDVGVYYCHHFWGTPYTFGQGTKVEIK

SEQ ID NO: 5518 - protein, 106 aa, Artificial Sequence
  source: /note="Description of Artificial Sequence: Synthetic polypeptide"
DVVMTQSPLSLPVTLGQPASISCSASSSVSYMYWFQQRPGQSPRRLIYLTSILASGVPDRFSGSGSGTDFTLKISRVEAEDVGVYYCQQWSFNPYTFGQGTKVEIK

SEQ ID NO: 5519 - protein, 112 aa, Artificial Sequence
  source: /note="Description of Artificial Sequence: Synthetic polypeptide"
DVVMTQTPLSLPVSLGDQASISCRSSQSLVHSNGDTYLHWYLQKPGQSPKLLIYKVSNRFSGVPDRFSGSGSGTDFTLKISRVEAEDLGVYFCSQSTHVPLTFGAGTKLELK

SEQ ID NO: 5520 - protein, 112 aa, Artificial Sequence
  source: /note="Description of Artificial Sequence: Synthetic polypeptide"
DVVMTQTPLSLPVSLGDQASISCRSSQSLVHSNGNTYLHWYLQKPGQSPKLLIYKVSDRFSGVPDRFSGSGSGTDFTLRISRVEAEDLGVYFCSQSTHVPLTFGAGTKLELK

SEQ ID NO: 5521 - protein, 112 aa, Artificial Sequence
  source: /note="Description of Artificial Sequence: Synthetic polypeptide"
DVVMTQTPLSLPVSLGDQASISCRSSQSLVHSNGNTYLHWYLQKPGQSPKLLIYKVSNRFSGVPDRFSGSGSGTDFTLKISRVEAEDLGVYFCSQSTHVPLTFGAGTKLELK

SEQ ID NO: 5522 - protein, 112 aa, Artificial Sequence
  source: /note="Description of Artificial Sequence: Synthetic polypeptide"
DVVMTQTPLSLPVSLGDQASISCRSSQSLVHSNGNTYLHWYLQKPGQSPKLLIYKVSNRFSGVPDRFSGSGSGTDFTLKISRVEAEDLGVYFCSQSTHVPPTFGSGTKLEIK

SEQ ID NO: 5523 - protein, 112 aa, Artificial Sequence
  source: /note="Description of Artificial Sequence: Synthetic polypeptide"
DVVMTQTPLSLPVSLGDQASISCRSSQTIIHSNGNTYLEWYLRKPGQSPKLLIYKVSNRFCGVPDRFSGSGSGTDFTLKISRVEAEDLGVYYCFQGSHVPYTFGGGTELEIK

SEQ ID NO: 5524 - protein, 112 aa, Artificial Sequence
  source: /note="Description of Artificial Sequence: Synthetic polypeptide"
DVVMTQTPLSLPVSLGDQASISCRSSQTIIHSNGNTYLEWYLRKPGQSPKLLIYKVSNRFSGVPDRFSGSGSGTDFTLKISRVEAEDLGVYYCFQGSHVPYTFGGGTELEIK

SEQ ID NO: 5525 - protein, 112 aa, Artificial Sequence
  source: /note="Description of Artificial Sequence: Synthetic polypeptide"
DVVMTQTPLSLSVTPGQPASISCRSSQSLVHSNGYTYLHWYLQKPGQSPQLLIYKVSNRFSGVPDRFSGSGSGTDFTLKISRVEAEDLGVYFCSQSTRVPYTFGQGTKLEIK

SEQ ID NO: 5526 - protein, 112 aa, Artificial Sequence
  source: /note="Description of Artificial Sequence: Synthetic polypeptide"
DVVMTQTPLSLSVTPGQPASISCRSSQSLVHSNRYTYLHWYLQKPGQSPQLLIYKVSNRFSGVPDRFSGSGSGTDFTLKISRVEAEDVGVYYCSQSTRVPYTFGQGTKLEIK

SEQ ID NO: 5527 - protein, 112 aa, Artificial Sequence
  source: /note="Description of Artificial Sequence: Synthetic polypeptide"
DVVMTQTPLSLSVTPGQPASISCRSSQSLVHSNWYTYLHWYLQKPGQSPQLLIYKVSNRFSGVPDRFSGSGSGTDFTLKISRVEAEDVGVYYCSQSTRVPYTFGQGTKLEIK

SEQ ID NO: 5528 - protein, 112 aa, Artificial Sequence
  source: /note="Description of Artificial Sequence: Synthetic polypeptide"
DVVMTQTPLSLSVTPGQPASISCRSSRSLVHSNGYTYLHWYLQKPGQSPQLLIYKVSNRVSGVPDRFSGSGSGTDFTLKISRVEAEDVGVYYCSQSTRVPYTFGQGTKLEIK

SEQ ID NO: 5529 - protein, 112 aa, Artificial Sequence
  source: /note="Description of Artificial Sequence: Synthetic polypeptide"
DVVMTQTPLSLSVTPGQPASISCRTSQSLVHSNAYTYLHWYLQKPGQSPQLLIYKVSNRVSGVPDRFSGSGSGTDFTLKISRVEAEDVGVYYCSQSTRVPYTFGQGTKLEIK

SEQ ID NO: 5530 - protein, 112 aa, Artificial Sequence
  source: /note="Description of Artificial Sequence: Synthetic polypeptide"
DVVMTQTPLSLSVTPGQPASISCRTSQSLVHSNQYTYLHWYLQKPGQSPQLLIYKVSNRVSGVPDRFSGSGSGTDFTLKISRVEAEDVGVYYCSQSTRVPYTFGQGTKLEIK

SEQ ID NO: 5531 - protein, 112 aa, Artificial Sequence
  source: /note="Description of Artificial Sequence: Synthetic polypeptide"
DVVMTQTPLTLSVTIGQPASISCKSSQSLLYSNGKTFLSWLLQRPGQSPKRLIYLVSKLDSGVPDRFAGSGSGTDFTLKISRLEADDLGIYYCMQGTHFPLTFGAGTKLELK

SEQ ID NO: 5532 - protein, 112 aa, Artificial Sequence
  source: /note="Description of Artificial Sequence: Synthetic polypeptide"
  VARIANT (78)..(78): /replace="Gln"
  SITE (1)..(112): /note="Variant residues given in the sequence have no preference with respect to those in the annotations for variant positions"
DVVMTQTPLTLSVTIGQPASISCKSSQSLLYSNGKTFLSWLLQRPGQSPKRLIYLVSKLDSGVPDRFAGSGSGTDFTEKISRLEADDLGIYYCMQGTHFPLTFGGGTKLEMK

SEQ ID NO: 5533 - protein, 112 aa, Artificial Sequence
  source: /note="Description of Artificial Sequence: Synthetic polypeptide"
  VARIANT (3)..(3): /replace="Gln"
  SITE (1)..(112): /note="Variant residues given in the sequence have no preference with respect to those in the annotations for variant positions"
DVEMTQNPLSLPVSLGDQASISCRSSQSLVHSNGYTYLHWYLQKPGQSPKLLIYKVSNRFSGVPDRFSGSGSGTDFTLKISRVEADDLGVYLCSQSTRVPYTFGGGTKLEIK

SEQ ID NO: 5534 - protein, 112 aa, Artificial Sequence
  source: /note="Description of Artificial Sequence: Synthetic polypeptide"
  VARIANT (3)..(3): /replace="Gln"
  SITE (1)..(112): /note="Variant residues given in the sequence have no preference with respect to those in the annotations for variant positions"
DVEMTQTPLSLPVSLGDQASISCRSSQSLVHSNGNTYLHWYLQKPGQSPKLLIYKVSNRFSGVPDRFSGSGSGTDFTLKISRVEAEDLGVYFCSQSTHVPLTFGAGTKLELK

SEQ ID NO: 5535 - protein, 112 aa, Artificial Sequence
  source: /note="Description of Artificial Sequence: Synthetic polypeptide"
  VARIANT (3)..(3): /replace="Gln"
  SITE (1)..(112): /note="Variant residues given in the sequence have no preference with respect to those in the annotations for variant positions"
DVEMTQTPLSLPVSLGDQASISCRSSQTIIHSNGNTYLEWYLRKPGQSPKLLIYKVSNRFSGVPDRFSGSGSGTDFTLKISRVEGEDLGVYYCFQGSHVPYTFGGGTELEIK

SEQ ID NO: 5536 - protein, 112 aa, Artificial Sequence
  source: /note="Description of Artificial Sequence: Synthetic polypeptide"
  VARIANT (3)..(3): /replace="Gln"
  SITE (1)..(112): /note="Variant residues given in the sequence have no preference with respect to those in the annotations for variant positions"
DVEMTQTPLTLSVTIGQPASISCKSSQSLLDSDGKTYLNWLLQRPGQSPKRLIYLVSKLDSGVPDRFTGSGSGTDFTLKISRVEAEDLGVYYCWQGTHFPYTFGGGTKLEIK

SEQ ID NO: 5537 - protein, 112 aa, Artificial Sequence
  source: /note="Description of Artificial Sequence: Synthetic polypeptide"
  VARIANT (3)..(3): /replace="Gln"
  SITE (1)..(112): /note="Variant residues given in the sequence have no preference with respect to those in the annotations for variant positions"
DVEMTQTPLTLSVTIGQPASISCKSSQSLLYSNGKTFLSWLLQRPGQSPKRLIYLVSKLDSGVPDRFAGSGSGTDFTLKISRLEADDLGIYYCMQGTHFPLTFGAGTKLELK

SEQ ID NO: 5538 - protein, 105 aa, Artificial Sequence
  source: /note="Description of Artificial Sequence: Synthetic polypeptide"
EIVLTQSPATLSLSPGERATLSCKASSNVNYMSWYQQKPGQAPRLLIYFTSNLPSGIPARFSGSGSGTDFTLTISSLEPEDFAVYYCSGEVTQFTFGQGTKVEIK

SEQ ID NO: 5539 - protein, 112 aa, Artificial Sequence
  source: /note="Description of Artificial Sequence: Synthetic polypeptide"
EIVLTQSPATLSLSPGERATLSCKSSQSLLDSDGKTYLNWYQQKPGQAPRLLIYLVSKLDSGIPARFSGSGSGTDFTLTISSLEPEDFAVYYCWQGTHFPYTFGQGTKVEIK

SEQ ID NO: 5540 - protein, 113 aa, Artificial Sequence
  source: /note="Description of Artificial Sequence: Synthetic polypeptide"
EIVLTQSPATLSLSPGERATLSCKSSQSLLNSGNQKKYLTWYQQKPGQAPRLLIYWASTRESGIPARFSGSGSGTDFTLTISSLEPEDFAVYYCQNDYGFPLTFGQGTKVEIK

SEQ ID NO: 5541 - protein, 113 aa, Artificial Sequence
  source: /note="Description of Artificial Sequence: Synthetic polypeptide"
EIVLTQSPATLSLSPGERATLSCKSSQSLLYSGNQKNFLAWYQQKPGQAPRLLIYWASTRESGIPARFSGSGSGTDFTLTISSLEPEDFAVYYCQQYYSYPFTFGQGTKVEIK

SEQ ID NO: 5542 - protein, 112 aa, Artificial Sequence
  source: /note="Description of Artificial Sequence: Synthetic polypeptide"
EIVLTQSPATLSLSPGERATLSCKSSQSLLYSNGKTFLSWYQQKPGQAPRLLIYLVSKLDSGIPARFSGSGSGTDFTLTISSLEPEDFAVYYCMQGTHFPLTFGQGTKVEIK

SEQ ID NO: 5543 - protein, 113 aa, Artificial Sequence
  source: /note="Description of Artificial Sequence: Synthetic polypeptide"
EIVLTQSPATLSLSPGERATLSCKSSQSLLYSSDQKNYLAWYQQKPGQAPRLLIYWASTRESGIPARFSGSGSGTDFTLTISSLEPEDFAVYYCQQYYSYPLTFGQGTKVEIK

SEQ ID NO: 5544 - protein, 113 aa, Artificial Sequence
  source: /note="Description of Artificial Sequence: Synthetic polypeptide"
EIVLTQSPATLSLSPGERATLSCKSSQSLLYSSNQKNCLAWYQQKPGQAPRLLIYWAFTRESGIPARFSGSGSGTDFTLTISSLEPEDFAVYYCQQYYSYPLTFGQGTKVEIK

SEQ ID NO: 5545 - protein, 113 aa, Artificial Sequence
  source: /note="Description of Artificial Sequence: Synthetic polypeptide"
EIVLTQSPATLSLSPGERATLSCKSSQSLLYSSNQKNCLAWYQQKPGQAPRLLIYWASTRESGIPARFSGSGSGTDFTLTISSLEPEDFAVYYCQQYYSYPLTFGQGTKVEIK

SEQ ID NO: 5546 - protein, 112 aa, Artificial Sequence
  source: /note="Description of Artificial Sequence: Synthetic polypeptide"
EIVLTQSPATLSLSPGERATLSCKSSQSVFYSSNQKNYLAWYQQKPGQAPRLLIYWASTRESGIPARFSGSGSGTDFTLTISSLEPEDFAVYYCHQYLSSLTFGQGTKVEIK

SEQ ID NO: 5547 - protein, 108 aa, Artificial Sequence
  source: /note="Description of Artificial Sequence: Synthetic polypeptide"
EIVLTQSPATLSLSPGERATLSCRASENIYSFLAWYQQKPGQAPRLLIYNSKTFAEGIPARFSGSGSGTDFTLTISSLEPEDFAVYYCQHHYGTPPWTFGQGTKVEIK

SEQ ID NO: 5548 - protein, 107 aa, Artificial Sequence
  source: /note="Description of Artificial Sequence: Synthetic polypeptide"
EIVLTQSPATLSLSPGERATLSCRASENIYSYLAWYQQKPGQAPRLLIYKAKTLAEGIPARFSGSGSGTDFTLTISSLEPEDFAVYYCQHHYGTPFTFGQGTKVEIK

SEQ ID NO: 5549 - protein, 107 aa, Artificial Sequence
  source: /note="Description of Artificial Sequence: Synthetic polypeptide"
EIVLTQSPATLSLSPGERATLSCRASQSVSRYLAWYQQKPGQAPRLLIYDASNRATGIPARFSGSGSGTDFTLTISSLEPEDFAVYYCQQYIFWPPTFGGGTKVEIK

SEQ ID NO: 5550 - protein, 107 aa, Artificial Sequence
  source: /note="Description of Artificial Sequence: Synthetic polypeptide"
EIVLTQSPATLSLSPGERATLSCRASQSVSSYLAWYQQKPGQAPRLLIYDASKRATGIPARFSGSGSGTDFTLTISSLEPEDFAVYYCQQRASMPITFGGGTKVEIK

SEQ ID NO: 5551 - protein, 107 aa, Artificial Sequence
  source: /note="Description of Artificial Sequence: Synthetic polypeptide"
EIVLTQSPATLSLSPGERATLSCRASQSVSSYLAWYQQKPGQAPRLLIYDASKRATGIPARFSGSGSGTDFTLTISSLEPEDFAVYYCQQRISYPITFGGGTKVEIK

SEQ ID NO: 5552 - protein, 107 aa, Artificial Sequence
  source: /note="Description of Artificial Sequence: Synthetic polypeptide"
EIVLTQSPATLSLSPGERATLSCRASQSVSSYLAWYQQKPGQAPRLLIYDASKRATGIPARFSGSGSGTDFTLTISSLEPEDFAVYYCQQRTSHPITFGGGTKVEIK

SEQ ID NO: 5553 - protein, 107 aa, Artificial Sequence
  source: /note="Description of Artificial Sequence: Synthetic polypeptide"
EIVLTQSPATLSLSPGERATLSCRASQSVSSYLAWYQQKPGQAPRLLIYDASKRATGIPARFSGSGSGTDFTLTISSLEPEDFAVYYCQQRVNLPPTFGGGTKVEIK

SEQ ID NO: 5554 - protein, 107 aa, Artificial Sequence
  source: /note="Description of Artificial Sequence: Synthetic polypeptide"
EIVLTQSPATLSLSPGERATLSCRASQSVSSYLAWYQQKPGQAPRLLIYDASKRATGIPARFSGSGSGTDFTLTISSLEPEDFAVYYCQQRYLRPITFGGGTKVEIK

SEQ ID NO: 5555 - protein, 107 aa, Artificial Sequence
  source: /note="Description of Artificial Sequence: Synthetic polypeptide"
EIVLTQSPATLSLSPGERATLSCRASQSVSSYLAWYQQKPGQAPRLLIYDASKRATGIPARFSGSGSGTDFTLTISSLEPEDFAVYYCQQSSVHPYTFGGGTKVEIK

SEQ ID NO: 5556 - protein, 107 aa, Artificial Sequence
  source: /note="Description of Artificial Sequence: Synthetic polypeptide"
EIVLTQSPATLSLSPGERATLSCRASQSVSSYLAWYQQKPGQAPRLLIYDASKRATGIPARFSGSGSGTDFTLTISSLEPEDFAVYYCQQVSLFPLTFGGGTKVEIK

SEQ ID NO: 5557 - protein, 107 aa, Artificial Sequence
  source: /note="Description of Artificial Sequence: Synthetic polypeptide"
EIVLTQSPATLSLSPGERATLSCRASQSVSSYLAWYQQKPGQAPRLLIYDASNRATGIPARFSGSGSGTDFTLTISSLEPEDFAVYYCQQADNWPFTFGGGTKVEIK

SEQ ID NO: 5558 - protein, 107 aa, Artificial Sequence
  source: /note="Description of Artificial Sequence: Synthetic polypeptide"
EIVLTQSPATLSLSPGERATLSCRASQSVSSYLAWYQQKPGQAPRLLIYDASNRATGIPARFSGSGSGTDFTLTISSLEPEDFAVYYCQQDSSFPPTFGGGTKVEIK

SEQ ID NO: 5559 - protein, 107 aa, Artificial Sequence
  source: /note="Description of Artificial Sequence: Synthetic polypeptide"
EIVLTQSPATLSLSPGERATLSCRASQSVSSYLAWYQQKPGQAPRLLIYDASNRATGIPARFSGSGSGTDFTLTISSLEPEDFAVYYCQQDYSWPYTFGGGTKVEIK

SEQ ID NO: 5560 - protein, 107 aa, Artificial Sequence
  source: /note="Description of Artificial Sequence: Synthetic polypeptide"
EIVLTQSPATLSLSPGERATLSCRASQSVSSYLAWYQQKPGQAPRLLIYDASNRATGIPARFSGSGSGTDFTLTISSLEPEDFAVYYCQQEFDLPFTFGGGTKVEIK

SEQ ID NO: 5561 - protein, 107 aa, Artificial Sequence
  source: /note="Description of Artificial Sequence: Synthetic polypeptide"
EIVLTQSPATLSLSPGERATLSCRASQSVSSYLAWYQQKPGQAPRLLIYDASNRATGIPARFSGSGSGTDFTLTISSLEPEDFAVYYCQQFSYWPWTFGGGTKVEIK

SEQ ID NO: 5562 - protein, 107 aa, Artificial Sequence
  source: /note="Description of Artificial Sequence: Synthetic polypeptide"
EIVLTQSPATLSLSPGERATLSCRASQSVSSYLAWYQQKPGQAPRLLIYDASNRATGIPARFSGSGSGTDFTLTISSLEPEDFAVYYCQQIDFLPYTFGGGTKVEIK

SEQ ID NO: 5563 - protein, 106 aa, Artificial Sequence
  source: /note="Description of Artificial Sequence: Synthetic polypeptide"
EIVLTQSPATLSLSPGERATLSCRASQSVSSYLAWYQQKPGQAPRLLIYDASNRATGIPARFSGSGSGTDFTLTISSLEPEDFAVYYCQQLFDWPTFGGGTKVEIK

SEQ ID NO: 5564 - protein, 107 aa, Artificial Sequence
  source: /note="Description of Artificial Sequence: Synthetic polypeptide"
EIVLTQSPATLSLSPGERATLSCRASQSVSSYLAWYQQKPGQAPRLLIYDASNRATGIPARFSGSGSGTDFTLTISSLEPEDFAVYYCQQLSTYPLTFGGGTKVEIK

SEQ ID NO: 5565 - protein, 107 aa, Artificial Sequence
  source: /note="Description of Artificial Sequence: Synthetic polypeptide"
EIVLTQSPATLSLSPGERATLSCRASQSVSSYLAWYQQKPGQAPRLLIYDASNRATGIPARFSGSGSGTDFTLTISSLEPEDFAVYYCQQRAAYPITFGGGTKVEIK

SEQ ID NO: 5566 - protein, 107 aa, Artificial Sequence
  source: /note="Description of Artificial Sequence: Synthetic polypeptide"
EIVLTQSPATLSLSPGERATLSCRASQSVSSYLAWYQQKPGQAPRLLIYDASNRATGIPARFSGSGSGTDFTLTISSLEPEDFAVYYCQQRADYPITFGGGTKVEIK

SEQ ID NO: 5567 - protein, 106 aa, Artificial Sequence
  source: /note="Description of Artificial Sequence: Synthetic polypeptide"
EIVLTQSPATLSLSPGERATLSCRASQSVSSYLAWYQQKPGQAPRLLIYDASNRATGIPARFSGSGSGTDFTLTISSLEPEDFAVYYCQQRAFLFTFGGGTKVEIK

SEQ ID NO: 5568 - protein, 107 aa, Artificial Sequence
  source: /note="Description of Artificial Sequence: Synthetic polypeptide"
EIVLTQSPATLSLSPGERATLSCRASQSVSSYLAWYQQKPGQAPRLLIYDASNRATGIPARFSGSGSGTDFTLTISSLEPEDFAVYYCQQRANYPITFGGGTKVEIK

SEQ ID NO: 5569 - protein, 107 aa, Artificial Sequence
  source: /note="Description of Artificial Sequence: Synthetic polypeptide"
EIVLTQSPATLSLSPGERATLSCRASQSVSSYLAWYQQKPGQAPRLLIYDASNRATGIPARFSGSGSGTDFTLTISSLEPEDFAVYYCQQRSHFPITFGGGTKVEIK

SEQ ID NO: 5570 - protein, 107 aa, Artificial Sequence
  source: /note="Description of Artificial Sequence: Synthetic polypeptide"
EIVLTQSPATLSLSPGERATLSCRASQSVSSYLAWYQQKPGQAPRLLIYDASNRATGIPARFSGSGSGTDFTLTISSLEPEDFAVYYCQQRSTFPITFGGGTKVEIK

SEQ ID NO: 5571 - protein, 107 aa, Artificial Sequence
  source: /note="Description of Artificial Sequence: Synthetic polypeptide"
EIVLTQSPATLSLSPGERATLSCRASQSVSSYLAWYQQKPGQAPRLLIYDASNRATGIPARFSGSGSGTDFTLTISSLEPEDFAVYYCQQRSVYPITFGGGTKVEIK

SEQ ID NO: 5572 - protein, 107 aa, Artificial Sequence
  source: /note="Description of Artificial Sequence: Synthetic polypeptide"
EIVLTQSPATLSLSPGERATLSCRASQSVSSYLAWYQQKPGQAPRLLIYDASNRATGIPARFSGSGSGTDFTLTISSLEPEDFAVYYCQQSSNWPWTFGGGTKVEIK

SEQ ID NO: 5573 - protein, 107 aa, Artificial Sequence
  source: /note="Description of Artificial Sequence: Synthetic polypeptide"
EIVLTQSPATLSLSPGERATLSCRASQSVSSYLAWYQQKPGQAPRLLIYDASNRATGIPARFSGSGSGTDFTLTISSLEPEDFAVYYCQQVSNYPFTFGGGTKVEIK

SEQ ID NO: 5574 - protein, 107 aa, Artificial Sequence
  source: /note="Description of Artificial Sequence: Synthetic polypeptide"
EIVLTQSPATLSLSPGERATLSCRASQSVSSYLAWYQQKPGQAPRLLIYDASNRATGIPARFSGSGSGTDFTLTISSLEPEDFAVYYCQQVSNYPITFGGGTKVEIK

SEQ ID NO: 5575 - protein, 107 aa, Artificial Sequence
  source: /note="Description of Artificial Sequence: Synthetic polypeptide"
EIVLTQSPATLSLSPGERATLSCRASQSVSSYLAWYQQKPGQAPRLLIYDASNRATGIPARFSGSGSGTDFTLTISSLEPEDFAVYYCQQYNNFPPTFGGGTKVEIK

SEQ ID NO: 5576 - protein, 107 aa, Artificial Sequence
  source: /note="Description of Artificial Sequence: Synthetic polypeptide"
EIVLTQSPATLSLSPGERATLSCRASQSVSSYLAWYQQKPGQAPRLLIYDASNRATGIPARFSGSGSGTDFTLTISSLEPEDFAVYYCQQYSFFPPTFGGGTKVEIK

SEQ ID NO: 5577 - protein, 107 aa, Artificial Sequence
  source: /note="Description of Artificial Sequence: Synthetic polypeptide"
EIVLTQSPATLSLSPGERATLSCRASQSVSSYLAWYQQKPGQAPRLLIYDASNRATGIPARFSGSGSGTDFTLTISSLEPEDFAVYYCQQYVNWPFTFGGGTKVEIK

SEQ ID NO: 5578 - protein, 107 aa, Artificial Sequence
  source: /note="Description of Artificial Sequence: Synthetic polypeptide"
EIVLTQSPATLSLSPGERATLSCRASQSVSSYLAWYQQKPGQAPRLLIYDASNRATGIPARFSGSGSGTDFTLTISSLEPEDFTVYYCQQRYALPITFGGGTKVEIK

SEQ ID NO: 5579 - protein, 107 aa, Artificial Sequence
  source: /note="Description of Artificial Sequence: Synthetic polypeptide"
EIVLTQSPATLSLSPGERATLSCRASQSVSSYLAWYQQKPGQAPRLLIYDSSNRATGIPARFSGSGSGTDFTLTISSLEPEDFAVYYCQQAFNRPPTFGGGTKVEIK

SEQ ID NO: 5580 - protein, 107 aa, Artificial Sequence
  source: /note="Description of Artificial Sequence: Synthetic polypeptide"
EIVLTQSPATLSLSPGERATLSCRASQSVSSYLAWYQQKPGQAPRLLIYDSSNRATGIPARFSGSGSGTDFTLTISSLEPEDFAVYYCQQRSNYPITFGGGTKVEIK

SEQ ID NO: 5581 - protein, 112 aa, Artificial Sequence
  source: /note="Description of Artificial Sequence: Synthetic polypeptide"
EIVLTQSPATLSLSPGERATLSCRFSQSLVHSNGNTYLHWYQQKPGQAPRLLIYKVSNRFSGIPARFSGSGSGTDFTLTISSLEPEDFAVYYCSQSTRVPPTFGQGTKVEIK

SEQ ID NO: 5582 - protein, 112 aa, Artificial Sequence
  source: /note="Description of Artificial Sequence: Synthetic polypeptide"
EIVLTQSPATLSLSPGERATLSCRSSQSLVHSNGNTYLHWYQQKPGQAPRLLIYKVSNRFSGIPARFSGSGSGTDFTLTISSLEPEDFAVYYCSQSTHVPLTFGQGTKVEIK

SEQ ID NO: 5583 - protein, 112 aa, Artificial Sequence
  source: /note="Description of Artificial Sequence: Synthetic polypeptide"
EIVLTQSPATLSLSPGERATLSCRSSQSLVHSNGNTYLHWYQQKPGQAPRLLIYKVSNRFSGIPARFSGSGSGTDFTLTISSLEPEDFAVYYCSQSTHVPPTFGQGTKVEIK

SEQ ID NO: 5584 - protein, 112 aa, Artificial Sequence
  source: /note="Description of Artificial Sequence: Synthetic polypeptide"
EIVLTQSPATLSLSPGERATLSCRSSQSLVHSNGYTYLHWYQQKPGQAPRLLIYKVSNRFSGIPARFSGSGSGTDFTLTISSLEPEDFAVYYCSQSTRVPYTFGQGTKVEIK

SEQ ID NO: 5585 - protein, 112 aa, Artificial Sequence
  source: /note="Description of Artificial Sequence: Synthetic polypeptide"
EIVLTQSPATLSLSPGERATLSCRSSQTIIHSNGNTYLEWYQQKPGQAPRLLIYKVSNRFCGIPARFSGSGSGTDFTLTISSLEPEDFAVYYCFQGSHVPYTFGQGTKVEIK

SEQ ID NO: 5586 - protein, 112 aa, Artificial Sequence
  source: /note="Description of Artificial Sequence: Synthetic polypeptide"
EIVLTQSPATLSLSPGERATLSCRSSQTIIHSNGNTYLEWYQQKPGQAPRLLIYKVSNRFSGIPARFSGSGSGTDFTLTISSLEPEDFAVYYCFQGSHVPYTFGQGTKVEIK

SEQ ID NO: 5587 - protein, 107 aa, Artificial Sequence
  source: /note="Description of Artificial Sequence: Synthetic polypeptide"
EIVLTQSPATLSLSPGERATLSCRTSENVYSNLAWYQQKPGQAPRLLIYAATNLADGIPARFSGSGSGTDFTLTISSLEPEDFAVYYCHHFWGTPYTFGQGTKVEIK

SEQ ID NO: 5588 - protein, 106 aa, Artificial Sequence
  source: /note="Description of Artificial Sequence: Synthetic polypeptide"
EIVLTQSPATLSLSPGERATLSCSASSSVSYMYWYQQKPGQAPRLLIYLTSILASGIPARFSGSGSGTDFTLTISSLEPEDFAVYYCQQWSFNPYTFGQGTKVEIK

SEQ ID NO: 5589 - protein, 107 aa, Artificial Sequence
  source: /note="Description of Artificial Sequence: Synthetic polypeptide"
EIVLTQSPATLSVSPGERATLSCRASQSVGSNLAWYQQKPGQAPRLLIYGASTRATGIPARFSGSGSGTEFTLTISSLQSEDFAVYYCQQYFFYPPTFGGGTKVEIK

SEQ ID NO: 5590 - protein, 105 aa, Artificial Sequence
  source: /note="Description of Artificial Sequence: Synthetic polypeptide"
EIVLTQSPGTLSLSPGERATLSCKASSNVNYMSWYQQKPGQAPRLLIYFTSNLPSGIPDRFSGSGSGTDFTLTISRLEPEDFAVYYCSGEVTQFTFGQGTKVEIK

SEQ ID NO: 5591 - protein, 112 aa, Artificial Sequence
  source: /note="Description of Artificial Sequence: Synthetic polypeptide"
EIVLTQSPGTLSLSPGERATLSCKSSQSLLDSDGKTYLNWYQQKPGQAPRLLIYLVSKLDSGIPDRFSGSGSGTDFTLTISRLEPEDFAVYYCWQGTHFPYTFGQGTKVEIK

SEQ ID NO: 5592 - protein, 113 aa, Artificial Sequence
  source: /note="Description of Artificial Sequence: Synthetic polypeptide"
EIVLTQSPGTLSLSPGERATLSCKSSQSLLNSGNQKKYLTWYQQKPGQAPRLLIYWASTRESGIPDRFSGSGSGTDFTLTISRLEPEDFAVYYCQNDYGFPLTFGQGTKVEIK

SEQ ID NO: 5593 - protein, 113 aa, Artificial Sequence
  source: /note="Description of Artificial Sequence: Synthetic polypeptide"
EIVLTQSPGTLSLSPGERATLSCKSSQSLLYSGNQKNFLAWYQQKPGQAPRLLIYWASTRESGIPDRFSGSGSGTDFTLTISRLEPEDFAVYYCQQYYSYPFTFGQGTKVEIK

SEQ ID NO: 5594 - protein, 112 aa, Artificial Sequence
  source: /note="Description of Artificial Sequence: Synthetic polypeptide"
EIVLTQSPGTLSLSPGERATLSCKSSQSLLYSNGKTFLSWYQQKPGQAPRLLIYLVSKLDSGIPDRFSGSGSGTDFTLTISRLEPEDFAVYYCMQGTHFPLTFGQGTKVEIK

SEQ ID NO: 5595 - protein, 113 aa, Artificial Sequence
  source: /note="Description of Artificial Sequence: Synthetic polypeptide"
EIVLTQSPGTLSLSPGERATLSCKSSQSLLYSSDQKNYLAWYQQKPGQAPRLLIYWASTRESGIPDRFSGSGSGTDFTLTISRLEPEDFAVYYCQQYYSYPLTFGQGTKVEIK

SEQ ID NO: 5596 - protein, 113 aa, Artificial Sequence
  source: /note="Description of Artificial Sequence: Synthetic polypeptide"
EIVLTQSPGTLSLSPGERATLSCKSSQSLLYSSNQKNCLAWYQQKPGQAPRLLIYWAFTRESGIPDRFSGSGSGTDFTLTISRLEPEDFAVYYCQQYYSYPLTFGQGTKVEIK

SEQ ID NO: 5597 - protein, 113 aa, Artificial Sequence
  source: /note="Description of Artificial Sequence: Synthetic polypeptide"
EIVLTQSPGTLSLSPGERATLSCKSSQSLLYSSNQKNCLAWYQQKPGQAPRLLIYWASTRESGIPDRFSGSGSGTDFTLTISRLEPEDFAVYYCQQYYSYPLTFGQGTKVEIK

SEQ ID NO: 5598 - protein, 112 aa, Artificial Sequence
  source: /note="Description of Artificial Sequence: Synthetic polypeptide"
EIVLTQSPGTLSLSPGERATLSCKSSQSVFYSSNQKNYLAWYQQKPGQAPRLLIYWASTRESGIPDRFSGSGSGTDFTLTISRLEPEDFAVYYCHQYLSSLTFGQGTKVEIK

SEQ ID NO: 5599 - protein, 108 aa, Artificial Sequence
  source: /note="Description of Artificial Sequence: Synthetic polypeptide"
EIVLTQSPGTLSLSPGERATLSCRASENIYSFLAWYQQKPGQAPRLLIYNSKTFAEGIPDRFSGSGSGTDFTLTISRLEPEDFAVYYCQHHYGTPPWTFGQGTKVEIK

SEQ ID NO: 5600 - protein, 107 aa, Artificial Sequence
  source: /note="Description of Artificial Sequence: Synthetic polypeptide"
EIVLTQSPGTLSLSPGERATLSCRASENIYSYLAWYQQKPGQAPRLLIYKAKTLAEGIPDRFSGSGSGTDFTLTISRLEPEDFAVYYCQHHYGTPFTFGQGTKVEIK

SEQ ID NO: 5601 - protein, 108 aa, Artificial Sequence
  source: /note="Description of Artificial Sequence: Synthetic polypeptide"
EIVLTQSPGTLSLSPGERATLSCRASQSVSSDYLAWYQQKPGQAPRLLIYGASSRATGIPDRFSGSGSGTDFTLTISRLEPEDFAVYYCQQDYSYPWTFGGGTKVEIK

SEQ ID NO: 5602 - protein, 108 aa, Artificial Sequence
  source: /note="Description of Artificial Sequence: Synthetic polypeptide"
EIVLTQSPGTLSLSPGERATLSCRASQSVSSDYLAWYQQKPGQAPRLLIYGASSRATGIPDRFSGSGSGTDFTLTISRLEPEDFAVYYCQQFSSHPFTFGGGTKVEIK

SEQ ID NO: 5603 - protein, 107 aa, Artificial Sequence
  source: /note="Description of Artificial Sequence: Synthetic polypeptide"
EIVLTQSPGTLSLSPGERATLSCRASQSVSSSYLAWYQQKPGQAPRLLIYGASSRATGIPDRFSGSGSGTDFTLTISRLEPEDFAVYYCQQDDRSPTFGGGTKVEIK

SEQ ID NO: 5604 - protein, 108 aa, Artificial Sequence
  source: /note="Description of Artificial Sequence: Synthetic polypeptide"
EIVLTQSPGTLSLSPGERATLSCRASQSVSSSYLAWYQQKPGQAPRLLIYGASSRATGIPDRFSGSGSGTDFTLTISRLEPEDFAVYYCQQHDSSPPTFGGGTKVEIK

SEQ ID NO: 5605 - protein, 107 aa, Artificial Sequence
  source: /note="Description of Artificial Sequence: Synthetic polypeptide"
EIVLTQSPGTLSLSPGERATLSCRASQSVSSSYLAWYQQKPGQAPRLLIYGASSRATGIPDRFSGSGSGTDFTLTISRLEPEDFAVYYCQQPGAVPTFGGGTKVEIK

SEQ ID NO: 5606 - protein, 108 aa, Artificial Sequence
  source: /note="Description of Artificial Sequence: Synthetic polypeptide"
EIVLTQSPGTLSLSPGERATLSCRASQSVSSSYLAWYQQKPGQAPRLLIYGASSRATGIPDRFSGSGSGTDFTLTISRLEPEDFAVYYCQQYAGSPFTFGGGTKVEIK

SEQ ID NO: 5607 - protein, 108 aa, Artificial Sequence
  source: /note="Description of Artificial Sequence: Synthetic polypeptide"
EIVLTQSPGTLSLSPGERATLSCRASQSVSSSYLAWYQQKPGQAPRLLIYGASSRATGIPDRFSGSGSGTDFTLTISRLEPEDFAVYYCQQYASPPITFGGGTKVEIK

SEQ ID NO: 5608 - protein, 108 aa, Artificial Sequence
  source: /note="Description of Artificial Sequence: Synthetic polypeptide"
EIVLTQSPGTLSLSPGERATLSCRASQSVSSSYLAWYQQKPGQAPRLLIYGASSRATGIPDRFSGSGSGTDFTLTISRLEPEDFAVYYCQQYVNSPFTFGGGTKVEIK

SEQ ID NO: 5609 - protein, 107 aa, Artificial Sequence
  source: /note="Description of Artificial Sequence: Synthetic polypeptide"
EIVLTQSPGTLSLSPGERATLSCRASQSVSSYLAWYQQKPGQAPRLLIYDASNRATGIPARFSGSGSGTDFTLTISSLEPEDFAVYYCQQRILYPITFGGGTKVEIK

SEQ ID NO: 5610 - protein, 107 aa, Artificial Sequence
  source: /note="Description of Artificial Sequence: Synthetic polypeptide"
EIVLTQSPGTLSLSPGERATLSCRASQSVSSYLAWYQQKPGQAPRLLIYDASNRATGIPARFSGSGSGTDFTLTISSLEPEDFAVYYCQQRSAYPITFGGGTKVEIK

SEQ ID NO: 5611 - protein, 112 aa, Artificial Sequence
  source: /note="Description of Artificial Sequence: Synthetic polypeptide"
EIVLTQSPGTLSLSPGERATLSCRFSQSLVHSNGNTYLHWYQQKPGQAPRLLIYKVSNRFSGIPDRFSGSGSGTDFTLTISRLEPEDFAVYYCSQSTRVPPTFGQGTKVEIK

SEQ ID NO: 5612 - protein, 112 aa, Artificial Sequence
  source: /note="Description of Artificial Sequence: Synthetic polypeptide"
EIVLTQSPGTLSLSPGERATLSCRSSQSLVHSNGNTYLHWYQQKPGQAPRLLIYKVSNRFSGIPDRFSGSGSGTDFTLTISRLEPEDFAVYYCSQSTHVPLTFGQGTKVEIK

SEQ ID NO: 5613 - protein, 112 aa, Artificial Sequence
  source: /note="Description of Artificial Sequence: Synthetic polypeptide"
EIVLTQSPGTLSLSPGERATLSCRSSQSLVHSNGNTYLHWYQQKPGQAPRLLIYKVSNRFSGIPDRFSGSGSGTDFTLTISRLEPEDFAVYYCSQSTHVPPTFGQGTKVEIK

SEQ ID NO: 5614 - protein, 112 aa, Artificial Sequence
  source: /note="Description of Artificial Sequence: Synthetic polypeptide"
EIVLTQSPGTLSLSPGERATLSCRSSQSLVHSNGYTYLHWYQQKPGQAPRLLIYKVSNRFSGIPDRFSGSGSGTDFTLTISRLEPEDFAVYYCSQSTRVPYTFGQGTKVEIK

SEQ ID NO: 5615 - protein, 112 aa, Artificial Sequence
  source: /note="Description of Artificial Sequence: Synthetic polypeptide"
EIVLTQSPGTLSLSPGERATLSCRSSQTIIHSNGNTYLEWYQQKPGQAPRLLIYKVSNRFCGIPDRFSGSGSGTDFTLTISRLEPEDFAVYYCFQGSHVPYTFGQGTKVEIK

SEQ ID NO: 5616 - protein, 112 aa, Artificial Sequence
  source: /note="Description of Artificial Sequence: Synthetic polypeptide"
EIVLTQSPGTLSLSPGERATLSCRSSQTIIHSNGNTYLEWYQQKPGQAPRLLIYKVSNRFSGIPDRFSGSGSGTDFTLTISRLEPEDFAVYYCFQGSHVPYTFGQGTKVEIK

SEQ ID NO: 5617 - protein, 107 aa, Artificial Sequence
  source: /note="Description of Artificial Sequence: Synthetic polypeptide"
EIVLTQSPGTLSLSPGERATLSCRTSENVYSNLAWYQQKPGQAPRLLIYAATNLADGIPDRFSGSGSGTDFTLTISRLEPEDFAVYYCHHFWGTPYTFGQGTKVEIK

SEQ ID NO: 5618 - protein, 106 aa, Artificial Sequence
  source: /note="Description of Artificial Sequence: Synthetic polypeptide"
EIVLTQSPGTLSLSPGERATLSCSASSSVSYMYWYQQKPGQAPRLLIYLTSILASGIPDRFSGSGSGTDFTLTISRLEPEDFAVYYCQQWSFNPYTFGQGTKVEIK

SEQ ID NO: 5619 - protein, 107 aa, Artificial Sequence
  source: /note="Description of Artificial Sequence: Synthetic polypeptide"
EIVMTQSPATLSLSPGERATLSCRASQSVSSYLAWYQQKPGQAPRLLIYDASNRATGIPARFSGSGSGTDFTLTISSLEPEDFAVYYCQQRSVYPITFGGGTKVEIK

SEQ ID NO: 5620 - protein, 106 aa, Artificial Sequence
  source: /note="Description of Artificial Sequence: Synthetic polypeptide"
EIVMTQSPATLSLSPGERATLSCRASQSVSSYLAWYQQKPGQAPRLLIYDSSNRATGIPARFSGSGSGTDFTLTISSLEPEDFAVYYCQQLVHWPTFGGGTKVEIK

SEQ ID NO: 5621 - protein, 105 aa, Artificial Sequence
  source: /note="Description of Artificial Sequence: Synthetic polypeptide"
EIVMTQSPATLSVSPGERATLSCKASSNVNYMSWYQQKPGQAPRLLIYFTSNLPSGIPARFSGSGSGTEFTLTISSLQSEDFAVYYCSGEVTQFTFGQGTKVEIK

SEQ ID NO: 5622 - protein, 112 aa, Artificial Sequence
  source: /note="Description of Artificial Sequence: Synthetic polypeptide"
EIVMTQSPATLSVSPGERATLSCKSSQSLLDSDGKTYLNWYQQKPGQAPRLLIYLVSKLDSGIPARFSGSGSGTEFTLTISSLQSEDFAVYYCWQGTHFPYTFGQGTKVEIK

SEQ ID NO: 5623 - protein, 113 aa, Artificial Sequence
  source: /note="Description of Artificial Sequence: Synthetic polypeptide"
EIVMTQSPATLSVSPGERATLSCKSSQSLLNSGNQKKYLTWYQQKPGQAPRLLIYWASTRESGIPARFSGSGSGTEFTLTISSLQSEDFAVYYCQNDYGFPLTFGQGTKVEIK

SEQ ID NO: 5624 - protein, 113 aa, Artificial Sequence
  source: /note="Description of Artificial Sequence: Synthetic polypeptide"
EIVMTQSPATLSVSPGERATLSCKSSQSLLYSGNQKNFLAWYQQKPGQAPRLLIYWASTRESGIPARFSGSGSGTEFTLTISSLQSEDFAVYYCQQYYSYPFTFGQGTKVEIK

SEQ ID NO: 5625 - protein, 112 aa, Artificial Sequence
  source: /note="Description of Artificial Sequence: Synthetic polypeptide"
EIVMTQSPATLSVSPGERATLSCKSSQSLLYSNGKTFLSWYQQKPGQAPRLLIYLVSKLDSGIPARFSGSGSGTEFTLTISSLQSEDFAVYYCMQGTHFPLTFGQGTKVEIK

SEQ ID NO: 5626 - protein, 113 aa, Artificial Sequence
  source: /note="Description of Artificial Sequence: Synthetic polypeptide"
EIVMTQSPATLSVSPGERATLSCKSSQSLLYSSDQKNYLAWYQQKPGQAPRLLIYWASTRESGIPARFSGSGSGTEFTLTISSLQSEDFAVYYCQQYYSYPLTFGQGTKVEIK

SEQ ID NO: 5627 - protein, 113 aa, Artificial Sequence
  source: /note="Description of Artificial Sequence: Synthetic polypeptide"
EIVMTQSPATLSVSPGERATLSCKSSQSLLYSSNQKNCLAWYQQKPGQAPRLLIYWAFTRESGIPARFSGSGSGTEFTLTISSLQSEDFAVYYCQQYYSYPLTFGQGTKVEIK

SEQ ID NO: 5628 - protein, 113 aa, Artificial Sequence
  source: /note="Description of Artificial Sequence: Synthetic polypeptide"
EIVMTQSPATLSVSPGERATLSCKSSQSLLYSSNQKNCLAWYQQKPGQAPRLLIYWASTRESGIPARFSGSGSGTEFTLTISSLQSEDFAVYYCQQYYSYPLTFGQGTKVEIK

SEQ ID NO: 5629 - protein, 112 aa, Artificial Sequence
  source: /note="Description of Artificial Sequence: Synthetic polypeptide"
EIVMTQSPATLSVSPGERATLSCKSSQSVFYSSNQKNYLAWYQQKPGQAPRLLIYWASTRESGIPARFSGSGSGTEFTLTISSLQSEDFAVYYCHQYLSSLTFGQGTKVEIK

SEQ ID NO: 5630 - protein, 108 aa, Artificial Sequence
  source: /note="Description of Artificial Sequence: Synthetic polypeptide"
EIVMTQSPATLSVSPGERATLSCRASENIYSFLAWYQQKPGQAPRLLIYNSKTFAEGIPARFSGSGSGTEFTLTISSLQSEDFAVYYCQHHYGTPPWTFGQGTKVEIK

SEQ ID NO: 5631 - protein, 107 aa, Artificial Sequence
  source: /note="Description of Artificial Sequence: Synthetic polypeptide"
EIVMTQSPATLSVSPGERATLSCRASENIYSYLAWYQQKPGQAPRLLIYKAKTLAEGIPARFSGSGSGTEFTLTISSLQSEDFAVYYCQHHYGTPFTFGQGTKVEIK

SEQ ID NO: 5632 - protein, 106 aa, Artificial Sequence
  source: /note="Description of Artificial Sequence: Synthetic polypeptide"
EIVMTQSPATLSVSPGERATLSCRASQSVSSNLAWYQQKPGQAPRLLIYGASTRATGIPARFSGSGSGTEFTLTISSLQSEDFAVYYCQQDDDGYTFGGGTKVEIK

SEQ ID NO: 5633 - protein, 107 aa, Artificial Sequence
  source: /note="Description of Artificial Sequence: Synthetic polypeptide"
EIVMTQSPATLSVSPGERATLSCRASQSVSSNLAWYQQKPGQAPRLLIYGASTRATGIPARFSGSGSGTEFTLTISSLQSEDFAVYYCQQDDNYPYTFGGGTKVEIK

SEQ ID NO: 5634 - protein, 106 aa, Artificial Sequence
  source: /note="Description of Artificial Sequence: Synthetic polypeptide"
EIVMTQSPATLSVSPGERATLSCRASQSVSSNLAWYQQKPGQAPRLLIYGASTRATGIPARFSGSGSGTEFTLTISSLQSEDFAVYYCQQLDDWFTFGGGTKVEIK

SEQ ID NO: 5635 - protein, 107 aa, Artificial Sequence
  source: /note="Description of Artificial Sequence: Synthetic polypeptide"
EIVMTQSPATLSVSPGERATLSCRASQSVSSNLAWYQQKPGQAPRLLIYGASTRATGIPARFSGSGSGTEFTLTISSLQSEDFAVYYCQQLPYWPPTFGGGTKVEIK

SEQ ID NO: 5636 - protein, 107 aa, Artificial Sequence
  source: /note="Description of Artificial Sequence: Synthetic polypeptide"
EIVMTQSPATLSVSPGERATLSCRASQSVSSNLAWYQQKPGQAPRLLIYGASTRATGIPARFSGSGSGTEFTLTISSLQSEDFAVYYCQQVNSLPPTFGGGTKVEIK

SEQ ID NO: 5637 - protein, 107 aa, Artificial Sequence
  source: /note="Description of Artificial Sequence: Synthetic polypeptide"
EIVMTQSPATLSVSPGERATLSCRASQSVSSNLAWYQQKPGQAPRLLIYSASTRATGIPARFSGSGSGTEFTLTISSLQSEDFAVYYCQQDHDYPFTFGGGTKVEIK

SEQ ID NO: 5638 - protein, 112 aa, Artificial Sequence
  source: /note="Description of Artificial Sequence: Synthetic polypeptide"
EIVMTQSPATLSVSPGERATLSCRFSQSLVHSNGNTYLHWYQQKPGQAPRLLIYKVSNRFSGIPARFSGSGSGTEFTLTISSLQSEDFAVYYCSQSTRVPPTFGQGTKVEIK

SEQ ID NO: 5639 - protein, 112 aa, Artificial Sequence
  source: /note="Description of Artificial Sequence: Synthetic polypeptide"
EIVMTQSPATLSVSPGERATLSCRSSQSLVHSNGNTYLHWYQQKPGQAPRLLIYKVSNRFSGIPARFSGSGSGTEFTLTISSLQSEDFAVYYCSQSTHVPLTFGQGTKVEIK

SEQ ID NO: 5640 - protein, 112 aa, Artificial Sequence
  source: /note="Description of Artificial Sequence: Synthetic polypeptide"
EIVMTQSPATLSVSPGERATLSCRSSQSLVHSNGNTYLHWYQQKPGQAPRLLIYKVSNRFSGIPARFSGSGSGTEFTLTISSLQSEDFAVYYCSQSTHVPPTFGQGTKVEIK

SEQ ID NO: 5641 - protein, 112 aa, Artificial Sequence
  source: /note="Description of Artificial Sequence: Synthetic polypeptide"
EIVMTQSPATLSVSPGERATLSCRSSQSLVHSNGYTYLHWYQQKPGQAPRLLIYKVSNRFSGIPARFSGSGSGTEFTLTISSLQSEDFAVYYCSQSTRVPYTFGQGTKVEIK

SEQ ID NO: 5642 - protein, 112 aa, Artificial Sequence
  source: /note="Description of Artificial Sequence: Synthetic polypeptide"
EIVMTQSPATLSVSPGERATLSCRSSQTIIHSNGNTYLEWYQQKPGQAPRLLIYKVSNRFCGIPARFSGSGSGTEFTLTISSLQSEDFAVYYCFQGSHVPYTFGQGTKVEIK

SEQ ID NO: 5643 - protein, 112 aa, Artificial Sequence
  source: /note="Description of Artificial Sequence: Synthetic polypeptide"
EIVMTQSPATLSVSPGERATLSCRSSQTIIHSNGNTYLEWYQQKPGQAPRLLIYKVSNRFSGIPARFSGSGSGTEFTLTISSLQSEDFAVYYCFQGSHVPYTFGQGTKVEIK

SEQ ID NO: 5644 - protein, 107 aa, Artificial Sequence
  source: /note="Description of Artificial Sequence: Synthetic polypeptide"
EIVMTQSPATLSVSPGERATLSCRTSENVYSNLAWYQQKPGQAPRLLIYAATNLADGIPARFSGSGSGTEFTLTISSLQSEDFAVYYCHHFWGTPYTFGQGTKVEIK

SEQ ID NO: 5645 - protein, 106 aa, Artificial Sequence
  source: /note="Description of Artificial Sequence: Synthetic polypeptide"
EIVMTQSPATLSVSPGERATLSCSASSSVSYMYWYQQKPGQAPRLLIYLTSILASGIPARFSGSGSGTEFTLTISSLQSEDFAVYYCQQWSFNPYTFGQGTKVEIK

SEQ ID NO: 5646 - protein, 108 aa, Artificial Sequence
  source: /note="Description of Artificial Sequence: Synthetic polypeptide"
EIVMTQSPGTLSLSPGERATLSCRASQSVSSSYLAWYQQKPGQAPRLLIYGASNRATGIPDRFSGSGSGTDFTLTISRLEPEDFAVYYCQQAGSHPFTFGGGTKVEIK

SEQ ID NO: 5647 - protein, 108 aa, Artificial Sequence
  source: /note="Description of Artificial Sequence: Synthetic polypeptide"
EIVMTQSPGTLSLSPGERATLSCRASQSVSSSYLAWYQQKPGQAPRLLIYGASNRATGIPDRFSGSGSGTDFTLTISRLEPEDFAVYYCQQDDSAPYTFGGGTKVEIK

SEQ ID NO: 5648 - protein, 108 aa, Artificial Sequence
  source: /note="Description of Artificial Sequence: Synthetic polypeptide"
EIVMTQSPGTLSLSPGERATLSCRASQSVSSSYLAWYQQKPGQAPRLLIYGASSRATGIPDRFSGSGSGTDFTLTISRLEPEDFAVYYCQQDDRSPYTFGGGTKVEIK

SEQ ID NO: 5649 - protein, 108 aa, Artificial Sequence
  source: /note="Description of Artificial Sequence: Synthetic polypeptide"
EIVMTQSPGTLSLSPGERATLSCRASQSVSSSYLAWYQQKPGQAPRLLIYGASSRATGIPDRFSGSGSGTDFTLTISRLEPEDFAVYYCQQYFSSPFTFGGGTKVEIK

SEQ ID NO: 5650 - protein, 112 aa, Artificial Sequence
  source: /note="Description of Artificial Sequence: Synthetic polypeptide"
GVVMAQTPLSLSVTPGQPASISCRTSQSLVHSNGYTYLHWYLQKPGQSPQLLIYKVSNRVSGVPDRFSGSGSGTDFTLKISRVEAEDVGVYYCSQSTRVPYTFGQGTKLEIK

SEQ ID NO: 5651 - protein, 112 aa, Artificial Sequence
  source: /note="Description of Artificial Sequence: Synthetic polypeptide"
GVVMTQTPLSLSVTPGQPASISCRSSQSLIHSNGYTYLHWYLQKPGQSPQLLIYKVSNRRSGVPDRFSGSGSGTDFTLKISRVEAEDVGVYYCSQSTRVPYTFGQGTKLEIK

SEQ ID NO: 5652 - protein, 112 aa, Artificial Sequence
  source: /note="Description of Artificial Sequence: Synthetic polypeptide"
GVVMTQTPLSLSVTPGQPASISCRSSQSLVHSNGYTYLHWYLQKPGQSPQLLIYKVSNRRSGVPDRFSGSGSGTDFTLKISRVEAEDVGVYYCSQSTRVPYTFGQGTKLEIK

SEQ ID NO: 5653 - protein, 112 aa, Artificial Sequence
  source: /note="Description of Artificial Sequence: Synthetic polypeptide"
GVVMTQTPLSLSVTPGQPASISCRSSQSLVHSNQYTYLHWYLQKPGQSPQLLIYKVSNRRSGVPDRFSGSGSGTDFTLKISRVEAEDVGVYYCSQSTRVPYTFGQGTKLEIK

SEQ ID NO: 5654 - protein, 112 aa, Artificial Sequence
  source: /note="Description of Artificial Sequence: Synthetic polypeptide"
GVVMTQTPLSLSVTPGQPASISCRSSQSLVHSNRYTYLHWYLQKPGQSPQLLIYKVSNRRSGVPDRFSGSGSGTDFTLKISRVEAEDVGVYYCSQSTRVPYTFGQGTKLEIK

SEQ ID NO: 5655 - protein, 112 aa, Artificial Sequence
  source: /note="Description of Artificial Sequence: Synthetic polypeptide"
GVVMTQTPLSLSVTPGQPASISCRSSRSLVHSNGYTYLHWYLQKPGQSPQLLIYKVSNRFSGVPDRFSGSGSGTDFTLKISRVEAEDVGVYYCSQSTRVPYTFGQGTKLEIK

SEQ ID NO: 5656 - protein, 112 aa, Artificial Sequence
  source: /note="Description of Artificial Sequence: Synthetic polypeptide"
GVVMTQTPLSLSVTPGQPASISCRSSRSLVHSNGYTYLHWYLQKPGQSPQLLIYKVSNRRSGVPDRFSGSGSGTDFTLKISRVEAEDVGVYYCSQSTRVPYTFGQGTKLEIK

SEQ ID NO: 5657 - protein, 112 aa, Artificial Sequence
  source: /note="Description of Artificial Sequence: Synthetic polypeptide"
GVVMTQTPLSLSVTPGQPASISCRSSRSLVHSNGYTYLHWYLQKPGQSPQLLIYKVSNRVSGVPDRFSGSGSGTDFTLKISRVEAEDVGVYYCSQSTRVPYTFGQGTKLEIK

SEQ ID NO: 5658 - protein, 112 aa, Artificial Sequence
  source: /note="Description of Artificial Sequence: Synthetic polypeptide"
GVVMTQTPLSLSVTPGQPASISCRSSRSLVHSNQYTYLHWYLQKPGQSPQLLIYKVSNRRSGVPDRFSGSGSGTDFTLKISRVEAEDVGVYYCSQSTRVPYTFGQGTKLEIK

SEQ ID NO: 5659 - protein, 112 aa, Artificial Sequence
  source: /note="Description of Artificial Sequence: Synthetic polypeptide"
GVVMTQTPLSLSVTPGQPASISCRSSRSLVHSNRYTYLHWYLQKPGQSPQLLIYKVSNRRSGVPDRFSGSGSGTDFTLKISRVEAEDVGVYYCSQSTRVPYTFGQGTKLEIK

SEQ ID NO: 5660 - protein, 112 aa, Artificial Sequence
  source: /note="Description of Artificial Sequence: Synthetic polypeptide"
GVVMTQTPLSLSVTPGQPASISCRSSSSLVHSNGYTYLHWYLQKPGQSPQLLIYKVSNRKSGVPDRFSGSGSGTDFTLKISRVEAEDVGVYYCSQSTRVPYTFGQGTKLEIK

SEQ ID NO: 5661 - protein, 112 aa, Artificial Sequence
  source: /note="Description of Artificial Sequence: Synthetic polypeptide"
GVVMTQTPLSLSVTPGQPASISCRTSQSLVHSNGYTYLHWYLQKPGQSPQLLIYKVSNRVSGVPDRFSGSGSGTDFTLKISRVEAEDVGVYYCSQSTRVPYTFGQGTKLEIK

SEQ ID NO: 5662 - protein, 112 aa, Artificial Sequence
  source: /note="Description of Artificial Sequence: Synthetic polypeptide"
GVVMTQTPLSLSVTPGQPASISCRTSQSLVHSNQYTYLHWYLQKPGQSPQLLIYKVSNRVSGVPDRFSGSGSGTDFTLKISRVEAEDVGVYYCSQSTRVPYTFGQGTKLEIK

SEQ ID NO: 5663 - protein, 112 aa, Artificial Sequence
  source: /note="Description of Artificial Sequence: Synthetic polypeptide"
GVVMTQTPLSLSVTPGQPASISCRTSRSLVHSNRYTYLHWYLQKPGQSPQLLIYKVSNRRSGVPDRFSGSGSGTDFTLKISRVEAEDVGVYYCSQSTRVPYTFGQGTKLEIK

SEQ ID NO: 5664 - protein, 106 aa, Artificial Sequence
  source: /note="Description of Artificial Sequence: Synthetic polypeptide"
ILLTQSPAILSVSPGERVSFSCRASQSIGTSIHWYQQRTNGSPRLLIKFASESISGIPSRFSGSGSGTDFTLNINSVESEDIADYYCQQTNTWPITFGAGTKLELK

SEQ ID NO: 5665 - protein, 112 aa, Artificial Sequence
  source: /note="Description of Artificial Sequence: Synthetic polypeptide"
ITMSQSPSSLAVSVGEKVTMSCKSSQSLLYSSDQKNYLAWYQQKPGQSPKLLIYWASTRESGVPDRFTGSGSGTDFTLTISSVKAEDLAVYCCQQYYSYPLTFGAGTKLELK

SEQ ID NO: 5666 - protein, 107 aa, Artificial Sequence
  source: /note="Description of Artificial Sequence: Synthetic polypeptide"
NIVMTQSPKSMSMSVGERVTLTCKASENVVTYVSWYQQKPEQSPKLLIYGASNRYTGVPDRFTGSGSATDFTLTISSVQAEDLADYHCGQGYSYPYTFGGGTKLEIK

SEQ ID NO: 5667 - protein, 105 aa, Artificial Sequence
  source: /note="Description of Artificial Sequence: Synthetic polypeptide"
NVLTQSPALMSASPGEKVTMTCSASSSVSYMYWYQQKPRSSPKPWIYLTSILASGVPARFSGSGSGTSYSLTISSMEAEDAATYYCQQWSFNPYTFGGGTKLVIK

SEQ ID NO: 5668 - protein, 105 aa, Artificial Sequence
  source: /note="Description of Artificial Sequence: Synthetic polypeptide"
  VARIANT (10)..(10): /replace="Gln"
  VARIANT (12)..(12): /replace="Gln"
  VARIANT (76)..(76): /replace="Gln"
  SITE (1)..(105): /note="Variant residues given in the sequence have no preference with respect to those in the annotations for variant positions"
QMSQSPACLEAEVGESVTITCRASENIYSYLAWYQQKQGKSPKLVVYKAKTLAEGVPSRFSGRGSGTQFFLKINSEQREDFGSYYCQHHYGTPFTFGSGTKLEIK

SEQ ID NO: 5669 - protein, 109 aa, Artificial Sequence
  source: /note="Description of Artificial Sequence: Synthetic polypeptide"
QTQSPSSLAVSAGEKVTLSCKSSQSVFYSSNQKNYLAWYQQKPGQSPKLLISWASTRESGVPDRFTGSGFGTDFTLTISSVQGEDLAVYYCHQYLSSLTFGAGTKLELK

SEQ ID NO: 5670 - protein, 129 aa, Artificial Sequence
  source: /note="Description of Artificial Sequence: Synthetic polypeptide"
QTQVFLSLLLWVSGTCGNIMLTQSPSSLAVSAGEKVTLSCKSSQSVFYSSNQKNYLAWYQQKPGQSPKLLISWASTRESGVPDRFTGSGSGTDFTLTINSVQAEDLAVYYCHQYLSSLTFGAGTKLELK

SEQ ID NO: 5671 - protein, 111 aa, Artificial Sequence
  source: /note="Description of Artificial Sequence: Synthetic polypeptide"
TMSQSPSSLAVSVGEKVTMSCKSSQSLLYSSDQKNYLAWYQQKPGQSPKLLIYWASTRESGVPDRFTGSGSGTDFTLTISSVKAEDLAVYCCQQYYSYPLTFGAGTKLELK

SEQ ID NO: 5672 - protein, 111 aa, Artificial Sequence
  source: /note="Description of Artificial Sequence: Synthetic polypeptide"
TMSQSPSSLAVSVGEKVTMSCKSSQSLLYSSNQKNCLAWYQQKPGQSPKLLIYWAFTRESGVPDRFTGSGSGTDFTLTISSVKAEDLAVYYCQQYYSYPLTFGAGTKLELK

SEQ ID NO: 5673 - protein, 109 aa, Artificial Sequence
  source: /note="Description of Artificial Sequence: Synthetic polypeptide"
TQSPSSLAVSVGEKVTMTCKSSQSLLYSGNQKNFLAWYQQKPGQSPKLLIYWASTRESGVPDRFTGSGSGTDFTLTISTVKAEDLAVYYCQQYYSYPFTFGSGTKLEIK

SEQ ID NO: 5674 - protein, 104 aa, Artificial Sequence
  source: /note="Description of Artificial Sequence: Synthetic polypeptide"
  VARIANT (10)..(10): /replace="Gln"
  SITE (1)..(104): /note="Variant residues given in the sequence have no preference with respect to those in the annotations for variant positions"
VLTQSPAIMEASPGEKVTMTCSASSSVSYMYWYQQKPRSSPKPWIYLTSILASGVPARFSGSGSGTSYSLTISSMEAEDAATYYCQQWSFNPYTFGGGTKLVIK

SEQ ID NO: 5675 - protein, 104 aa, Artificial Sequence
  source: /note="Description of Artificial Sequence: Synthetic polypeptide"
VLTQSPALMSASPGEKVTMTCSASSSVSYMYWYQQKPRSSPKPWIYLTSILASGVPARFSGSGSGTSYSLTINNMEAEDAATYYCQQWSFNPYTFGGGTKLVIK

SEQ ID NO: 5676 - protein, 112 aa, Artificial Sequence
  source: /note="Description of Artificial Sequence: Synthetic polypeptide"
  VARIANT (1)..(1): /replace="Gln"
  VARIANT (4)..(4): /replace="Gln"
  SITE (1)..(112): /note="Variant residues given in the sequence have no preference with respect to those in the annotations for variant positions"
EVVETQTPLSLPVSLGDQASFSCRSSQSLVHSNGNTYLHWFLQKPGQSPKLLIFKVSNRVSGVPDRFSGSGSGTDFTLKISRVEAEDLGVYFCSQSTHVPLTFGAGTKLELK

SEQ ID NO: 5677 - protein, 108 aa, Artificial Sequence
  source: /note="Description of Artificial Sequence: Synthetic polypeptide"
DIQMTQSPSSLSASVGDRVTITCSASQDISNYLNWYQQKPGKAPKVLIYFTSSLHSGVPSRFSGSGSGTDFTLTISSLQPEDFATYYCQQYSTVPWTFGQGTKVEIKR

SEQ ID NO: 5678 - protein, 107 aa, Homo sapiens
DIQMTQSPSSLSASVGDRVTITCQASQDIKTYLSWFQQKPGKPPKLLISDASGFQPGVPSRFSGSGYGTDFSFTITSLRPDDTATYYCQQYEKVPFTFGPGKVGFNR

SEQ ID NO: 5679 - protein, 101 aa, Homo sapiens
DIVMTQSPDSLAVSLGERATINCKSSQSVLYSSNNKNYLAWYQQKPGQPPKLLIYWASTRESGVPDRFSGSGSGTDFTLTISSLQAEDVAVYYCQQYYSTP

SEQ ID NO: 5680 - protein, 107 aa, Artificial Sequence
  source: /note="Description of Artificial Sequence: Synthetic polypeptide"
DIVMTQSPDSLAVSLGERATINCQASQDIKTYLSWYQQKPGQPPKLLIYDASGFQPGVPDRFSGSGYGTDFTFTISSLQAEDVATYYCQQYEKVPYTFGQGTKVEIK

SEQ ID NO: 5681 - protein, 108 aa, Artificial Sequence
  source: /note="Description of Artificial Sequence: Synthetic polypeptide"
  MOD_RES (107)..(108): Any amino acid
DIQMTQSPSSLSASVGDRVTITCKTSQDINKYMAWYQQTPGKAPRLLIHYTSALQPGIPSRFSGSGSGRDYTFTISSLQPEDIATYYCLQYDNLWTFGQGTKVEIKXX

SEQ ID NO: 5682 - protein, 222 aa, Artificial Sequence
  source: /note="Description of Artificial Sequence: Synthetic polypeptide"
  MOD_RES (220)..(222): Any amino acid
DVVMTQSPLSLPVTPGEPASISCRSSQSLAKSYGNTYLSWYLQKPGQSPQLLIYGISNRFSGVPDRFSGSGSGTDFTLKISRVEAEDVGVYYCLQGTHQPYTFGQGTKVEIKRADAAPSVFIFPPSDEQLKSGTASVVCLLNNFYPREAKVQWKVDNALQSGNSQESVTEQDSKDSTYSLSSTLTLSKADYEKHKVYACEVTHQGLSSPVTKSFNRGECXXX

SEQ ID NO: 5683 - protein, 241 aa, Artificial Sequence
  source: /note="Description of Artificial Sequence: Synthetic polypeptide"
  MOD_RES (239)..(241): Any amino acid
MGWSCIILFLVATATGVHSDVVMTQSPLSLPVTPGEPASISCRSSQSLAKSYGNTYLSWYLQKPGQSPQLLIYGISNRFSGVPDRFSGSGSGTDFTLKISRVEAEDVGVYYCLQGTHQPYTFGQGTKVEIKRTVAAPSVFIFPPSDEQLKSGTASVVCLLNNFYPREAKVQWKVDNALQSGNSQESVTEQDSKDSTYSLSSTLTLSKADYEKHKVYACEVTHQGLSSPVTKSFNRGECXXX

SEQ ID NO: 5684 - DNA, 35 bp, Homo sapiens
  modified_base (17)..(18): a, c, g or t
caacattaaagacaccnnsatacactgggtgcgtc

SEQ ID NO: 5685 - DNA, 35 bp, Homo sapiens
  modified_base (16)..(17): a, c, g or t
cagcaacattatactnnscctcccacgttcggaca

SEQ ID NO: 5686 - DNA, 54 bp, Homo sapiens
  modified_base (16)..(17): a, c, g or t
  modified_base (28)..(29): a, c, g or t
  modified_base (34)..(35): a, c, g or t
ccgaaactactgattnnstcggcatccnnsctcnnstctggagtcccttctcgc

SEQ ID NO: 5687 - DNA, 45 bp, Homo sapiens
  modified_base (16)..(17): a, c, g or t
  modified_base (28)..(29): a, c, g or t
ccgaaactactgattnnstcggcatccnnsctctactctggagtc

SEQ ID NO: 5688 - DNA, 36 bp, Homo sapiens
  modified_base (17)..(18): a, c, g or t
cctggaatgggttgcannsatttatcctacgaatgg

SEQ ID NO: 5689 - DNA, 40 bp, Homo sapiens
  modified_base (23)..(24): a, c, g or t
cgcaacttattactgtcagcaannstatactactcctccc

SEQ ID NO: 5690 - DNA, 34 bp, Homo sapiens
  modified_base (17)..(18): a, c, g or t
ctattattgttctagannsggaggggacggcttc

SEQ ID NO: 5691 - DNA, 54 bp, Homo sapiens
  modified_base (17)..(18): a, c, g or t
  modified_base (29)..(30): a, c, g or t
  modified_base (35)..(36): a, c, g or t
ctattattgttctagannsggaggggacnnsttcnnsgctatggactactgggg

SEQ ID NO: 5692 - DNA, 38 bp, Homo sapiens
  modified_base (18)..(19): a, c, g or t
  modified_base (21)..(22): a, c, g or t
cttattactgtcagcaannsnnsactactcctcccacg

SEQ ID NO: 5693 - DNA, 33 bp, Homo sapiens
  modified_base (16)..(17): a, c, g or t
gccagtcaggatgtgnnsactgctgtagcctgg

SEQ ID NO: 5694 - DNA, 81 bp, Homo sapiens
  modified_base (41)..(42): a, c, g or t
  modified_base (44)..(45): a, c, g or t
  modified_base (47)..(48): a, c, g or t
  modified_base (50)..(51): a, c, g or t
  modified_base (53)..(54): a, c, g or t
gcgtgctgaggacactgccgtctattattgttctagatggnnsnnsnnsnnsnnstatgctatggactactggggtcaagg

SEQ ID NO: 5695 - DNA, 62 bp, Homo sapiens
  modified_base (20)..(21): a, c, g or t
  modified_base (41)..(42): a, c, g or t
  modified_base (47)..(48): a, c, g or t
gggcctggaatgggttgcannsatttatcctacgaatggtnnsactnnstatgccgatagcg

SEQ ID NO: 5696 - DNA, 47 bp, Homo sapiens
  modified_base (15)..(16): a, c, g or t
  modified_base (30)..(31): a, c, g or t
ggggaggggacggcnnstatgctatggacnnstggggtcaaggaacc

SEQ ID NO: 5697 - DNA, 45 bp, Homo sapiens
  modified_base (18)..(19): a, c, g or t
  modified_base (21)..(22): a, c, g or t
  modified_base (24)..(25): a, c, g or t
  modified_base (27)..(28): a, c, g or t
gttctagatggggagggnnsnnsnnsnnsgctatggactactggg

SEQ ID NO: 5698 - protein, 108 aa, Artificial Sequence
  source: /note="Description of Artificial Sequence: Synthetic polypeptide"
DIQLTQSPSSVSASVGDRVTITCRASQDISSWLAWYQQKPGKAPKLLIYAASSLQSGVPSRFSGSGSGTDFTLTISSLQPEDFATYYCEQANSLPPITFGGGTKVEIK

SEQ ID NO: 5699 - protein, 107 aa, Artificial Sequence
  source: /note="Description of Artificial Sequence: Synthetic polypeptide"
DIQMTQSPSSLSASVGDRVTITCRASQSINSYLNWYQQKPGKAPKLLIYAASSLQSGVPSRFSGSGSGTDFTLTISSLQPEDFATYYCQQLDSTPITFGGGTKVEIK

SEQ ID NO: 5700 - protein, 107 aa, Artificial Sequence
  source: /note="Description of Artificial Sequence: Synthetic polypeptide"
DIQMTQSPSSLSASVGDRVTITCRASQSISSFLNWYQQKPGKAPKLLISAASSLQSGVPSRFSGSGSGTDFTLTISSLQPEDFATYYCQQSYREPITFGGGTKVEIK

SEQ ID NO: 5701 - protein, 108 aa, Artificial Sequence
  source: /note="Description of Artificial Sequence: Synthetic polypeptide"
DIQMTQSPSSVSASVGDRVTITCRASQGIDSWLAWYQQKPGKAPKLLIYAASSLQSGVPSRFSGSGSGTDFTLTISSLQPEDFATYYCQQGNSLPPITFGGGTKVEIK

SEQ ID NO: 5702 - protein, 106 aa, Artificial Sequence
  source: /note="Description of Artificial Sequence: Synthetic polypeptide"
DIQMTQSPSSVSASVGDRVTITCRASQGISRWLAWYQQKPGKAPKLLIYAASSLQSGVPSRFSGSGSGTDFTLTISSLQPEDFATYYCQQANALPTFGGGTKVEIK

SEQ ID NO: 5703 - protein, 108 aa, Artificial Sequence
  source: /note="Description of Artificial Sequence: Synthetic polypeptide"
DIQMTQSPSSVSASVGDRVTITCRASQGISSWLAWYQQKPGKAPKLLIYAASNLQSGVPSRFSGSGSGTDFTLTISSLQPEDFATYYCQQAPSVPPITFGGGTKVEIK

SEQ ID NO: 5704 - protein, 107 aa, Artificial Sequence
  source: /note="Description of Artificial Sequence: Synthetic polypeptide"
DIQMTQSPSSVSASVGDRVTITCRASQGISSWLAWYQQKPGKAPKLLIYAASNLQSGVPSRFSGSGSGTDFTLTISSLQPEDFATYYCQQGNSYPITFGGGTKVEIK

SEQ ID NO: 5705 - protein, 107 aa, Artificial Sequence
  source: /note="Description of Artificial Sequence: Synthetic polypeptide"
DIQMTQSPSTLSASVGDRVTITCRASQSISSWLAWYQQKPGKAPKLLIYKASSLESGVPSRFSGSGSGTEFTLTISSLQPDDFATYYCQQYKSYPITFGGGTKVEIK

SEQ ID NO: 5706 - protein, 113 aa, Artificial Sequence
  source: /note="Description of Artificial Sequence: Synthetic polypeptide"
DIVMTQSPDSLAVSLGERATINCKSSQSVLYSSNNKNYLAWYQQKPGQPPKLLIYWASTRESGVPDRFSGSGSGTDFTLTISSLQAEDVAVYYCQQYANAPITFGGGTKVEIK

SEQ ID NO: 5707 - protein, 112 aa, Artificial Sequence
  source: /note="Description of Artificial Sequence: Synthetic polypeptide"
DIVMTQSPLSLPVTPGEPASISCRSSQSLLHSNGYNYLDWYLQKPGQSPQLLIFLGSNRASGVPDRFSGSGSGTDFTLKISRVEAEDVGVYYCMQAIQGPITFGGGTKVEIK

SEQ ID NO: 5708 - protein, 112 aa, Artificial Sequence
  source: /note="Description of Artificial Sequence: Synthetic polypeptide"
DIVMTQSPLSLPVTPGEPASISCRSSQSLLHSNGYNYLDWYLQKPGQSPQLLIFLGSNRASGVPDRFSGSGSGTDFTLKISRVEAEDVGVYYCMQGIETPPTFGGGTKVEIK

SEQ ID NO: 5709 - protein, 112 aa, Artificial Sequence
  source: /note="Description of Artificial Sequence: Synthetic polypeptide"
DIVMTQSPLSLPVTPGEPASISCRSSQSLLHSNGYNYLDWYLQKPGQSPQLLIYLASNRASGVPDRFSGSGSGTDFTLKISRVEAEDVGVYYCMQAIDTPPTFGGGTKVEIK

SEQ ID NO: 5710 - protein, 112 aa, Artificial Sequence
  source: /note="Description of Artificial Sequence: Synthetic polypeptide"
DIVMTQSPLSLPVTPGEPASISCRSSQSLLHSNGYNYLDWYLQKPGQSPQLLIYLGSHRASGVPDRFSGSGSGTDFTLKISRVEAEDVGVYYCMQRLEAPLTFGGGTKVEIK

SEQ ID NO: 5711 - protein, 112 aa, Artificial Sequence
  source: /note="Description of Artificial Sequence: Synthetic polypeptide"
DIVMTQSPLSLPVTPGEPASISCRSSQSLLHSNGYNYLDWYLQKPGQSPQLLIYLGSNRASGVPDRFSGSGSGTDFTLKISRVEAEDVGVYYCMQALERPPTFGGGTKVEIK

SEQ ID NO: 5712 - protein, 112 aa, Artificial Sequence
  source: /note="Description of Artificial Sequence: Synthetic polypeptide"
DIVMTQSPLSLPVTPGEPASISCRSSQSLLHSNGYNYLDWYLQKPGQSPQLLIYLGSNRASGVPDRFSGSGSGTDFTLKISRVEAEDVGVYYCMQARDGPITFGGGTKVEIK

SEQ ID NO: 5713 - protein, 113 aa, Artificial Sequence
  source: /note="Description of Artificial Sequence: Synthetic polypeptide"
DIVMTQSPLSLPVTPGEPASISCRSSQSLLHSNGYNYLDWYLQKPGQSPQLLIYLGSNRASGVPDRFSGSGSGTDFTLKISRVEAEDVGVYYCMQRLQSPLRTFGGGTKVEIK

SEQ ID NO: 5714 - protein, 112 aa, Artificial Sequence
  source: /note="Description of Artificial Sequence: Synthetic polypeptide"
DIVMTQSPLSLPVTPGEPASISCRSSQSLLHSNGYNYLDWYLQKPGQSPQVLIYLGSNRASGVPDRFSGSGSGTDFTLKISRVEAEDVGVYYCMQALDVPLTFGGGTKVEIK

SEQ ID NO: 5715 - protein, 112 aa, Artificial Sequence
  source: /note="Description of Artificial Sequence: Synthetic polypeptide"
DIVMTQSPLSLPVTPGEPASISCRSSQSLLRSNGYNYLDWYLQKPGQPPQLLIYLGSNRVSGVPDRFSGSGSGTDFTLKISRVEAEDVGVYYCMQQQETPLTFGGGTKVEIK

SEQ ID NO: 5716 - protein, 112 aa, Artificial Sequence
  source: /note="Description of Artificial Sequence: Synthetic polypeptide"
DIVMTQSPLSLPVTPGEPASISCRSSQSLLRSNGYNYLDWYLQKPGQSPQLLIYLGSNRASGVPDRFSGSGSGTDFTLKISRVEAEDVGVYYCMQQQETPLTFGGGTKVEIK

SEQ ID NO: 5717 - protein, 112 aa, Artificial Sequence
  source: /note="Description of Artificial Sequence: Synthetic polypeptide"
DIVMTQSPLSLPVTPGESASISCRSSQGLLRSNGYNYLDWYLQKPGQSPQLLIYLGSNRASGVPDRFSGSGSGTDFTLKISRVEAEDVGVYYCMQQQETPLTFGGGTKVEIK

SEQ ID NO: 5718 - protein, 112 aa, Artificial Sequence
  source: /note="Description of Artificial Sequence: Synthetic polypeptide"
DIVMTQSPLSLPVTPGGPASISCRSSQSLLRSNGYNYLDWYLQKPGQSPQLLIYLGSNRASGVPDRFSGSGSGTDFTLKISRVEAEDVGVYYCMQQQETPLTFGGGTKVEIK

SEQ ID NO: 5719 - protein, 108 aa, Artificial Sequence
  source: /note="Description of Artificial Sequence: Synthetic polypeptide"
EIVLTQSPATLSLSPGERATLSCRASQSVSSYLAWYQQKPGQAPRLLIYDASNRATGIPARFSGSGSGTDFTLTISSLEPEDFAVYYCQQASVYPPITFGGGTKVEIK

SEQ ID NO: 5720 - protein, 107 aa, Artificial Sequence
  source: /note="Description of Artificial Sequence: Synthetic polypeptide"
EIVLTQSPATLSVSPGERATLSCRASQSVSSNLAWYQQKPGQAPRLLIYGASTRATGIPARFSGSGSGTEFTLTISSLQSEDFAVYYCQQDRKGPLTFGGGTKVEIK

SEQ ID NO: 5721 - protein, 107 aa, Artificial Sequence
  source: /note="Description of Artificial Sequence: Synthetic polypeptide"
EIVLTQSPATLSVSPGERATLSCRASQSVSSNLAWYQQKPGQAPRLLIYGASTRATGIPARFSGSGSGTEFTLTISSLQSEDFAVYYCQQYNAFPPTFGGGTKVEIK

SEQ ID NO: 5722 - protein, 107 aa, Artificial Sequence
  source: /note="Description of Artificial Sequence: Synthetic polypeptide"
EIVLTQSPATLSVSPGERATLSCRASQSVSSNLAWYQQKPGQAPRLLIYGASTRATGIPARFSGSGSGTEFTLTISSLQSEDFAVYYCQQYNNHPPTFGGGTKVEIK

SEQ ID NO: 5723 - protein, 108 aa, Artificial Sequence
  source: /note="Description of Artificial Sequence: Synthetic polypeptide"
EIVLTQSPGTLSLSPGERATLSCRASQSVRSSYLAWYQQKPGQAPRLLIYGASSRATGIPDRFSGSGSGTDFTLTISRLEPEDFAVYYCDQLGSSPRTFGGGTKVEIK

SEQ ID NO: 5724 - protein, 108 aa, Artificial Sequence
  source: /note="Description of Artificial Sequence: Synthetic polypeptide"
EIVLTQSPGTLSLSPGERATLSCRASQSVRSSYLAWYQQKPGQAPRLLIYGASSRATGIPDRFSGSGSGTDFTLTISRLEPEDFAVYYCQQAGDYPPTFGGGTKVEIK

SEQ ID NO: 5725 - protein, 108 aa, Artificial Sequence
  source: /note="Description of Artificial Sequence: Synthetic polypeptide"
EIVLTQSPGTLSLSPGERATLSCRASQSVRSSYLAWYQQKPGQAPRLLIYGASSRATGIPDRFSGSGSGTDFTLTISRLEPEDFAVYYCQQLDSSPITFGGGTKVEIK

SEQ ID NO: 5726 - protein, 108 aa, Artificial Sequence
  source: /note="Description of Artificial Sequence: Synthetic polypeptide"
EIVLTQSPGTLSLSPGERATLSCRASQSVSSSFLAWYQQKPGQAPRLLIYGASSRATGIPDRFSGSGSGTDFTLTISRLEPEDFAVYYCEQYASSPYTFGGGTKVEIK

SEQ ID NO: 5727 - protein, 108 aa, Artificial Sequence
  source: /note="Description of Artificial Sequence: Synthetic polypeptide"
EIVLTQSPGTLSLSPGERATLSCRASQSVSSSFLAWYQQKPGQAPRLLIYGASSRATGIPDRFSGSGSGTDFTLTISRLEPEDFAVYYCQQAKVWPYTFGGGTKVEIK

SEQ ID NO: 5728 - protein, 108 aa, Artificial Sequence
  source: /note="Description of Artificial Sequence: Synthetic polypeptide"
EIVLTQSPGTLSLSPGERATLSCRASQSVSSSFLAWYQQKPGQAPRLLIYGASSRATGIPDRFSGSGSGTDFTLTISRLEPEDFAVYYCQQLGIAPITFGGGTKVEIK

SEQ ID NO: 5729 - protein, 108 aa, Artificial Sequence
  source: /note="Description of Artificial Sequence: Synthetic polypeptide"
EIVLTQSPGTLSLSPGERATLSCRASQSVSSSFLAWYQQKPGQAPRLLIYGASSRATGIPDRFSGSGSGTDFTLTISRLEPEDFAVYYCQQYGSPPLTFGGGTKVEIK

SEQ ID NO: 5730 - protein, 108 aa, Artificial Sequence
  source: /note="Description of Artificial Sequence: Synthetic polypeptide"
EIVLTQSPGTLSLSPGERATLSCRASQSVSSSYLAWYQQKPGQAPRLLIYGASSRATGIPDRFSGSGSGTDFTLTISRLEPEDFAVYYCQQAASSPITFGGGTKVEIK

SEQ ID NO: 5731 - protein, 108 aa, Artificial Sequence
  source: /note="Description of Artificial Sequence: Synthetic polypeptide"
EIVLTQSPGTLSLSPGERATLSCRASQSVSSSYLAWYQQKPGQAPRLLIYGASSRATGIPDRFSGSGSGTDFTLTISRLEPEDFAVYYCQQALRSPLTFGGGTKVEIK

SEQ ID NO: 5732 - protein, 109 aa, Artificial Sequence
  source: /note="Description of Artificial Sequence: Synthetic polypeptide"
EIVLTQSPGTLSLSPGERATLSCRASQSVSSSYLAWYQQKPGQAPRLLIYGASSRATGIPDRFSGSGSGTDFTLTISRLEPEDFAVYYCQQHGRLPPWTFGGGTKVEIK

SEQ ID NO: 5733 - protein, 108 aa, Artificial Sequence
  source: /note="Description of Artificial Sequence: Synthetic polypeptide"
EIVLTQSPGTLSLSPGERATLSCRASQSVSSSYLAWYQQKPGQAPRLLIYGASSRATGIPDRFSGSGSGTDFTLTISRLEPEDFAVYYCQQLGSHPPTFGGGTKVEIK

SEQ ID NO: 5734 - protein, 109 aa, Artificial Sequence
  source: /note="Description of Artificial Sequence: Synthetic polypeptide"
EIVLTQSPGTLSLSPGERATLSCRASQSVSSSYLAWYQQKPGQAPRLLIYGASSRATGIPDRFSGSGSGTDFTLTISRLEPEDFAVYYCQQSGSVPPITFGGGTKVEIK

SEQ ID NO: 5735 - protein, 108 aa, Artificial Sequence
  source: /note="Description of Artificial Sequence: Synthetic polypeptide"
EIVLTQSPGTLSLSPGERATLSCRASQSVSSSYLAWYQQKPGQAPRLLIYGASSRATGIPDRFSGSGSGTDFTLTISRLEPEDFAVYYCQQVAVSPITFGGGTKVEIK

SEQ ID NO: 5736 - protein, 108 aa, Artificial Sequence
  source: /note="Description of Artificial Sequence: Synthetic polypeptide"
EIVLTQSPGTLSLSPGERATLSCRASQSVSSSYLAWYQQKPGQAPRLLIYGASSRATGIPDRFSGSGSGTDFTLTISRLEPEDFAVYYCQQYDSAPITFGGGTKVEIK

SEQ ID NO: 5737 - protein, 107 aa, Artificial Sequence
  source: /note="Description of Artificial Sequence: Synthetic polypeptide"
EIVMTQSPATLSLSPGERATLSCRASQSVSSYLAWYQQKPGQAPRLLIYDASNRATGIPARFSGSGSGTDFTLTISSLEPEDFAVYYCQQRSALPFTFGGGTKVEIK

SEQ ID NO: 5738 - protein, 108 aa, Artificial Sequence
  source: /note="Description of Artificial Sequence: Synthetic polypeptide"
EIVMTQSPATLSLSPGERATLSCRASQSVSSYLAWYQQKPGQAPRLLIYDSSNRATGIPARFSGSGSGTDFTLTISSLEPEDFAVYYCQQETNMPPITFGGGTKVEIK

SEQ ID NO: 5739 - protein, 107 aa, Artificial Sequence
  source: /note="Description of Artificial Sequence: Synthetic polypeptide"
EIVMTQSPATLSVSPGERATLSCRASQSISSWLAWYQQKPGQAPRLLIYGASTRATGIPARFSGSGSGTEFTLTISSLQSEDFAVYYCQQARLGPWTFGGGTKVEIK

SEQ ID NO: 5740 - protein, 107 aa, Artificial Sequence
  source: /note="Description of Artificial Sequence: Synthetic polypeptide"
EIVMTQSPATLSVSPGERATLSCRASQSVSSNLAWYQQKPGQAPRLLIYGASTRATGIPARFSGSGSGTEFTLTISSLQSEDFAVYYCQEYLNYPITFGGGTKVEIK

SEQ ID NO: 5741 - protein, 107 aa, Artificial Sequence
  source: /note="Description of Artificial Sequence: Synthetic polypeptide"
EIVMTQSPATLSVSPGERATLSCRASQSVSSNLAWYQQKPGQAPRLLIYGASTRATGIPARFSGSGSGTEFTLTISSLQSEDFAVYYCQQFRVLPPTFGGGTKVEIK

SEQ ID NO: 5742 - protein, 107 aa, Artificial Sequence
  source: /note="Description of Artificial Sequence: Synthetic polypeptide"
EIVMTQSPATLSVSPGERATLSCRASQSVSSNLAWYQQKPGQAPRLLIYGASTRATGIPARFSGSGSGTEFTLTISSLQSEDFAVYYCQQVANYPRTFGGGTKVEIK

SEQ ID NO: 5743 - protein, 108 aa, Artificial Sequence
  source: /note="Description of Artificial Sequence: Synthetic polypeptide"
EIVMTQSPATLSVSPGERATLSCRASQSVSSNLAWYQQKPGQAPRLLIYGASTRATGIPARFSGSGSGTEFTLTISSLQSEDFAVYYCQQYADWPPITFGGGTKVEIK

SEQ ID NO: 5744 - protein, 107 aa, Artificial Sequence
  source: /note="Description of Artificial Sequence: Synthetic polypeptide"
EIVMTQSPATLSVSPGERATLSCRASQSVSSNLAWYQQKPGQAPRLLIYGASTRATGIPARFSGSGSGTEFTLTISSLQSEDFAVYYCQQYNIYPLTFGGGTKVEIK

SEQ ID NO: 5745 - protein, 107 aa, Artificial Sequence
  source: /note="Description of Artificial Sequence: Synthetic polypeptide"
EIVMTQSPATLSVSPGERATLSCRASQSVSSNLAWYQQKPGQAPRLLIYSASTRATGIPARFSGSGSGTEFTLTISSLQSEDFAVYYCQQYNALPRTFGGGTKVEIK

SEQ ID NO: 5746 - protein, 107 aa, Artificial Sequence
  source: /note="Description of Artificial Sequence: Synthetic polypeptide"
EIVMTQSPATLSVSPGERATLSCRASQSVSSNLAWYQQKPGQAPRLLIYSASTRATGIPARFSGSGSGTEFTLTISSLQSEDFAVYYCQQYNSWPITFGGGTKVEIK

SEQ ID NO: 5747 - protein, 107 aa, Artificial Sequence
  source: /note="Description of Artificial Sequence: Synthetic polypeptide"
EIVMTQSPATLSVSPGERATLSCRASQSVSSSLAWYQQKPGQAPRLLIYGASTRATGIPARFSGSGSGTEFTLTISSLQSEDFAVYYCQQAADWPITFGGGTKVEIK

SEQ ID NO: 5748 - protein, 119 aa, Artificial Sequence
  source: /note="Description of Artificial Sequence: Synthetic polypeptide"
EVQLLESGGGLVQPGGSLRLSCAASGFTFSNYAMSWVRQAPGKGLEWVSAISGSGGSTYYADSVKGRFTISRDNSKNTLYLQMNSLRAEDTAVYYCAKLYQGTPDFDLWGRGTLVTVSS

SEQ ID NO: 5749 - protein, 119 aa, Artificial Sequence
  source: /note="Description of Artificial Sequence: Synthetic polypeptide"
EVQLLESGGGLVQPGGSLRLSCAASGFTFSSSAMSWVRQAPGKGLEWVSAISGSGGSTYYADSVKGRFTISRDNSKNTLYLQMNSLRAEDTAVYYCAKPLSSTGGGNIWGQGTMVTVSS

SEQ ID NO: 5750 - protein, 120 aa, Artificial Sequence
  source: /note="Description of Artificial Sequence: Synthetic polypeptide"
EVQLLESGGGLVQPGGSLRLSCAASGFTFSSYAMSWVRQAPGKGLEWVSAISASGGSTYYADSVKGRFTISRDNSKNTLYLQMNSLRAEDTAVYYCAKRGYPGYPAFDIWGQGTMVTVSS

SEQ ID NO: 5751 - protein, 125 aa, Artificial Sequence
  source: /note="Description of Artificial Sequence: Synthetic polypeptide"
EVQLLESGGGLVQPGGSLRLSCAASGFTFSSYAMSWVRQAPGKGLEWVSAISGSGGSTYYADSVKGRFTISRDNSKNTLYLQMNSLRAEDTAVYYCAKVGGMYDGGVYYYGMDVWGQGTTVTVSS

SEQ ID NO: 5752 - protein, 122 aa, Artificial Sequence
  source: /note="Description of Artificial Sequence: Synthetic polypeptide"
EVQLLESGGGLVQPGGSLRLSCAASGFTFSSYAMSWVRQAPGKGLEWVSAISGSGGSTYYADSVKGRFTISRDNSKNTLYLQMNSLRAEDTAVYYCAREVMARARTYGMDVWGQGTTVTVSS

SEQ ID NO: 5753 - protein, 118 aa, Artificial Sequence
  source: /note="Description of Artificial Sequence: Synthetic polypeptide"
EVQLLESGGGLVQPGGSLRLSCAASGFTFSSYAMSWVRQAPGKGLEWVSSISGSGGSTYYADSVKGRFTISRDNSKNTLYLQMNSLRAEDTAVYYCAKTGGTYGMDVWGQGTTVTVSS

SEQ ID NO: 5754 - protein, 121 aa, Artificial Sequence
  source: /note="Description of Artificial Sequence: Synthetic polypeptide"
EVQLLESGGGLVQPGGSLRLSCAASGFTFSTYAMSWVRQAPGKGLEWVSAISGSGGSTYYADSVKGRFTISRDNSKNTLYLQMNSLRAEDTAVYYCAKTPSSIYAAGMDVWGQGTTVTVSS

SEQ ID NO: 5755 - protein, 123 aa, Artificial Sequence
  source: /note="Description of Artificial Sequence: Synthetic polypeptide"
EVQLVESGGGLVKPGGSLRLSCAASGFTFSSYSMNWVRQAPGKGLEWVSSISSSSSYIYYADSVKGRFTISRDNAKNSLYLQMNSLRAEDTAVYYCARDRLGRGYKWNWFDPWGQGTLVTVSS

SEQ ID NO: 5756 - protein, 122 aa, Artificial Sequence
  source: /note="Description of Artificial Sequence: Synthetic polypeptide"
EVQLVESGGGLVQPGRSLRLSCAASGFTFDDYAMHWVRQAPGKGLEWVSGISWNSGSIGYADSVKGRFTISRDNAKNSLYLQMNSLRAEDTALYYCAKGVGQVPASVAFDIWGQGTMVTVSS

SEQ ID NO: 5757 - protein, 119 aa, Artificial Sequence
  source: /note="Description of Artificial Sequence: Synthetic polypeptide"
EVQLVESGGGLVQPGRSLRLSCAASGFTFGDYAMHWVRQAPGKGLEWVSGISWNSGSIGYADSVKGRFTISRDNAKNSLYLQMNSLRAEDTALYYCAKPLYRGGPFDIWGQGTMVTVSS

SEQ ID NO: 5758 - protein, 125 aa, Artificial Sequence
  source: /note="Description of Artificial Sequence: Synthetic polypeptide"
EVQLVQSGAEVKKPGESLKISCKGSGYSFTSYWIGWVRQMPGKGLEWMGIIYPGDSDTTYSPSFQGQVTISADKSISTAYLQWSSLKASDTAMYYCARGRGRYSYGYHKAAFDIWGQGTMVTVSS

SEQ ID NO: 5759 - protein, 107 aa, Artificial Sequence
  source: /note="Description of Artificial Sequence: Synthetic polypeptide"
EVVMTQSPATLSVSPGERATLSCRASQSVGSNLAWYQQKPGQAPRLLIYGASTRATGIPARFSGSGSGTEFTLTISSLQSEDFAVYYCQQARLGPWTFGGGTKVEIK

SEQ ID NO: 5760 - protein, 125 aa, Artificial Sequence
  source: /note="Description of Artificial Sequence: Synthetic polypeptide"
QLQLQESGPGLVKPSETLSLTCTVSGGSIKSSEYYWGWIRQPPGKGLEWIGSIYRAGSTYYNPSLKSRVTISVDTSKNQFSLKLSSVTAADTAVYYCARGVGSGYSYGYRYFDYWGQGTLVTVSS

SEQ ID NO: 5761 - protein, 125 aa, Artificial Sequence
  source: /note="Description of Artificial Sequence: Synthetic polypeptide"
QLQLQESGPGLVKPSETLSLTCTVSGGSISSREYYWGWIRQPPGKGLEWIGSIYRSGSTYYNPSLKSRVTISVDTSKNQFSLKLSSVTAADTAVYYCARGVGSGYSYGYRYFDYWGQGTLVTVSS

SEQ ID NO: 5762 - protein, 125 aa, Artificial Sequence
  source: /note="Description of Artificial Sequence: Synthetic polypeptide"
QLQLQESGPGLVKPSETLSLTCTVSGGSISSSDYYWGWIRQPPGKGLEWIGGIYYRGSTYYNPSLKSRVTISVDTSKNQFSLKLSSVTAADTAVYYCARGVGSGYSYGYRYFDYWGQGTLVTVSS

SEQ ID NO: 5763 - protein, 125 aa, Artificial Sequence
  source: /note="Description of Artificial Sequence: Synthetic polypeptide"
QLQLQESGPGLVKPSETLSLTCTVSGGSISSSDYYWGWIRQPPGKGLEWIGQIYYKGSTYYNPSLKSRVTISVDTSKNQFSLKLSSVTAADTAVYYCARGVGSGYSYGYRYFDYWGQGTLVTVSS

SEQ ID NO: 5764 - protein, 121 aa, Artificial Sequence
  source: /note="Description of Artificial Sequence: Synthetic polypeptide"
QLQLQESGPGLVKPSETLSLTCTVSGGSISSSDYYWGWIRQPPGKGLEWIGSIYYSGSTYYNPSLKSRVTISVDTSKNQFSLKLSSVTAADTAVYYCARSLAMSGAYFDLWGRGTLVTVSS

SEQ ID NO: 5765 - protein, 125 aa, Artificial Sequence
  source: /note="Description of Artificial Sequence: Synthetic polypeptide"
QLQLQESGPGLVKPSETLSLTCTVSGGSISSSEYYWGWIRQPPGKGLEWIGLIYYRGSTYYNPSLKSRVTISVDTSKNQFSLKLSSVTAADTAVYYCARGVGSGYSYGYRYFDYWGQGTLVTVSS

SEQ ID NO: 5766 - protein, 120 aa, Artificial Sequence
  source: /note="Description of Artificial Sequence: Synthetic polypeptide"
QLQLQESGPGLVKPSETLSLTCTVSGGSISSSSYYWGWIRQPPGKGLEWIGSISYSGSTYYNPSLKSRVTISVDTSKNQFSLKLSSVTAADTAVYYCARGGTTWLVADVWGQGTMVTVSS

SEQ ID NO: 5767 - protein, 121 aa, Artificial Sequence
  source: /note="Description of Artificial Sequence: Synthetic polypeptide"
QLQLQESGPGLVKPSETLSLTCTVSGGSISSSSYYWGWIRQPPGKGLEWIGSIYYSGSTYYNPSLKSRVTISVDTSKNQFSLKLSSVTAADTAVYYCARERWDLGHGMDVWGQGTTVTVSS

SEQ ID NO: 5768 - protein, 125 aa, Artificial Sequence
  source: /note="Description of Artificial Sequence: Synthetic polypeptide"
QLQLQESGPGLVKPSETLSLTCTVSGGSIVSSDYYWGWIRQPPGKGLEWIGGIYYRGSTYYNPSLKSRVTISVDTSKNQFSLKLSSVTAADTAVYYCARGVGSGYSYGYRYFDYWGQGTLVTVSS

SEQ ID NO: 5769 - protein, 125 aa, Artificial Sequence
  source: /note="Description of Artificial Sequence: Synthetic polypeptide"
QLQLQESGPGLVKPSETLSLTCTVSGGSIYSSDYYWGWIRQPPGKGLEWIGSIYWRGSTYYNPSLKSRVTISVDTSKNQFSLKLSSVTAADTAVYYCARGVGSGYSYGYRYFDYWGQGTLVTVSS

SEQ ID NO: 5770 - protein, 124 aa, Artificial Sequence
  source: /note="Description of Artificial Sequence: Synthetic polypeptide"
QVQLQESGPGLVKPSETLSLTCAVSGYSIPSDYYWGWIRQPPGKGLEWIGSIYYRGSTVYNPSLKSRVTISVDTSKNQFSLKLSSVTAADTAVYYCARGVGSGYSYGYRYFDYWGQGTLVTVSS

SEQ ID NO: 5771 - protein, 121 aa, Artificial Sequence
  source: /note="Description of Artificial Sequence: Synthetic polypeptide"
QVQLQESGPGLVKPSETLSLTCAVSGYSISSGYYWGWIRQPPGKGLEWIGSIYHSGNTYYNPSLKSRVTISVDTSKNQFSLKLSSVTAADTAVYYCARGPPELGKMYFQHWGQGTLVTVSS

SEQ ID NO: 5772 - protein, 122 aa, Artificial Sequence
  source: /note="Description of Artificial Sequence: Synthetic polypeptide"
QVQLQESGPGLVKPSETLSLTCAVSGYSISSGYYWGWIRQPPGKGLEWIGSIYHSGSTYYNPSLKSRVTISVDTSKNQFSLKLSSVTAADTAVYYCARGRPELGWDKYFQHWGQGTLVTVSS

SEQ ID NO: 5773 - protein, 127 aa, Artificial Sequence
  source: /note="Description of Artificial Sequence: Synthetic polypeptide"
QVQLQESGPGLVKPSETLSLTCAVSGYSISSGYYWGWIRQPPGKGLEWIGSIYHSGSTYYNPSLKSRVTISVDTSKNQFSLKLSSVTAADTAVYYCARGSPRFYYGSGSYLDLFDIWGQGTMVTVSS

SEQ ID NO: 5774 - protein, 122 aa, Artificial Sequence
  source: /note="Description of Artificial Sequence: Synthetic polypeptide"
QVQLQESGPGLVKPSETLSLTCAVSGYSISSVRYWGWIRQPPGKGLEWIGAIYPSGSTYYNPSLKSRVTISVDTSKNQFSLKLSSVTAADTAVYYCARQGSIKQGYYGMDVWGQGTTVTVSS

SEQ ID NO: 5775 - protein, 122 aa, Artificial Sequence
  source: /note="Description of Artificial Sequence: Synthetic polypeptide"
QVQLQESGPGLVKPSETLSLTCAVSGYSISSVRYWGWIRQPPGKGLEWIGSIYHSGSTYYNPSLKSRVTISVDTSKNQFSLKLSSVTAADTAVYYCARQGSIKQGYYGMDVWGQGTTVTVSS

SEQ ID NO: 5776 - protein, 126 aa, Artificial Sequence
  source: /note="Description of Artificial Sequence: Synthetic polypeptide"
QVQLQESGPGLVKPSQTLSLTCTVSGGSISSGGYYWSWIRQHPGKGLEWIGNIYYSGSTYYNPSLKSRVTISVDTSKNQFSLKLSSVTAADTAVYYCARDRGMGPKLYYYYGMDVWGQGTTVTVSS

SEQ ID NO: 5777 - protein, 124 aa, Artificial Sequence
  source: /note="Description of Artificial Sequence: Synthetic polypeptide"
QVQLQESGPGLVKPSQTLSLTCTVSGGSISSGGYYWSWIRQHPGKGLEWIGSIYYSGSTYYNPSLKSRVTISVDTSKNQFSLKLSSVTAADTAVYYCARGVGIQQQLVLGFDPWGQGTLVTVSS

SEQ ID NO: 5778 - protein, 124 aa, Artificial Sequence
  source: /note="Description of Artificial Sequence: Synthetic polypeptide"
QVQLQESGPGLVKPSQTLSLTCTVSGGSISSGGYYWSWIRQHPGKGLEWIGSIYYSGSTYYNPSLKSRVTISVDTSKNQFSLKLSSVTAADTAVYYCARLHSDYSVLYYGMDVWGQGTTVTVSS

SEQ ID NO: 5779 - protein, 124 aa, Artificial Sequence
  source: /note="Description of Artificial Sequence: Synthetic polypeptide"
QVQLQESGPGLVKPSQTLSLTCTVSGGSISSGGYYWSWIRQHPGKGLEWIGYIYYSGSTVYNPSLKSRVTISVDTSKNQFSLKLSSVTAADTAVYYCARDVGRTGPHYYGMDVWGQGTTVTVSS

SEQ ID NO: 5780 - protein, 121 aa, Artificial Sequence
  source: /note="Description of Artificial Sequence: Synthetic polypeptide"
QVQLQESGPGLVKPSQTLSLTCTVSGGSISSGGYYWSWIRQHPGKGLEWIGYIYYSGSTVYNPSLKSRVTISVDTSKNQFSLKLSSVTAADTAVYYCARLPGYPLGLFDIWGQGTLVTVSS

SEQ ID NO: 5781 - protein, 128 aa, Artificial Sequence
  source: /note="Description of Artificial Sequence: Synthetic polypeptide"
QVQLQESGPGLVKPSQTLSLTCTVSGGSISSGGYYWSWIRQHPGKGLEWIGYIYYSGSTYYNPSLKSRVTISVDTSKNQFSLKLSSVTAADTAVYYCARDRGGTHFGADHYYYGMDVWGQGTMVTVSS

SEQ ID NO: 5782 - protein, 120 aa, Artificial Sequence
  source: /note="Description of Artificial Sequence: Synthetic polypeptide"
QVQLQESGPGLVKPSQTLSLTCTVSGGSISSGTYYWSWIRQHPGKGLEWIGYIYYSGSTYYNPSLKSRVTISVDTSKNQFSLKLSSVTAADTAVYYCARGVGRYRVADYWGQGTLVTVSS

SEQ ID NO: 5783 - protein, 118 aa, Artificial Sequence
  source: /note="Description of Artificial Sequence: Synthetic polypeptide"
QVQLVESGGGVVQPGRSLRLSCAASGFTFSSYGMHWVRQAPGKGLEWVAVISYDGSNKYYADSVKGRFTISRDNSKNTLYLQMNSLRAEDTAVYYCARDAYEGRVDVWGQGTMVTVSS

SEQ ID NO: 5784 - protein, 127 aa, Artificial Sequence
  source: /note="Description of Artificial Sequence: Synthetic polypeptide"
QVQLVESGGGVVQPGRSLRLSCAASGFTFSSYGMHWVRQAPGKGLEWVAVISYDGSNKYYADSVKGRFTISRDNSKNTLYLQMNSLRAEDTAVYYCARESGDRATLVYYYYYGMDVWGQGTTVTVSS

SEQ ID NO: 5785 - protein, 129 aa, Artificial Sequence
  source: /note="Description of Artificial Sequence: Synthetic polypeptide"
QVQLVQSGAEVKKPGASVEVSCKASGYTFTKYYMSWVRQAPGQGLEWMGIINPIGGSTSYAQKFQGRVTMTRDTSTSTVYMELSSLRSEDTAVYYCARDPSGIAAAGPAARHYYGMDVWGQGTTVTVSS

SEQ ID NO: 5786 - protein, 124 aa, Artificial Sequence
  source: /note="Description of Artificial Sequence: Synthetic polypeptide"
QVQLVQSGAEVKKPGASVKVSCKASGGTFGSYAISWVRQAPGQGLEWMGGIIPAFGTAWYAQKFQGRVTITADESTSTAYMELSSLRSEDTAVYYCARQGRKTGYYYYYGMDVWGQGTTVTVSS

SEQ ID NO: 5787 - protein, 129 aa, Artificial Sequence
  source: /note="Description of Artificial Sequence: Synthetic polypeptide"
QVQLVQSGAEVKKPGASVKVSCKASGYTFASRYMSWVRQAPGQGLEWMGIINPVGGSTSYAQKFQGRVTMTRDTSTSTVYMELSSLRSEDTAVYYCARDPSGIAAAGPAGRYYYGLDVWGQGTTVTVSS

SEQ ID NO: 5788 - protein, 124 aa, Artificial Sequence
  source: /note="Description of Artificial Sequence: Synthetic polypeptide"
QVQLVQSGAEVKKPGASVKVSCKASGYTFASYYMWWVRQAPGQGLEWMGGILPSGGRTSYAQKFQGRVTMTRDTSISTAYMELSRLRSDDTAVYYCARGKRSSGWYEGYGMDVWGQGTTVTVSS

SEQ ID NO: 5789 - protein, 124 aa, Artificial Sequence
  source: /note="Description of Artificial Sequence: Synthetic polypeptide"
QVQLVQSGAEVKKPGASVKVSCKASGYTFFSYYMHWVRQAPGQGLEWMGWINPSGGNTRYAQKFQGRVTMTRDTSISTAYMELSRLRSDDTAVYYCARGKRSSGWYEGYGMDVWGQGTTVTVSS

SEQ ID NO: 5790 - protein, 124 aa, Artificial Sequence
  source: /note="Description of Artificial Sequence: Synthetic polypeptide"
QVQLVQSGAEVKKPGASVKVSCKASGYTFGAYYMHWVRQAPGQGLEWMGWINPNSGFTRYAQKFQGRVTMTRDTSISTAYMELSRLRSDDTAVYYCARGKRSSGWYEGYGMDVWGQGTTVTVSS

SEQ ID NO: 5791 - protein, 124 aa, Artificial Sequence
  source: /note="Description of Artificial Sequence: Synthetic polypeptide"
QVQLVQSGAEVKKPGASVKVSCKASGYTFGAYYMHWVRQAPGQGLEWMGWVNPNSGGTNYAQKFQGRVTMTRDTSISTAYMELSRLRSDDTAVYYCARGKRSSGWYEGYGMDVWGQGTTVTVSS

SEQ ID NO: 5792 - protein, 124 aa, Artificial Sequence
  source: /note="Description of Artificial Sequence: Synthetic polypeptide"
QVQLVQSGAEVKKPGASVKVSCKASGYTFGGYLMHWVRQAPGQGLEWMGWINPMSGGTRYAQKFQGRVTMTRDTSISTAYMELSRLRSDDTAVYYCARGKRSSGWYEGYGMDVWGQGTTVTVSS

SEQ ID NO: 5793 - protein, 124 aa, Artificial Sequence
  source: /note="Description of Artificial Sequence: Synthetic polypeptide"
QVQLVQSGAEVKKPGASVKVSCKASGYTFLAYYMHWVRQAPGQGLEWMGWINPNSGGTRYAQKFQGRVTMTRDTSISTAYMELSRLRSDDTAVYYCARGKRSSGWYEGYGMDVWGQGTTVTVSS

SEQ ID NO: 5794 - protein, 124 aa, Artificial Sequence
  source: /note="Description of Artificial Sequence: Synthetic polypeptide"
QVQLVQSGAEVKKPGASVKVSCKASGYTFLAYYMHWVRQAPGQGLEWMGWINPSWGSTSYAQKFQGRVTMTRDTSISTAYMELSRLRSDDTAVYYCARGKRSSGWYEGYGMDVWGQGTTVTVSS

SEQ ID NO: 5795 - protein, 124 aa, Artificial Sequence
  source: /note="Description of Artificial Sequence: Synthetic polypeptide"
QVQLVQSGAEVKKPGASVKVSCKASGYTFPGYLMHWVRQAPGQGLEWMGWINPVSGSTNYAQKFQGRVTMTRDTSISTAYMELSRLRSDDTAVYYCARGKRSSGWYEGYGMDVWGQGTTVTVSS

SEQ ID NO: 5796 - protein, 124 aa, Artificial Sequence
  source: /note="Description of Artificial Sequence: Synthetic polypeptide"
QVQLVQSGAEVKKPGASVKVSCKASGYTFRAYYMHWVRQAPGQGLEWMGWINPSQGSTSYAQKFQGRVTMTRDTSISTAYMELSRLRSDDTAVYYCARGKRSSGWYEGYGMDVWGQGTTVTVSS

SEQ ID NO: 5797 - protein, 124 aa, Artificial Sequence
  source: /note="Description of Artificial Sequence: Synthetic polypeptide"
QVQLVQSGAEVKKPGASVKVSCKASGYTFTAYLMHWVRQAPGQGLEWMGWINPSGGSTSYAQKFQGRVTMTRDTSISTAYMELSRLRSDDTAVYYCARGKRSSGWYEGYGMDVWGQGTTVTVSS

SEQ ID NO: 5798 - protein, 124 aa, Artificial Sequence
  source: /note="Description of Artificial Sequence: Synthetic polypeptide"
QVQLVQSGAEVKKPGASVKVSCKASGYTFTAYYMHWVRQAPGQGLEWMGWVNPNSGGTMYAQKFQGRVTMTRDTSISTAYMELSRLRSDDTAVYYCARGKRSSGWYEGYGMDVWGQGTTVTVSS

SEQ ID NO: 5799 - protein, 124 aa, Artificial Sequence
  source: /note="Description of Artificial Sequence: Synthetic polypeptide"
QVQLVQSGAEVKKPGASVKVSCKASGYTFTGYAMAWVRQAPGQGLEWMGGIIPTFGTAWYAQKFQGRVTITADESTSTAYMELSSLRSEDTAVYYCARQGRKTGYYYYYGMDVWGQGTTVTVSS

SEQ ID NO: 5800 - protein, 122 aa, Artificial Sequence
  source: /note="Description of Artificial Sequence: Synthetic polypeptide"
QVQLVQSGAEVKKPGASVKVSCKASGYTFTGYYMHWVRQAPGQGLEWMGWINPNSGGTNYAQKFQGRVTMTRDTSISTAYMELSRLRSDDTAVYYCARGGPQLRVAEYFQHWGQGTLVTVSS

SEQ ID NO: 5801 - protein, 128 aa, Artificial Sequence
  source: /note="Description of Artificial Sequence: Synthetic polypeptide"
QVQLVQSGAEVKKPGASVKVSCKASGYTFTGYYMHWVRQAPGQGLEWMGWINPNSGGTNYAQKFQGRVTMTRDTSISTAYMELSRLRSDDTAVYYCARSPGGATDGLVYYYYYGMDVWGQGTTVTVSS

SEQ ID NO: 5802 - protein, 124 aa, Artificial Sequence
  source: /note="Description of Artificial Sequence: Synthetic polypeptide"
QVQLVQSGAEVKKPGASVKVSCKASGYTFTGYYMHWVRQAPGQGLEWMGWTNPNSGGTRYAQKFQGRVTMTRDTSISTAYMELSRLRSDDTAVYYCARGKRSSGWYEGYGMDVWGQGTTVTVSS

SEQ ID NO: 5803 - protein, 129 aa, Artificial Sequence
  source: /note="Description of Artificial Sequence: Synthetic polypeptide"
QVQLVQSGAEVKKPGASVKVSCKASGYTFTKYYMSWVRQAPGQGLEWMGIINPIGGSASYAQKFQGRVTMTRDTSTSTVYMELSSLRSEDTAVYYCARDPSGIAAAGPAGRYYYGMDVWGQGTTVTVSS

SEQ ID NO: 5804 - protein, 129 aa, Artificial Sequence
  source: /note="Description of Artificial Sequence: Synthetic polypeptide"
QVQLVQSGAEVKKPGASVKVSCKASGYTFTKYYMSWVRQAPGQGLEWMGIINPIGGSISYAQKFQGRVTMTRDTSTSTVYMELSSLRSEDTAVYYCARDPSGIAAAGPASRYYYGMDVWGQGTTVTVSS

SEQ ID NO: 5805 - protein, 129 aa, Artificial Sequence
  source: /note="Description of Artificial Sequence: Synthetic polypeptide"
QVQLVQSGAEVKKPGASVKVSCKASGYTFTKYYMSWVRQAPGQGLEWMGIINPIGGSTSYAQKFQGRVTMTRDTSASTVYMELSSLRSEDTAVYYCARDPSGIAAAGPAGRYYYGMDVWGQGTTVTVSS

SEQ ID NO: 5806 - protein, 129 aa, Artificial Sequence
  source: /note="Description of Artificial Sequence: Synthetic polypeptide"
QVQLVQSGAEVKKPGASVKVSCKASGYTFTKYYMSWVRQAPGQGLEWMGIINPIGGSTSYAQKFQGRVTMTRDTSTSTAYMELSSLRSEDTAVYYCARDPSGIAAAGPAGRYYYGMDVWGQGTTVTVSS

SEQ ID NO: 5807 - protein, 129 aa, Artificial Sequence
  source: /note="Description of Artificial Sequence: Synthetic polypeptide"
QVQLVQSGAEVKKPGASVKVSCKASGYTFTKYYMSWVRQAPGQGLEWMGIINPIGGSTSYAQKFQGRVTMTRDTSTSTVYMELSSLRSEDTAVYYCARDPFGIALAGPASRYYYGMDVWGQGTTVTVSS

SEQ ID NO: 5808 - protein, 129 aa, Artificial Sequence
  source: /note="Description of Artificial Sequence: Synthetic polypeptide"
QVQLVQSGAEVKKPGASVKVSCKASGYTFTKYYMSWVRQAPGQGLEWMGIINPIGGSTSYAQKFQGRVTMTRDTSTSTVYMELSSLRSEDTAVYYCARDPGGAAAAGPASRYYYGMDVWGQGTTVTVSS

SEQ ID NO: 5809 - protein, 129 aa, Artificial Sequence
  source: /note="Description of Artificial Sequence: Synthetic polypeptide"
QVQLVQSGAEVKKPGASVKVSCKASGYTFTKYYMSWVRQAPGQGLEWMGIINPIGGSTSYAQKFQGRVTMTRDTSTSTVYMELSSLRSEDTAVYYCARDPSGIAAAGPASRYYYGMDVWGQGTTVTVSS

SEQ ID NO: 5810 - protein, 129 aa, Artificial Sequence
  source: /note="Description of Artificial Sequence: Synthetic polypeptide"
QVQLVQSGAEVKKPGASVKVSCKASGYTFTKYYMSWVRQAPGQGLEWMGIINPIGGSTSYAQKFQGRVTMTRDTSTSTVYMELSSLRSEDTAVYYCARDPSGIAAAYPASRYYRGMDVWGQGTTVTVSS

SEQ ID NO: 5811 - protein, 129 aa, Artificial Sequence
  source: /note="Description of Artificial Sequence: Synthetic polypeptide"
QVQLVQSGAEVKKPGASVKVSCKASGYTFTKYYMSWVRQAPGQGLEWMGIINPIGGSTSYAQKFQGRVTMTRDTSTSTVYMELSSLRSEDTAVYYCARDPSGIALAFPASRYYYGMDVWGQGTTVTVSS

SEQ ID NO: 5812 - protein, 129 aa, Artificial Sequence
  source: /note="Description of Artificial Sequence: Synthetic polypeptide"
QVQLVQSGAEVKKPGASVKVSCKASGYTFTKYYMSWVRQAPGQGLEWMGIINPIGGSTSYAQKFQGRVTMTRDTSTSTVYMELSSLRSEDTAVYYCARDPSGIALAGPASRGYYGMDVWGQGTTVTVSS

SEQ ID NO: 5813 - protein, 129 aa, Artificial Sequence
  source: /note="Description of Artificial Sequence: Synthetic polypeptide"
QVQLVQSGAEVKKPGASVKVSCKASGYTFTKYYMSWVRQAPGQGLEWMGIINPIGGSTSYAQKFQGRVTMTRDTSTSTVYMELSSLRSEDTAVYYCARDPSGIALAGPASRSYYGMDVWGQGTTVTVSS

SEQ ID NO: 5814 - protein, 128 aa, Artificial Sequence
  source: /note="Description of Artificial Sequence: Synthetic polypeptide"
QVQLVQSGAEVKKPGASVKVSCKASGYTFTKYYMSWVRQAPGQGLEWMGIINPIGGSTSYAQKFQGRVTMTRDTSTSTVYMELSSLRSEDTAVYYCARDPSGIALAGPASRYYGMDVWGQGTTVTVSS

SEQ ID NO: 5815 - protein, 129 aa, Artificial Sequence
  source: /note="Description of Artificial Sequence: Synthetic polypeptide"
QVQLVQSGAEVKKPGASVKVSCKASGYTFTKYYMSWVRQAPGQGLEWMGIINPIGGSTSYAQKFQGRVTMTRDTSTSTVYMELSSLRSEDTAVYYCARDPSGIALLGPASRYYYGMDVWGQGTTVTVSS

SEQ ID NO: 5816 - protein, 129 aa, Artificial Sequence
  source: /note="Description of Artificial Sequence: Synthetic polypeptide"
QVQLVQSGAEVKKPGASVKVSCKASGYTFTKYYMSWVRQAPGQGLEWMGIINPIGGSTSYAQKFRGRVTMTRDTSTSTVYMELSSLRSEDTAVYYCARDPSGIAAAGPASRYYYGMDVWGQGTTVTVSS

SEQ ID NO: 5817 - protein, 129 aa, Artificial Sequence
  source: /note="Description of Artificial Sequence: Synthetic polypeptide"
QVQLVQSGAEVKKPGASVKVSCKASGYTFTKYYMSWVRQAPGQGLEWMGIINPIGGSTSYAQKFRGRVTMTRDTSTSTVYMELSSLRSEDTAVYYCTRDPSGIAAAGPASRYYYGMDVWGQGTTVTVSS

SEQ ID NO: 5818 - protein, 129 aa, Artificial Sequence
  source: /note="Description of Artificial Sequence: Synthetic polypeptide"
QVQLVQSGAEVKKPGASVKVSCKASGYTFTKYYMSWVRQAPGQGLEWMGIINPIGGSTSYARKFQGRVTMTRDTSTGTVYMELSSLRSEDTAVYYCARDPSGIAAAYPASRYNYGMDVWGQGTTVTVSS

SEQ ID NO: 5819 - protein, 129 aa, Artificial Sequence
  source: /note="Description of Artificial Sequence: Synthetic polypeptide"
QVQLVQSGAEVKKPGASVKVSCKASGYTFTKYYMSWVRQAPGQGLEWMGIVNPIGGSTSYAQRFQGRVTMTRDTSTSTVYMELSSLRSEDTAVYYCARDPSGIGLAGPFSRYYYGMDVWGQGTTVTVSS

SEQ ID NO: 5820 - protein, 129 aa, Artificial Sequence
  source: /note="Description of Artificial Sequence: Synthetic polypeptide"
QVQLVQSGAEVKKPGASVKVSCKASGYTFTSGYMSWVRQAPGQGLEWMGIINPYGGTTSYAQKFQGRVTMTRDTSTSTVYMELSSLRSEDTAVYYCARDPSGIAAAGPASRYYYGMDVWGQGTTVTVSS

SEQ ID NO: 5821 - protein, 129 aa, Artificial Sequence
  source: /note="Description of Artificial Sequence: Synthetic polypeptide"
QVQLVQSGAEVKKPGASVKVSCKASGYTFTSHYMSWVRQAPGQGLEWMGIINPIGGSTSYAQKFQGRVTMTRDTSTSTVYMELSSLRSEDTAVYYCARDPSGIAAAGPASRYYYGMDVWGQGTTVTVSS

SEQ ID NO: 5822 - protein, 129 aa, Artificial Sequence
  source: /note="Description of Artificial Sequence: Synthetic polypeptide"
QVQLVQSGAEVKKPGASVKVSCKASGYTFTSLYISWVRQAPGQGLEWMGVINPVGGSTSYAQKFQGRVTMTRDTSTSTVYMELSSLRSEDTAVYYCARDPSGIAAAGPASRYYYGMDVWGQGTTVTVSS

SEQ ID NO: 5823 - protein, 129 aa, Artificial Sequence
  source: /note="Description of Artificial Sequence: Synthetic polypeptide"
QVQLVQSGAEVKKPGASVKVSCKASGYTFTSLYMSWVRQAPGQGLEWMGIINPVGGSTSYAQKFQGRVTMTRDTSTSTVYMELSSLRSEDTAVYYCARDPSGIAAAGPASRYYYGMDVWGQGTTVTVSS

SEQ ID NO: 5824 - protein, 129 aa, Artificial Sequence
  source: /note="Description of Artificial Sequence: Synthetic polypeptide"
QVQLVQSGAEVKKPGASVKVSCKASGYTFTSQYMSWVRQAPGQGLEWMGIINPVGGSTSYAQKFQGRVTMTRDTSTSTVYMELSSLRSEDTAVYYCARDPSGIAAAGPASRYYYGMDVWGQGTTVTVSS

SEQ ID NO: 5825 - protein, 129 aa, Artificial Sequence
  source: /note="Description of Artificial Sequence: Synthetic polypeptide"
QVQLVQSGAEVKKPGASVKVSCKASGYTFTSQYMSWVRQAPGQGLEWMGIINPYGGSTSYAQKFQGRVTMTRDTSTSTVYMELSSLRSEDTAVYYCARDPSGIAAAGPASRYYYGMDVWGQGTTVTVSS

SEQ ID NO: 5826 - protein, 129 aa, Artificial Sequence
  source: /note="Description of Artificial Sequence: Synthetic polypeptide"
QVQLVQSGAEVKKPGASVKVSCKASGYTFTSRYMSWVRQAPGQGLEWMGIINPLGGSTSYAQKFQGRVTMTRDTSTSTVYMELSSLRSEDTAVYYCARDPSGIAAAGPASRYYYGMDVWGQGTTVTVSS

SEQ ID NO: 5827 - protein, 129 aa, Artificial Sequence
  source: /note="Description of Artificial Sequence: Synthetic polypeptide"
QVQLVQSGAEVKKPGASVKVSCKASGYTFTSRYMSWVRQAPGQGLEWMGIINPVGGSASYARKFQGRVTMTRDTSTSTVYMELSSLRSEDTAVYYCARDPSGIAAAGPASRYYYGMDVWGQGTTVTVSS

SEQ ID NO: 5828 - protein, 129 aa, Artificial Sequence
  source: /note="Description of Artificial Sequence: Synthetic polypeptide"
QVQLVQSGAEVKKPGASVKVSCKASGYTFTSRYMSWVRQAPGQGLEWMGIINPVGGSTSYAQKFQGRVTMTRDTSTSTVYMELSSLRSEDTAVYYCARDPSGIAAAGPAGRYYYGMDVWGQGTAVTVSS

SEQ ID NO: 5829 - protein, 129 aa, Artificial Sequence
  source: /note="Description of Artificial Sequence: Synthetic polypeptide"
QVQLVQSGAEVKKPGASVKVSCKASGYTFTSRYMSWVRQAPGQGLEWMGIINPVGGSTSYAQKFQGRVTMTRDTSTSTVYMELSSLRSEDTAVYYCARDPSGIAAAGPASRHYYGMDVWGQGTTVTVSS

SEQ ID NO: 5830 - protein, 129 aa, Artificial Sequence
  source: /note="Description of Artificial Sequence: Synthetic polypeptide"
QVQLVQSGAEVKKPGASVKVSCKASGYTFTSRYMSWVRQAPGQGLEWMGIINPVGGSTSYAQKFQGRVTMTRDTSTSTVYMELSSLRSEDTAVYYCARDPSGIAAAGPASRYYYGMDVWGQGTTVTVSS

SEQ ID NO: 5831 - protein, 129 aa, Artificial Sequence
  source: /note="Description of Artificial Sequence: Synthetic polypeptide"
QVQLVQSGAEVKKPGASVKVSCKASGYTFTSRYMSWVRQAPGQGLEWMGIINPVGGSTSYAQKFQGRVTMTRDTSTSTVYMELSSLRSEDTAVYYCARDPSGIAAPGPASRGYYGMDVWGQGTTVTVSS

SEQ ID NO: 5832 - protein, 129 aa, Artificial Sequence
  source: /note="Description of Artificial Sequence: Synthetic polypeptide"
QVQLVQSGAEVKKPGASVKVSCKASGYTFTSRYMSWVRQAPGQGLEWMGIINPVGGSTSYAQKFQGRVTMTRDTSTSTVYMELSSLRSEDTAVYYCARDPSGIALAGPAGRYYYGMDVWGQGTTVTVSS

SEQ ID NO: 5833 - protein, 129 aa, Artificial Sequence
  source: /note="Description of Artificial Sequence: Synthetic polypeptide"
QVQLVQSGAEVKKPGASVKVSCKASGYTFTSRYMSWVRQAPGQGLEWMGIINPVGGSTSYAQKFQGRVTMTRDTSTSTVYMELSSLRSEDTAVYYCARDPSGIALAGPASRGYYGMDVWGQGTTVTVSS

SEQ ID NO: 5834 - protein, 129 aa, Artificial Sequence
  source: /note="Description of Artificial Sequence: Synthetic polypeptide"
QVQLVQSGAEVKKPGASVKVSCKASGYTFTSRYMSWVRQAPGQGLEWMGIINPVGGSTSYAQKFQGRVTMTRDTSTSTVYMELSSLRSEDTAVYYCARDPSGIALAGPASRPYYGMDVWGQGTTVTVSS

SEQ ID NO: 5835 - protein, 129 aa, Artificial Sequence
  source: /note="Description of Artificial Sequence: Synthetic polypeptide"
QVQLVQSGAEVKKPGASVKVSCKASGYTFTSRYMSWVRQAPGQGLEWMGIINPVGGSTSYAQKFQGRVTMTRDTSTSTVYMELSSLRSEDTAVYYCARDPSGIALAGPASRYYLGMDVWGQGTTVTVSS

SEQ ID NO: 5836 - protein, 129 aa, Artificial Sequence
  source: /note="Description of Artificial Sequence: Synthetic polypeptide"
QVQLVQSGAEVKKPGASVKVSCKASGYTFTSRYMSWVRQAPGQGLEWMGIINPVGGSTSYAQKFQGRVTMTRDTSTSTVYMELSSLRSEDTAVYYCARDPSGIALAGPGSRYYRGMDVWGQGTTVTVSS

SEQ ID NO: 5837 - protein, 129 aa, Artificial Sequence
  source: /note="Description of Artificial Sequence: Synthetic polypeptide"
QVQLVQSGAEVKKPGASVKVSCKASGYTFTSRYMSWVRQAPGQGLEWMGIINPVGGSTSYAQKFQGRVTMTRDTSTSTVYMELSSLRSEDTAVYYCARDPSGIAVAGPASRYYYGMDVWGQGTTVTVSS

SEQ ID NO: 5838 - protein, 129 aa, Artificial Sequence
  source: /note="Description of Artificial Sequence: Synthetic polypeptide"
QVQLVQSGAEVKKPGASVKVSCKASGYTFTSTYMSWVRQAPGQGLEWMGIINPVGGSTSYAQKFQGRVTMTRDTSTSTVYMELSSLRSEDTAVYYCARDPSGIAAAGPASRYYYGMDVWGQGTTVTVSS

SEQ ID NO: 5839 - protein, 129 aa, Artificial Sequence
  source: /note="Description of Artificial Sequence: Synthetic polypeptide"
QVQLVQSGAEVKKPGASVKVSCKASGYTFTSTYMSWVRQAPGQGLEWMGIINPWGGTTSYAQKFQGRVTMTRDTSTSTVYMELSSLRSEDTAVYYCARDPSGIAAAGPASRYYYGMDVWGQGTTVTVSS

SEQ ID NO: 5840 - protein, 129 aa, Artificial Sequence
  source: /note="Description of Artificial Sequence: Synthetic polypeptide"
QVQLVQSGAEVKKPGASVKVSCKASGYTFTSTYMSWVRQAPGQGLEWMGIINPYGGSTSYAQKFQGRVTMTRDTSTSTVYMELSSLRSEDTAVYYCARDPSGIAAAGPASRYYYGMDVWGQGTTVTVSS

SEQ ID NO: 5841 - protein, 125 aa, Artificial Sequence
  source: /note="Description of Artificial Sequence: Synthetic polypeptide"
QVQLVQSGAEVKKPGASVKVSCKASGYTFTSYGISWVRQAPGQGLEWMGSISAYNGNTNYAQKLQGRVTMTTDTSTSTAYMELRSLRSDDTAVYYCARDPSGGTTLHYYYGMDVWGQGTTVTVSS

SEQ ID NO: 5842 - protein, 121 aa, Artificial Sequence
  source: /note="Description of Artificial Sequence: Synthetic polypeptide"
QVQLVQSGAEVKKPGASVKVSCKASGYTFTSYGISWVRQAPGQGLEWMGWISAYNGNTNYAQKLQGRVTMTTDTSTSTAYMELRSLRSDDTAVYYCARDLPKYKWGWFDPWGQGTLVTVSS

SEQ ID NO: 5843 - protein, 126 aa, Artificial Sequence
  source: /note="Description of Artificial Sequence: Synthetic polypeptide"
QVQLVQSGAEVKKPGASVKVSCKASGYTFTSYGISWVRQAPGQGLEWMGWISAYNGNTNYAQKLQGRVTMTTDTSTSTAYMELRSLRSDDTAVYYCARDPGGYGPTLYYYYGMDVWGQGTTVTVSS

SEQ ID NO: 5844 - protein, 129 aa, Artificial Sequence
  source: /note="Description of Artificial Sequence: Synthetic polypeptide"
QVQLVQSGAEVKKPGASVKVSCKASGYTFTSYLMSWVRQAPGQGLEWMGIINPLGGSTSYAQKFQGRVTMTRDTSTSTVYMELSSLRSEDTAVYYCARDPSGIAAAGPASRYYYGMDVWGQGTTVTVSS

SEQ ID NO: 5845 - protein, 129 aa, Artificial Sequence
  source: /note="Description of Artificial Sequence: Synthetic polypeptide"
QVQLVQSGAEVKKPGASVKVSCKASGYTFTSYLMSWVRQAPGQGLEWMGIINPVGGSTSYAQKFQGRVTMTRDTSTSTVYMELSSLRSEDTAVYYCARDPSGIAAAGPASRYYYGMDVWGQGTTVTVSS

SEQ ID NO: 5846 - protein, 129 aa, Artificial Sequence
  source: /note="Description of Artificial Sequence: Synthetic polypeptide"
QVQLVQSGAEVKKPGASVKVSCKASGYTFTSYLMSWVRQAPGQGLEWMGVINPFGGSTSYAQKFQGRVTMTRDTSTSTVYMELSSLRSEDTAVYYCARDPSGIAAAGPASRYYYGMDVWGQGTTVTVSS

SEQ ID NO: 5847 - protein, 124 aa, Artificial Sequence
  source: /note="Description of Artificial Sequence: Synthetic polypeptide"
QVQLVQSGAEVKKPGASVKVSCKASGYTFTSYMMHWVRQAPGQGLEWMGIIGPSGGYTSYAQKFQGRVTMTRDTSISTAYMELSRLRSDDTAVYYCARGKRSSGWYEGYGMDVWGQGTTVTVSS

SEQ ID NO: 5848 - protein, 129 aa, Artificial Sequence
  source: /note="Description of Artificial Sequence: Synthetic polypeptide"
QVQLVQSGAEVKKPGASVKVSCKASGYTFTSYTMSWVRQAPGQGLEWMGIINPYGGSTSYAQKFQGRVTMTRDTSTSTVYMELSSLRSEDTAVYYCARDPSGIAAAGPASRYYYGMDVWGQGTTVTVSS

SEQ ID NO: 5849 - protein, 124 aa, Artificial Sequence
  source: /note="Description of Artificial Sequence: Synthetic polypeptide"
QVQLVQSGAEVKKPGASVKVSCKASGYTFVAYYMHWVRQAPGQGLEWMGWINPNSGATRYAQKFQGRVTMTRDTSISTAYMELSRLRSDDTAVYYCARGKRSSGWYEGYGMDVWGQGTTVTVSS

SEQ ID NO: 5850 - protein, 129 aa, Artificial Sequence
  source: /note="Description of Artificial Sequence: Synthetic polypeptide"
QVQLVQSGAEVKKPGASVKVSCKASGYTLTSRYMSWVRQAPGQGLEWMGIINPVGGSTSYAQKFRGRVTMTRDTSTSTVYMELSSLRSEDTAVYYCARDPSGIAAAGPASRYYYGMDVWGQGTTVTVSS

SEQ ID NO: 5851 - protein, 129 aa, Artificial Sequence
  source: /note="Description of Artificial Sequence: Synthetic polypeptide"
QVQLVQSGAEVKKPGASVKVSCKTSGYTFTKYYMSWVRQAPGQGPEWMGIINPIGGSTSYAQKFQGRVTMTRDTSTSTVYMELSSLRSEDTAVYYCVRDPSGIAAAGPASRYYYGMDVWGQGTTVTVSS

SEQ ID NO: 5852 - protein, 124 aa, Artificial Sequence
  source: /note="Description of Artificial Sequence: Synthetic polypeptide"
QVQLVQSGAEVKKPGSSVKVSCKASGGTFGSYAISWVRQAPGQGLEWMGGIIPQFGTANYAQKFQGRVTITADESTSTAYMELSSLRSEDTAVYYCARQGRKTGYYYYYGMDVWGQGTTVTVSS

SEQ ID NO: 5853 - protein, 124 aa, Artificial Sequence
  source: /note="Description of Artificial Sequence: Synthetic polypeptide"
QVQLVQSGAEVKKPGSSVKVSCKASGGTFRNYAISWVRQAPGQGLEWMGGIIPIGGWANYAQKFQGRVTITADESTSTAYMELSSLRSEDTAVYYCARQGRKTGYYYYYGMDVWGQGTTVTVSS

SEQ ID NO: 5854 - protein, 124 aa, Artificial Sequence
  source: /note="Description of Artificial Sequence: Synthetic polypeptide"
QVQLVQSGAEVKKPGSSVKVSCKASGGTFRSYAISWVRQAPGQGLEWMGGIIPGFGTAWYAQKFQGRVTITADESTSTAYMELSSLRSEDTAVYYCARQGRKTGYYYYYGMDVWGQGTTVTVSS

SEQ ID NO: 5855 - protein, 124 aa, Artificial Sequence
  source: /note="Description of Artificial Sequence: Synthetic polypeptide"
QVQLVQSGAEVKKPGSSVKVSCKASGGTFSSYAISWVRQAPGQGLEWMGGIIPGFGRANYAQKFQGRVTITADESTSTAYMELSSLRSEDTAVYYCARQGRKTGYYYYYGMDVWGQGTTVTVSS

SEQ ID NO: 5856 - protein, 124 aa, Artificial Sequence
  source: /note="Description of Artificial Sequence: Synthetic polypeptide"
QVQLVQSGAEVKKPGSSVKVSCKASGGTFSSYAISWVRQAPGQGLEWMGGIIPGFGTAQYAQKFQGRVTITADESTSTAYMELSSLRSEDTAVYYCARQGRKTGYYYYYGMDVWGQGTTVTVSS

SEQ ID NO: 5857 - protein, 120 aa, Artificial Sequence
  source: /note="Description of Artificial Sequence: Synthetic polypeptide"
QVQLVQSGAEVKKPGSSVKVSCKASGGTFSSYAISWVRQAPGQGLEWMGGIIPIFGTANYAQKFQGRVTITADESTSTAYMELSSLRSEDTAVYYCARSPYSGTRDFDLWGRGTLVTVSS

SEQ ID NO: 5858 - protein, 124 aa, Artificial Sequence
  source: /note="Description of Artificial Sequence: Synthetic polypeptide"
QVQLVQSGAEVKKPGSSVKVSCKASGGTFSSYAISWVRQAPGQGLEWMGGIIPSFGTASYAQKFQGRVTITADESTSTAYMELSSLRSEDTAVYYCARQGRKTGYYYYYGMDVWGQGTTVTVSS

SEQ ID NO: 5859 - protein, 124 aa, Artificial Sequence
  source: /note="Description of Artificial Sequence: Synthetic polypeptide"
QVQLVQSGAEVKKPGSSVKVSCKASGGTFSSYAISWVRQAPGQGLEWMGGIVPRFGTANYAQKFQGRVTITADESTSTAYMELSSLRSEDTAVYYCARQGRKTGYYYYYGMDVWGQGTTVTVSS

SEQ ID NO: 5860 - protein, 129 aa, Artificial Sequence
  source: /note="Description of Artificial Sequence: Synthetic polypeptide"
QVQLVQSGAEVRKPGASVKVSCKASGYTFTKYYMSWVRQAPGQGLEWMGIINPIGGSTSYAQKFQGRVTMTRDTSTSTVYMELSSLRSEDTAVYYCARDPSGIAAAFPAGRYYYGMDVWGQGTTVTVSS

SEQ ID NO: 5861 - protein, 129 aa, Artificial Sequence
  source: /note="Description of Artificial Sequence: Synthetic polypeptide"
QVRLVQSGAEVRKPGASVKVSCKASGYTFTKYYMSWVRQAPGQGLEWMGIINPIGGSTSYAQKFQGRVTMTRDTSTSTVYMELSSLRSEDTAVYYCARDPSGIAAAFPASRSYYGMDVWGQGTTVTVSS

SEQ ID NO: 5862 - protein, 467 aa, Artificial Sequence
  source: /note="Description of Artificial Sequence: Synthetic polypeptide"
MGWSCIILFLVATATGVHSEVQLVESGGGLVQPGGSLRLSCAASGFTFTDYTMDWVRQAPGKGLEWVADVNPNSGGSIYNQRFKGRFTLSVDRSKNTLYLQMNSLRAEDTAVYYCARNLGPSFYFDYWGQGTLVTVSSASTKGPSVFPLAPSSKSTSGGTAALGCLVKDYFPEPVTVSWNSGALTSGVHTFPAVLQSSGLYSLSSVVTVPSSSLGTQTYICNVNHKPSNTKVDKKVEPKSCDKTHTCPPCPAPELLGGPSVFLFPPKPKDTLMISRTPEVTCVVVDVSHEDPEVKFNWYVDGVEVHNAKTKPREEQYNSTYRVVSVLTVLHQDWLNGKEYKCKVSNKALPAPIEKTISKAKGQPREPQVYTLPPSREEMTKNQVSLTCLVKGFYPSDIAVEWESNGQPENNYKTTPPVLDSDGSFFLYSKLTVDKSRWQQGNVFSCSVMHEALHNHYTQKSLSLSPG

SEQ ID NO: 5863 - protein, 451 aa, Artificial Sequence
  source: /note="Description of Artificial Sequence: Synthetic polypeptide"
EVQLVQSGGGVERPGGSLRLSCAASGFTFDDYAMSWVRQAPGKGLEWVSGINWQGGSTGYADSVKGRVTISRDNAKNSLYLQMNSLRAEDTAVYYCAKILGAGRGWYFDYWGKGTTVTVSSASTKGPSVFPLAPSSKSTSGGTAALGCLVKDYFPEPVTVSWNSGALTSGVHTFPAVLQSSGLYSLSSVVTVPSSSLGTQTYICNVNHKPSNTKVDKKVEPKSCDKTHTCPPCPAPELLGGPSVFLFPPKPKDTLMISRTPEVTCVVVDVSHEDPEVKFNWYVDGVEVHNAKTKPREEQYNSTYRVVSVLTVLHQDWLNGKEYKCKVSNKALPAPIEKTISKAKGQPREPQVYTLPPSREEMTKNQVSLTCLVKGFYPSDIAVEWESNGQPENNYKTTPPVLDSDGSFFLYSKLTVDKSRWQQGNVFSCSVMHEALHNHYTQKSLSLSPGK

SEQ ID NO: 5864 - protein, 451 aa, Artificial Sequence
  source: /note="Description of Artificial Sequence: Synthetic polypeptide"
EVQLVQSGGGVERPGGSLRLSCAASGFTFDDYGMSWVRQAPGKGLEWVSGINWNGGSTGYADSVKGRVTISRDNAKNSLYLQMNSLRAEDTAVYYCAKILGAGRGWYFDLWGKGTTVTVSSASTKGPSVFPLAPSSKSTSGGTAALGCLVKDYFPEPVTVSWNSGALTSGVHTFPAVLQSSGLYSLSSVVTVPSSSLGTQTYICNVNHKPSNTKVDKKVEPKSCDKTHTCPPCPAPELLGGPSVFLFPPKPKDTLMISRTPEVTCVVVDVSHEDPEVKFNWYVDGVEVHNAKTKPREEQYNSTYRVVSVLTVLHQDWLNGKEYKCKVSNKALPAPIEKTISKAKGQPREPQVYTLPPSREEMTKNQVSLTCLVKGFYPSDIAVEWESNGQPENNYKTTPPVLDSDGSFFLYSKLTVDKSRWQQGNVFSCSVMHEALHNHYTQKSLSLSPGK

SEQ ID NO: 5865 - protein, 452 aa, Artificial Sequence
  source: /note="Description of Artificial Sequence: Synthetic polypeptide"
EVQLVESGGGLVQPGGSLRLSCAASGYTFTSYNMHWVRQAPGKGLEWVGAIYPGNGDTSYNQKFKGRFTISVDKSKNTLYLQMNSLRAEDTAVYYCARVVYYSNSYWYFDVWGQGTLVTVSSASTKGPSVFPLAPSSKSTSGGTAALGCLVKDYFPEPVTVSWNSGALTSGVHTFPAVLQSSGLYSLSSVVTVPSSSLGTQTYICNVNHKPSNTKVDKKVEPKSCDKTHTCPPCPAPELLGGPSVFLFPPKPKDTLMISRTPEVTCVVVDVSHEDPEVKFNWYVDGVEVHNAKTKPREEQYNSTYRVVSVLTVLHQDWLNGKEYKCKVSNKALPAPIEKTISKAKGQPREPQVYTLPPSREEMTKNQVSLTCLVKGFYPSDIAVEWESNGQPENNYKTTPPVLDSDGSFFLYSKLTVDKSRWQQGNVFSCSVMHEALHNHYTQKSLSLSPGK

SEQ ID NO: 5866 - protein, 452 aa, Artificial Sequence
  source: /note="Description of Artificial Sequence: Synthetic polypeptide"
EVQLVESGGGLVQPGGSLRLSCAASGYTFTSYNMHWVRQAPGKGLEWVGAIYPGNGATSYNQKFKGRFTISVDKSKNTLYLQMNSLRAEDTAVYYCARVVYYSYRYWYFDVWGQGTLVTVSSASTKGPSVFPLAPSSKSTSGGTAALGCLVKDYFPEPVTVSWNSGALTSGVHTFPAVLQSSGLYSLSSVVTVPSSSLGTQTYICNVNHKPSNTKVDKKVEPKSCDKTHTCPPCPAPELLGGPSVFLFPPKPKDTLMISRTPEVTCVVVDVSHEDPEVKFNWYVDGVEVHNAKTKPREEQYNATYRVVSVLTVLHQDWLNGKEYKCKVSNAALPAPIAATISKAKGQPREPQVYTLPPSREEMTKNQVSLTCLVKGFYPSDIAVEWESNGQPENNYKTTPPVLDSDGSFFLYSKLTVDKSRWQQGNVFSCSVMHEALHNHYTQKSLSLSPGK

SEQ ID NO: 5867 - protein, 451 aa, Artificial Sequence
  source: /note="Description of Artificial Sequence: Synthetic polypeptide"
EVQLVESGGGLVQPGGSLRLSCAASGYTFTSYNMHWVRQAPGKGLEWVGAIYPGNGDTSYNQKFKGRFTISVDKSKNTLYLQMNSLRAEDTAVYYCARVVYYSNSYWYFDVWGQGTLVTVSSASTKGPSVFPLAPSSKSTSGGTAALGCLVKDYFPEPVTVSWNSGALTSGVHTFPAVLQSSGLYSLSSVVTVPSSSLGTQTYICNVNHKPSNTKVDKKVEPKSCDKTHTCPPCPAPELLGGPSVFLFPPKPKDTLMISRTPEVTCVVVDVSHEDPEVKFNWYVDGVEVHNAKTKPREEQYNSTYRVVSVLTVLHQDWLNGKEYKCKVSNKALPAPIEKTISKAKGQPREPQVYTLPPSREEMTKNQVSLTCLVKGFYPSDIAVEWESNGQPENNYKTTPPVLDSDGSFFLYSKLTVDKSRWQQGNVFSCSVMHEALHNHYTQKSLSLSPG

SEQ ID NO: 5868 - protein, 451 aa, Artificial Sequence
  source: /note="Description of Artificial Sequence: Synthetic polypeptide"
EVQLVESGGGLVQPGGSLRLSCAASGYTFTSYNMHWVRQAPGKGLEWVGAIYPGNGATSYNQKFKGRFTISVDKSKNTLYLQMNSLRAEDTAVYYCARVVYYSYRYWYFDVWGQGTLVTVSSASTKGPSVFPLAPSSKSTSGGTAALGCLVKDYFPEPVTVSWNSGALTSGVHTFPAVLQSSGLYSLSSVVTVPSSSLGTQTYICNVNHKPSNTKVDKKVEPKSCDKTHTCPPCPAPELLGGPSVFLFPPKPKDTLMISRTPEVTCVVVDVSHEDPEVKFNWYVDGVEVHNAKTKPREEQYNATYRVVSVLTVLHQDWLNGKEYKCKVSNAALPAPIAATISKAKGQPREPQVYTLPPSREEMTKNQVSLTCLVKGFYPSDIAVEWESNGQPENNYKTTPPVLDSDGSFFLYSKLTVDKSRWQQGNVFSCSVMHEALHNHYTQKSLSLSPG

SEQ ID NO: 5869 - protein, 17 aa, Artificial Sequence
  source: /note="Description of Artificial Sequence: Synthetic peptide"
AIDTGGGRTYYADSVKG

SEQ ID NO: 5870 - protein, 129 aa, Artificial Sequence
  source: /note="Description of Artificial Sequence: Synthetic polypeptide"
QVQLVQSGGGLVQPGGSLRLSCAASGFTFSSYWMYWVRQVPGKGLEWVSAIDTGGGRTYYADSVKGRFAISRVNAKNTMYLQMNSLRAEDTAVYYCARDEGGGTGWGVLKDWPYGLDAWGQGTLVTVSS

SEQ ID NO: 5871 - protein, 459 aa, Artificial Sequence
  source: /note="Description of Artificial Sequence: Synthetic polypeptide"
QVQLVQSGGGLVQPGGSLRLSCAASGFTFSSYWMYWVRQVPGKGLEWVSAIDTGGGRTYYADSVKGRFAISRVNAKNTMYLQMNSLRAEDTAVYYCARDEGGGTGWGVLKDWPYGLDAWGQGTLVTVSSASTKGPSVFPLAPSSKSTSGGTAALGCLVKDYFPEPVTVSWNSGALTSGVHTFPAVLQSSGLYSLSSVVTVPSSSLGTQTYICNVNHKPSNTKVDKRVEPKSCDKTHTCPPCPAPEAAGGPSVFLFPPKPKDTLMISRTPEVTCVVVDVSHEDPEVKFNWYVDGVEVHNAKTKPREEQYNSTYRVVSVLTVLHQDWLNGKEYKCKVSNKALPAPIEKTISKYTLPPSREEMAKGQPREPQVTKNQVSLTCLVKGFYPSDIAVEWESNGQPENNYKTTPPVLDSDGSFFLYSKLTVDKSRWQQGNVFSCSVMHEALHNHYTQKSLSLSPGK

SEQ ID NO: 5872 - protein, 444 aa, Artificial Sequence
  source: /note="Description of Artificial Sequence: Synthetic polypeptide"
QVQLVQSGAEVKKPGASVKVSCKASGYTFTSYWINWVRQAPGQGLEWMGNIYPGSSLTNYNEKFKNRVTMTRDTSTSTVYMELSSLRSEDTAVYYCARLSTGTFAYWGQGTLVTVSSASTKGPSVFPLAPCSRSTSESTAALGCLVKDYFPEPVTVSWNSGALTSGVHTFPAVLQSSGLYSLSSVVTVPSSSLGTKTYTCNVDHKPSNTKVDKRVESKYGPPCPPCPAPEFLGGPSVFLFPPKPKDTLMISRTPEVTCVVVDVSQEDPEVQFNWYVDGVEVHNAKTKPREEQFNSTYRVVSVLTVLHQDWLNGKEYKCKVSNKGLPSSIEKTISKAKGQPREPQVYTLPPSQEEMTKNQVSLTCLVKGFYPSDIAVEWESNGQPENNYKTTPPVLDSDGSFFLYSRLTVDKSRWQEGNVFSCSVMHEALHNHYTQKSLSLSLGK

SEQ ID NO: 5873 - protein, 443 aa, Artificial Sequence
  source: /note="Description of Artificial Sequence: Synthetic polypeptide"
QVQLVQSGAEVKKPGASVKVSCKASGYTFTSYWINWVRQAPGQGLEWMGNIYPGSSLTNYNEKFKNRVTMTRDTSTSTVYMELSSLRSEDTAVYYCARLSTGTFAYWGQGTLVTVSSASTKGPSVFPLAPCSRSTSESTAALGCLVKDYFPEPVTVSWNSGALTSGVHTFPAVLQSSGLYSLSSVVTVPSSSLGTKTYTCNVDHKPSNTKVDKRVESKYGPPCPPCPAPEFLGGPSVFLFPPKPKDTLMISRTPEVTCVVVDVSQEDPEVQFNWYVDGVEVHNAKTKPREEQFNSTYRVVSVLTVLHQDWLNGKEYKCKVSNKGLPSSIEKTISKAKGQPREPQVYTLPPSQEEMTKNQVSLTCLVKGFYPSDIAVEWESNGQPENNYKTTPPVLDSDGSFFLYSRLTVDKSRWQEGNVFSCSVMHEALHNHYTQKSLSLSLG

SEQ ID NO: 5874 - protein, 117 aa, Artificial Sequence
  source: /note="Description of Artificial Sequence: Synthetic polypeptide"
QVQLVQSGAEVKKPGASVKVSCKASGYTFTSYWINWVRQAPGQGLEWMGNIWPGSSLTNYNEKFKNRVTMTRDTSTSTVYMELSSLRSEDTAVYYCARLLTGTFAYWGQGTLVTVSS

SEQ ID NO: 5875 - protein, 432 aa, Artificial Sequence
  source: /note="Description of Artificial Sequence: Synthetic polypeptide"
QVQLVESGGGWQPGRSLRLDCKASGITFSNSGMHWVRQAPGKGLEWVAVRWYDGSKRYYADSVKGRFTISRDNSKNTLFLQMNSLRAEDTAVYYCATNDDYWGQGTLVTVSSASTKGPSVFPLAPCSRSTSESTAALGCLVDYFPEPVTVSWNSGALTSGVHTFPAVLQSSGLYSLSSVVTVPSSSLGTTYTCNVDHKPSNTKVDRVESYGPPCPPCPAPEFLGGPSVFLFPPKPKDTLMISRTPEVTCWVDVSQEDPEVQFNWYYDGVEVHNATKPREEQFNSTYRVVSVLTVLHQDWLNGKEYKCKVSNKGLPSSIEKTISKAGQPREPQVYTLPPSQEEMTKNQVSLTCLVKGFYPSDIAVEWESNGQPEKNYKTTPPVLDSDGSFFLYSRLTVDKSRWQEGNVFSCSVMHEALHNHYTQKSLSLSLGK

SEQ ID NO: 5876 - protein, 117 aa, Artificial Sequence
  source: /note="Description of Artificial Sequence: Synthetic polypeptide"
EVQLLESGGGLVQPGGSLRLSCAASGFTFSSYIMWVRQAPGKGLEWVSSIYPSGGITFYADKGRFTISRDNSKNTLYLQMNSLRAEDTAVYYCARIKLGTVTTVDYWGQGTLVTVSS

SEQ ID NO: 5877 - protein, 445 aa, Artificial Sequence
  source: /note="Description of Artificial Sequence: Synthetic polypeptide"
QVQLVQSGAEVKKPGASVKVSCKASGYSFTSYWMNWVRQAPGQGLEWIGVIHPSDSETWLDQKFKDRVTITVDKSTSTAYMELSSLRSEDTAVYYCAREHYGTSPFAYWGQGTLVTVSSASTKGPSVFPLAPCSRSTSESTAALGCLVKDYFPEPVTVSWNSGALTSGVHTFPAVLQSSGLYSLSSVVTVPSSSLGTKTYTCNVDHKPSNTKVDKRVESKYGPPCPPCPAPEFLGGPSVFLFPPKPKDTLMISRTPEVTCVVVDVSQEDPEVQFNWYVDGVEVHNAKTKPREEQFNSTYRVVSVLTVLHQDWLNGKEYKCKVSNKGLPSSIEKTISKAKGQPREPQVYTLPPSQEEMTKNQVSLTCLVKGFYPSDIAVEWESNGQPENNYKTTPPVLDSDGSFFLYSRLTVDKSRWQEGNVFSCSVMHEALHNHYTQKSLSLSLG

SEQ ID NO: 5878 - protein, 448 aa, Artificial Sequence
  source: /note="Description of Artificial Sequence: Synthetic polypeptide"
QVQLVQSGAEVKKPGASVKVSCKASGHIFSNYWIQWVRQAPGQGLEWMGEILPGSGHTEYTENFKDRVTMTRDTSTSTVYMELSSLRSEDTAVYYCARYFFGSSPNWYFDVWGQGTLVTVSSASTKGPSVFPLAPCSRSTSESTAALGCLVKDYFPEPVTVSWNSGALTSGVHTFPAVLQSSGLYSLSSVVTVPSSNFGTQTYTCNVDHKPSNTKVDKTVERKCCVECPPCPAPPVAGPSVFLFPPKPKDTLMISRTPEVTCVVVDVSQEDPEVQFNWYVDGVEVHNAKTKPREEQFNSTYRVVSVLTVLHQDWLNGKEYKCKVSNKGLPSSIEKTISKAKGQPREPQVYTLPPSQEEMTKNQVSLTCLVKGFYPSDIAVEWESNGQPENNYKTTPPVLDSDGSFFLYSRLTVDKSRWQEGNVFSCSVLHEALHSHYTQKSLSLSLGK

SEQ ID NO: 5879 - protein, 469 aa, Artificial Sequence
  source: /note="Description of Artificial Sequence: Synthetic polypeptide"
MGWSCIILFLVATATGVHSLEQVQLVQSGAEVKKPGASVKVSCKASGHIFSNYWIQWVRQAPGQGLEWMGEILPGSGHTEYTENFKDRVTMTRDTSTSTVYMELSSLRSEDTAVYYCARYFFGSSPNWYFDVWGQGTLVTVSSASTKGPSVFPLAPCSRSTSESTAALGCLVKDYFPEPVTVSWNSGALTSGVHTFPAVLQSSGLYSLSSVVTVPSSNFGTQTYTCNVDHKPSNTKVDKTVERKCCVECPPCPAPPVAGPSVFLFPPKPKDTLMISRTPEVTCVVVDVSQEDPEVQFNWYVDGVEVHNAKTKPREEQFNSTYRVVSVLTVLHQDWLNGKEYKCKVSNKGLPSSIEKTISKAKGQPREPQVYTLPPSQEEMTKNQVSLTCLVKGFYPSDIAVEWESNGQPENNYKTTPPVLDSDGSFFLYSRLTVDKSRWQEGNVFSCSVMHEALHNHYTQKSLSLSLGK

SEQ ID NO: 5880 - protein, 469 aa, Artificial Sequence
  source: /note="Description of Artificial Sequence: Synthetic polypeptide"
MGWSCIILFLVATATGVHSLEQVQLVQSGAEVKKPGASVKVSCKASGYIFSNYWIQWVRQAPGQGLEWMGEILPGSGSTEYTENFKDRVTMTRDTSTSTVYMELSSLRSEDTAVYYCARYFFGSSPNWYFDVWGQGTLVTVSSASTKGPSVFPLAPCSRSTSESTAALGCLVKDYFPEPVTVSWNSGALTSGVHTFPAVLQSSGLYSLSSVVTVPSSNFGTQTYTCNVDHKPSNTKVDKTVERKCCVECPPCPAPPVAGPSVFLFPPKPKDTLMISRTPEVTCVVVDVSQEDPEVQFNWYVDGVEVHNAKTKPREEQFNSTYRVVSVLTVLHQDWLNGKEYKCKVSNKGLPSSIEKTISKAKGQPREPQVYTLPPSQEEMTKNQVSLTCLVKGFYPSDIAVEWESNGQPENNYKTTPPVLDSDGSFFLYSRLTVDKSRWQEGNVFSCSVMHEALHNHYTQKSLSLSLGK

SEQ ID NO: 5881 - protein, 447 aa, Artificial Sequence
  source: /note="Description of Artificial Sequence: Synthetic polypeptide"
QVQLQQPGAELVRPGTSVKLSCKASGYTFTSSWMHWVKQRPGQGLEWIGVIDPHDSYTNYNQKFKGKATLTVDTSSSTAYMQLSSLTSEDSAVYYCARGGGSSYNRYFDVWGTGTTVTVSSASTKGPSVFPLAPCSRSTSESTAALGCLVKDYFPEPVTVSWNSGALTSGVHTFPAVLQSSGLYSLSSVVTVPSSNFGTQTYTCNVDHKPSNTKVDKTVERKCCVECPPCPAPPVAGPSVFLFPPKPKDTLMISRTPEVTCVVVDVSQEDPEVQFNWYVDGVEVHNAKTKPREEQFNSTYRVVSVLTVLHQDWLNGKEYKCKVSNKGLPSSIEKTISKAKGQPREPQVYTLPPSQEEMTKNQVSLTCLVKGFYPSDIAVEWESNGQPENNYKTTPPVLDSDGSFFLYSRLTVDKSRWQEGNVFSCSVMHEALHNHYTQKSLSLSLGK

SEQ ID NO: 5882 - protein, 447 aa, Artificial Sequence
  source: /note="Description of Artificial Sequence: Synthetic polypeptide"
QVQLQQPGAELVRPGTSVKLSCKASGYTFTSSWMHWVKQRPGQGLEWIGVIDPHDSYTNYNQKFKGKATLTVDTSSSTAYMQLSSLTSEDSAVYYCARGGGSSYNRYFDVWGTGTTVTVSSASTKGPSVFPLAPCSRSTSESTAALGCLVKDYFPEPVTVSWNSGALTSGVHTFPAVLQSSGLYSLSSVVTVPSSNFGTQTYTCNVDHKPSNTKVDKTVERKCCVECPPCPAPPVAGPSVFLFPPKPKDTLMISRTPEVTCVVVDVSQEDPEVQFNWYVDGVEVHNAKTKPREEQFNSTYRVVSVLTVLHQDWLNGKEYKCKVSNKGLPSSIEKTISKAKGQPREPQVYTLPPSQEEMTKNQVSLTCLVKGFYPSDIAVEWESNGQPENNYKTTPPVLDSDGSFFLYSRLTVDKSRWQEGNVFSCSVLHEALHSHYTQKSLSLSLGK

SEQ ID NO: 5883 - protein, 447 aa, Artificial Sequence
  source: /note="Description of Artificial Sequence: Synthetic polypeptide"
QVQLQQPGAELVRPGTSVKLSCKASGYTFTSSWMHWVKQRPGQGLEWIGVIDPSDSYTNYNQKFKGKATLTVDTSSSTAYMQLSSLTSEDSAVYYCARGGGSSYNRYFDVWGTGTTVTVSSASTKGPSVFPLAPCSRSTSESTAALGCLVKDYFPEPVTVSWNSGALTSGVHTFPAVLQSSGLYSLSSVVTVPSSNFGTQTYTCNVDHKPSNTKVDKTVERKCCVECPPCPAPPVAGPSVFLFPPKPKDTLMISRTPEVTCVVVDVSQEDPEVQFNWYVDGVEVHNAKTKPREEQFNSTYRVVSVLTVLHQDWLNGKEYKCKVSNKGLPSSIEKTISKAKGQPREPQVYTLPPSQEEMTKNQVSLTCLVKGFYPSDIAVEWESNGQPENNYKTTPPVLDSDGSFFLYSRLTVDKSRWQEGNVFSCSVMHEALHNHYTQKSLSLSLGK

SEQ ID NO: 5884 - protein, 121 aa, Artificial Sequence
  source: /note="Description of Artificial Sequence: Synthetic polypeptide"
EVQLVESGGGLVKPGGSLKLSCAASGYTFTSYVMHWVRQAPGKGLEWIGYINPYNDGTKYNEKFQGRVTISSDKSISTAYMELSSLRSEDTAMYYCARGTYYYGSRVFDYWGQGTLVTVSS

SEQ ID NO: 5885 - protein, 121 aa, Artificial Sequence
  source: /note="Description of Artificial Sequence: Synthetic polypeptide"
QVQLQESGSGLVKPGGSLRLSCAASGYTFTSYVMHWVRQAPGKGLEWMGYINPYNDGTKYNESLKSRVTISSDKSISTAYMELSSLRAEDTAVYYCARGTYYYGSRVFDYWGQGTLVTVSS

SEQ ID NO: 5886 - protein, 121 aa, Artificial Sequence
  source: /note="Description of Artificial Sequence: Synthetic polypeptide"
EVQLVESGGGLVQPGRSLRLSCAASGYTFTSYVMHWVRQMPGKGLEWMGYINPYNDGTKYNEKFQGRVTITSDKSTSTAYMELSRLRSDDTAVYYCARGTYYYGSRVFDYWGQGTLVTVSS

SEQ ID NO: 5887 - protein, 121 aa, Artificial Sequence
  source: /note="Description of Artificial Sequence: Synthetic polypeptide"
EVQLQQSGPEVKKPGTSVKVSCKASGYTFTSYVMHWVRQAPGKGLVWVSYINPYNDGTKYNESLKSRVTISSDKSISTAYLQMNSLRAEDTAVYYCARGTYYYGSRVFDYWGQGTLVTVSS

SEQ ID NO: 5888 - protein, 124 aa, Artificial Sequence
  source: /note="Description of Artificial Sequence: Synthetic polypeptide"
TVQLVESGGGVVRPGGSLRLSCAASGYAFSSYWMNWVRQAPGKGLEWIGQIWPGDGDTNYNGKFQDRVTITADESTSTAYMELRSLRSDDTAVYFCARRETTTVGRYYYAMDYWGQGTLVTVSS

SEQ ID NO: 5889 - protein, 124 aa, Artificial Sequence
  source: /note="Description of Artificial Sequence: Synthetic polypeptide"
QVQLVESGGGLVEPGGSLRLSCAASGYAFSSYWMNWVRQMPGKGLEWMGQIWPGDGDTNYNPSLKSRVTITADESTSTAYMELSSLKAEDTAVYFCARRETTTVGRYYYAMDYWGQGTLVTVSS

SEQ ID NO: 5890 - protein, 124 aa, Artificial Sequence
  source: /note="Description of Artificial Sequence: Synthetic polypeptide"
QVQLQESGPGLVKPSQTLSLTCAASGYAFSSYWMNWVRQAPGKGLEWMGQIWPGDGDTNYNGALKSRVTITADESTSTAYMELSSLRSEDTAVYFCARRETTTVGRYYYAMDYWGQGTLVTVSS

SEQ ID NO: 5891 - protein, 124 aa, Artificial Sequence
  source: /note="Description of Artificial Sequence: Synthetic polypeptide"
EVQLVQSGSELKKPGASVKVSCKASGYAFSSYWMNWVRQAPGKGLEWVAQIWPGDGDTNYADSVKGRFTITADESTSTAYLQMNSLRAGDTAMYFCARRETTTVGRYYYAMDYWGQGTLVTVSS

SEQ ID NO: 5892 - protein, 121 aa, Artificial Sequence
  source: /note="Description of Artificial Sequence: Synthetic polypeptide"
EVQLVESGGGLVKPGGSLKLSCAASGYTFTSYVMHWVRQAPGKGLEWIGYINPYNDGPKYNEKFQGRVTISSDKSISTAYMELSSLRSEDTAMYYCARGTYYYGSRVFDYWGQGTLVTVSS

SEQ ID NO: 5893 - protein, 121 aa, Artificial Sequence
  source: /note="Description of Artificial Sequence: Synthetic polypeptide"
EVQLVESGGGLVKPGGSLKLSCAASGYTFTSYVMHWVRQAPGKGLEWIGYINPYNDGHKYNEKFQGRVTISSDKSISTAYMELSSLRSEDTAMYYCARGTYYYGSRVFDYWGQGTLVTVSS

SEQ ID NO: 5894 - protein, 121 aa, Artificial Sequence
  source: /note="Description of Artificial Sequence: Synthetic polypeptide"
EVQLVESGGGLVKPGGSLKLSCAASGYTFTSYVMHWVRQAPGKGLEWIGYINPYNDGTKYNEKFQGRVTISSDKSISTAYMELSSLRSEDTAMYYCARGTYYYGSRVFNYWGQGTLVTVSS

SEQ ID NO: 5895 - protein, 121 aa, Artificial Sequence
  source: /note="Description of Artificial Sequence: Synthetic polypeptide"
EVQLVESGGGLVKPGGSLKLSCAASGYTFTSYVMHWVRQAPGKGLEWIGYINPYNDGTKYNEKFQGRVTISSDKSISTAYMELSSLRSEDTAMYYCARGTYYYGSRVFHYWGQGTLVTVSS

SEQ ID NO: 5896 - protein, 121 aa, Artificial Sequence
  source: /note="Description of Artificial Sequence: Synthetic polypeptide"
EVQLVESGGGLVKPGGSLKLSCAASGYTFTSYVMHWVRQAPGKGLEWIGYINPYNDGTKYNEKFQGRVTISSDKSISTAYMELSSLRSEDTAMYYCARGTYYYGSRVFSYWGQGTLVTVSS

SEQ ID NO: 5897 - protein, 121 aa, Artificial Sequence
  source: /note="Description of Artificial Sequence: Synthetic polypeptide"
EVQLVESGGGLVKPGGSLKLSCAASGYTFTSYVMHWVRQAPGKGLEWIGYINPYNDGTEYNEKFQGRVTISSDKSISTAYMELSSLRSEDTAMYYCARGTYYYGTRVFDYWGQGTLVTVSS

SEQ ID NO: 5898 - protein, 121 aa, Artificial Sequence
  source: /note="Description of Artificial Sequence: Synthetic polypeptide"
EVQLVESGGGLVKPGGSLKLSCAASGYTFTSYVMHWVRQAPGKGLEWIGYINPYNDGPKYNEKFQGRVTISSDKSISTAYMELSSLRSEDTAMYYCARGTYYYGTRVFDYWGQGTLVTVSS

SEQ ID NO: 5899 - protein, 121 aa, Artificial Sequence
  source: /note="Description of Artificial Sequence: Synthetic polypeptide"
EVQLVESGGGLVKPGGSLKLSCAASGYTFTSYVMHWVRQAPGKGLEWIGYINPYNDGPKYNEKFQGRVTISSDKSISTAYMELSSLRSEDTAMYYCARGTYYYGTSVFDYWGQGTLVTVSS

SEQ ID NO: 5900 - protein, 121 aa, Artificial Sequence
  source: /note="Description of Artificial Sequence: Synthetic polypeptide"
EVQLVESGGGLVKPGGSLKLSCAASGYTFTSYVMHWVRQAPGKGLEWIGYINPYNDGPEYNEKFQGRVTISSDKSISTAYMELSSLRSEDTAMYYCARGTYYYGTRVFDYWGQGTLVTVSS

SEQ ID NO: 5901 - protein, 121 aa, Artificial Sequence
  source: /note="Description of Artificial Sequence: Synthetic polypeptide"
EVQLVESGGGLVKPGGSLKLSCAASGYTFTSYVMHWVRQAPGKGLEWIGYINPYNSGTKYNEKFQGRVTISSDKSISTAYMELSSLRSEDTAMYYCARGTYYYGTRVFDYWGQGTLVTVSS

SEQ ID NO: 5902 - protein, 121 aa, Artificial Sequence
  source: /note="Description of Artificial Sequence: Synthetic polypeptide"
EVQLVESGGGLVKPGGSLKLSCAASGYTFTSYVMHWVRQAPGKGLEWIGYINPYNEGTKYNEKFQGRVTISSDKSISTAYMELSSLRSEDTAMYYCARGTYYYGTRVFDYWGQGTLVTVSS

SEQ ID NO: 5903 - protein, 121 aa, Artificial Sequence
  source: /note="Description of Artificial Sequence: Synthetic polypeptide"
EVQLVESGGGLVKPGGSLKLSCAASGYTFTSYVMHWVRQAPGKGLEWIGYINPYNSGTEYNEKFQGRVTISSDKSISTAYMELSSLRSEDTAMYYCARGTYYYGTRVFDYWGQGTLVTVSS

SEQ ID NO: 5904 - protein, 121 aa, Artificial Sequence
  source: /note="Description of Artificial Sequence: Synthetic polypeptide"
EVQLVESGGGLVKPGGSLKLSCAASGYTFTSYVMHWVRQAPGKGLEWIGYINPYNEGTEYNEKFQGRVTISSDKSISTAYMELSSLRSEDTAMYYCARGTYYYGTRVFDYWGQGTLVTVSS

SEQ ID NO: 5905 - protein, 121 aa, Artificial Sequence
  source: /note="Description of Artificial Sequence: Synthetic polypeptide"
EVQLVESGGGLVKPGGSLKLSCAASGYTFTSYVMHWVRQAPGKGLEWIGYINPYNDGTKYNEKFQGRVTISSDKSISTAYMELSSLRSEDTAMYYCARGTYYYGTRVFDYWGQGTLVTVSS

SEQ ID NO: 5906 - protein, 121 aa, Artificial Sequence
  source: /note="Description of Artificial Sequence: Synthetic polypeptide"
EVQLVESGGGLVKPGGSLKLSCAASGYTFTSYVMHWVRQAPGKGLEWIGYINPYNDGTKYNEKFQGRVTISSDKSISTAYMELSSLRSEDTAMYYCARGTYYYGLRVFDYWGQGTLVTVSS

SEQ ID NO: 5907 - protein, 121 aa, Artificial Sequence
  source: /note="Description of Artificial Sequence: Synthetic polypeptide"
EVQLVESGGGLVKPGGSLKLSCAASGYTFTSYVMHWVRQAPGKGLEWIGYINPYNDGTKYNEKFQGRVTISSDKSISTAYMELSSLRSEDTAMYYCARGTYYYGSEVFDYWGQGTLVTVSS

SEQ ID NO: 5908 - protein, 121 aa, Artificial Sequence
  source: /note="Description of Artificial Sequence: Synthetic polypeptide"
EVQLVESGGGLVKPGGSLKLSCAASGYTFTSYVMHWVRQAPGKGLEWIGYINPYNDGTKYNEKFQGRVTISSDKSISTAYMELSSLRSEDTAMYYCARGTYYYGSSVFDYWGQGTLVTVSS

SEQ ID NO: 5909 - protein, 121 aa, Artificial Sequence
  source: /note="Description of Artificial Sequence: Synthetic polypeptide"
EVQLVESGGGLVKPGGSLKLSCAASGYTFTSYVMHWVRQAPGKGLEWIGYINPYNAGTKYNEKFQGRVTISSDKSISTAYMELSSLRSEDTAMYYCARGTYYYGSRVFDYWGQGTLVTVSS

SEQ ID NO: 5910 - protein, 451 aa, Artificial Sequence
  source: /note="Description of Artificial Sequence: Synthetic polypeptide"
EVQLVESGGGLVKPGGSLKLSCAASGYTFTSYVMHWVRQAPGKGLEWIGYINPYNDGTKYNEKFQGRVTISSDKSISTAYMELSSLRSEDTAMYYCARGTYYYGSRVFDYWGQGTLVTVSSASTKGPSVFPLAPSSKSTSGGTAALGCLVKDYFPEPVTVSWNSGALTSGVHTFPAVLQSSGLYSLSSVVTVPSSSLGTQTYICNVNHKPSNTKVDKKVEPKSCDKTHTCPPCPAPELLGGPDVFLFPPKPKDTLMISRTPEVTCVVVDVSHEDPEVQFNWYVDGVEVHNAKTKPREEQFNSTFRVVSVLTVVHQDWLNGKEYKCKVSNKALPAPEEKTISKTKGQPREPQVYTLPPSREEMTKNQVSLTCLVKGFYPSDIAVEWESNGQPENNYKTTPPMLDSDGSFFLYSKLTVDKSRWQQGNVFSCSVMHEALHNHYTQKSLSLSPGK

SEQ ID NO: 5911 - protein, 451 aa, Artificial Sequence
  source: /note="Description of Artificial Sequence: Synthetic polypeptide"
EVQLVESGGGLVKPGGSLKLSCAASGYTFTSYVMHWVRQAPGKGLEWIGYINPYNDGTKYNEKFQGRVTISSDKSISTAYMELSSLRSEDTAMYYCARGTYYYGTRVFDYWGQGTLVTVSSASTKGPSVFPLAPSSKSTSGGTAALGCLVKDYFPEPVTVSWNSGALTSGVHTFPAVLQSSGLYSLSSVVTVPSSSLGTQTYICNVNHKPSNTKVDKKVEPKSCDKTHTCPPCPAPELLGGPDVFLFPPKPKDTLMISRTPEVTCVVVDVSHEDPEVQFNWYVDGVEVHNAKTKPREEQFNSTFRVVSVLTVVHQDWLNGKEYKCKVSNKALPAPEEKTISKTKGQPREPQVYTLPPSREEMTKNQVSLTCLVKGFYPSDIAVEWESNGQPENNYKTTPPMLDSDGSFFLYSKLTVDKSRWQQGNVFSCSVMHEALHNHYTQKSLSLSPGK

SEQ ID NO: 5912 - protein, 451 aa, Artificial Sequence
  source: /note="Description of Artificial Sequence: Synthetic polypeptide"
EVQLVESGGGLVKPGGSLKLSCAASGYTFTSYVMHWVRQAPGKGLEWIGYINPYNAGTKYNEKFQGRVTISSDKSISTAYMELSSLRSEDTAMYYCARGTYYYGSRVFDYWGQGTLVTVSSASTKGPSVFPLAPSSKSTSGGTAALGCLVKDYFPEPVTVSWNSGALTSGVHTFPAVLQSSGLYSLSSVVTVPSSSLGTQTYICNVNHKPSNTKVDKKVEPKSCDKTHTCPPCPAPELLGGPDVFLFPPKPKDTLMISRTPEVTCVVVDVSHEDPEVQFNWYVDGVEVHNAKTKPREEQFNSTFRVVSVLTVVHQDWLNGKEYKCKVSNKALPAPEEKTISKTKGQPREPQVYTLPPSREEMTKNQVSLTCLVKGFYPSDIAVEWESNGQPENNYKTTPPMLDSDGSFFLYSKLTVDKSRWQQGNVFSCSVMHEALHNHYTQKSLSLSPGK

SEQ ID NO: 5913 - protein, 451 aa, Artificial Sequence
  source: /note="Description of Artificial Sequence: Synthetic polypeptide"
EVQLVESGGGLVKPGGSLKLSCAASGYTFTSYVMHWVRQAPGKGLEWIGYINPYNDGTEYNEKFQGRVTISSDKSISTAYMELSSLRSEDTAMYYCARGTYYYGTRVFDYWGQGTLVTVSSASTKGPSVFPLAPSSKSTSGGTAALGCLVKDYFPEPVTVSWNSGALTSGVHTFPAVLQSSGLYSLSSVVTVPSSSLGTQTYICNVNHKPSNTKVDKKVEPKSCDKTHTCPPCPAPELLGGPDVFLFPPKPKDTLMISRTPEVTCVVVDVSHEDPEVQFNWYVDGVEVHNAKTKPREEQFNSTFRVVSVLTVVHQDWLNGKEYKCKVSNKALPAPEEKTISKTKGQPREPQVYTLPPSREEMTKNQVSLTCLVKGFYPSDIAVEWESNGQPENNYKTTPPMLDSDGSFFLYSKLTVDKSRWQQGNVFSCSVMHEALHNHYTQKSLSLSPGK

SEQ ID NO: 5914 - protein, 451 aa, Artificial Sequence
  source: /note="Description of Artificial Sequence: Synthetic polypeptide"
EVQLVESGGGLVKPGGSLKLSCAASGYTFTSYVMHWVRQAPGKGLEWIGYINPYNDGPKYNEKFQGRVTISSDKSISTAYMELSSLRSEDTAMYYCARGTYYYGTRVFDYWGQGTLVTVSSASTKGPSVFPLAPSSKSTSGGTAALGCLVKDYFPEPVTVSWNSGALTSGVHTFPAVLQSSGLYSLSSVVTVPSSSLGTQTYICNVNHKPSNTKVDKKVEPKSCDKTHTCPPCPAPELLGGPDVFLFPPKPKDTLMISRTPEVTCVVVDVSHEDPEVQFNWYVDGVEVHNAKTKPREEQFNSTFRVVSVLTVVHQDWLNGKEYKCKVSNKALPAPEEKTISKTKGQPREPQVYTLPPSREEMTKNQVSLTCLVKGFYPSDIAVEWESNGQPENNYKTTPPMLDSDGSFFLYSKLTVDKSRWQQGNVFSCSVMHEALHNHYTQKSLSLSPGK

SEQ ID NO: 5915 - protein, 451 aa, Artificial Sequence
  source: /note="Description of Artificial Sequence: Synthetic polypeptide"
EVQLVESGGGLVKPGGSLKLSCAASGYTFTSYVMHWVRQAPGKGLEWIGYINPYNDGPKYNEKFQGRVTISSDKSISTAYMELSSLRSEDTAMYYCARGTYYYGTSVFDYWGQGTLVTVSSASTKGPSVFPLAPSSKSTSGGTAALGCLVKDYFPEPVTVSWNSGALTSGVHTFPAVLQSSGLYSLSSVVTVPSSSLGTQTYICNVNHKPSNTKVDKKVEPKSCDKTHTCPPCPAPELLGGPDVFLFPPKPKDTLMISRTPEVTCVVVDVSHEDPEVQFNWYVDGVEVHNAKTKPREEQFNSTFRVVSVLTVVHQDWLNGKEYKCKVSNKALPAPEEKTISKTKGQPREPQVYTLPPSREEMTKNQVSLTCLVKGFYPSDIAVEWESNGQPENNYKTTPPMLDSDGSFFLYSKLTVDKSRWQQGNVFSCSVMHEALHNHYTQKSLSLSPGK

SEQ ID NO: 5916 - protein, 451 aa, Artificial Sequence
  source: /note="Description of Artificial Sequence: Synthetic polypeptide"
EVQLVESGGGLVKPGGSLKLSCAASGYTFTSYVMHWVRQAPGKGLEWIGYINPYNSGTKYNEKFQGRVTISSDKSISTAYMELSSLRSEDTAMYYCARGTYYYGTRVFDYWGQGTLVTVSSASTKGPSVFPLAPSSKSTSGGTAALGCLVKDYFPEPVTVSWNSGALTSGVHTFPAVLQSSGLYSLSSVVTVPSSSLGTQTYICNVNHKPSNTKVDKKVEPKSCDKTHTCPPCPAPELLGGPDVFLFPPKPKDTLMISRTPEVTCVVVDVSHEDPEVQFNWYVDGVEVHNAKTKPREEQFNSTFRVVSVLTVVHQDWLNGKEYKCKVSNKALPAPEEKTISKTKGQPREPQVYTLPPSREEMTKNQVSLTCLVKGFYPSDIAVEWESNGQPENNYKTTPPMLDSDGSFFLYSKLTVDKSRWQQGNVFSCSVMHEALHNHYTQKSLSLSPGK

SEQ ID NO: 5917 - protein, 451 aa, Artificial Sequence
  source: /note="Description of Artificial Sequence: Synthetic polypeptide"
EVQLVESGGGLVKPGGSLKLSCAASGYTFTSYVMHWVRQAPGKGLEWIGYINPYNEGTKYNEKFQGRVTISSDKSISTAYMELSSLRSEDTAMYYCARGTYYYGTRVFDYWGQGTLVTVSSASTKGPSVFPLAPSSKSTSGGTAALGCLVKDYFPEPVTVSWNSGALTSGVHTFPAVLQSSGLYSLSSVVTVPSSSLGTQTYICNVNHKPSNTKVDKKVEPKSCDKTHTCPPCPAPELLGGPDVFLFPPKPKDTLMISRTPEVTCVVVDVSHEDPEVQFNWYVDGVEVHNAKTKPREEQFNSTFRVVSVLTVVHQDWLNGKEYKCKVSNKALPAPEEKTISKTKGQPREPQVYTLPPSREEMTKNQVSLTCLVKGFYPSDIAVEWESNGQPENNYKTTPPMLDSDGSFFLYSKLTVDKSRWQQGNVFSCSVMHEALHNHYTQKSLSLSPGK

SEQ ID NO: 5918 - protein, 451 aa, Artificial Sequence
  source: /note="Description of Artificial Sequence: Synthetic polypeptide"
EVQLVESGGGLVKPGGSLKLSCAASGYTFTSYVMHWVRQAPGKGLEWIGYINPYNSGTEYNEKFQGRVTISSDKSISTAYMELSSLRSEDTAMYYCARGTYYYGTRVFDYWGQGTLVTVSSASTKGPSVFPLAPSSKSTSGGTAALGCLVKDYFPEPVTVSWNSGALTSGVHTFPAVLQSSGLYSLSSVVTVPSSSLGTQTYICNVNHKPSNTKVDKKVEPKSCDKTHTCPPCPAPELLGGPDVFLFPPKPKDTLMISRTPEVTCVVVDVSHEDPEVQFNWYVDGVEVHNAKTKPREEQFNSTFRVVSVLTVVHQDWLNGKEYKCKVSNKALPAPEEKTISKTKGQPREPQVYTLPPSREEMTKNQVSLTCLVKGFYPSDIAVEWESNGQPENNYKTTPPMLDSDGSFFLYSKLTVDKSRWQQGNVFSCSVMHEALHNHYTQKSLSLSPGK

SEQ ID NO: 5919 - protein, 115 aa, Artificial Sequence
  source: /note="Description of Artificial Sequence: Synthetic polypeptide"
EVQLQQSGPELVKPGASVKISCKTSGYTFTDYTLHWVKQSHVKSLEWIGGIDPINGGTTYNQKFKGKATLTVDKSSSTAYMELRSLTSEDSAVYYCARGEAMDSWGQGTSVTVSS

SEQ ID NO: 5920 - protein, 115 aa, Artificial Sequence
  source: /note="Description of Artificial Sequence: Synthetic polypeptide"
QVQLVQSGAEVKKPGASVKVSCKASGYTFTDYTLHWVRQAPGQGLEWMGGINPINGGTTYNQKFKGRVTMTRDTSTSTVYMELSSLRSEDTAVYYCARGEAMDSWGQGTLVTVSS

SEQ ID NO: 5921 - protein, 115 aa, Artificial Sequence
  source: /note="Description of Artificial Sequence: Synthetic polypeptide"
QVQLVQSGAEVKKPGASVKVSCKASGYTFTDYTLHWVRQAPGQGLEWMGGIWPITGGTTYNQKFKGRVTMTRDTSTSTVYMELSSLRSEDTAVYYCARGEAQGSWGQGTLVTVSS

SEQ ID NO: 5922 - protein, 115 aa, Artificial Sequence
  source: /note="Description of Artificial Sequence: Synthetic polypeptide"
QVQLVQSGAEVKKPGASVKVSCKASGYTFTDYTLHWVRQAPGQGLEWMGGIWPITGGTTYNQKFKGRVTMTRDTSTSTVYMELSSLRSEDTAVYYCARGEAEGSWGQGTLVTVSS

SEQ ID NO: 5923 - protein, 121 aa, Artificial Sequence
  source: /note="Description of Artificial Sequence: Synthetic polypeptide"
QVTLKESGPVLLKPTETLTLTCTVSGFSLSNPRMGVSWIRQPPGKALEWFAHIFSTDEKSLKLSLRSRLTLSKDTSKSQVVLTMTNMAPVDSATYYCARDSSNYEGYFDFWGQGTLVTVSS

SEQ ID NO: 5924 - protein, 121 aa, Artificial Sequence
  source: /note="Description of Artificial Sequence: Synthetic polypeptide"
QVTLKESGPVLVKPTETLTLTCTVSGFSLSNARMGVSWIRQPPGKALEWLAHIFSTDEKSIRRSLRSRLTLSKDTSKSQVVLTMTNMDPVDTATYFCARDSSNYEGYFDYWGQGTLVTVSS

SEQ ID NO: 5925 - protein, 121 aa, Artificial Sequence
  source: /note="Description of Artificial Sequence: Synthetic polypeptide"
QVTLKESGPVLVKPTETLTLTCTVSGFSLSNARMGVSWIRQPPGKALEWLGHIFSTDEKSYSTSLRGRITISKDTSRGLVVLTLTNMDPVDTATYYCARDSSNYEGYFDFWGPGFLVTVSS

SEQ ID NO: 5926 - protein, 121 aa, Artificial Sequence
  source: /note="Description of Artificial Sequence: Synthetic polypeptide"
QVTLKESGPVLVKPTETLTLTCTVSGFSLNNARMGVSWIRQPPGKALEWFAHIFSTDEKSFRTSLRSRLTLSKDTSKSQVVLTMTNMDPVDTATYYCARDSSNYEGYFDYWGQGILVTVSS

SEQ ID NO: 5927 - protein, 122 aa, Artificial Sequence
  source: /note="Description of Artificial Sequence: Synthetic polypeptide"
QVTLKESGPVLVKPTETLTLTCTVSGFSLSNVRMGVSWIRQPPGKALEWFAHIFSSDEKSIRRSLRSRLTLSKDTSKSQVVLTMTNMDPVDTATYYCARDSSNYEGYFDFWGQGTLVTVSSN

SEQ ID NO: 5928 - protein, 121 aa, Artificial Sequence
  source: /note="Description of Artificial Sequence: Synthetic polypeptide"
QVTLKESGPVLVKPTETLTLTCTVSGFSLSNVRMGVSWIRQPPGKALEWFAHIFSSDEKSIRRSLRSRLTLSKDTSKSQVVLTMTNMDPVDTATYYCARDSSNYEGYFDYWGQGTLVTVSS

SEQ ID NO: 5929 - protein, 121 aa, Artificial Sequence
  source: /note="Description of Artificial Sequence: Synthetic polypeptide"
QVTLKESGPVLVKPTETLTLTCTVSGFSLSNARMGVSWIRQPPGKALEWLAHIFSTDEKSIRRSLRSRLTLSKDTSKSQVVLIMTNMDPVDTATYYCARDSSNYEGYFDYWGQGTLVTVSS

SEQ ID NO: 5930 - protein, 121 aa, Artificial Sequence
  source: /note="Description of Artificial Sequence: Synthetic polypeptide"
QVTLKESGPVLVKPTETLTLTCTVSGFSLSNARMGVSWIRQPPGKALEWLAHIFSTDEKSIRRSLRSRLTLSKDTSKSQVVLTMTNMDPVDTATYYCARDSSNYEGYFDYWGQGTLVTVSS

SEQ ID NO: 5931 - protein, 121 aa, Artificial Sequence
  source: /note="Description of Artificial Sequence: Synthetic polypeptide"
QVTLEESGPVLVKPTETLTLTCTVSGFSLSNARMGVSWIRQPPGKAPEWFAHIFSTDEKSLRLSLRSRLTLSKDTSKSQVVLTMTNMDPVDTATYYCARDSSNYEGYFDYWGQGTLVTVSS

SEQ ID NO: 5932 - protein, 121 aa, Artificial Sequence
  source: /note="Description of Artificial Sequence: Synthetic polypeptide"
QVTLKESGPVLVKPTETLTLTCTVSGFSLSNAKMGVSWIRQPPGKALEWLAHIFSTDEKSIRRSLRSRLTMSKDTSKSQVVLTMTNMDPVDTATYYCVRDSSNYEGYFDYWGQGTLVTVSS

SEQ ID NO: 5933 - protein, 121 aa, Artificial Sequence
  source: /note="Description of Artificial Sequence: Synthetic polypeptide"
QVTLKESGPVLVKPTETLTLTCTVSGFSLSNPRMGVSWIRQPPGKALEWLGHIFSSDEKSYRLSLRSRLSISKDTSKSQVVLTMTNMDPVDTATYYCVRDSSNYGGYFDYWGQGTLVTVSS

SEQ ID NO: 5934 - protein, 121 aa, Artificial Sequence
  source: /note="Description of Artificial Sequence: Synthetic polypeptide"
QVTLKESGPVLVKPIETLTLTCTVCGFSLSNPRMGVSWIRQPPGKALEWLGHIFSSDEKSYRLFLRSRLSISKDTSKSQVVLTMTNMDPVDTATYYCARDSSDYEGYFDYWGQGTLVTVSS

SEQ ID NO: 5935 - protein, 121 aa, Artificial Sequence
  source: /note="Description of Artificial Sequence: Synthetic polypeptide"
QVTLKESGPVLVKPTETLTLTCTVSGFSLSNPRMGVSWLRQPPGKALEWFAHIFSTDEKSYSPSLRGRLTVSKDTSKSQVVLTLTNMDPVDTATYYCARDSSNYEGYFDYWGQGTLVTVSS

SEQ ID NO: 5936 - protein, 118 aa, Artificial Sequence
  source: /note="Description of Artificial Sequence: Synthetic polypeptide"
EVQLVESGGGLVKPGGSLRLSCEASGFTFSDAWMSWVRQAPGKGLEWVGRIKSKTDGGTTDYVVPLNGRFIISRDDSRNTLYLQLNNLKTEDTAVYYCTTVPGSYGYWGQGTLVTVSS

SEQ ID NO: 5937 - protein, 120 aa, Artificial Sequence
  source: /note="Description of Artificial Sequence: Synthetic polypeptide"
EVNLVESGGGLVKPGGSLRLSCEASGFTFSYAWMSWVRQAPGKGLEWVGRIKSIADGGATDYAAPVRNRFTISRDDSRNTLYLEMHSLKTEDTAVYYCTTIPGNDAFDMWGQGTMVTVSS

SEQ ID NO: 5938 - protein, 119 aa, Artificial Sequence
  source: /note="Description of Artificial Sequence: Synthetic polypeptide"
EVQLVESWGVLVKPGGSLRLSCAASGFIFNNAWMSWVRQAPGKGLEWIGRIKSKSDGGTTDYAAPVKDRFTISRDDSKDTLYLQMNGLKTEDTAVYFCTTAPGGPFDYWGQGTLVTVSS

SEQ ID NO: 5939 - protein, 120 aa, Artificial Sequence
  source: /note="Description of Artificial Sequence: Synthetic polypeptide"
EVNLVESGGGLVKPGGSLRLSCEASGFTFSYAWMSWVRQAPGKGLEWVGRIKSITDGGVIDYAAPVRNRCTISRDDSRNTLYLEMHSLKTEDTAVYYCTTIPGNDDFDMWGQGRMVTVSS

SEQ ID NO: 5940 - protein, 120 aa, Artificial Sequence
  source: /note="Description of Artificial Sequence: Synthetic polypeptide"
EVNLVESGGGLVKPGGSLRLSCEASGFTFSYAWMSWVRQAPGKGLEWVGRIKSINDGGATDYASPVRNRFTISRDDSRNMLYLEMHSLKTEDTAVYYCTTIPGNDAFDMWGQGTLVTVSS

SEQ ID NO: 5941 - protein, 119 aa, Artificial Sequence
  source: /note="Description of Artificial Sequence: Synthetic polypeptide"
EVQLVESGGDLVKPGGSLRLSCAASGFTFTNAWMSWVRQAPGKGLEWVGRIKSKIDGGTTDYAAPVKGRFIISRDDSKNTLSLQMNSLKTEDTAMYYCTTAPGGPFDYWGQGSLVTVSS

SEQ ID NO: 5942 - protein, 126 aa, Artificial Sequence
  source: /note="Description of Artificial Sequence: Synthetic polypeptide"
QVQLVQSGAEVKKPGSSVKVSCKASGDTFSSNAISWVRQAPGQGLEWMGVIIPIFGTADYAQKFQGRVTITADESTSTAYMELSSLRSEDTAVYYCARHTYHEYAGGYYGGAMDPWGQGTLVTVSS

SEQ ID NO: 5943 - protein, 123 aa, Artificial Sequence
  source: /note="Description of Artificial Sequence: Synthetic polypeptide"
EVQLLESGGGLVQPGGSLRLSCAASGFTFSNYAMSWVRQAPGKGLEWVSDISGGGGRTYYADSVKGRFTISRDNSKNTLYLQMNSLRAEDTAVYYCARAGLLYGGGVYPMDIWGQGTLVTVSS

SEQ ID NO: 5944 - protein, 121 aa, Artificial Sequence
  source: /note="Description of Artificial Sequence: Synthetic polypeptide"
  MOD_RES (100)..(101): Any naturally occurring amino acid
QVTLKESGPVLLKPTETLTLTCTVSGFSLSNPRMGVSWIRQPPGKALEWFAHIFSTDEKSLKLSLRSRLTLSKDTSKSQVVLTMTNMAPVDSATYYCARXXSNYEGYFDFWGQGTLVTVSS

SEQ ID NO: 5945 - protein, 121 aa, Artificial Sequence
  source: /note="Description of Artificial Sequence: Synthetic polypeptide"
  MOD_RES (100)..(101): Any naturally occurring amino acid
QVTLKESGPVLVKPTETLTLTCTVSGFSLSNARMGVSWIRQPPGKALEWLAHIFSTDEKSIRRSLRSRLTLSKDTSKSQVVLTMTNMDPVDTATYFCARXXSNYEGYFDYWGQGTLVTVSS

SEQ ID NO: 5946 - protein, 121 aa, Artificial Sequence
  source: /note="Description of Artificial Sequence: Synthetic polypeptide"
  MOD_RES (100)..(101): Any naturally occurring amino acid
QVTLKESGPVLVKPTETLTLTCTVSGFSLSNARMGVSWIRQPPGKALEWLGHIFSTDEKSYSTSLRGRITISKDTSRGLVVLTLTNMDPVDTATYYCARXXSNYEGYFDFWGPGFLVTVSS

SEQ ID NO: 5947 - protein, 121 aa, Artificial Sequence
  source: /note="Description of Artificial Sequence: Synthetic polypeptide"
  MOD_RES (100)..(101): Any naturally occurring amino acid
QVTLKESGPVLVKPTETLTLTCTVSGFSLNNARMGVSWIRQPPGKALEWFAHIFSTDEKSFRTSLRSRLTLSKDTSKSQVVLTMTNMDPVDTATYYCARXXSNYEGYFDYWGQGILVTVSS

SEQ ID NO: 5948 - protein, 122 aa, Artificial Sequence
  source: /note="Description of Artificial Sequence: Synthetic polypeptide"
  MOD_RES (100)..(101): Any naturally occurring amino acid
QVTLKESGPVLVKPTETLTLTCTVSGFSLSNVRMGVSWIRQPPGKALEWFAHIFSSDEKSIRRSLRSRLTLSKDTSKSQVVLTMTNMDPVDTATYYCARXXSNYEGYFDFWGQGTLVTVSSN

SEQ ID NO: 5949 - protein, 121 aa, Artificial Sequence
  source: /note="Description of Artificial Sequence: Synthetic polypeptide"
  MOD_RES (100)..(101): Any naturally occurring amino acid
QVTLKESGPVLVKPTETLTLTCTVSGFSLSNVRMGVSWIRQPPGKALEWFAHIFSSDEKSIRRSLRSRLTLSKDTSKSQVVLTMTNMDPVDTATYYCARXXSNYEGYFDYWGQGTLVTVSS

SEQ ID NO: 5950 - protein, 121 aa, Artificial Sequence
  source: /note="Description of Artificial Sequence: Synthetic polypeptide"
  MOD_RES (100)..(101): Any naturally occurring amino acid
QVTLKESGPVLVKPTETLTLTCTVSGFSLSNARMGVSWIRQPPGKALEWLAHIFSTDEKSIRRSLRSRLTLSKDTSKSQVVLIMTNMDPVDTATYYCARXXSNYEGYFDYWGQGTLVTVSS

SEQ ID NO: 5951 - protein, 121 aa, Artificial Sequence
  source: /note="Description of Artificial Sequence: Synthetic polypeptide"
  MOD_RES (100)..(101): Any naturally occurring amino acid
QVTLKESGPVLVKPTETLTLTCTVSGFSLSNARMGVSWIRQPPGKALEWLAHIFSTDEKSIRRSLRSRLTLSKDTSKSQVVLTMTNMDPVDTATYYCARXXSNYEGYFDYWGQGTLVTVSS

SEQ ID NO: 5952 - protein, 121 aa, Artificial Sequence
  source: /note="Description of Artificial Sequence: Synthetic polypeptide"
  MOD_RES (100)..(101): Any naturally occurring amino acid
QVTLEESGPVLVKPTETLTLTCTVSGFSLSNARMGVSWIRQPPGKAPEWFAHIFSTDEKSLRLSLRSRLTLSKDTSKSQVVLTMTNMDPVDTATYYCARXXSNYEGYFDYWGQGTLVTVSS

SEQ ID NO: 5953 - protein, 121 aa, Artificial Sequence
  source: /note="Description of Artificial Sequence: Synthetic polypeptide"
  MOD_RES (100)..(101): Any naturally occurring amino acid
QVTLKESGPVLVKPTETLTLTCTVSGFSLSNAKMGVSWIRQPPGKALEWLAHIFSTDEKSIRRSLRSRLTMSKDTSKSQVVLTMTNMDPVDTATYYCVRXXSNYEGYFDYWGQGTLVTVSS

SEQ ID NO: 5954 - protein, 121 aa, Artificial Sequence
  source: /note="Description of Artificial Sequence: Synthetic polypeptide"
  MOD_RES (100)..(101): Any naturally occurring amino acid
QVTLKESGPVLVKPTETLTLTCTVSGFSLSNPRMGVSWIRQPPGKALEWLGHIFSSDEKSYRLSLRSRLSISKDTSKSQVVLTMTNMDPVDTATYYCVRXXSNYGGYFDYWGQGTLVTVSS

SEQ ID NO: 5955 - protein, 121 aa, Artificial Sequence
  source: /note="Description of Artificial Sequence: Synthetic polypeptide"
  MOD_RES (83)..(83): Any naturally occurring amino acid
  MOD_RES (100)..(101): Any naturally occurring amino acid
QVTLKESGPVLVKPTETLTLTCTVFGFSLSNPRMGVSWIRQPPGKAPEWLGHIFSSDEKSYRLSLRSRLSISKDTSKSQVVFXMTNMDPGDPATYYCVRXXSNYEEYFDYWGQGTLVTVSS

SEQ ID NO: 5956 - protein, 121 aa, Artificial Sequence
  source: /note="Description of Artificial Sequence: Synthetic polypeptide"
  MOD_RES (100)..(101): Any naturally occurring amino acid
QVTLKESGPVLVKPTETLTLTCTVSGFSLSNPRMGVSWLRQPPGKALEWFAHIFSTDEKSYSPSLRGRLTVSKDTSKSQVVLTLTNMDPVDTATYYCARXXSNYEGYFDYWGQGTLVTVSS

SEQ ID NO: 5957 - protein, 118 aa, Artificial Sequence
  source: /note="Description of Artificial Sequence: Synthetic polypeptide"
  MOD_RES (56)..(57): Any naturally occurring amino acid
EVQLVESGGGLVKPGGSLRLSCEASGFTFSDAWMSWVRQAPGKGLEWVGRIKSKTXXGTTDYVVPLNGRFIISRDDSRNTLYLQLNNLKTEDTAVYYCTTVPGSYGYWGQGTLVTVSS

SEQ ID NO: 5958 - protein, 120 aa, Artificial Sequence
  source: /note="Description of Artificial Sequence: Synthetic polypeptide"
  MOD_RES (56)..(57): Any naturally occurring amino acid
EVNLVESGGGLVKPGGSLRLSCEASGFTFSYAWMSWVRQAPGKGLEWVGRIKSIAXXGATDYAAPVRNRFTISRDDSRNTLYLEMHSLKTEDTAVYYCTTIPGNDAFDMWGQGTMVTVSS

SEQ ID NO: 5959 - protein, 119 aa, Artificial Sequence
  source: /note="Description of Artificial Sequence: Synthetic polypeptide"
  MOD_RES (56)..(57): Any naturally occurring amino acid
EVQLVESWGVLVKPGGSLRLSCAASGFIFNNAWMSWVRQAPGKGLEWIGRIKSKSXXGTTDYAAPVKDRFTISRDDSKDTLYLQMNGLKTEDTAVYFCTTAPGGPFDYWGQGTLVTVSS

SEQ ID NO: 5960 - protein, 120 aa, Artificial Sequence
  source: /note="Description of Artificial Sequence: Synthetic polypeptide"
  MOD_RES (56)..(57): Any naturally occurring amino acid
EVNLVESGGGLVKPGGSLRLSCEASGFTFSYAWMSWVRQAPGKGLEWVGRIKSITXXGVIDYAAPVRNRCTISRDDSRNTLYLEMHSLKTEDTAVYYCTTIPGNDDFDMWGQGRMVTVSS

SEQ ID NO: 5961 - protein, 120 aa, Artificial Sequence
  source: /note="Description of Artificial Sequence: Synthetic polypeptide"
  MOD_RES (56)..(57): Any naturally occurring amino acid
EVNLVESGGGLVKPGGSLRLSCEASGFTFSYAWMSWVRQAPGKGLEWVGRIKSINXXGATDYASPVRNRFTISRDDSRNMLYLEMHSLKTEDTAVYYCTTIPGNDAFDMWGQGTLVTVSS

SEQ ID NO: 5962 - protein, 119 aa, Artificial Sequence
  source: /note="Description of Artificial Sequence: Synthetic polypeptide"
  MOD_RES (56)..(57): Any naturally occurring amino acid
EVQLVESGGDLVKPGGSLRLSCAASGFTFTNAWMSWVRQAPGKGLEWVGRIKSKIXXGTTDYAAPVKGRFIISRDDSKNTLSLQMNSLKTEDTAMYYCTTAPGGPFDYWGQGSLVTVSS

SEQ ID NO: 5963 - protein, 126 aa, Artificial Sequence
  source: /note="Description of Artificial Sequence: Synthetic polypeptide"
  MOD_RES (114)..(115): Any naturally occurring amino acid
QVQLVQSGAEVKKPGSSVKVSCKASGDTFSSNAISWVRQAPGQGLEWMGVIIPIFGTADYAQKFQGRVTITADESTSTAYMELSSLRSEDTAVYYCARHTYHEYAGGYYGGAMXXWGQGTLVTVSS

SEQ ID NO: 5964 - protein, 122 aa, Artificial Sequence
  source: /note="Description of Artificial Sequence: Synthetic polypeptide"
  MOD_RES (62)..(63): Any naturally occurring amino acid
EVQLLESGGGLVQPGGSLRLSCAASGFTFSNYAMSWVRQAPGKGLEWVSDISGGGGRTYYAXXVKGRFTISRDNSKNTLYLQMNSLRAEDTAVYYCARAGLLYGGGVYPMDIWGQGTLVTVS

SEQ ID NO: 5965 - protein, 446 aa, Artificial Sequence
  source: /note="Description of Artificial Sequence: Synthetic polypeptide"
EVQLVESGGGLVQPGRSLRLSCAASRFTFDDYAMHWVRQAPGKGLEWVSGISWNSGRIGYADSVKGRFTISRDNAENSLFLQMNGLRAEDTALYYCAKGRDSFDIWGQGTMVTVSSASTKGPSVFPLAPSSKSTSGGTAALGCLVKDYFPEPVTVSWNSGALTSGVHTFPAVLQSSGLYSLSSVVTVPSSSLGTQTYICNVNHKPSNTKVDKKVEPKSCDKTHTCPPCPAPELLGGPSVFLFPPKPKDTLMISRTPEVTCVVVDVSHEDPEVKFNWYVDGVEVHNAKTKPREEQYNSTYRVVSVLTVLHQDWLNGKEYKCKVSNKALPAPIEKTISKAKGQPREPQVYTLPPSRDELTKNQVSLTCLVKGFYPSDIAVEWESNGQPENNYKTTPPVLDSDGSFFLYSKLTVDKSRWQQGNVFSCSVMHEALHNHYTQKSLSLSPGK

SEQ ID NO: 5966 - protein, 123 aa, Artificial Sequence
  source: /note="Description of Artificial Sequence: Synthetic polypeptide"
EVQLLESGGGLVQPGGSLRLSCAASGFTFTSYAMSWVRQAPGKGLEWVAVISHGGTYTYYADSVKGRFTISRDNAKNTLYLQMNSLRAEDTAVYYCARHPIYSGNYQGYFDYWGQGTLVTVSS

SEQ ID NO: 5967 - protein, 452 aa, Artificial Sequence
  source: /note="Description of Artificial Sequence: Synthetic polypeptide"
EVQLLESGGGLVQPGGSLRLSCAASGFTFTSYAMSWVRQAPGKGLEWVATISHGGTYTYYPDSVKGRFTISRDNAKNTLYLQMNSLRAEDTAVYYCARHPIYSGNYQGYFDYWGQGTLVTVSSASTKGPSVFPLAPSSKSTSGGTAALGCLVKDYFPEPVTVSWNSGALTSGVHTFPAVLQSSGLYSLSSVVTVPSSSLGTQTYICNVNHKPSNTKVDKKVEPKSCDKTHTCPPCPAPELLGGPDVFLFPPKPKDTLMISRTPEVTCVVVDVSHEDPEVKFNWYVDGVEVHNAKTKPREEQYNSTYRVVSVLTVLHQDWLNGKEYKCKVSNKALPAPEEKTISKAKGQPREPQVYTLPPSRDELTKNQVSLTCLVKGFYPSDIAVEWESNGQPENNYKTTPPVLDSDGSFFLYSKLTVDKSRWQQGNVFSCSVMHEALHNHYTQKSLSLSPG

SEQ ID NO: 5968 - protein, 452 aa, Artificial Sequence
  source: /note="Description of Artificial Sequence: Synthetic polypeptide"
EVQLLESGGGLVQPGGSLRLSCAASGFTFTSYAMSWVRQAPGKGLEWVATISHGGTYTYYPDSVKGRFTISRDNAKNTLYLQMNSLRAEDTAVYYCARHPIYSGNYQGYFDYWGQGTLVTVSSASTKGPSVFPLAPSSKSTSGGTAALGCLVKDYFPEPVTVSWNSGALTSGVHTFPAVLQSSGLYSLSSVVTVPSSSLGTQTYICNVNHKPSNTKVDKKVEPKSCDKTHTCPPCPAPELLAGPSVFLFPPKPKDTLMISRTPEVTCVVVDVEFEDPEVKFNWYVDGVEVHNAKTKPREEQYNSTYRVVSVLTVLHQDWLNGKEYKCKVTNKALPAPEEKTISKAKGQPREPQVYTLPPSRDELTKNQVSLTCLVKGFYPSDIAVEWESNGQPENNYKTTPPVLDSDGSFFLYSKLTVDKSRWQQGNVFSCSVMHEALHNHYTQKSLSLSPG

SEQ ID NO: 5969 - protein, 452 aa, Artificial Sequence
  source: /note="Description of Artificial Sequence: Synthetic polypeptide"
EVQLLESGGGLVQPGGSLRLSCAASGFTFTSYAMSWVRQAPGKGLEWVATISHGGTYTYYPDSVKGRFTISRDNAKNTLYLQMNSLRAEDTAVYYCARHPIYSGNYQGYFDYWGQGTLVTVSSASTKGPSVFPLAPSSKSTSGGTAALGCLVKDYFPEPVTVSWNSGALTSGVHTFPAVLQSSGLYSLSSVVTVPSSSLGTQTYICNVNHKPSNTKVDKKVEPKSCDKTHTCPPCPAPELLGGPDVFLFPPKPKDTLMISRTPEVTCVVVDVSFEDPEVKFNWYVDGVEVHNAKTKPREEQYNSTYRVVSVLTVLHQDWLNGKEYKCKVTNKALPAPEEKTISKAKGQPREPQVYTLPPSRDELTKNQVSLTCLVKGFYPSDIAVEWESNGQPENNYKTTPPVLDSDGSFFLYSKLTVDKSRWQQGNVFSCSVMHEALHNHYTQKSLSLSPG

SEQ ID NO: 5970 - protein, 452 aa, Artificial Sequence
  source: /note="Description of Artificial Sequence: Synthetic polypeptide"
EVQLLESGGGLVQPGGSLRLSCAASGFTFTSYAMSWVRQAPGKGLEWVATISHGGTYTYYPDSVKGRFTISRDNAKNTLYLQMNSLRAEDTAMYYCARHPIYSGNYQGYFDYWGQGTLVTVSSASTKGPSVFPLAPSSKSTSGGTAALGCLVKDYFPEPVTVSWNSGALTSGVHTFPAVLQSSGLYSLSSVVTVPSSSLGTQTYICNVNHKPSNTKVDKKVEPKSCDKTHTCPPCPAPELLGGPDVFLFPPKPKDTLMISRTPEVTCVVVDVSHEDPEVKFNWYVDGVEVHNAKTKPREEQYNSTYRVVSVLTVLHQDWLNGKEYKCKVSNKALPAPEEKTISKAKGQPREPQVYTLPPSRDELTKNQVSLTCLVKGFYPSDIAVEWESNGQPENNYKTTPPVLDSDGSFFLYSKLTVDKSRWQQGNVFSCSVMHEALHNHYTQKSLSLSPG

SEQ ID NO: 5971 - protein, 452 aa, Artificial Sequence
  source: /note="Description of Artificial Sequence: Synthetic polypeptide"
EVQLLESGGGLVQPGGSLRLSCAASGFTFTSYAMSWVRQAPGKGLEWVATISHGGTYTYYPDSVKGRFTISRDNAKNTLYLQMNSLRAEDTAMYYCARHPIYSGNYQGYFDYWGQGTLVTVSSASTKGPSVFPLAPSSKSTSGGTAALGCLVKDYFPEPVTVSWNSGALTSGVHTFPAVLQSSGLYSLSSVVTVPSSSLGTQTYICNVNHKPSNTKVDKKVEPKSCDKTHTCPPCPAPELLAGPSVFLFPPKPKDTLMISRTPEVTCVVVDVEFEDPEVKFNWYVDGVEVHNAKTKPREEQYNSTYRVVSVLTVLHQDWLNGKEYKCKVTNKALPAPEEKTISKAKGQPREPQVYTLPPSRDELTKNQVSLTCLVKGFYPSDIAVEWESNGQPENNYKTTPPVLDSDGSFFLYSKLTVDKSRWQQGNVFSCSVMHEALHNHYTQKSLSLSPG

SEQ ID NO: 5972 - protein, 452 aa, Artificial Sequence
  source: /note="Description of Artificial Sequence: Synthetic polypeptide"
EVQLLESGGGLVQPGGSLRLSCAASGFTFTSYAMSWVRQAPGKGLEWVATISHGGTYTYYPDSVKGRFTISRDNAKNTLYLQMNSLRAEDTAMYYCARHPIYSGNYQGYFDYWGQGTLVTVSSASTKGPSVFPLAPSSKSTSGGTAALGCLVKDYFPEPVTVSWNSGALTSGVHTFPAVLQSSGLYSLSSVVTVPSSSLGTQTYICNVNHKPSNTKVDKKVEPKSCDKTHTCPPCPAPELLGGPDVFLFPPKPKDTLMISRTPEVTCVVVDVSFEDPEVKFNWYVDGVEVHNAKTKPREEQYNSTYRVVSVLTVLHQDWLNGKEYKCKVTNKALPAPEEKTISKAKGQPREPQVYTLPPSRDELTKNQVSLTCLVKGFYPSDIAVEWESNGQPENNYKTTPPVLDSDGSFFLYSKLTVDKSRWQQGNVFSCSVMHEALHNHYTQKSLSLSPG

SEQ ID NO: 5973 - protein, 452 aa, Artificial Sequence
  source: /note="Description of Artificial Sequence: Synthetic polypeptide"
EVQLLESGGGLVQPGGSLRLSCAASGFTFTSYAMSWVRQAPGKGLEWVAVISHGGTYTYYADSVKGRFTISRDNAKNTLYLQMNSLRAEDTAVYYCARHPIYSGNYQGYFDYWGQGTLVTVSSASTKGPSVFPLAPSSKSTSGGTAALGCLVKDYFPEPVTVSWNSGALTSGVHTFPAVLQSSGLYSLSSVVTVPSSSLGTQTYICNVNHKPSNTKVDKKVEPKSCDKTHTCPPCPAPELLGGPDVFLFPPKPKDTLMISRTPEVTCVVVDVSHEDPEVKFNWYVDGVEVHNAKTKPREEQYNSTYRVVSVLTVLHQDWLNGKEYKCKVSNKALPAPEEKTISKAKGQPREPQVYTLPPSRDELTKNQVSLTCLVKGFYPSDIAVEWESNGQPENNYKTTPPVLDSDGSFFLYSKLTVDKSRWQQGNVFSCSVMHEALHNHYTQKSLSLSPG

SEQ ID NO: 5974 - protein, 452 aa, Artificial Sequence
  source: /note="Description of Artificial Sequence: Synthetic polypeptide"
EVQLLESGGGLVQPGGSLRLSCAASGFTFTSYAMSWVRQAPGKGLEWVAVISHGGTYTYYADSVKGRFTISRDNAKNTLYLQMNSLRAEDTAVYYCARHPIYSGNYQGYFDYWGQGTLVTVSSASTKGPSVFPLAPSSKSTSGGTAALGCLVKDYFPEPVTVSWNSGALTSGVHTFPAVLQSSGLYSLSSVVTVPSSSLGTQTYICNVNHKPSNTKVDKKVEPKSCDKTHTCPPCPAPELLAGPSVFLFPPKPKDTLMISRTPEVTCVVVDVEFEDPEVKFNWYVDGVEVHNAKTKPREEQYNSTYRVVSVLTVLHQDWLNGKEYKCKVTNKALPAPEEKTISKAKGQPREPQVYTLPPSRDELTKNQVSLTCLVKGFYPSDIAVEWESNGQPENNYKTTPPVLDSDGSFFLYSKLTVDKSRWQQGNVFSCSVMHEALHNHYTQKSLSLSPG

SEQ ID NO: 5975 - protein, 452 aa, Artificial Sequence
  source: /note="Description of Artificial Sequence: Synthetic polypeptide"
EVQLLESGGGLVQPGGSLRLSCAASGFTFTSYAMSWVRQAPGKGLEWVAVISHGGTYTYYADSVKGRFTISRDNAKNTLYLQMNSLRAEDTAVYYCARHPIYSGNYQGYFDYWGQGTLVTVSSASTKGPSVFPLAPSSKSTSGGTAALGCLVKDYFPEPVTVSWNSGALTSGVHTFPAVLQSSGLYSLSSVVTVPSSSLGTQTYICNVNHKPSNTKVDKKVEPKSCDKTHTCPPCPAPELLGGPDVFLFPPKPKDTLMISRTPEVTCVVVDVSFEDPEVKFNWYVDGVEVHNAKTKPREEQYNSTYRVVSVLTVLHQDWLNGKEYKCKVTNKALPAPEEKTISKAKGQPREPQVYTLPPSRDELTKNQVSLTCLVKGFYPSDIAVEWESNGQPENNYKTTPPVLDSDGSFFLYSKLTVDKSRWQQGNVFSCSVMHEALHNHYTQKSLSLSPG

SEQ ID NO: 5976 - protein, 452 aa, Artificial Sequence
  source: /note="Description of Artificial Sequence: Synthetic polypeptide"
EVQLLESGGGLVQPGGSLRLSCAASGFTFTSYAMSWVRQAPGKGLEWVATISHGGTYTYYPDSVKGRFTISRDNAKNTLYLQMNSLRAEDTAVYYCARHPIYSGNYQGYFDYWGQGTLVTVSSASTKGPSVFPLAPSSKSTSGGTAALGCLVKDYFPEPVTVSWNSGALTSGVHTFPAVLQSSGLYSLSSVVTVPSSSLGTQTYICNVNHKPSNTKVDKKVEPKSCDKTHTCPPCPAPELLGGPSVFLFPPKPKDTLMISRTPEVTCVVVDVSHEDPEVKFNWYVDGVEVHNAKTKPREEQYNSTYRVVSVLTVLHQDWLNGKEYKCKVSNKALPAPIEKTISKAKGQPREPQVYTLPPSRDELTKNQVSLTCLVKGFYPSDIAVEWESNGQPENNYKTTPPVLDSDGSFFLYSKLTVDKSRWQQGNVFSCSVMHEALHNHYTQKSLSLSPG

SEQ ID NO: 5977 - protein, 452 aa, Artificial Sequence
  source: /note="Description of Artificial Sequence: Synthetic polypeptide"
EVQLLESGGGLVQPGGSLRLSCAASGFTFTSYAMSWVRQAPGKGLEWVAVISHGGTYTYYADSVKGRFTISRDNAKNTLYLQMNSLRAEDTAVYYCARHPIYSGNYQGYFDYWGQGTLVTVSSASTKGPSVFPLAPSSKSTSGGTAALGCLVKDYFPEPVTVSWNSGALTSGVHTFPAVLQSSGLYSLSSVVTVPSSSLGTQTYICNVNHKPSNTKVDKKVEPKSCDKTHTCPPCPAPELLGGPSVFLFPPKPKDTLMISRTPEVTCVVVDVSHEDPEVKFNWYVDGVEVHNAKTKPREEQYNSTYRVVSVLTVLHQDWLNGKEYKCKVSNKALPAPIEKTISKAKGQPREPQVYTLPPSRDELTKNQVSLTCLVKGFYPSDIAVEWESNGQPENNYKTTPPVLDSDGSFFLYSKLTVDKSRWQQGNVFSCSVMHEALHNHYTQKSLSLSPG

SEQ ID NO: 5978 - protein, 452 aa, Artificial Sequence
  source: /note="Description of Artificial Sequence: Synthetic polypeptide"
EVQLLESGGGLVQPGGSLRLSCAASGFTFTSYAMSWVRQAPGKGLEWVATISHGGTYTYYPDSVKGRFTISRDNAKNTLYLQMNSLRAEDTAMYYCARHPIYSGNYQGYFDYWGQGTLVTVSSASTKGPSVFPLAPSSKSTSGGTAALGCLVKDYFPEPVTVSWNSGALTSGVHTFPAVLQSSGLYSLSSVVTVPSSSLGTQTYICNVNHKPSNTKVDKKVEPKSCDKTHTCPPCPAPELLGGPSVFLFPPKPKDTLMISRTPEVTCVVVDVSHEDPEVKFNWYVDGVEVHNAKTKPREEQYNSTYRVVSVLTVLHQDWLNGKEYKCKVSNKALPAPIEKTISKAKGQPREPQVYTLPPSRDELTKNQVSLTCLVKGFYPSDIAVEWESNGQPENNYKTTPPVLDSDGSFFLYSKLTVDKSRWQQGNVFSCSVMHEALHNHYTQKSLSLSPG

SEQ ID NO: 5979 - protein, 32 aa, Artificial Sequence
  source: /note="Description of Artificial Sequence: Synthetic polypeptide"
RFTISRDNAKNSLYLQMNSLRAEDTAVYYCTR

SEQ ID NO: 5980 - protein, 32 aa, Artificial Sequence
  source: /note="Description of Artificial Sequence: Synthetic polypeptide"
RLTISRDTSKSQVVLTMTNMDPVDTATYYCAR

SEQ ID NO: 5981 - protein, 32 aa, Artificial Sequence
  source: /note="Description of Artificial Sequence: Synthetic polypeptide"
RLSISRDTSKSQVVLTMTNMDPVDTATYYCAR

SEQ ID NO: 5982 - protein, 32 aa, Artificial Sequence
  source: /note="Description of Artificial Sequence: Synthetic polypeptide"
RLTISRNTSKSQVVLTMTNMDPVDTATYYCAR

SEQ ID NO: 5983 - protein, 330 aa, Artificial Sequence
  source: /note="Description of Artificial Sequence: Synthetic polypeptide"
ASTKGPSVFPLAPSSKSTSGGTAALGCLVKDYFPEPVTVSWNSGALTSGVHTFPAVLQSSGLYSLSSVVTVPSSSLGTQTYICNVNHKPSNTKVDKRVEPKSCDKTHTCPPCPAPELLGGPSVFLFPPKPKDTLMISRTPEVTCVVVDVSHEDPEVKFNWYVDGVEVHNVKTKPREEQYNSTYRVVSVLTVLHQDWLNGKEYKCKVSNKALPAPIEKTISKAKGQPREPQVYTLPPSREEMTKNQVSLTCLVKGFYPSDIAVEWESNGQPENNYKTTPPVLDSDGSFFLYSKLTVDKSRWQQGNVFSCSVMHEALHNHYTQKSLSLSPGK

SEQ ID NO: 5984 - protein, 330 aa, Artificial Sequence
  source: /note="Description of Artificial Sequence: Synthetic polypeptide"
ASTKGPSVFPLAPSSKSTSGGTAALGCLVKDYFPEPVTVSWNSGALTSGVHTFPAVLQSSGLYSLSSVVTVPSSSLGTQTYICNVNHKPSNTKVDKRVEPKSCDKTHTCPPCPAPELLGGPSVFLFPPKPKDTLMISRTPEVTCVVVDVSHEDPEVKFNWYVDGVEVHNAKTKPREEQYNSTYRVVSVLTVLHQDWLNGKEYKCKVSNKALPAPIEKTISKAKGQPREPQVYTLPPSREEMTKNQVSLTCLVKGFYPSDIAVEWESNGQPENNYKTTPPVLDSDGSFFLYSKLTVDKSRWQQGNVFSCSVMHEALHNHYTQKSLSLSPGK

SEQ ID NO: 5985 - protein, 330 aa, Artificial Sequence
  source: /note="Description of Artificial Sequence: Synthetic polypeptide"
ASTKGPSVFPLAPSSKSTSGGTAALGCLVKDYFPEPVTVSWNSGALTSGVHTFPAVLQSSGLYSLSSVVTVPSSSLGTQTYICNVNHKPSNTKVDKRVEPKSCDKTHTCPPCPAPEAAGGPSVFLFPPKPKDTLMISRTPEVTCVVVDVSHEDPEVKFNWYVDGVEVHNAKTKPREEQYNSTYRVVSVLTVLHQDWLNGKEYKCKVSNKALPAPIEKTISKAKGQPREPQVYTLPPSREEMTKNQVSLTCLVKGFYPSDIAVEWESNGQPENNYKTTPPVLDSDGSFFLYSKLTVDKSRWQQGNVFSCSVMHEALHNHYTQKSLSLSPGK

SEQ ID NO: 5986 - protein, 450 aa, Artificial Sequence
  source: /note="Description of Artificial Sequence: Synthetic polypeptide"
EVKLVESGGGLVQPGGSLRLSCAASGFTFSSYIMSWVRQTPEKRLEWVATISSGGSSTYYPDSVKGRFTISRDNAKNTLYLQMSSLKSEDTAMYYCTRDDDYDVKVFAYWGQGTLVTVSSASTKGPSVFPLAPSSKSTSGGTAALGCLVKDYFPEPVTVSWNSGALTSGVHTFPAVLQSSGLYSLSSVVTVPSSSLGTQTYICNVNHKPSNTKVDKRVEPKSCDKTHTCPPCPAPELLGGPSVFLFPPKPKDTLMISRTPEVTCVVVDVSHEDPEVKFNWYVDGVEVHNAKTKPREEQYNSTYRVVSVLTVLHQDWLNGKEYKCKVSNKALPAPIEKTISKAKGQPREPQVYTLPPSREEMTKNQVSLTCLVKGFYPSDIAVEWESNGQPENNYKTTPPVLDSDGSFFLYSKLTVDKSRWQQGNVFSCSVMHEALHNHYTQKSLSLSPGK

SEQ ID NO: 5987 - protein, 450 aa, Artificial Sequence
  source: /note="Description of Artificial Sequence: Synthetic polypeptide"
EVKLVESGGGLVQPGGSLRLSCAASGFTFSSYIMSWVRQTPEKRLEWVATISSGGSSTYYPDSVKGRFTISRDNAKNTLYLQMSSLKSEDTAMYYCTRDDDYDVKVFAYWGQGTLVTVSSASTKGPSVFPLAPSSKSTSGGTAALGCLVKDYFPEPVTVSWNSGALTSGVHTFPAVLQSSGLYSLSSVVTVPSSSLGTQTYICNVNHKPSNTKVDKRVEPKSCDKTHTCPPCPAPEAAGGPSVFLFPPKPKDTLMISRTPEVTCVVVDVSHEDPEVKFNWYVDGVEVHNAKTKPREEQYNSTYRVVSVLTVLHQDWLNGKEYKCKVSNKALPAPIEKTISKAKGQPREPQVYTLPPSREEMTKNQVSLTCLVKGFYPSDIAVEWESNGQPENNYKTTPPVLDSDGSFFLYSKLTVDKSRWQQGNVFSCSVMHEALHNHYTQKSLSLSPGK

SEQ ID NO: 5988 - protein, 448 aa, Artificial Sequence
  source: /note="Description of Artificial Sequence: Synthetic polypeptide"
QVQLVQSGAEVVKPGASVKISCKASGYTFTGYFMNWVKQSPGQSLEWIGRIHPYDGDTFYNQKFQGKATLTVDKSSNTAHMELLSLTSEDFAVYYCTRYDGSRAMDYWGQGTTVTVSSASTKGPSVFPLAPSSKSTSGGTAALGCLVKDYFPEPVTVSWNSGALTSGVHTFPAVLQSSGLYSLSSVVTVPSSSLGTQTYICNVNHKPSNTKVDKKVEPKSCDKTHTCPPCPAPELLGGPSVFLFPPKPKDTLMISRTPEVTCVVVDVSHEDPEVKFNWYVDGVEVHNAKTKPREEQYNSTYRVVSVLTVLHQDWLNGKEYKCKVSNKALPAPIEKTISKAKGQPREPQVYTLPPSRDELTKNQVSLTCLVKGFYPSDIAVEWESNGQPENNYKTTPPVLDSDGSFFLYSKLTVDKSRWQQGNVFSCSVMHEALHNHYTQKSLSLSPGK

SEQ ID NO: 5989 - protein, 455 aa, Artificial Sequence
  source: /note="Description of Artificial Sequence: Synthetic polypeptide"
EVQLVESGGGLVQPGGSLRLSCAASGFSFSDHYWMCWVRQAPGKGLEWVACIYTADSDSYYADSVKGRFTISKDSSKNTLYLQMNSLRAEDTAVYYCARNGAYAGGPYGDLWGQGTLVTVVTVSSASTKGPSVFPLAPSSKSTSGGTAALGCLVKDYFPEPVTVSWNSGALTSGVHTFPAVLQSSGLYSLSSVVTVPSSSLGTQTYICNVNHKPSNTKVDKKVEPKSCDKTHTCPPCPAPELLGGPSVFLFPPKPKDTLMISRTPEVTCVVVDVSHEDPEVKFNWYVDGVEVHNAKTKPREEQYSSTYRVVSVLTVLHQDWLNGKEYKCKVSNKALPAPIEKTISKAKGQPREPQVYTLPPSREEMTKNQVSLTCLVKGFYPSDIAVEWESNGQPENNYKTTPPVLDSDGSFFLYSKLTVDKSRWQQGNVFSCSVMHEALHNHYTQKSLSLSPGK

SEQ ID NO: 5990 - protein, 455 aa, Artificial Sequence
  source: /note="Description of Artificial Sequence: Synthetic polypeptide"
EVQLVESGGGLVQPGGSLRLSCAASGFSFSDHYWMCWVRQAPGKGLEWVACIYTADSDSYYADSVKGRFTISKDSSKNTLYLQMNSLRAEDTAVYYCARNGAYAGGPYGDLWGQGTLVTVVTVSSASTKGPSVFPLAPSSKSTSGGTAALGCLVKDYFPEPVTVSWNSGALTSGVHTFPAVLQSSGLYSLSSVVTVPSSSLGTQTYICNVNHKPSNTKVDKKVEPKSCDKTHTCPPCPAPELLGGPSVFLFPPKPKDTLMISRTPEVTCVVVDVSHEDPEVKFNWYVDGVEVHNAKTKPREEQYNSTYRVVSVLTVLHQDWLNGKEYKCKVSNKALPAPIEKTISKAKGQPREPQVYTLPPSREEMTKNQVSLTCLVKGFYPSDIAVEWESNGQPENNYKTTPPVLDSDGSFFLYSKLTVDKSRWQQGNVFSCSVMHEALHNHYTQKSLSLSPGK

SEQ ID NO: 5991 - protein, 469 aa, Artificial Sequence
  source: /note="Description of Artificial Sequence: Synthetic polypeptide"
MKHLWFFLLLVAAPRWVLSQVQLQESGPGLVKPSGTLSLTCAVSGVSIRSINWWNWVRQPPGKGLEWIGEIYHSGSTNYNPSLKSRVTISVDKSKNQFSLKLNSVTAADTAVYYCARDGGIAVTDYYYYGLDVWGQGTTVTVSSAETTAPSVYPLAPGTALKSNSMVTLGCLVKGYFPEPVTVTWNSGALSSGVHTFPAVLQSGLYTLTSSVTVPSSTWPSQTVTCNVAHPASSTKVDKKIVPRNCGGDCKPCICTGSEVSSVFIFPPKPKDVLTITLTPKVTCVVVDISQDDPEVHFSWFVDDVEVHTAQTRPPEEQFNSTFRSVSELPILHQDWLNGRTFRCKVTSAAFPSPIEKTISKPEGRTQVPHVYTMSPTKEEMTQNEVSITCMVKGFYPPDIYVEWQMNGQPQENYKNTPPTMDTDGSYFLYSKLNVKKEKWQQGNTFTCSVLHEGLHNHHTEKSLSHSPG

SEQ ID NO: 5992 - protein, 450 aa, Artificial Sequence
  source: /note="Description of Artificial Sequence: Synthetic polypeptide"
QVQLQESGPGLVKPSGTLSLTCAVSGVSIRSINWWNWVRQPPGKGLEWIGEIYHSGSTNYNPSLKSRVTISVDKSKNQFSLKLNSVTAADTAVYYCARDGGIAVTDYYYYGLDVWGQGTTVTVSSAETTAPSVYPLAPGTALKSNSMVTLGCLVKGYFPEPVTVTWNSGALSSGVHTFPAVLQSGLYTLTSSVTVPSSTWPSQTVTCNVAHPASSTKVDKKIVPRNCGGDCKPCICTGSEVSSVFIFPPKPKDVLTITLTPKVTCVVVDISQDDPEVHFSWFVDDVEVHTAQTRPPEEQFNSTFRSVSELPILHQDWLNGRTFRCKVTSAAFPSPIEKTISKPEGRTQVPHVYTMSPTKEEMTQNEVSITCMVKGFYPPDIYVEWQMNGQPQENYKNTPPTMDTDGSYFLYSKLNVKKEKWQQGNTFTCSVLHEGLHNHHTEKSLSHSPG

SEQ ID NO: 5993 - protein, 455 aa, Artificial Sequence
  source: /note="Description of Artificial Sequence: Synthetic polypeptide"
QVQLQESGPGLVKPSGTLSLTCAVSGVSIRSINWWNWVRQPPGKGLEWIGEIYHSGSTNYNPSLKSRVTISVDKSKNQFSLKLNSVTAADTAVYYCARDGGIAVTDYYYYGLDVWGQGTTVTVSSASTKGPSVFPLAPSSKSTSGGTAALGCLVKDYFPEPVTVSWNSGALTSGVHTFPAVLQSSGLYSLSSVVTVPSSSLGTQTYICNVNHKPSNTKVDKKVEPKSCDKTHTCPPCPAPELLGGPSVFLFPPKPKDTLMISRTPEVTCVVVDVSHEDPEVKFNWYVDGVEVHNAKTKPREEQYNSTYRVVSVLTVLHQDWLNGKEYKCKVSNKALPAPIEKTISKAKGQPREPQVYTLPPSRDELTKNQVSLTCLVKGFYPSDIAVEWESNGQPENNYKTTPPVLDSDGSFFLYSKLTVDKSRWQQGNVFSCSVMHEALHNHYTQKSLSLSPGK

SEQ ID NO: 5994 - protein, 452 aa, Artificial Sequence
  source: /note="Description of Artificial Sequence: Synthetic polypeptide"
QVQLQESGPGLVKPSGTLSLTCAVSGVSIRSINWWNWVRQPPGKGLEWIGEIYHSGSTNYNPSLKSRVTISVDKSKNQFSLKLNSVTAADTAVYYCARDGGIAVTDYYYYGLDVWGQGTTVTVSSASTKGPSVFPLAPCSRSTSESTAALGCLVKDYFPEPVTVSWNSGALTSGVHTFPAVLQSSGLYSLSSVVTVPSSSLGTKTYTCNVDHKPSNTKVDKRVESKYGPPCPSCPAPEFLGGPSVFLFPPKPKDTLMISRTPEVTCVVVDVSQEDPEVQFNWYVDGVEVHNAKTKPREEQFNSTYRVVSVLTVLHQDWLNGKEYKCKVSNKGLPSSIEKTISKAKGQPREPQVYTLPPSQEEMTKNQVSLTCLVKGFYPSDIAVEWESNGQPENNYKTTPPVLDSDGSFFLYSRLTVDKSRWQEGNVFSCSVMHEALHNHYTQKSLSLSLGK

SEQ ID NO: 5995 - protein, 452 aa, Artificial Sequence
  source: /note="Description of Artificial Sequence: Synthetic polypeptide"
QVQLQESGPGLVKPSGTLSLTCAVSGVSIRSINWWNWVRQPPGKGLEWIGEIYHSGSTNYNPSLKSRVTISVDKSKNQFSLKLNSVTAADTAVYYCARDGGIAVTDYYYYGLDVWGQGTTVTVSSASTKGPSVFPLAPCSRSTSESTAALGCLVKDYFPEPVTVSWNSGALTSGVHTFPAVLQSSGLYSLSSVVTVPSSSLGTKTYTCNVDHKPSNTKVDKRVESKYGPPCPPCPAPEFEGGPSVFLFPPKPKDTLMISRTPEVTCVVVDVSQEDPEVQFNWYVDGVEVHNAKTKPREEQFNSTYRVVSVLTVLHQDWLNGKEYKCKVSNKGLPSSIEKTISKAKGQPREPQVYTLPPSQEEMTKNQVSLTCLVKGFYPSDIAVEWESNGQPENNYKTTPPVLDSDGSFFLYSRLTVDKSRWQEGNVFSCSVMHEALHNHYTQKSLSLSLGK

SEQ ID NO: 5996 - protein, 118 aa, Artificial Sequence
  source: /note="Description of Artificial Sequence: Synthetic polypeptide"
QMQLVQSGAEVKKTGSSVKVSCKASGFNIKDYYLHWVRQAPGQALEWMGWIDPDQGDTEYAQKFQDRVTITRDRSMSTAYMELSSLRSEDTAMYYCNAAYGSSSYPMDYWGQGTTVTV

SEQ ID NO: 5997 - protein, 464 aa, Artificial Sequence
  source: /note="Description of Artificial Sequence: Synthetic polypeptide"
MKHLWFFLLLVAAPRWVLSQVQLVQSGAEVKKPGASVKISCKASGYSFTAYYIHWVKQAPGQGLEWIGYISSYNGATNYNQKFKGRVTFTTDTSTSTAYMELRSLRSDDTAVYYCARDYDYDVGMDYWGQGTLVTVSSASTKGPSVFPLAPCSRSTSESTAALGCLVKDYFPEPVTVSWNSGALTSGVHTFPAVLQSSGLYSLSSVVTVPSSNFGTQTYTCNVDHKPSNTKVDKTVERKCCVECPPCPAPPVAGPSVFLFPPKPKDTLMISRTPEVTCVVVDVSHEDPEVQFNWYVDGVEVHNAKTKPREEQFNSTFRVVSVLTVVHQDWLNGKEYKCKVSNKGLPAPIEKTISKTKGQPREPQVYTLPPSREEMTKNQVSLTCLVEGFYPSDIAVEWESNGQPENNYKTTPPMLDSDGSFFLYSELTVDKSRWQQGNVFSCSVMHEALHNHYTQKSLSLSPGK

SEQ ID NO: 5998 - protein, 464 aa, Artificial Sequence
  source: /note="Description of Artificial Sequence: Synthetic polypeptide"
MKHLWFFLLLVAAPRWVLSQVQLVQSGAEVKKPGASVKISCKASGYSFTAYYIHWVKQAPGQGLEWIGYIANYNRATNYNQKFKGRVTFTTDTSTSTAYMELRSLRSDDTAVYYCARDYDYDVGMDYWGQGTLVTVSSASTKGPSVFPLAPCSRSTSESTAALGCLVKDYFPEPVTVSWNSGALTSGVHTFPAVLQSSGLYSLSSVVTVPSSNFGTQTYTCNVDHKPSNTKVDKTVERKCCVECPPCPAPPVAGPSVFLFPPKPKDTLMISRTPEVTCVVVDVSHEDPEVQFNWYVDGVEVHNAKTKPREEQFNSTFRVVSVLTVVHQDWLNGKEYKCKVSNKGLPAPIEKTISKTKGQPREPQVYTLPPSREEMTKNQVSLTCLVEGFYPSDIAVEWESNGQPENNYKTTPPMLDSDGSFFLYSELTVDKSRWQQGNVFSCSVMHEALHNHYTQKSLSLSPGK

SEQ ID NO: 5999 - protein, 466 aa, Artificial Sequence
  source: /note="Description of Artificial Sequence: Synthetic polypeptide"
MKHLWFFLLLVAAPRWVLSQVQLVQSGAEVKKPGASVKVSCKASGYTFTNYWMHWVRQAPGQGLEWMGDINPSNGRTSYKEKFKRRVTLSVDKSSSTAYMELSSLRSEDTAVYFCTIHYDDKYYPLMDYWGQGTLVTVSSASTKGPSVFPLAPCSRSTSESTAALGCLVKDYFPEPVTVSWNSGALTSGVHTFPAVLQSSGLYSLSSVVTVPSSNFGTQTYTCNVDHKPSNTKVDKTVERKCCVECPPCPAPPVAGPSVFLFPPKPKDTLMISRTPEVTCVVVDVSHEDPEVQFNWYVDGVEVHNAKTKPREEQFNSTFRVVSVLTVVHQDWLNGKEYKCKVSNKGLPAPIEKTISKTKGQPREPQVYTLPPSREKMTKNQVSLTCLVKGFYPSDIAVEWESNGQPENNYKTTPPMLKSDGSFFLYSKLTVDKSRWQQGNVFSCSVMHEALHNHYTQKSLSLSPGK

SEQ ID NO: 6000 - protein, 445 aa, Artificial Sequence
  source: /note="Description of Artificial Sequence: Synthetic polypeptide"
QVQLVQSGAEVKKPGASVKISCKASGYSFTAYYIHWVKQAPGQGLEWIGYISSYNGATNYNQKFKGRVTFTTDTSTSTAYMELRSLRSDDTAVYYCARDYDYDVGMDYWGQGTLVTVSSASTKGPSVFPLAPCSRSTSESTAALGCLVKDYFPEPVTVSWNSGALTSGVHTFPAVLQSSGLYSLSSVVTVPSSNFGTQTYTCNVDHKPSNTKVDKTVERKCCVECPPCPAPPVAGPSVFLFPPKPKDTLMISRTPEVTCVVVDVSHEDPEVQFNWYVDGVEVHNAKTKPREEQFNSTFRVVSVLTVVHQDWLNGKEYKCKVSNKGLPAPIEKTISKTKGQPREPQVYTLPPSREEMTKNQVSLTCLVEGFYPSDIAVEWESNGQPENNYKTTPPMLDSDGSFFLYSELTVDKSRWQQGNVFSCSVMHEALHNHYTQKSLSLSPGK

SEQ ID NO: 6001 - protein, 445 aa, Artificial Sequence
  source: /note="Description of Artificial Sequence: Synthetic polypeptide"
QVQLVQSGAEVKKPGASVKISCKASGYSFTAYYIHWVKQAPGQGLEWIGYIANYNRATNYNQKFKGRVTFTTDTSTSTAYMELRSLRSDDTAVYYCARDYDYDVGMDYWGQGTLVTVSSASTKGPSVFPLAPCSRSTSESTAALGCLVKDYFPEPVTVSWNSGALTSGVHTFPAVLQSSGLYSLSSVVTVPSSNFGTQTYTCNVDHKPSNTKVDKTVERKCCVECPPCPAPPVAGPSVFLFPPKPKDTLMISRTPEVTCVVVDVSHEDPEVQFNWYVDGVEVHNAKTKPREEQFNSTFRVVSVLTVVHQDWLNGKEYKCKVSNKGLPAPIEKTISKTKGQPREPQVYTLPPSREEMTKNQVSLTCLVEGFYPSDIAVEWESNGQPENNYKTTPPMLDSDGSFFLYSELTVDKSRWQQGNVFSCSVMHEALHNHYTQKSLSLSPGK

SEQ ID NO: 6002 - protein, 447 aa, Artificial Sequence
  source: /note="Description of Artificial Sequence: Synthetic polypeptide"
QVQLVQSGAEVKKPGASVKVSCKASGYTFTNYWMHWVRQAPGQGLEWMGDINPSNGRTSYKEKFKRRVTLSVDKSSSTAYMELSSLRSEDTAVYFCTIHYDDKYYPLMDYWGQGTLVTVSSASTKGPSVFPLAPCSRSTSESTAALGCLVKDYFPEPVTVSWNSGALTSGVHTFPAVLQSSGLYSLSSVVTVPSSNFGTQTYTCNVDHKPSNTKVDKTVERKCCVECPPCPAPPVAGPSVFLFPPKPKDTLMISRTPEVTCVVVDVSHEDPEVQFNWYVDGVEVHNAKTKPREEQFNSTFRVVSVLTVVHQDWLNGKEYKCKVSNKGLPAPIEKTISKTKGQPREPQVYTLPPSREKMTKNQVSLTCLVKGFYPSDIAVEWESNGQPENNYKTTPPMLKSDGSFFLYSKLTVDKSRWQQGNVFSCSVMHEALHNHYTQKSLSLSPGK

SEQ ID NO: 6003 - protein, 119 aa, Artificial Sequence
  source: /note="Description of Artificial Sequence: Synthetic polypeptide"
QVQLVQSGAEVKKPGASVKISCKASGYSFTAYYIHWVKQAPGQGLEWIGYISSYNGATNYNQKFKGRVTFTTDTSTSTAYMELRSLRSDDTAVYYCARDYDYDVGMDYWGQGTLVTVSS

SEQ ID NO: 6004 - protein, 464 aa, Artificial Sequence
  source: /note="Description of Artificial Sequence: Synthetic polypeptide"
MKHLWFFLLLVAAPRWVLSQVQLVQSGAEVKKPGASVKISCKASGYSFTAYYIHWVKQAPGQGLEWIGYIANYNRATNYNQKFKGRVTFTTDTSTSTAYMELRSLRSDDTAVYYCARDYDYDVGMDYWGQGTLVTVSSASTKGPSVFPLAPCSRSTSESTAALGCLVKDYFPEPVTVSWNSGALTSGVHTFPAVLQSSGLYSLSSVVTVPSSNFGTQTYTCNVDHKPSNTKVDKTVERKCCVECPPCPAPPVAGPSVFLFPPKPKDTLMISRTPEVTCVVVDVSHEDPEVQFNWYVDGVEVHNAKTKPREEQFNSTFRVVSVLTVVHQDWLNGKEYKCKVSNKGLPAPIEKTISKTKGQPREPQVYTLPPSREEMTKNQVSLTCLVKGFYPSDIAVEWESNGQPENNYKTTPPMLDSDGSFFLYSKLTVDKSRWQQGNVFSCSVMHEALHNHYTQKSLSLSPGK

SEQ ID NO: 6005 - protein, 466 aa, Artificial Sequence
  source: /note="Description of Artificial Sequence: Synthetic polypeptide"
MKHLWFFLLLVAAPRWVLSQVQLVQSGAEVKKPGASVKVSCKASGYTFTNYWMHWVRQAPGQGLEWMGDINPSNGRTSYKEKFKRRVTLSVDKSSSTAYMELSSLRSEDTAVYFCTIHYDDKYYPLMDYWGQGTLVTVSSASTKGPSVFPLAPCSRSTSESTAALGCLVKDYFPEPVTVSWNSGALTSGVHTFPAVLQSSGLYSLSSVVTVPSSNFGTQTYTCNVDHKPSNTKVDKTVERKCCVECPPCPAPPVAGPSVFLFPPKPKDTLMISRTPEVTCVVVDVSHEDPEVQFNWYVDGVEVHNAKTKPREEQFNSTFRVVSVLTVVHQDWLNGKEYKCKVSNKGLPAPIEKTISKTKGQPREPQVYTLPPSREEMTKNQVSLTCLVKGFYPSDIAVEWESNGQPENNYKTTPPMLDSDGSFFLYSKLTVDKSRWQQGNVFSCSVMHEALHNHYTQKSLSLSPGK

SEQ ID NO: 6006 - protein, 445 aa, Artificial Sequence
  source: /note="Description of Artificial Sequence: Synthetic polypeptide"
QVQLVQSGAEVKKPGASVKISCKASGYSFTAYYIHWVKQAPGQGLEWIGYIANYNRATNYNQKFKGRVTFTTDTSTSTAYMELRSLRSDDTAVYYCARDYDYDVGMDYWGQGTLVTVSSASTKGPSVFPLAPCSRSTSESTAALGCLVKDYFPEPVTVSWNSGALTSGVHTFPAVLQSSGLYSLSSVVTVPSSNFGTQTYTCNVDHKPSNTKVDKTVERKCCVECPPCPAPPVAGPSVFLFPPKPKDTLMISRTPEVTCVVVDVSHEDPEVQFNWYVDGVEVHNAKTKPREEQFNSTFRVVSVLTVVHQDWLNGKEYKCKVSNKGLPAPIEKTISKTKGQPREPQVYTLPPSREEMTKNQVSLTCLVKGFYPSDIAVEWESNGQPENNYKTTPPMLDSDGSFFLYSKLTVDKSRWQQGNVFSCSVMHEALHNHYTQKSLSLSPGK

SEQ ID NO: 6007 - protein, 447 aa, Artificial Sequence
  source: /note="Description of Artificial Sequence: Synthetic polypeptide"
QVQLVQSGAEVKKPGASVKVSCKASGYTFTNYWMHWVRQAPGQGLEWMGDINPSNGRTSYKEKFKRRVTLSVDKSSSTAYMELSSLRSEDTAVYFCTIHYDDKYYPLMDYWGQGTLVTVSSASTKGPSVFPLAPCSRSTSESTAALGCLVKDYFPEPVTVSWNSGALTSGVHTFPAVLQSSGLYSLSSVVTVPSSNFGTQTYTCNVDHKPSNTKVDKTVERKCCVECPPCPAPPVAGPSVFLFPPKPKDTLMISRTPEVTCVVVDVSHEDPEVQFNWYVDGVEVHNAKTKPREEQFNSTFRVVSVLTVVHQDWLNGKEYKCKVSNKGLPAPIEKTISKTKGQPREPQVYTLPPSREEMTKNQVSLTCLVKGFYPSDIAVEWESNGQPENNYKTTPPMLDSDGSFFLYSKLTVDKSRWQQGNVFSCSVMHEALHNHYTQKSLSLSPGK

SEQ ID NO: 6008 - protein, 445 aa, Artificial Sequence
  source: /note="Description of Artificial Sequence: Synthetic polypeptide"
QVQLVQSGAEVKKPGASVKISCKASGYSFTAYYIHWVKQAPGQGLEWIGYIAGYKDATNYNQKFKGRVTFTTDTSTSTAYMELRSLRSDDTAVYYCARDYDYDVGMDYWGQGTLVTVSSASTKGPSVFPLAPCSRSTSESTAALGCLVKDYFPEPVTVSWNSGALTSGVHTFPAVLQSSGLYSLSSVVTVPSSNFGTQTYTCNVDHKPSNTKVDKTVERKCCVECPPCPAPPVAGPSVFLFPPKPKDTLMISRTPEVTCVVVDVSHEDPEVQFNWYVDGVEVHNAKTKPREEQFNSTFRVVSVLTVVHQDWLNGKEYKCKVSNKGLPAPIEKTISKTKGQPREPQVYTLPPSREEMTKNQVSLTCLVEGFYPSDIAVEWESNGQPENNYKTTPPMLDSDGSFFLYSELTVDKSRWQQGNVFSCSVMHEALHNHYTQKSLSLSPGK

SEQ ID NO: 6009 - protein, 464 aa, Artificial Sequence
  source: /note="Description of Artificial Sequence: Synthetic polypeptide"
MKHLWFFLLLVAAPRWVLSQVQLVQSGAEVKKPGASVKISCKASGYSFTAYYIHWVKQAPGQGLEWIGYIAGYKDATNYNQKFKGRVTFTTDTSTSTAYMELRSLRSDDTAVYYCARDYDYDVGMDYWGQGTLVTVSSASTKGPSVFPLAPCSRSTSESTAALGCLVKDYFPEPVTVSWNSGALTSGVHTFPAVLQSSGLYSLSSVVTVPSSNFGTQTYTCNVDHKPSNTKVDKTVERKCCVECPPCPAPPVAGPSVFLFPPKPKDTLMISRTPEVTCVVVDVSHEDPEVQFNWYVDGVEVHNAKTKPREEQFNSTFRVVSVLTVVHQDWLNGKEYKCKVSNKGLPAPIEKTISKTKGQPREPQVYTLPPSREEMTKNQVSLTCLVEGFYPSDIAVEWESNGQPENNYKTTPPMLDSDGSFFLYSELTVDKSRWQQGNVFSCSVMHEALHNHYTQKSLSLSPGK

SEQ ID NO: 6010 - protein, 445 aa, Artificial Sequence
  source: /note="Description of Artificial Sequence: Synthetic polypeptide"
QVQLVQSGAEVKKPGASVKISCKASGYSFTAYYIHWVKQAPGQGLEWIGYISNYNRATNYNQKFKGRVTFTTDTSTSTAYMELRSLRSDDTAVYYCARDYDYDVGMDYWGQGTLVTVSSASTKGPSVFPLAPCSRSTSESTAALGCLVKDYFPEPVTVSWNSGALTSGVHTFPAVLQSSGLYSLSSVVTVPSSNFGTQTYTCNVDHKPSNTKVDKTVERKCCVECPPCPAPPVAGPSVFLFPPKPKDTLMISRTPEVTCVVVDVSHEDPEVQFNWYVDGVEVHNAKTKPREEQFNSTFRVVSVLTVVHQDWLNGKEYKCKVSNKGLPAPIEKTISKTKGQPREPQVYTLPPSREEMTKNQVSLTCLVEGFYPSDIAVEWESNGQPENNYKTTPPMLDSDGSFFLYSELTVDKSRWQQGNVFSCSVMHEALHNHYTQKSLSLSPGK

SEQ ID NO: 6011 - protein, 464 aa, Artificial Sequence
  source: /note="Description of Artificial Sequence: Synthetic polypeptide"
MKHLWFFLLLVAAPRWVLSQVQLVQSGAEVKKPGASVKISCKASGYSFTAYYIHWVKQAPGQGLEWIGYISNYNRATNYNQKFKGRVTFTTDTSTSTAYMELRSLRSDDTAVYYCARDYDYDVGMDYWGQGTLVTVSSASTKGPSVFPLAPCSRSTSESTAALGCLVKDYFPEPVTVSWNSGALTSGVHTFPAVLQSSGLYSLSSVVTVPSSNFGTQTYTCNVDHKPSNTKVDKTVERKCCVECPPCPAPPVAGPSVFLFPPKPKDTLMISRTPEVTCVVVDVSHEDPEVQFNWYVDGVEVHNAKTKPREEQFNSTFRVVSVLTVVHQDWLNGKEYKCKVSNKGLPAPIEKTISKTKGQPREPQVYTLPPSREEMTKNQVSLTCLVEGFYPSDIAVEWESNGQPENNYKTTPPMLDSDGSFFLYSELTVDKSRWQQGNVFSCSVMHEALHNHYTQKSLSLSPGK

SEQ ID NO: 6012 - protein, 447 aa, Homo sapiens
QVELVESGGGLVQPGGSLRLSCAASGFTFTSYWMSWVRQAPGKGLELVSSITSYGSFTYYADSVKGRFTISRDNSKNTLYLQMNSLRAEDTAVYYCARNMYTHFDSWGQGTLVTVSSASTKGPSVFPLAPSSKSTSGGTAALGCLVKDYFPEPVTVSWNSGALTSGVHTFPAVLQSSGLYSLSSVVTVPSSSLGTQTYICNVNHKPSNTKVDKKVEPKSCDKTHTCPPCPAPELLGGPSVFLFPPKPKDTLMISRTPEVTCVVVDVSHEDPEVKFNWYVDGVEVHNAKTKPREEQYNSTYRVVSVLTVLHQDWLNGKEYKCKVSNKALPAPIEKTISKAKGQPREPQVYTLPPSRDELTKNQVSLTCLVKGFYPSDIAVEWESNGQPENNYKTTPPVLDSDGSFFLYSKLTVDKSRWQQGNVFSCSVMHEALHNHYTQKSLSLSPGK

SEQ ID NO: 6013 - protein, 451 aa, Artificial Sequence
  source: /note="Description of Artificial Sequence: Synthetic polypeptide"
QVQLVQSGAEVKKPGASVKVSCKASGYTFTDYIMHWVRQAPGQGLEWMGYINPYNDGSKYTEKFQGRVTMTSDTSISTAYMELSRLRSDDTAVYYCARGTYYYGSALFDYWGQGTTVTVSSASTKGPSVFPLAPSSKSTSGGTAALGCLVKDYFPEPVTVSWNSGALTSGVHTFPAVLQSSGLYSLSSVVTVPSSSLGTQTYICNVNHKPSNTKVDKKVEPKSCDKTHTCPPCPAPEAAGGPSVFLFPPKPKDTLMISRTPEVTCVVVDVSHEDPEVKFNWYVDGVEVHNAKTKPREEQYNSTYRVVSVLTVLHQDWLNGKEYKCKVSNKALGAPIEKTISKAKGQPREPQVYTLPPSRDELTKNQVSLTCLVKGFYPSDIAVEWESNGQPENNYKTTPPVLDSDGSFFLYSKLTVDKSRWQQGNVFSCSVMHEALHNHYTQKSLSLSPGK

SEQ ID NO: 6014 - protein, 451 aa, Artificial Sequence
  source: /note="Description of Artificial Sequence: Synthetic polypeptide"
QVQLVQSGAEVKKPGASVKVSCKASGYTFTDYIMHWVRQAPGQGLEWMGYINPYNDGSKYTEKFQGRVTMTSDTSISTAYMELSRLRSDDTAVYYCARGTYYYGPQLFDYWGQGTTVTVSSASTKGPSVFPLAPSSKSTSGGTAALGCLVKDYFPEPVTVSWNSGALTSGVHTFPAVLQSSGLYSLSSVVTVPSSSLGTQTYICNVNHKPSNTKVDKKVEPKSCDKTHTCPPCPAPEAAGGPSVFLFPPKPKDTLMISRTPEVTCVVVDVSHEDPEVKFNWYVDGVEVHNAKTKPREEQYNSTYRVVSVLTVLHQDWLNGKEYKCKVSNKALGAPIEKTISKAKGQPREPQVYTLPPSRDELTKNQVSLTCLVKGFYPSDIAVEWESNGQPENNYKTTPPVLDSDGSFFLYSKLTVDKSRWQQGNVFSCSVMHEALHNHYTQKSLSLSPGK

SEQ ID NO: 6015 - protein, 451 aa, Artificial Sequence
  source: /note="Description of Artificial Sequence: Synthetic polypeptide"
QVQLVQSGAEVKKPGASVKVSCKASGYTFTDYITHWVRQAPGQGLEWMGYINPYNDGSKYTEKFQGRVTMTSDTSISTAYMELSRLRSDDTAVYYCARGTYYYGPDLFDYWGQGTTVTVSSASTKGPSVFPLAPSSKSTSGGTAALGCLVKDYFPEPVTVSWNSGALTSGVHTFPAVLQSSGLYSLSSVVTVPSSSLGTQTYICNVNHKPSNTKVDKKVEPKSCDKTHTCPPCPAPEAAGGPSVFLFPPKPKDTLMISRTPEVTCVVVDVSHEDPEVKFNWYVDGVEVHNAKTKPREEQYNSTYRVVSVLTVLHQDWLNGKEYKCKVSNKALGAPIEKTISKAKGQPREPQVYTLPPSRDELTKNQVSLTCLVKGFYPSDIAVEWESNGQPENNYKTTPPVLDSDGSFFLYSKLTVDKSRWQQGNVFSCSVMHEALHNHYTQKSLSLSPGK

SEQ ID NO: 6016 - protein, 445 aa, Homo sapiens
QVQLVQSGAEVKKPGSSVKVSCKASGGTFNSYAISWVRQAPGQGLEWMGGIIPGFGTANYAQKFQGRVTITADESTSTAYMELSSLRSEDTAVYYCARKNEEDGGFDHWGQGTLVTVSSASTKGPSVFPLAPCSRSTSESTAALGCLVKDYFPEPVTVSWNSGALTSGVHTFPAVLQSSGLYSLSSVVTVPSSNFGTQTYTCNVDHKPSNTKVDKTVERKCCVECPPCPAPPVAGPSVFLFPPKPKDTLMISRTPEVTCVVVDVSHEDPEVQFNWYVDGVEVHNAKTKPREEQFNSTFRVVSVLTVVHQDWLNGKEYKCKVSNKGLPAPIEKTISKTKGQPREPQVYTLPPSREEMTKNQVSLTCLVKGFYPSDIAVEWESNGQPENNYKTTPPMLDSDGSFFLYSKLTVDKSRWQQGNVFSCSVMHEALHNHYTQKSLSLSPGK

SEQ ID NO: 6017 - protein, 444 aa, Homo sapiens
QVQLVESGGGLVQPGGSLRLSCAASGFTFSDYYMHWVRQAPGKGLEWVSVISGSGSNTYYADSVKGRFTISRDNSKNTLYLQMNSLRAEDTAVYYCARLYAQFEGDFWGQGTLVTVSSASTKGPSVFPLAPCSRSTSESTAALGCLVKDYFPEPVTVSWNSGALTSGVHTFPAVLQSSGLYSLSSVVTVPSSNFGTQTYTCNVDHKPSNTKVDKTVERKCCVECPPCPAPPVAGPSVFLFPPKPKDTLMISRTPEVTCVVVDVSHEDPEVQFNWYVDGVEVHNAKTKPREEQFNSTFRVVSVLTVVHQDWLNGKEYKCKVSNKGLPAPIEKTISKTKGQPREPQVYTLPPSREEMTKNQVSLTCLVKGFYPSDIAVEWESNGQPENNYKTTPPMLDSDGSFFLYSKLTVDKSRWQQGNVFSCSVMHEALHNHYTQKSLSLSPGK

SEQ ID NO: 6018 - protein, 442 aa, Homo sapiens
QVQLVQSGAEVKKPGESLKISCKGSGYSFSTYWISWVRQMPGKGLEWMGKIYPGDSYTNYSPSFQGQVTISADKSISTAYLQWSSLKASDTAMYYCARGYGIFDYWGQGTLVTVSSASTKGPSVFPLAPCSRSTSESTAALGCLVKDYFPEPVTVSWNSGALTSGVHTFPAVLQSSGLYSLSSVVTVPSSNFGTQTYTCNVDHKPSNTKVDKTVERKCCVECPPCPAPPVAGPSVFLFPPKPKDTLMISRTPEVTCVVVDVSHEDPEVQFNWYVDGVEVHNAKTKPREEQFNSTFRVVSVLTVVHQDWLNGKEYKCKVSNKGLPAPIEKTISKTKGQPREPQVYTLPPSREEMTKNQVSLTCLVKGFYPSDIAVEWESNGQPENNYKTTPPMLDSDGSFFLYSKLTVDKSRWQQGNVFSCSVMHEALHNHYTQKSLSLSPGK

SEQ ID NO: 6019 - protein, 442 aa, Homo sapiens
EVQLVQSGAEVKKPGESLRISCKGSGYSFSTYWISWVRQMPGKGLEWMGKIYPGDSYTNYSPSFQGQVTISADKSISTAYLQWSSLKASDTAMYYCARGYGIFDYWGQGTLVTVSSASTKGPSVFPLAPCSRSTSESTAALGCLVKDYFPEPVTVSWNSGALTSGVHTFPAVLQSSGLYSLSSVVTVPSSNFGTQTYTCNVDHKPSNTKVDKTVERKCCVECPPCPAPPVAGPSVFLFPPKPKDTLMISRTPEVTCVVVDVSHEDPEVQFNWYVDGVEVHNAKTKPREEQFNSTFRVVSVLTVVHQDWLNGKEYKCKVSNKGLPAPIEKTISKTKGQPREPQVYTLPPSREEMTKNQVSLTCLVKGFYPSDIAVEWESNGQPENNYKTTPPMLDSDGSFFLYSKLTVDKSRWQQGNVFSCSVMHEALHNHYTQKSLSLSPGK

SEQ ID NO: 6020 - protein, 214 aa, Homo sapiens
SYELTQPPSVSVSPGQTASITCSGDNIGDQYAHWYQQKPGQSPVVVIYQDKNRPSGIPERFSGSNSGNTATLTISGTQAMDEADYYCATYTGFGSLAVFGGGTKLTVLGQPKAAPSVTLFPPSSEELQANKATLVCLISDFYPGAVTVAWKADSSPVKAGVETTTPSKQSNNKYAASSYLSLTPEQWKSHRSYSCQVTHEGSTVEKTVAPTECS

SEQ ID NO: 6021 - protein, 214 aa, Homo sapiens
SYELTQPPSVSVSPGQTASITCSGDNIGDQYAHWYQQKPGQSPVLVIYQDKNRPSGIPERFSGSNSGNTATLTISGTQAMDEADYYCSTYTFVGFTTVFGGGTKLTVLGQPKAAPSVTLFPPSSEELQANKATLVCLISDFYPGAVTVAWKADSSPVKAGVETTTPSKQSNNKYAASSYLSLTPEQWKSHRSYSCQVTHEGSTVEKTVAPTECS

SEQ ID NO: 6022 - protein, 446 aa, Artificial Sequence
  source: /note="Description of Artificial Sequence: Synthetic polypeptide"
QVQLVQSGAEVKKPGSSVKVSCKASGGTFSSYAISWVRQAPGQGLEWMGGIIPIFGTANYAQKFQGRVTITADKSTSTAYMELSSLRSEDTAVYYCAREYGWMDYWGQGTTVTVSSASTKGPSVFPLAPSSKSTSGGTAALGCLVKDYFPEPVTVSWNSGALTSGVHTFPAVLQSSGLYSLSSVVTVPSSSLGTQTYICNVNHKPSNTKVDKKVEPKSCDKTHTCPPCPAPEAAGGPSVFLFPPKPKDTLMISRTPEVTCVVVDVSHEDPEVKFNWYVDGVEVHNAKTKPREEQYNSTYRVVSVLTVLHQDWLNGKEYKCKVSNKALGAPIEKTISKAKGQPREPQVYTLPPSRDELTKNQVSLTCLVKGFYPSDIAVEWESNGQPENNYKTTPPVLDSDGSFFLYSKLTVDKSRWQQGNVFSCSVMHEALHNHYTQKSLSLSPGK

SEQ ID NO: 6023 - protein, 448 aa, Artificial Sequence
  source: /note="Description of Artificial Sequence: Synthetic polypeptide"
QVQLVQSGAEVKKPGSSVKVSCKASGGTFSSYAISWVRQAPGQGLEWMGGIIPIFGTANYAQKFQGRVTITADKSTSTAYMELSSLRSEDTAVYYCAREYYRGPYDYWGQGTTVTVSSASTKGPSVFPLAPSSKSTSGGTAALGCLVKDYFPEPVTVSWNSGALTSGVHTFPAVLQSSGLYSLSSVVTVPSSSLGTQTYICNVNHKPSNTKVDKKVEPKSCDKTHTCPPCPAPEAAGGPSVFLFPPKPKDTLMISRTPEVTCVVVDVSHEDPEVKFNWYVDGVEVHNAKTKPREEQYNSTYRVVSVLTVLHQDWLNGKEYKCKVSNKALGAPIEKTISKAKGQPREPQVYTLPPSRDELTKNQVSLTCLVKGFYPSDIAVEWESNGQPENNYKTTPPVLDSDGSFFLYSKLTVDKSRWQQGNVFSCSVMHEALHNHYTQKSLSLSPGK

SEQ ID NO: 6024 - protein, 446 aa, Artificial Sequence
  source: /note="Description of Artificial Sequence: Synthetic polypeptide"
QVQLVQSGAEVKKPGSSVKVSCKASGGTFSSYAISWVRQAPGQGLEWMGGIIPIFGTANYAQKFQGRVTITADKSTSTAYMELSSLRSEDTAVYYCAREYGSMDYWGQGTTVTVSSASTKGPSVFPLAPSSKSTSGGTAALGCLVKDYFPEPVTVSWNSGALTSGVHTFPAVLQSSGLYSLSSVVTVPSSSLGTQTYICNVNHKPSNTKVDKKVEPKSCDKTHTCPPCPAPEAAGGPSVFLFPPKPKDTLMISRTPEVTCVVVDVSHEDPEVKFNWYVDGVEVHNAKTKPREEQYNSTYRVVSVLTVLHQDWLNGKEYKCKVSNKALGAPIEKTISKAKGQPREPQVYTLPPSRDELTKNQVSLTCLVKGFYPSDIAVEWESNGQPENNYKTTPPVLDSDGSFFLYSKLTVDKSRWQQGNVFSCSVMHEALHNHYTQKSLSLSPGK

SEQ ID NO: 6025 - protein, 452 aa, Artificial Sequence
  source: /note="Description of Artificial Sequence: Synthetic polypeptide"
QVQLVQSGAEVKKPGSSVKVSCKASGGTFSSYAISWVRQAPGQGLEWMGGIIPIFGTANYAQKFQGRVTITADKSTSTAYMELSSLRSEDTAVYYCARVNYPYSYWGDFDYWGQGTTVTVSSASTKGPSVFPLAPSSKSTSGGTAALGCLVKDYFPEPVTVSWNSGALTSGVHTFPAVLQSSGLYSLSSVVTVPSSSLGTQTYICNVNHKPSNTKVDKKVEPKSCDKTHTCPPCPAPEAAGGPSVFLFPPKPKDTLMISRTPEVTCVVVDVSHEDPEVKFNWYVDGVEVHNAKTKPREEQYNSTYRVVSVLTVLHQDWLNGKEYKCKVSNKALGAPIEKTISKAKGQPREPQVYTLPPSRDELTKNQVSLTCLVKGFYPSDIAVEWESNGQPENNYKTTPPVLDSDGSFFLYSKLTVDKSRWQQGNVFSCSVMHEALHNHYTQKSLSLSPGK

SEQ ID NO: 6026 - protein, 446 aa, Artificial Sequence
  source: /note="Description of Artificial Sequence: Synthetic polypeptide"
EVQLLESGGGLVQPGGSLRLSCAASGFTFSSYAMSWVRQAPGKGLEWVSAISGSGGSTYYADSVKGRFTISRDNSKNTLYLQMNSLRAEDTAVYYCALDVGAFDYWGQGALVTVSSASTKGPSVFPLAPSSKSTSGGTAALGCLVKDYFPEPVTVSWNSGALTSGVHTFPAVLQSSGLYSLSSVVTVPSSSLGTQTYICNVNHKPSNTKVDKKVEPKSCDKTHTCPPCPAPEAAGGPSVFLFPPKPKDTLMISRTPEVTCVVVDVSHEDPEVKFNWYVDGVEVHNAKTKPREEQYNSTYRVVSVLTVLHQDWLNGKEYKCKVSNKALGAPIEKTISKAKGQPREPQVYTLPPSRDELTKNQVSLTCLVKGFYPSDIAVEWESNGQPENNYKTTPPVLDSDGSFFLYSKLTVDKSRWQQGNVFSCSVMHEALHNHYTQKSLSLSPGK

SEQ ID NO: 6027 - protein, 446 aa, Artificial Sequence
  source: /note="Description of Artificial Sequence: Synthetic polypeptide"
EVQLLESGGGLVQPGGSLRLSCAASGFTFSSYAMSWVRQAPGKGLEWVSAISGSGGSTYYADSVKGRFTISRDNSKNTLYLQMNSLRAEDTAVYYCAFDVGPFDYWGQGTLVTVSSASTKGPSVFPLAPSSKSTSGGTAALGCLVKDYFPEPVTVSWNSGALTSGVHTFPAVLQSSGLYSLSSVVTVPSSSLGTQTYICNVNHKPSNTKVDKKVEPKSCDKTHTCPPCPAPEAAGGPSVFLFPPKPKDTLMISRTPEVTCVVVDVSHEDPEVKFNWYVDGVEVHNAKTKPREEQYNSTYRVVSVLTVLHQDWLNGKEYKCKVSNKALGAPIEKTISKAKGQPREPQVYTLPPSRDELTKNQVSLTCLVKGFYPSDIAVEWESNGQPENNYKTTPPVLDSDGSFFLYSKLTVDKSRWQQGNVFSCSVMHEALHNHYTQKSLSLSPGK

SEQ ID NO: 6028 - protein, 450 aa, Artificial Sequence
  source: /note="Description of Artificial Sequence: Synthetic polypeptide"
EVQLLESGGGLVQPGGSLRLSCAASGFTFSSYAMSWVRQAPGKGLEWVSAISGSGGSTYYADSVKGRFTISRDNSKNTLYLQMNSLRAEDTAVYYCARVFYRGGVSMDYWGQGTLVTVSSASTKGPSVFPLAPSSKSTSGGTAALGCLVKDYFPEPVTVSWNSGALTSGVHTFPAVLQSSGLYSLSSVVTVPSSSLGTQTYICNVNHKPSNTKVDKKVEPKSCDKTHTCPPCPAPEAAGGPSVFLFPPKPKDTLMISRTPEVTCVVVDVSHEDPEVKFNWYVDGVEVHNAKTKPREEQYNSTYRVVSVLTVLHQDWLNGKEYKCKVSNKALGAPIEKTISKAKGQPREPQVYTLPPSRDELTKNQVSLTCLVKGFYPSDIAVEWESNGQPENNYKTTPPVLDSDGSFFLYSKLTVDKSRWQQGNVFSCSVMHEALHNHYTQKSLSLSPGK

SEQ ID NO: 6029 - protein, 450 aa, Artificial Sequence
  source: /note="Description of Artificial Sequence: Synthetic polypeptide"
QVQLVQSGAEVKKPGSSVKVSCKASGGTFSSYAISWVRQAPGQGLEWMGGIIPIFGTANYAQKFQGRVTITADKSTSTAYMELSSLRSEDTAVYYCARSEFRFYADFDYWGQGTTVTVSSASTKGPSVFPLAPSSKSTSGGTAALGCLVKDYFPEPVTVSWNSGALTSGVHTFPAVLQSSGLYSLSSVVTVPSSSLGTQTYICNVNHKPSNTKVDKKVEPKSCDKTHTCPPCPAPEAAGGPSVFLFPPKPKDTLMISRTPEVTCVVVDVSHEDPEVKFNWYVDGVEVHNAKTKPREEQYNSTYRVVSVLTVLHQDWLNGKEYKCKVSNKALGAPIEKTISKAKGQPREPQVYTLPPSRDELTKNQVSLTCLVKGFYPSDIAVEWESNGQPENNYKTTPPVLDSDGSFFLYSKLTVDKSRWQQGNVFSCSVMHEALHNHYTQKSLSLSPGK

SEQ ID NO: 6030 - protein, 448 aa, Artificial Sequence
  source: /note="Description of Artificial Sequence: Synthetic polypeptide"
EVQLLESGGGLVQPGGSLRLSCAASGFTFSSYAMSWVRQAPGKGLEWVSAISGSGGSTYYADSVKGRFTISRDNSKNTLYLQMNSLRAEDTAVYYCARDDPWPPFDYWGQGTLVTVSSASTKGPSVFPLAPSSKSTSGGTAALGCLVKDYFPEPVTVSWNSGALTSGVHTFPAVLQSSGLYSLSSVVTVPSSSLGTQTYICNVNHKPSNTKVDKKVEPKSCDKTHTCPPCPAPEAAGGPSVFLFPPKPKDTLMISRTPEVTCVVVDVSHEDPEVKFNWYVDGVEVHNAKTKPREEQYNSTYRVVSVLTVLHQDWLNGKEYKCKVSNKALGAPIEKTISKAKGQPREPQVYTLPPSRDELTKNQVSLTCLVKGFYPSDIAVEWESNGQPENNYKTTPPVLDSDGSFFLYSKLTVDKSRWQQGNVFSCSVMHEALHNHYTQKSLSLSPGK

SEQ ID NO: 6031 - protein, 449 aa, Artificial Sequence
  source: /note="Description of Artificial Sequence: Synthetic polypeptide"
QVQLVQSGAEVKKPGSSVKVSCKASGGTFSSYAISWVRQAPGQGLEWMGGIIPIFGTANYAQKFQGRVTITADKSTSTAYMELSSLRSEDTAVYYCARSTLIYGYFDYWGQGTTVTVSSASTKGPSVFPLAPSSKSTSGGTAALGCLVKDYFPEPVTVSWNSGALTSGVHTFPAVLQSSGLYSLSSVVTVPSSSLGTQTYICNVNHKPSNTKVDKKVEPKSCDKTHTCPPCPAPEAAGGPSVFLFPPKPKDTLMISRTPEVTCVVVDVSHEDPEVKFNWYVDGVEVHNAKTKPREEQYNSTYRVVSVLTVLHQDWLNGKEYKCKVSNKALGAPIEKTISKAKGQPREPQVYTLPPSRDELTKNQVSLTCLVKGFYPSDIAVEWESNGQPENNYKTTPPVLDSDGSFFLYSKLTVDKSRWQQGNVFSCSVMHEALHNHYTQKSLSLSPGK

SEQ ID NO: 6032 - protein, 450 aa, Artificial Sequence
  source: /note="Description of Artificial Sequence: Synthetic polypeptide"
QVQLVQSGAEVKKPGSSVKVSCKASGGTFSSYAISWVRQAPGQGLEWMGGIIPIFGTANYAQKFQGRVTITADKSTSTAYMELSSLRSEDTAVYYCARSSGAYPGYFDYWGQGTTVTVSSASTKGPSVFPLAPSSKSTSGGTAALGCLVKDYFPEPVTVSWNSGALTSGVHTFPAVLQSSGLYSLSSVVTVPSSSLGTQTYICNVNHKPSNTKVDKKVEPKSCDKTHTCPPCPAPEAAGGPSVFLFPPKPKDTLMISRTPEVTCVVVDVSHEDPEVKFNWYVDGVEVHNAKTKPREEQYNSTYRVVSVLTVLHQDWLNGKEYKCKVSNKALGAPIEKTISKAKGQPREPQVYTLPPSRDELTKNQVSLTCLVKGFYPSDIAVEWESNGQPENNYKTTPPVLDSDGSFFLYSKLTVDKSRWQQGNVFSCSVMHEALHNHYTQKSLSLSPGK

SEQ ID NO: 6033 - protein, 450 aa, Artificial Sequence
  source: /note="Description of Artificial Sequence: Synthetic polypeptide"
QVQLVQSGAEVKKPGSSVKVSCKASGGTFSSYAISWVRQAPGQGLEWMGGIIPIFGTANYAQKFQGRVTITADKSTSTAYMELSSLRSEDTAVYYCARSYYWESYPFDYWGQGTTVTVSSASTKGPSVFPLAPSSKSTSGGTAALGCLVKDYFPEPVTVSWNSGALTSGVHTFPAVLQSSGLYSLSSVVTVPSSSLGTQTYICNVNHKPSNTKVDKKVEPKSCDKTHTCPPCPAPEAAGGPSVFLFPPKPKDTLMISRTPEVTCVVVDVSHEDPEVKFNWYVDGVEVHNAKTKPREEQYNSTYRVVSVLTVLHQDWLNGKEYKCKVSNKALGAPIEKTISKAKGQPREPQVYTLPPSRDELTKNQVSLTCLVKGFYPSDIAVEWESNGQPENNYKTTPPVLDSDGSFFLYSKLTVDKSRWQQGNVFSCSVMHEALHNHYTQKSLSLSPGK

SEQ ID NO: 6034 - protein, 448 aa, Artificial Sequence
  source: /note="Description of Artificial Sequence: Synthetic polypeptide"
QITLKESGPTLVKPTQTLTLTCTFSGFSLSTSGMGVSWIRQPPGKGLEWLAHIYWDDDKRYNPTLKSRLTITKDPSKNQVVLTMTNMDPVDTATYYCARSSYGAMDYWGQGTLVTVSSASTKGPSVFPLAPSSKSTSGGTAALGCLVKDYFPEPVTVSWNSGALTSGVHTFPAVLQSSGLYSLSSVVTVPSSSLGTQTYICNVNHKPSNTKVDKKVEPKSCDKTHTCPPCPAPELLGGPSVFLFPPKPKDTLMISRTPEVTCVVVDVSHEDPEVKFNWYVDGVEVHNAKTKPREEQYNSTYRVVSVLTVLHQDWLNGKEYKCKVSNKALPAPIEKTISKAKGQPREPQVYTLPPSREEMTKNQVSLTCLVKGFYPSDIAVEWESNGQPENNYKTTPPVLDSDGSFFLYSKLTVDKSRWQQGNVFSCSVMHEALHNHYTQKSLSLSPGK

SEQ ID NO: 6035 - protein, 330 aa, Artificial Sequence
  source: /note="Description of Artificial Sequence: Synthetic polypeptide"
ASTKGPSVFPLAPSSKSTSGGTAALGCLVKDYFPEPVTVSWNSGALTSGVHTFPAVLQSSGLYSLSSVVTVPSSSLGTQTYICNVNHKPSNTKVDKKVEPKSCDKTHTCPPCPAPELLGGPSVFLFPPKPKDTLMISRTPEVTCVVVDVSHEDPEVKFNWYVDGVEVHNAKTKPREEQYNSTYRVVSVLTVLHQDWLNGKEYKCKVSNKALPAPIEKTISKAKGQPREPQVYTLPPSREEMTKNQVSLTCLVKGFYPSDIAVEWESNGQPENNYKTTPPVLDSDGSFFLYSKLTVDKSRWQQGNVFSCSVMHEALHNHYTQKSLSLSPGK

SEQ ID NO: 6036 - protein, 448 aa, Artificial Sequence
  source: /note="Description of Artificial Sequence: Synthetic polypeptide"
QVKLQQSGPGILQSSQTLSLTCSFSGFSLSTSGMGVSWIRQPSGKGLEWLAHIYWDDDKRYNPTLKSRLTISKDPSRNQVFLKITSVDTADTATYYCARSSYGAMDYWGQGTSVTVSSASTKGPSVFPLAPSSKSTSGGTAALGCLVKDYFPEPVTVSWNSGALTSGVHTFPAVLQSSGLYSLSSVVTVPSSSLGTQTYICNVNHKPSNTKVDKKVEPKSCDKTHTCPPCPAPELLGGPSVFLFPPKPKDTLMISRTPEVTCVVVDVSHEDPEVKFNWYVDGVEVHNAKTKPREEQYNSTYRVVSVLTVLHQDWLNGKEYKCKVSNKALPAPIEKTISKAKGQPREPQVYTLPPSREEMTKNQVSLTCLVKGFYPSDIAVEWESNGQPENNYKTTPPVLDSDGSFFLYSKLTVDKSRWQQGNVFSCSVMHEALHNHYTQKSLSLSPGK

SEQ ID NO: 6037 - protein, 120 aa, Artificial Sequence
  source: /note="Description of Artificial Sequence: Synthetic polypeptide"
QVQLVQSGAEVKKPGASVKVSCKASGYTFTDYNMDWVRQAPGQSLEWMGQINPNNGLIFFNQKFQGRVTLTTDTSTSTAYMELRSLRSDDTAVYYCAREAITTVGAMDYWGQGTLVTVSS

SEQ ID NO: 6038 - protein, 451 aa, Artificial Sequence
  source: /note="Description of Artificial Sequence: Synthetic polypeptide"
EVQLVESGGGLVQPGGSLRLSCAASGFTFSSYAMSWVRQAPGRGLEWVSTINNSGGGTYYADSVKGRFTISRDNSKNTLYLHMNSLRAEDTAVYYCAKEGGKYYYYAMDVWGQGTTVTVSSASTKGPSVFPLAPSSKSTSGGTAALGCLVKDYFPEPVTVSWNSGALTSGVHTFPAVLQSSGLYSLSSVVTVPSSSLGTQTYICNVNHKPSNTKVDKKVEPKSCDKTHTCPPCPAPELLGGPSVFLFPPKPKDTLMISRTPEVTCVVVDVSHEDPEVKFNWYVDGVEVHNAKTKPREEQYNSTYRVVSVLTVLHQDWLNGKEYKCKVSNKALPAPIEKTISKAKGQPREPQVYTLPPSREEMTKNQVSLTCLVKGFYPSDIAVEWESNGQPENNYKTTPPVLDSDGSFFLYSKLTVDKSRWQQGNVFSCSVMHEALHNHYTQKSLSLSPGK

SEQ ID NO: 6039 - protein, 451 aa, Artificial Sequence
  source: /note="Description of Artificial Sequence: Synthetic polypeptide"
EVQLVESGGGLVQPGGSLRLSCAASGFTFSSYAMSWVRQAPGKGLEWVSTIDNAGGGTYYADSVKGRFTISRDNSKNTLYLQMNSLRAEDTAVYYCAKEGGKYYYYAMDVWGQGTTVTVSSASTKGPSVFPLAPSSKSTSGGTAALGCLVKDYFPEPVTVSWNSGALTSGVHTFPAVLQSSGLYSLSSVVTVPSSSLGTQTYICNVNHKPSNTKVDKKVEPKSCDKTHTCPPCPAPEAAGASSVFLFPPKPKDTLMISRTPEVTCVVVDVSAEDPEVKFNWYVDGVEVHNAKTKPREEQYNSTYRVVSVLTVLHQDWLNGKEYKCKVSNKALPSSIEKTISKAKGQPREPQVYTLPPSREEMTKNQVSLTCLVKGFYPSDIAVEWESNGQPENNYKTTPPVLDSDGSFFLYSKLTVDKSRWQQGNVFSCSVMHEALHNHYTQKSLSLSPGK

SEQ ID NO: 6040 - protein, 448 aa, Artificial Sequence
  source: /note="Description of Artificial Sequence: Synthetic polypeptide"
EVQLVESGGGLVQPGGSLRLSCAASGFTFSSYAMSWVRQAPGKGLEWVSTIDNAGGGTYYADSVKGRFTISRDNSKNTLYLQMNSLRAEDTAVYYCAKEGGKYYYYAMDVWGQGTTVTVSSASTKGPSVFPLAPCSRSTSESTAALGCLVKDYFPEPVTVSWNSGALTSGVHTFPAVLQSSGLYSLSSVVTVPSSSLGTKTYTCNVDHKPSNTKVDKRVESKYGPPCPPCPAPEAAGGPSVFLFPPKPKDTLMISRTPEVTCVVVDVSQEDPEVQFNWYVDGVEVHNAKTKPREEQFNSTYRVVSVLTVLHQDWLNGKEYKCKVSNKGLPSSIEKTISKAKGQPREPQVYTLPPSQEEMTKNQVSLTCLVKGFYPSDIAVEWESNGQPENNYKTTPPVLDSDGSFFLYSRLTVDKSRWQEGNVFSCSVMHEALHNHYTQKSLSLSLGK

SEQ ID NO: 6041 - protein, 451 aa, Artificial Sequence
  source: /note="Description of Artificial Sequence: Synthetic polypeptide"
EVQLVESGGGLVQPGGSLRLSCAASGFTFSSYAMSWVRQAPGKGLEWVSTIQNAGGGTYYADSVKGRFTISRDNSKNTLYLQMNSLRAEDTAVYYCAKEGGKYYYYAMDVWGQGTTVTVSSASTKGPSVFPLAPSSKSTSGGTAALGCLVKDYFPEPVTVSWNSGALTSGVHTFPAVLQSSGLYSLSSVVTVPSSSLGTQTYICNVNHKPSNTKVDKKVEPKSCDKTHTCPPCPAPEAAGASSVFLFPPKPKDTLMISRTPEVTCVVVDVSAEDPEVKFNWYVDGVEVHNAKTKPREEQYNSTYRVVSVLTVLHQDWLNGKEYKCKVSNKALPSSIEKTISKAKGQPREPQVYTLPPSREEMTKNQVSLTCLVKGFYPSDIAVEWESNGQPENNYKTTPPVLDSDGSFFLYSKLTVDKSRWQQGNVFSCSVMHEALHNHYTQKSLSLSPGK

SEQ ID NO: 6042 - protein, 448 aa, Artificial Sequence
  source: /note="Description of Artificial Sequence: Synthetic polypeptide"
EVQLVESGGGLVQPGGSLRLSCAASGFTFSSYAMSWVRQAPGKGLEWVSTIQNAGGGTYYADSVKGRFTISRDNSKNTLYLQMNSLRAEDTAVYYCAKEGGKYYYYAMDVWGQGTTVTVSSASTKGPSVFPLAPCSRSTSESTAALGCLVKDYFPEPVTVSWNSGALTSGVHTFPAVLQSSGLYSLSSVVTVPSSSLGTKTYTCNVDHKPSNTKVDKRVESKYGPPCPPCPAPEAAGGPSVFLFPPKPKDTLMISRTPEVTCVVVDVSQEDPEVQFNWYVDGVEVHNAKTKPREEQFNSTYRVVSVLTVLHQDWLNGKEYKCKVSNKGLPSSIEKTISKAKGQPREPQVYTLPPSQEEMTKNQVSLTCLVKGFYPSDIAVEWESNGQPENNYKTTPPVLDSDGSFFLYSRLTVDKSRWQEGNVFSCSVMHEALHNHYTQKSLSLSLGK

SEQ ID NO: 6043 - protein, 451 aa, Artificial Sequence
  source: /note="Description of Artificial Sequence: Synthetic polypeptide"
EVQLVESGGGLVQPGGSLRLSCAASGFTFSSYAMSWVRQAPGKGLEWVSTINQAGGGTYYADSVKGRFTISRDNSKNTLYLQMNSLRAEDTAVYYCAKEGGKYYYYAMDVWGQGTTVTVSSASTKGPSVFPLAPSSKSTSGGTAALGCLVKDYFPEPVTVSWNSGALTSGVHTFPAVLQSSGLYSLSSVVTVPSSSLGTQTYICNVNHKPSNTKVDKKVEPKSCDKTHTCPPCPAPEAAGASSVFLFPPKPKDTLMISRTPEVTCVVVDVSAEDPEVKFNWYVDGVEVHNAKTKPREEQYNSTYRVVSVLTVLHQDWLNGKEYKCKVSNKALPSSIEKTISKAKGQPREPQVYTLPPSREEMTKNQVSLTCLVKGFYPSDIAVEWESNGQPENNYKTTPPVLDSDGSFFLYSKLTVDKSRWQQGNVFSCSVMHEALHNHYTQKSLSLSPGK

SEQ ID NO: 6044 - protein, 448 aa, Artificial Sequence
  source: /note="Description of Artificial Sequence: Synthetic polypeptide"
EVQLVESGGGLVQPGGSLRLSCAASGFTFSSYAMSWVRQAPGKGLEWVSTINQAGGGTYYADSVKGRFTISRDNSKNTLYLQMNSLRAEDTAVYYCAKEGGKYYYYAMDVWGQGTTVTVSSASTKGPSVFPLAPCSRSTSESTAALGCLVKDYFPEPVTVSWNSGALTSGVHTFPAVLQSSGLYSLSSVVTVPSSSLGTKTYTCNVDHKPSNTKVDKRVESKYGPPCPPCPAPEAAGGPSVFLFPPKPKDTLMISRTPEVTCVVVDVSQEDPEVQFNWYVDGVEVHNAKTKPREEQFNSTYRVVSVLTVLHQDWLNGKEYKCKVSNKGLPSSIEKTISKAKGQPREPQVYTLPPSQEEMTKNQVSLTCLVKGFYPSDIAVEWESNGQPENNYKTTPPVLDSDGSFFLYSRLTVDKSRWQEGNVFSCSVMHEALHNHYTQKSLSLSLGK

SEQ ID NO: 6045 - protein, 448 aa, Artificial Sequence
  source: /note="Description of Artificial Sequence: Synthetic polypeptide"
EVQLVESGGGLVQPGGSLRLSCAASGFTFSSYAMSWVRQAPGKGLEWVSTINAAGGGTYYADSVKGRFTISRDNSKNTLYLQMNSLRAEDTAVYYCAKEGGKYYYYAMDVWGQGTTVTVSSASTKGPSVFPLAPCSRSTSESTAALGCLVKDYFPEPVTVSWNSGALTSGVHTFPAVLQSSGLYSLSSVVTVPSSSLGTKTYTCNVDHKPSNTKVDKRVESKYGPPCPPCPAPEAAGGPSVFLFPPKPKDTLMISRTPEVTCVVVDVSQEDPEVQFNWYVDGVEVHNAKTKPREEQFNSTYRVVSVLTVLHQDWLNGKEYKCKVSNKGLPSSIEKTISKAKGQPREPQVYTLPPSQEEMTKNQVSLTCLVKGFYPSDIAVEWESNGQPENNYKTTPPVLDSDGSFFLYSRLTVDKSRWQEGNVFSCSVMHEALHNHYTQKSLSLSLGK

SEQ ID NO: 6046 - protein, 451 aa, Artificial Sequence
  source: /note="Description of Artificial Sequence: Synthetic polypeptide"
EVQLVESGGGLVQPGGSLRLSCAASGFTFSSYAMSWVRQAPGKGLEWVSTINAAGGGTYYADSVKGRFTISRDNSKNTLYLQMNSLRAEDTAVYYCAKEGGKYYYYALDVWGQGTTVTVSSASTKGPSVFPLAPSSKSTSGGTAALGCLVKDYFPEPVTVSWNSGALTSGVHTFPAVLQSSGLYSLSSVVTVPSSSLGTQTYICNVNHKPSNTKVDKKVEPKSCDKTHTCPPCPAPEAAGASSVFLFPPKPKDTLMISRTPEVTCVVVDVSAEDPEVKFNWYVDGVEVHNAKTKPREEQYNSTYRVVSVLTVLHQDWLNGKEYKCKVSNKALPSSIEKTISKAKGQPREPQVYTLPPSREEMTKNQVSLTCLVKGFYPSDIAVEWESNGQPENNYKTTPPVLDSDGSFFLYSKLTVDKSRWQQGNVFSCSVMHEALHNHYTQKSLSLSPGK

SEQ ID NO: 6047 - protein, 448 aa, Artificial Sequence
  source: /note="Description of Artificial Sequence: Synthetic polypeptide"
EVQLVESGGGLVQPGGSLRLSCAASGFTFSSYAMSWVRQAPGKGLEWVSTINAAGGGTYYADSVKGRFTISRDNSKNTLYLQMNSLRAEDTAVYYCAKEGGKYYYYALDVWGQGTTVTVSSASTKGPSVFPLAPCSRSTSESTAALGCLVKDYFPEPVTVSWNSGALTSGVHTFPAVLQSSGLYSLSSVVTVPSSSLGTKTYTCNVDHKPSNTKVDKRVESKYGPPCPPCPAPEAAGGPSVFLFPPKPKDTLMISRTPEVTCVVVDVSQEDPEVQFNWYVDGVEVHNAKTKPREEQFNSTYRVVSVLTVLHQDWLNGKEYKCKVSNKGLPSSIEKTISKAKGQPREPQVYTLPPSQEEMTKNQVSLTCLVKGFYPSDIAVEWESNGQPENNYKTTPPVLDSDGSFFLYSRLTVDKSRWQEGNVFSCSVMHEALHNHYTQKSLSLSLGK

SEQ ID NO: 6048 - protein, 451 aa, Artificial Sequence
  source: /note="Description of Artificial Sequence: Synthetic polypeptide"
EVQLVESGGGLVQPGGSLRLSCAASGFTFSSYAMSWVRQAPGKGLEWVSTINQAGGGTYYADSVKGRFTISRDNSKNTLYLQMNSLRAEDTAVYYCAKEGGKYYYYALDVWGQGTTVTVSSASTKGPSVFPLAPSSKSTSGGTAALGCLVKDYFPEPVTVSWNSGALTSGVHTFPAVLQSSGLYSLSSVVTVPSSSLGTQTYICNVNHKPSNTKVDKKVEPKSCDKTHTCPPCPAPEAAGASSVFLFPPKPKDTLMISRTPEVTCVVVDVSAEDPEVKFNWYVDGVEVHNAKTKPREEQYNSTYRVVSVLTVLHQDWLNGKEYKCKVSNKALPSSIEKTISKAKGQPREPQVYTLPPSREEMTKNQVSLTCLVKGFYPSDIAVEWESNGQPENNYKTTPPVLDSDGSFFLYSKLTVDKSRWQQGNVFSCSVMHEALHNHYTQKSLSLSPGK

SEQ ID NO: 6049 - protein, 448 aa, Artificial Sequence
  source: /note="Description of Artificial Sequence: Synthetic polypeptide"
EVQLVESGGGLVQPGGSLRLSCAASGFTFSSYAMSWVRQAPGKGLEWVSTINQAGGGTYYADSVKGRFTISRDNSKNTLYLQMNSLRAEDTAVYYCAKEGGKYYYYALDVWGQGTTVTVSSASTKGPSVFPLAPCSRSTSESTAALGCLVKDYFPEPVTVSWNSGALTSGVHTFPAVLQSSGLYSLSSVVTVPSSSLGTKTYTCNVDHKPSNTKVDKRVESKYGPPCPPCPAPEAAGGPSVFLFPPKPKDTLMISRTPEVTCVVVDVSQEDPEVQFNWYVDGVEVHNAKTKPREEQFNSTYRVVSVLTVLHQDWLNGKEYKCKVSNKGLPSSIEKTISKAKGQPREPQVYTLPPSQEEMTKNQVSLTCLVKGFYPSDIAVEWESNGQPENNYKTTPPVLDSDGSFFLYSRLTVDKSRWQEGNVFSCSVMHEALHNHYTQKSLSLSLGK

SEQ ID NO: 6050 - protein, 448 aa, Artificial Sequence
  source: /note="Description of Artificial Sequence: Synthetic polypeptide"
QLQLQESGPGLLKPSETLSLTCTVSGGSISSPGYYGGWIRQPPGKGLEWIGSIYKSGSTYHNPSLKSRVTISVDTSKNQFSLKLSSVTAADTAVYYCTRPVVRYFGWFDPWGQGTLVTVSSASTKGPSVFPLAPCSRSTSESTAALGCLVKDYFPEPVTVSWNSGALTSGVHTFPAVLQSSGLYSLSSVVTVPSSSLGTKTYTCNVDHKPSNTKVDKRVESKYGPPCPPCPAPEFEGGPSVFLFPPKPKDTLMISRTPEVTCVVVDVSQEDPEVQFNWYVDGVEVHNAKTKPREEQFNSTYRVVSVLTVLHQDWLNGKEYKCKVSNKGLPSSIEKTISKAKGQPREPQVYTLPPSQEEMTKNQVSLTCLVKGFYPSDIAVEWESNGQPENNYKTTPPVLDSDGSFFLYSRLTVDKSRWQEGNVFSCSVMHEALHNHYTQKSLSLSLGK

SEQ ID NO: 6051 - protein, 449 aa, Artificial Sequence
  source: /note="Description of Artificial Sequence: Synthetic polypeptide"
EVQLVESGGGLVKPGGSLRLSCAASGFTFSDYGMHWVRQAPGKGLEWVAYISSGNRIIYYADTVKGRFTISRDNAKNSLYLQMNSLRAEDTAVYYCARQDGYRYAMDYWGQGTLVTVSSASTKGPSVFPLAPSSKSTSGGTAALGCLVKDYFPEPVTVSWNSGALTSGVHTFPAVLQSSGLYSLSSVVTVPSSSLGTQTYICNVNHKPSNTKVDKKVEPKSCDKTHTCPPCPAPEAAGGPSVFLFPPKPKDTLMISRTPEVTCVVVDVSHEDPEVKFNWYVDGVEVHNAKTKPREEQYNSTYRVVSVLTVLHQDWLNGKEYKCKVSNKALPAPIEKTISKAKGQPREPQVYTLPPSREEMTKNQVSLTCLVKGFYPSDIAVEWESNGQPENNYKTTPPVLDSDGSFFLYSKLTVDKSRWQQGNVFSCSVMHEALHNHYTQKSLSLSPGK

SEQ ID NO: 6052 - protein, 450 aa, Artificial Sequence
  source: /note="Description of Artificial Sequence: Synthetic polypeptide"
QVQLVESGGGVVQPGRSLRLSCAASGFTFSSYGMHWVRQAPGKGLEWVAVISYEESNRYHADSVKGRFTISRDNSKITLYLQMNSLRTEDTAVYYCARDGGIAAPGPDYWGQGTLVTVSSASTKGPSVFPLAPSSKSTSGGTAALGCLVKDYFPEPVTVSWNSGALTSGVHTFPAVLQSSGLYSLSSVVTVPSSSLGTQTYICNVNHKPSNTKVDKKVEPKSCDKTHTCPPCPAPELLGGPSVFLFPPKPKDTLMISRTPEVTCVVVDVSHEDPEVKFNWYVDGVEVHNAKTKPREEQYASTYRVVSVLTVLHQDWLNGKEYKCKVSNKALPAPIEKTISKAKGQPREPQVYTLPPSREEMTKNQVSLTCLVKGFYPSDIAVEWESNGQPENNYKTTPPVLDSDGSFFLYSKLTVDKSRWQQGNVFSCSVMHEALHNHYTQKSLSLSPGK

SEQ ID NO: 6053 - protein, 348 aa, Artificial Sequence
  source: /note="Description of Artificial Sequence: Synthetic polypeptide"
EVQLLESGGGLVQPGGSLRLSCAASGFTFRDYEMWWVRQAPGKGLERVSAINPQGTRTYYADSVKGRFTISRDNSKNTLYLQMNSLRAEDTAVYYCAKLPFRFSDRGQGTLVTVSSASTESKYGPPCPPCPAPEFLGGPSVFLFPPKPKDTLMISRTPEVTCVVVDVSQEDPEVQFNWYVDGVEVHNAKTKPREEQFNSTYRVVSVLTVLHQDWLNGKEYKCKVSNKGLPSSIEKTISKAKGQPREPQVYTLPPSQEEMTKNQVSLTCLVKGFYPSDIAVEWESNGQPENNYKTTPPVLDSDGSFFLYSRLTVDKSRWQEGNVFSCSVMHEALHNHYTQKSLSLSLGK

SEQ ID NO: 6054 - protein, 449 aa, Artificial Sequence
  source: /note="Description of Artificial Sequence: Synthetic polypeptide"
EVQLLESGGGLVQPGGSLRLSCAASGFTFSDYAMNWVRQAPGKGLEWVSGIKSGGSSKYYADSVKGRFTISRDNSKNTLYLQMNSLRAEDTAVYYCAKHVDFYRALDYWGQGTLVTVSSASTKGPSVFPLAPSSKSTSGGTAALGCLVKDYFPEPVTVSWNSGALTSGVHTFPAVLQSSGLYSLSSVVTVPSSSLGTQTYICNVNHKPSNTKVDKKVEPKSCDKTHTCPPCPAPELLGGPSVFLFPPKPKDTLMISRTPEVTCVVVDVSHEDPEVKFNWYVDGVEVHNAKTKPREEQYNSTYRVVSVLTVLHQDWLNGKEYKCKVSNKALPAPIEKTISKAKGQPREPQVYTLPPSREEMTKNQVSLTCLVKGFYPSDIAVEWESNGQPENNYKTTPPVLDSDGSFFLYSKLTVDKSRWQQGNVFSCSVMHEALHNHYTQKSLSLSPGK

SEQ ID NO: 6055 - protein, 452 aa, Artificial Sequence
  source: /note="Description of Artificial Sequence: Synthetic polypeptide"
QVQLVQSGAEVKKPGSSVKVSCKASGGTFSSYAISWVRQAPGQGLEWMGGIIPIFGTANYAQKFQGRVTITADESTSTAYMELSSLRSEDTAVYYCARVRYSAWYRDSLDYWGQGTLVTVSSASTKGPSVFPLAPSSKSTSGGTAALGCLVKDYFPEPVTVSWNSGALTSGVHTFPAVLQSSGLYSLSSVVTVPSSSLGTQTYICNVNHKPSNTKVDKKVEPKSCDKTHTCPPCPAPELLGGPSVFLFPPKPKDTLMISRTPEVTCVVVDVSHEDPEVKFNWYVDGVEVHNAKTKPREEQYNSTYRVVSVLTVLHQDWLNGKEYKCKVSNKALPAPIEKTISKAKGQPREPQVYTLPPSREEMTKNQVSLTCLVKGFYPSDIAVEWESNGQPENNYKTTPPVLDSDGSFFLYSKLTVDKSRWQQGNVFSCSVMHEALHNHYTQKSLSLSPGK

SEQ ID NO: 6056 - protein, 452 aa, Artificial Sequence
  source: /note="Description of Artificial Sequence: Synthetic polypeptide"
QVQLVQSGAEVKKPGSSVKVSCKASGGTFSSYAISWVRQAPGQGLEWMGGIIPIFGTANYAQKFQGRVTITADESTSTAYMELSSLRSEDTAVYYCARVGHPAWWRDSLDYWGQGTLVTVSSASTKGPSVFPLAPSSKSTSGGTAALGCLVKDYFPEPVTVSWNSGALTSGVHTFPAVLQSSGLYSLSSVVTVPSSSLGTQTYICNVNHKPSNTKVDKKVEPKSCDKTHTCPPCPAPELLGGPSVFLFPPKPKDTLMISRTPEVTCVVVDVSHEDPEVKFNWYVDGVEVHNAKTKPREEQYNSTYRVVSVLTVLHQDWLNGKEYKCKVSNKALPAPIEKTISKAKGQPREPQVYTLPPSREEMTKNQVSLTCLVKGFYPSDIAVEWESNGQPENNYKTTPPVLDSDGSFFLYSKLTVDKSRWQQGNVFSCSVMHEALHNHYTQKSLSLSPGK

SEQ ID NO: 6057 - protein, 452 aa, Artificial Sequence
  source: /note="Description of Artificial Sequence: Synthetic polypeptide"
QVQLVQSGAEVKKPGSSVKVSCKASGGTFSSYAISWVRQAPGQGLEWMGGIIPIFGTANYAQKFQGRVTITADESTSTAYMELSSLRSEDTAVYYCARVANAAYFRSGLDYWGQGTLVTVSSASTKGPSVFPLAPSSKSTSGGTAALGCLVKDYFPEPVTVSWNSGALTSGVHTFPAVLQSSGLYSLSSVVTVPSSSLGTQTYICNVNHKPSNTKVDKKVEPKSCDKTHTCPPCPAPELLGGPSVFLFPPKPKDTLMISRTPEVTCVVVDVSHEDPEVKFNWYVDGVEVHNAKTKPREEQYNSTYRVVSVLTVLHQDWLNGKEYKCKVSNKALPAPIEKTISKAKGQPREPQVYTLPPSREEMTKNQVSLTCLVKGFYPSDIAVEWESNGQPENNYKTTPPVLDSDGSFFLYSKLTVDKSRWQQGNVFSCSVMHEALHNHYTQKSLSLSPGK

SEQ ID NO: 6058 - protein, 454 aa, Artificial Sequence
  source: /note="Description of Artificial Sequence: Synthetic polypeptide"
QVQLVQSGAEVKKPGSSVKVSCKASGGTFSSYWISWVRQAPGQGLEWMGYIIPISGTARYAQKFQGRVTITADESTSTAYMELSSLRSEDTAVYYCAREPGYSSGLSVDYFDYWGQGTLVTVSSASTKGPSVFPLAPSSKSTSGGTAALGCLVKDYFPEPVTVSWNSGALTSGVHTFPAVLQSSGLYSLSSVVTVPSSSLGTQTYICNVNHKPSNTKVDKKVEPKSCDKTHTCPPCPAPELLGGPSVFLFPPKPKDTLMISRTPEVTCVVVDVSHEDPEVKFNWYVDGVEVHNAKTKPREEQYNSTYRVVSVLTVLHQDWLNGKEYKCKVSNKALPAPIEKTISKAKGQPREPQVYTLPPSREEMTKNQVSLTCLVKGFYPSDIAVEWESNGQPENNYKTTPPVLDSDGSFFLYSKLTVDKSRWQQGNVFSCSVMHEALHNHYTQKSLSLSPGK

SEQ ID NO: 6059 - protein, 449 aa, Artificial Sequence
  source: /note="Description of Artificial Sequence: Synthetic polypeptide"
EVQLLESGGGLVQPGGSLRLSCAASGFTFSSYAMSWVRQAPGKGLEWVSAISGSGGSTYYADSVKGRFTISRDNSKNTLYLQMNSLRAEDTAVYYCARGPAYTIVFDYWGQGTLVTVSSASTKGPSVFPLAPSSKSTSGGTAALGCLVKDYFPEPVTVSWNSGALTSGVHTFPAVLQSSGLYSLSSVVTVPSSSLGTQTYICNVNHKPSNTKVDKKVEPKSCDKTHTCPPCPAPELLGGPSVFLFPPKPKDTLMISRTPEVTCVVVDVSHEDPEVKFNWYVDGVEVHNAKTKPREEQYNSTYRVVSVLTVLHQDWLNGKEYKCKVSNKALPAPIEKTISKAKGQPREPQVYTLPPSREEMTKNQVSLTCLVKGFYPSDIAVEWESNGQPENNYKTTPPVLDSDGSFFLYSKLTVDKSRWQQGNVFSCSVMHEALHNHYTQKSLSLSPGK

SEQ ID NO: 6060 - protein, 449 aa, Artificial Sequence
  source: /note="Description of Artificial Sequence: Synthetic polypeptide"
EVQLLESGGGLVQPGGSLRLSCAASGFTFSSYAMSWVRQAPGKGLEWVSAISGSGGSTYYADSVKGRFTISRDNSKNTLYLQMNSLRAEDTAVYYCARGPVYSLVFDYWGQGTLVTVSSASTKGPSVFPLAPSSKSTSGGTAALGCLVKDYFPEPVTVSWNSGALTSGVHTFPAVLQSSGLYSLSSVVTVPSSSLGTQTYICNVNHKPSNTKVDKKVEPKSCDKTHTCPPCPAPELLGGPSVFLFPPKPKDTLMISRTPEVTCVVVDVSHEDPEVKFNWYVDGVEVHNAKTKPREEQYNSTYRVVSVLTVLHQDWLNGKEYKCKVSNKALPAPIEKTISKAKGQPREPQVYTLPPSREEMTKNQVSLTCLVKGFYPSDIAVEWESNGQPENNYKTTPPVLDSDGSFFLYSKLTVDKSRWQQGNVFSCSVMHEALHNHYTQKSLSLSPGK

SEQ ID NO: 6061 - protein, 454 aa, Artificial Sequence
  source: /note="Description of Artificial Sequence: Synthetic polypeptide"
QVQLVQSGAEVKKPGSSVKVSCKASGGTFSSYAISWVRQAPGQGLEWMGGIIPIFGTANYAQKFQGRVTITADESTSTAYMELSSLRSEDTAVYYCARDGYRRYGIGRYGFDYWGQGTLVTVSSASTKGPSVFPLAPSSKSTSGGTAALGCLVKDYFPEPVTVSWNSGALTSGVHTFPAVLQSSGLYSLSSVVTVPSSSLGTQTYICNVNHKPSNTKVDKKVEPKSCDKTHTCPPCPAPELLGGPSVFLFPPKPKDTLMISRTPEVTCVVVDVSHEDPEVKFNWYVDGVEVHNAKTKPREEQYNSTYRVVSVLTVLHQDWLNGKEYKCKVSNKALPAPIEKTISKAKGQPREPQVYTLPPSREEMTKNQVSLTCLVKGFYPSDIAVEWESNGQPENNYKTTPPVLDSDGSFFLYSKLTVDKSRWQQGNVFSCSVMHEALHNHYTQKSLSLSPGK

SEQ ID NO: 6062 - protein, 449 aa, Artificial Sequence
  source: /note="Description of Artificial Sequence: Synthetic polypeptide"
EVQLLESGGGLVQPGGSLRLSCAASGFTFSSYAMSWVRQAPGKGLEWVSAISGSGGSTYYADSVKGRFTISRDNSKNTLYLQMNSLRAEDTAVYYCARGPVYSSVFDYWGQGTLVTVSSASTKGPSVFPLAPSSKSTSGGTAALGCLVKDYFPEPVTVSWNSGALTSGVHTFPAVLQSSGLYSLSSVVTVPSSSLGTQTYICNVNHKPSNTKVDKKVEPKSCDKTHTCPPCPAPELLGGPSVFLFPPKPKDTLMISRTPEVTCVVVDVSHEDPEVKFNWYVDGVEVHNAKTKPREEQYNSTYRVVSVLTVLHQDWLNGKEYKCKVSNKALPAPIEKTISKAKGQPREPQVYTLPPSREEMTKNQVSLTCLVKGFYPSDIAVEWESNGQPENNYKTTPPVLDSDGSFFLYSKLTVDKSRWQQGNVFSCSVMHEALHNHYTQKSLSLSPGK

SEQ ID NO: 6063 - protein, 451 aa, Artificial Sequence
  source: /note="Description of Artificial Sequence: Synthetic polypeptide"
EVQLVESGGGLVQPGGSLRLSCAASGFTFSSYAMSWVRQAPGKGLEWVSIINNNVGRTYYADSVKGRFTISRDNSKNTLYLQMNSLRAEDTAVYYCAKEGGDYYYYGMDVWGQGTTVTVSSASTKGPSVFPLAPSSKSTSGGTAALGCLVKDYFPEPVTVSWNSGALTSGVHTFPAVLQSSGLYSLSSVVTVPSSSLGTQTYICNVNHKPSNTKVDKKVEPKSCDKTHTCPPCPAPELLGGPSVFLFPPKPKDTLMISRTPEVTCVVVDVSHEDPEVKFNWYVDGVEVHNAKTKPREEQYNSTYRVVSVLTVLHQDWLNGKEYKCKVSNKALPAPIEKTISKAKGQPREPQVYTLPPSREEMTKNQVSLTCLVKGFYPSDIAVEWESNGQPENNYKTTPPVLDSDGSFFLYSKLTVDKSRWQQGNVFSCSVMHEALHNHYTQKSLSLSPGK

SEQ ID NO: 6064 - protein, 451 aa, Artificial Sequence
  source: /note="Description of Artificial Sequence: Synthetic polypeptide"
EVQLVESGGGLVQPGGSLRLSCAASGFTFGSYAMSWVRQAPGKGLEWVSVISDSGGRTYYADSVKGRFTISRDYSKNTLYLQMNSLRAEDTAVYYCAKEGGDYYYYGMDVWGQGTTVTVSSASTKGPSVFPLAPSSKSTSGGTAALGCLVKDYFPEPVTVSWNSGALTSGVHTFPAVLQSSGLYSLSSVVTVPSSSLGTQTYICNVNHKPSNTKVDKKVEPKSCDKTHTCPPCPAPELLGGPSVFLFPPKPKDTLMISRTPEVTCVVVDVSHEDPEVKFNWYVDGVEVHNAKTKPREEQYNSTYRVVSVLTVLHQDWLNGKEYKCKVSNKALPAPIEKTISKAKGQPREPQVYTLPPSREEMTKNQVSLTCLVKGFYPSDIAVEWESNGQPENNYKTTPPVLDSDGSFFLYSKLTVDKSRWQQGNVFSCSVMHEALHNHYTQKSLSLSPGK

SEQ ID NO: 6065 - protein, 446 aa, Artificial Sequence
  source: /note="Description of Artificial Sequence: Synthetic polypeptide"
QLQLQESGPGLVKPSEILSLTCTVSGGSISSSSYYWGWIRQPPGKGLEWIGNIYYRGDTYYSPSLKSRVTISVDTSKNQFSLKLNSVTAADTAVYYCAKGFRFDYWGQGTLVTVSSASTKGPSVFPLAPSSKSTSGGTAALGCLVKDYFPEPVTVSWNSGALTSGVHTFPAVLQSSGLYSLSSVVTVPSSSLGTQTYICNVNHKPSNTKVDKKVEPKSCDKTHTCPPCPAPELLGGPSVFLFPPKPKDTLMISRTPEVTCVVVDVSHEDPEVKFNWYVDGVEVHNAKTKPREEQYNSTYRVVSVLTVLHQDWLNGKEYKCKVSNKALPAPIEKTISKAKGQPREPQVYTLPPSREEMTKNQVSLTCLVKGFYPSDIAVEWESNGQPENNYKTTPPVLDSDGSFFLYSKLTVDKSRWQQGNVFSCSVMHEALHNHYTQKSLSLSPGK

SEQ ID NO: 6066 - protein, 446 aa, Artificial Sequence
  source: /note="Description of Artificial Sequence: Synthetic polypeptide"
QLQLQESGPGLVKPSETLSLTCTVSGGSISSSSYYWGWIRQPPGKGLEWIGNIYYRGDTYYSPSLKSRVTISVDTSKNQFSLKLSSVTAADTAVYYCARGFRFDYWGQGTLVTVSSASTKGPSVFPLAPSSKSTSGGTAALGCLVKDYFPEPVTVSWNSGALTSGVHTFPAVLQSSGLYSLSSVVTVPSSSLGTQTYICNVNHKPSNTKVDKKVEPKSCDKTHTCPPCPAPELLGGPSVFLFPPKPKDTLMISRTPEVTCVVVDVSHEDPEVKFNWYVDGVEVHNAKTKPREEQYNSTYRVVSVLTVLHQDWLNGKEYKCKVSNKALPAPIEKTISKAKGQPREPQVYTLPPSREEMTKNQVSLTCLVKGFYPSDIAVEWESNGQPENNYKTTPPVLDSDGSFFLYSKLTVDKSRWQQGNVFSCSVMHEALHNHYTQKSLSLSPGK

SEQ ID NO: 6067 - protein, 446 aa, Artificial Sequence
  source: /note="Description of Artificial Sequence: Synthetic polypeptide"
QLQLQESGPGLVKPSETLSLTCTVSGGSISSSSYYWGWIRQPPGKGLEWIGNIYYRGDTYYSPSLKSRVTISVDTSKNQFSLKLSSVTAADTAVYYCAKGFRFDYWGQGTLVTVSSASTKGPSVFPLAPSSKSTSGGTAALGCLVKDYFPEPVTVSWNSGALTSGVHTFPAVLQSSGLYSLSSVVTVPSSSLGTQTYICNVNHKPSNTKVDKKVEPKSCDKTHTCPPCPAPELLGGPSVFLFPPKPKDTLMISRTPEVTCVVVDVSHEDPEVKFNWYVDGVEVHNAKTKPREEQYNSTYRVVSVLTVLHQDWLNGKEYKCKVSNKALPAPIEKTISKAKGQPREPQVYTLPPSREEMTKNQVSLTCLVKGFYPSDIAVEWESNGQPENNYKTTPPVLDSDGSFFLYSKLTVDKSRWQQGNVFSCSVMHEALHNHYTQKSLSLSPGK

SEQ ID NO: 6068 - protein, 446 aa, Artificial Sequence
  source: /note="Description of Artificial Sequence: Synthetic polypeptide"
QLQLQESGPGLVKPSETLSLTCTVSGGSISSSSYYWGWIRQPPGKGLEWIGNIYYRGDTYYSPSLKSRVTISVDTSKNQFSLKLSSVTAADTAVYYCAKGFRFDYWGQGTLVTVSSASTKGPSVFPLAPSSKSTSGGTAALGCLVKDYFPEPVTVSWNSGALTSGVHTFPAVLQSSGLYSLSSVVTVPSSSLGTQTYICNVNHKPSNTKVDKKVEPKSCDKTHTCPPCPAPELLGGPSVFLFPPKPKDTLMISRTPEVTCVVVDVEHEDPEVKFNWYVDGVEVHNAKTKPREEQYNSTYRVVSVLTVLHQDWLNGKEYKCKVSNKALPAPIEKTISKAKGQPREPQVYTLPPSREEMTKNQVSLTCLVKGFYPSDIAVEWESNGQPENNYKTTPPVLDSDGSFFLYSKLTVDKSRWQQGNVFSCSVMHEALHNHYTQKSLSLSPGK

SEQ ID NO: 6069 - protein, 470 aa, Mus musculus
MAVLVLFLCLVAFPSCVLSQVQLKESGPGLVAPSQSLSITCTVSGFSLLSYGVHWVRQPPGKGLEWLGVIWTGGTTNYNSALMSRLSISKDDSKSQVFLKMNSLQTDDTAIYYCARYYYGMDYWGQGTSVTVSSAKTTPPSVYPLAPGCGDTTGSSVTLGCLVKGYFPESVTVTWNSGSLSSSVHTFPALLQSGLYTMSSSVTVPSSTWPSQTVTCSVAHPASSTTVDKKLEPSGPISTINPCPPCKECHKCPAPNLEGGPSVFIFPPNIKDVLMISLTPKVTCVVVDVSEDDPDVRISWFVNNVEVHTAQTQTHREDYNSTIRVVSALPIQHQDWMSGKEFKCKVNNKDLPSPIERTISKIKGLVRAPQVYILPPPAEQLSRKDVSLTCLVVGFNPGDISVEWTSNGHTEENYKDTAPVLDSDGSYFIYSKLDIKTSKWEKTDSFSCNVRHEGLKNYYLKKTISRSPGK

SEQ ID NO: 6070 - protein, 446 aa, Artificial Sequence
  source: /note="Description of Artificial Sequence: Synthetic polypeptide"
QVQLVQSGAEVKKPGSSVKVSCKASGGTFSSYAISWVRQAPGQGLEWMGGIIPIFGTANYAQKFQGRVTITADKSTSTAYMELSSLRSEDTAVYYCARGYYAIDYWGQGTTVTVSSASTKGPSVFPLAPSSKSTSGGTAALGCLVKDYFPEPVTVSWNSGALTSGVHTFPAVLQSSGLYSLSSVVTVPSSSLGTQTYICNVNHKPSNTKVDKKVEPKSCDKTHTCPPCPAPEAAGGPSVFLFPPKPKDTLMISRTPEVTCVVVDVSHEDPEVKFNWYVDGVEVHNAKTKPREEQYNSTYRVVSVLTVLHQDWLNGKEYKCKVSNKALGAPIEKTISKAKGQPREPQVYTLPPSRDELTKNQVSLTCLVKGFYPSDIAVEWESNGQPENNYKTTPPVLDSDGSFFLYSKLTVDKSRWQQGNVFSCSVMHEALHNHYTQKSLSLSPGK

SEQ ID NO: 6071 - protein, 449 aa, Artificial Sequence
  source: /note="Description of Artificial Sequence: Synthetic polypeptide"
QVTLRESGPALVKPTQTLTLTCTFSGFSLSTSGMGVGWIRQPPGKALEWLAHIWWDDDKYYQPSLKSRLTISKDTSKNQVVLTMTNMDPVDTATYYCARTRRYFPFAYWGQGTLVTVSSASTKGPSVFPLAPSSKSTSGGTAALGCLVKDYFPEPVTVSWNSGALTSGVHTFPAVLQSSGLYSLSSVVTVPSSSLGTQTYICNVNHKPSNTKVDKKVEPKSCDKTHTCPPCPAPEAAGGPSVFLFPPKPKDTLMISRTPEVTCVVVDVSHEDPEVKFNWYVDGVEVHNAKTKPREEQYNSTYRVVSVLTVLHQDWLNGKEYKCKVSNKALGAPIEKTISKAKGQPREPQVYTLPPSRDELTKNQVSLTCLVKGFYPSDIAVEWESNGQPENNYKTTPPVLDSDGSFFLYSKLTVDKSRWQQGNVFSCSVMHEALHNHYTQKSLSLSPGK

SEQ ID NO: 6072 - protein, 449 aa, Artificial Sequence
  source: /note="Description of Artificial Sequence: Synthetic polypeptide"
QVQLKQSGPGLVQPSQSLSITCTVSGFSLTNYGVHWVRQSPGKGLEWLGVIWSGGNTDYNTPFTSRLSINKDNSKSQVFFKMNSLQSNDTAIYYCARALTYYDYEFAYWGQGTLVTVSAASTKGPSVFPLAPSSKSTSGGTAALGCLVKDYFPEPVTVSWNSGALTSGVHTFPAVLQSSGLYSLSSVVTVPSSSLGTQTYICNVNHKPSNTKVDKRVEPKSCDKTHTCPPCPAPELLGGPSVFLFPPKPKDTLMISRTPEVTCVVVDVSHEDPEVKFNWYVDGVEVHNAKTKPREEQYNSTYRVVSVLTVLHQDWLNGKEYKCKVSNKALPAPIEKTISKAKGQPREPQVYTLPPSREEMTKNQVSLTCLVKGFYPSDIAVEWESNGQPENNYKTTPPVLDSDGSFFLYSKLTVDKSRWQQGNVFSCSVMHEALHNHYTQKSLSLSPGK

SEQ ID NO: 6073 - protein, 444 aa, Artificial Sequence
  source: /note="Description of Artificial Sequence: Synthetic polypeptide"
QVQLQESGPGLVKPSETLSLTCTVSGGSVSSGDYYWTWIRQSPGKGLEWIGHIYYSGNTNYNPSLKSRLTISIDTSKTQFSLKLSSVTAADTAIYYCVRDRVTGAFDIWGQGTMVTVSSASTKGPSVFPLAPCSRSTSESTAALGCLVKDYFPEPVTVSWNSGALTSGVHTFPAVLQSSGLYSLSSVVTVPSSNFGTQTYTCNVDHKPSNTKVDKTVERKCCVECPPCPAPPVAGPSVFLFPPKPKDTLMISRTPEVTCVVVDVSHEDPEVQFNWYVDGVEVHNAKTKPREEQFNSTFRVVSVLTVVHQDWLNGKEYKCKVSNKGLPAPIEKTISKTKGQPREPQVYTLPPSREEMTKNQVSLTCLVKGFYPSDIAVEWESNGQPENNYKTTPPMLDSDGSFFLYSKLTVDKSRWQQGNVFSCSVMHEALHNHYTQKSLSLSPG

SEQ ID NO: 6074 - protein, 453 aa, Artificial Sequence
  source: /note="Description of Artificial Sequence: Synthetic polypeptide"
QVQLQQSGAEVKKPGSSVKVSCKASGYTFTNYYIYWVRQAPGQGLEWIGGINPTSGGSNFNEKFKTRVTITADESSTTAYMELSSLRSEDTAFYFCTRQGLWFDSDGRGFDFWGQGTTVTVSSASTKGPSVFPLAPSSKSTSGGTAALGCLVKDYFPEPVTVSWNSGALTSGVHTFPAVLQSSGLYSLSSVVTVPSSSLGTQTYICNVNHKPSNTKVDKKVEPKSCDKTHTCPPCPAPELLGGPSVFLFPPKPKDTLMISRTPEVTCVVVDVSHEDPEVKFNWYVDGVEVHNAKTKPREEQYNSTYRVVSVLTVLHQDWLNGKEYKCKVSNKALPAPIEKTISKAKGQPREPQVYTLPPSRDELTKNQVSLTCLVKGFYPSDIAVEWESNGQPENNYKTTPPVLDSDGSFFLYSKLTVDKSRWQQGNVFSCSVMHEALHNHYTQKSLSLSPGK

SEQ ID NO: 6075 - protein, 452 aa, Artificial Sequence
  source: /note="Description of Artificial Sequence: Synthetic polypeptide"
EVQLVESGGGLVQPGGSLRLSCAASGFTFSSFGMHWVRQAPGKGLEWVAYISSDSSAIYYADTVKGRFTISRDNAKNSLYLQMNSLRDEDTAVYYCGRGRENIYYGSRLDYWGQGTTVTVSSASTKGPSVFPLAPSSKSTSGGTAALGCLVKDYFPEPVTVSWNSGALTSGVHTFPAVLQSSGLYSLSSVVTVPSSSLGTQTYICNVNHKPSNTKVDKRVEPKSCDKTHTCPPCPAPELVGGPSVFLLPPKPKDTLMISRTPEVTCVVVDVSHEDPEVKFNWYVDGVEVHNAKTKPPEEQYNSTLRVVSVLTVLHQDWLNGKEYKCKVSNKALPAPIEKTISKAKGQPREPQVYTLPPSREEMTKNQVSLTCLVKGFYPSDIAVEWESNGQPENNYKTTPLVLDSDGSFFLYSKLTVDKSRWQQGNVFSCSVMHEALHNHYTQKSLSLSPGK

SEQ ID NO: 6076 - protein, 446 aa, Artificial Sequence
  source: /note="Description of Artificial Sequence: Synthetic polypeptide"
QVQLQQPGAELVMPGASVKLSCKASGYTFTSYWMHWVKQRPGEGLEWIGEIDPSDSYTNDNQKFKGKATLTVDKSSSTAYMQLSSLTSEDSAVYYCARRLYSNSYYYAMDYWGQGTSVTVSSAKTTPPSVYPLAPGSAAQTNSMVTLGCLVKGYFPEPVTVTWNSGSLSSGVHTFPAVLQSDLYTLSSSVTVPSSTWPSQTVTCNVAHPASSTKVDKKIVPRDCGCKPCICTVPEVSSVFIFPPKPKDVLTITLTPKVTCVVVDISKDDPEVQFSWFVDDVEVHTAQTKPREEQINSTFRSVSELPIMHQDWLNGKEFKCRVNSAAFPAPIEKTISKTKGRPKAPQVYTIPPPKEQMAKDKVSLTCMITNFFPEDITVEWQWNGQPAENYKNTQPIMDTDGSYFVYSKLNVQKSNWEAGNTFTCSVLHEGLHNHHTEKSLSHSPGK

SEQ ID NO: 6077 - protein, 444 aa, Artificial Sequence
  source: /note="Description of Artificial Sequence: Synthetic polypeptide"
EVQLQQSGPELVKPGASVKMSCKASGYTFSDYYMHWVKQSHGKSLEWIGYIYPDNGGNGYNQKFKGKATLTVDKSSSTVYMELRSLTSEDSALYYCARGTYYDGSYFDYWGQGTTLTVSSAKTTPPSVYPLAPGSAAQTNSMVTLGCLVKGYFPEPVTVTWNSGSLSSGVHTFPAVLQSDLYTLSSSVTVPSSTWPSQTVTCNVAHPASSTKVDKKIVPRDCGCKPCICTVPEVSSVFIFPPKPKDVLTITLTPKVTCVVVDISKDDPEVQFSWFVDDVEVHTAQTKPREEQINSTFRSVSELPIMHQDWLNGKEFKCRVNSAAFPAPIEKTISKTKGRPKAPQVYTIPPPKEQMAKDKVSLTCMITNFFPEDITVEWQWNGQPAENYKNTQPIMDTDGSYFVYSKLNVQKSNWEAGNTFTCSVLHEGLHNHHTEKSLSHSPGK

SEQ ID NO: 6078 - protein, 452 aa, Artificial Sequence
  source: /note="Description of Artificial Sequence: Synthetic polypeptide"
QVQLQQPGAELVMPGASVKLSCKASGYTFTSYWMHWVKQRPGEGLEWIGEIDPSDSYTNDNQKFKGKATLTVDKSSSTAYMQLSSLTSEDSAVYYCARRLYSNSYYYAMDYWGQGTSVTVSSASTKGPSVFPLAPSSKSTSGGTAALGCLVKDYFPEPVTVSWNSGALTSGVHTFPAVLQSSGLYSLSSVVTVPSSSLGTQTYICNVNHKPSNTKVDKKVEPKSCDKTHTCPPCPAPELLGGPSVFLFPPKPKDTLMISRTPEVTCVVVDVSHEDPEVKFNWYVDGVEVHNAKTKPREEQYNSTYRVVSVLTVLHQDWLNGKEYKCKVSNKALPAPIEKTISKAKGQPREPQVYTLPPSRDELTKNQVSLTCLVKGFYPSDIAVEWESNGQPENNYKTTPPVLDSDGSFFLYSKLTVDKSRWQQGNVFSCSVMHEALHNHYTQKSLSLSPGK

SEQ ID NO: 6079 - protein, 450 aa, Artificial Sequence
  source: /note="Description of Artificial Sequence: Synthetic polypeptide"
EVQLQQSGPELVKPGASVKMSCKASGYTFSDYYMHWVKQSHGKSLEWIGYIYPDNGGNGYNQKFKGKATLTVDKSSSTVYMELRSLTSEDSALYYCARGTYYDGSYFDYWGQGTTLTVSSASTKGPSVFPLAPSSKSTSGGTAALGCLVKDYFPEPVTVSWNSGALTSGVHTFPAVLQSSGLYSLSSVVTVPSSSLGTQTYICNVNHKPSNTKVDKKVEPKSCDKTHTCPPCPAPELLGGPSVFLFPPKPKDTLMISRTPEVTCVVVDVSHEDPEVKFNWYVDGVEVHNAKTKPREEQYNSTYRVVSVLTVLHQDWLNGKEYKCKVSNKALPAPIEKTISKAKGQPREPQVYTLPPSRDELTKNQVSLTCLVKGFYPSDIAVEWESNGQPENNYKTTPPVLDSDGSFFLYSKLTVDKSRWQQGNVFSCSVMHEALHNHYTQKSLSLSPGK

SEQ ID NO: 6080 - protein, 467 aa, Mus musculus
MNFGLSLIFLVLILKGVQCEVMLVESGGGLVKPGGSLKLSCAASGFPFSSYVMSWVRQTPQKRLEWVATISSGGGSTSNPDTVKGRFTISRDNAKNNLYLQMDSLRSEDTALYYCASLYYYGRGAYWGQGTLVTVSAATTTAPSVYPLVPGCSDTSGSSVTLGCLVKGYFPEPVTVKWNYGALSSGVRTVSSVLQSGFYSLSSLVTVPSSTWPSQTVICNVAHPASKTELIKRIEPRIPKPSTPPGSSCPPGNILGGPSVFIFPPKPKDALMISLTPKVTCVVVDVSEDDPDVHVSWFVDNKEVHTAWTQPREAQYNSTFRVVSALPIQHQDWMRGKEFKCKVNNKALPAPIERTISKPKGRAQTPQVYTIPPPREQMSKKKVSLTCLVTNFFSEAISVEWERNGELEQDYKNTPPILDSDGTYFLYSKLTVDTDSWLQGEIFTCSVVHEALHNHHTQKNLSRSPGK

SEQ ID NO: 6081 - protein, 233 aa, Artificial Sequence
  source: /note="Description of Artificial Sequence: Synthetic polypeptide"
MGWSCIILFLVATATGVHSDIQMTQSPSSLSASVGDRVTITCKASQDVSIGVAWYQQKPGKAPKLLIYSASYRYTGVPSRFSGSGSGTDFTLTISSLQPEDFATYYCQQYYIYPYTFGQGTKVEIKRTVAAPSVFIFPPSDEQLKSGTASVVCLLNNFYPREAKVQWKVDNALQSGNSQESVTEQDSKDSTYSLSSTLTLSKADYEKHKVYACEVTHQGLSSPVTKSFNRGEC

SEQ ID NO: 6082 - protein, 213 aa, Artificial Sequence
  source: /note="Description of Artificial Sequence: Synthetic polypeptide"
SELTQDPAVSVALGQTVRITCSGDSLRSYYASWYQQKPGQAPVLVIYGANNRPSGIPDRFSGSSSGNTASLTITGAQAEDEADYYCNSADSSGNHVVFGGGTKLTVLGQPKAAPSVTLFPPSSEELQANKATLVCLISDFYPGAVTVAWKADSSPVKAGVETTTPSKQSNNKYAASSYLSLTPEQWKSHKSYSCQVTHEGSTVEKTVAPTECS

SEQ ID NO: 6083 - protein, 213 aa, Artificial Sequence
  source: /note="Description of Artificial Sequence: Synthetic polypeptide"
SELTQDPAVSVALGQTVRITCQGDSLRSYYASWYQQKPGQAPVLVIYGKNNRPSGIPDRFSGSSSGNTASLTITGAQAEDEADYYCNSRDSSGNHVVFGGGTKLTVLGQPKAAPSVTLFPPSSEELQANKATLVCLISDFYPGAVTVAWKADSSPVKAGVETTTPSKQSNNKYAASSYLSLTPEQWKSHKSYSCQVTHEGSTVEKTVAPTECS

SEQ ID NO: 6084 - protein, 213 aa, Artificial Sequence
  source: /note="Description of Artificial Sequence: Synthetic polypeptide"
DIQMTQSPSSLSASVGDRVTITCRASSSVSYMHWYQQKPGKAPKPLIYAPSNLASGVPSRFSGSGSGTDFTLTISSLQPEDFATYYCQQWSFNPPTFGQGTKVEIKRTVAAPSVFIFPPSDEQLKSGTASVVCLLNNFYPREAKVQWKVDNALQSGNSQESVTEQDSKDSTYSLSSTLTLSKADYEKHKVYACEVTHQGLSSPVTKSFNRGEC

SEQ ID NO: 6085 - protein, 213 aa, Artificial Sequence
  source: /note="Description of Artificial Sequence: Synthetic polypeptide"
DIQMTQSPSSLSASVGDRVTITCRASSSVSYLHWYQQKPGKAPKPLIYAPSNLASGVPSRFSGSGSGTDFTLTISSLQPEDFATYYCQQWAFNPPTFGQGTKVEIKRTVAAPSVFIFPPSDEQLKSGTASVVCLLNNFYPREAKVQWKVDNALQSGNSQESVTEQDSKDSTYSLSSTLTLSKADYEKHKVYACEVTHQGLSSPVTKSFNRGEC

SEQ ID NO: 6086 - protein, 214 aa, Artificial Sequence
  source: /note="Description of Artificial Sequence: Synthetic polypeptide"
QPVLTQPLSVSVALGQTARITCGGNNIGSKNVHWYQQKPGQAPVLVIYRDSNRPSGIPERFSGSNSGNTATLTISRAQAGDEADYYCQVWDSSTAVFGTGTKLTVLQRTVAAPSVFIFPPSDEQLKSGTASVVCLLNNFYPREAKVQWKVDNALQSGNSQESVTEQDSKDSTYSLSSTLTLSKADYEKHKVYACEVTHQGLSSPVTKSFNRGEC

SEQ ID NO: 6087 - protein, 221 aa, Artificial Sequence
  source: /note="Description of Artificial Sequence: Synthetic polypeptide"
DIVMTQSPDSLAVSLGERATINCKSSQSLWDSGNQKNFLTWYQQKPGQPPKLLIYWTSYRESGVPDRFSGSGSGTDFTLTISSLQAEDVAVYYCQNDYFYPHTFGGGTKVEIKRGTVAAPSVFIFPPSDEQLKSGTASVVCLLNNFYPREAKVQWKVDNALQSGNSQESVTEQDSKDSTYSLSSTLTLSKADYEKHKVYACEVTHQGLSSPVTKSFNRGEC

SEQ ID NO: 6088 - protein, 117 aa, Artificial Sequence
  source: /note="Description of Artificial Sequence: Synthetic polypeptide"
QVQLVQSGAEVKKPGASVKVSCKASGYTFTSYWINWVRQAPGQGLEWMGNIYPGSSLTNYNEKFKNRVTMTRDTSTSTVYMELSSLRSEDTAVYYCARLSTGTFAYWGQGTLVTVSS

SEQ ID NO: 6089 - protein, 113 aa, Artificial Sequence
  source: /note="Description of Artificial Sequence: Synthetic polypeptide"
DIVMTQSPDSLAVSLGERATINCKSSQSLWDSGNQKNFLTWYQQKPGQPPKLLIYWTSYRESGVPDRFSGSGSGTDFTLTISSLQAEDVAVYYCQNDYFYPHTFGGGTKVEIK

SEQ ID NO: 6090 - protein, 208 aa, Artificial Sequence
  source: /note="Description of Artificial Sequence: Synthetic polypeptide"
EIVLTQSPATLSLSPGERATLSCRASQSVSSYLAWYQQPGQAPRLLIYDASNRATGIPARFSGSGSGTDFTLTISSLEPEDFAVYYCQQSSNWPRTFGQGTKVEIRTVAAPSVFIFPPSDEQLSGTASVVCLLNNFYPREAVQWKVDNALQSGNSQESVTEQDSDSTYSLSSTLTLSKADYEKHKVYACEVTHQGLSSPVTSFNRGEC

SEQ ID NO: 6091 - protein, 218 aa, Artificial Sequence
  source: /note="Description of Artificial Sequence: Synthetic polypeptide"
EIVLTQSPATLSLSPGERATLSCRASESVDNYGMSFMNWFQQKPGQPPKLLIHAASNQGSGVPSRFSGSGSGTDFTLTISSLEPEDFAVYFCQQSKEVPYTFGGGTKVEIKRTVAAPSVFIFPPSDEQLKSGTASVVCLLNNFYPREAKVQWKVDNALQSGNSQESVTEQDSKDSTYSLSSTLTLSKADYEKHKVYACEVTHQGLSSPVTKSFNRGEC

SEQ ID NO: 6092 - protein, 236 aa, Artificial Sequence
  source: /note="Description of Artificial Sequence: Synthetic polypeptide"
MGWSCIILFLVATATGVHSRDIQMTQSPSSLSASVGDRVTITCGASENIYHALNWYQQKPGKAPKLLIYGATNLADGVPSRFSGSGSGTDFTLTISSLQPEDFATYYCQNVLNTPLTFGQGTKVEIKRTRTVAAPSVFIFPPSDEQLKSGTASVVCLLNNFYPREAKVQWKVDNALQSGNSQESVTEQDSKDSTYSLSSTLTLSKADYEKHKVYACEVTHQGLSSPVTKSFNRGEC

SEQ ID NO: 6093 - protein, 236 aa, Artificial Sequence
  source: /note="Description of Artificial Sequence: Synthetic polypeptide"
MGWSCIILFLVATATGVHSRDIQMTQSPSSLSASVGDRVTITCGASENIYGALNWYQQKPGKAPKLLIYGATNLADGVPSRFSGSGSGTDFTLTISSLQPEDFATYYCQNVLNTPLTFGQGTKVEIKRTRTVAAPSVFIFPPSDEQLKSGTASVVCLLNNFYPREAKVQWKVDNALQSGNSQESVTEQDSKDSTYSLSSTLTLSKADYEKHKVYACEVTHQGLSSPVTKSFNRGEC

SEQ ID NO: 6094 - protein, 219 aa, Artificial Sequence
  source: /note="Description of Artificial Sequence: Synthetic polypeptide"
NIMMTQSPSSLAVSAGEKVTMSCKSSQSVLYSSNQKNYLAWYQQKPGQSPKLLIYWASTRESGVPDRFTGSGSGTDFTLTISSVQAEDLAVYYCAQHLSHRTFGGGTKLEIKRTVAAPSVFIFPPSDEQLKSGTASVVCLLNNFYPREAKVQWKVDNALQSGNSQESVTEQDSKDSTYSLSSTLTLSKADYEKHKVYACEVTHQGLSSPVTKSFNRGEC

SEQ ID NO: 6095 - protein, 219 aa, Artificial Sequence
  source: /note="Description of Artificial Sequence: Synthetic polypeptide"
NIMMTQSPSSLAVSAGEKVTMSCKSSQSVLYSSNQKNYLAWYQQKPGQSPKLLIYWASTRESGVPDRFTGSGSGTDFTLTISSVQAEDLAVYYCAQYLSSRTFGGGTKLEIKRTVAAPSVFIFPPSDEQLKSGTASVVCLLNNFYPREAKVQWKVDNALQSGNSQESVTEQDSKDSTYSLSSTLTLSKADYEKHKVYACEVTHQGLSSPVTKSFNRGEC

SEQ ID NO: 6096 - protein, 112 aa, Artificial Sequence
  source: /note="Description of Artificial Sequence: Synthetic polypeptide"
DIVMTQSPATLSLSPGERATLSCRSSKSLLNSNGNTYLYWFQQKPGQSPQLLIYRMSNLASGVPDRFSGSGSGTEFTLTISSLEPEDFAVYYCMQHLEYPFTFGAGTKLEIK

SEQ ID NO: 6097 - protein, 112 aa, Artificial Sequence
  source: /note="Description of Artificial Sequence: Synthetic polypeptide"
DIVMTQSPSSLSASVGDRVTISCRSSKSLLNSNGNTYLYWFQQKPGQSPQLLIYRMSNLASGVPDRFSGSGSGTEFTLTISSLQPEDVAVYYCMQHLEYPFTFGAGTKLEIK

SEQ ID NO: 6098 - protein, 112 aa, Artificial Sequence
  source: /note="Description of Artificial Sequence: Synthetic polypeptide"
DIVMTQSPATLSVSPGERATISCRSSKSLLNSNGNTYLYWFLQKPGQSPQLLIYRMSNLASGVPDRFSGSGSGTDFTLTISRVEAEDVGVYYCMQHLEYPFTFGAGTKLEIK

SEQ ID NO: 6099 - protein, 111 aa, Artificial Sequence
  source: /note="Description of Artificial Sequence: Synthetic polypeptide"
DILLTQSPATLSLSPGERATLSCRASQSVDYDGDSYLNWYQQKPGQPPKLLIYDASNLVSGIPPRFSGSGSGTDFTLTISRLEPEDFAVYHCQQSTEDPWTFGGGTKLEIK

SEQ ID NO: 6100 - protein, 111 aa, Artificial Sequence
  source: /note="Description of Artificial Sequence: Synthetic polypeptide"
DILLTQSPSSLSVTPGEKVTITCRASQSVDYDGDSYLNWYQQKPGQPPKLLIYDASNLVSGIPPRFSGSGSGTDFTLTINSLEAEDAATYHCQQSTEDPWTFGGGTKLEIK

SEQ ID NO: 6101 - protein, 111 aa, Artificial Sequence
  source: /note="Description of Artificial Sequence: Synthetic polypeptide"
DILLTQTPLSLPVTPGEPASISCRASQSVDYDGDSYLNWYQQKPGQPPKLLIYDASNLVSGIPPRFSGSGSGTDFTLKISRVEAEDVGVYHCQQSTEDPWTFGGGTKLEIK

SEQ ID NO: 6102 - protein, 112 aa, Artificial Sequence
  source: /note="Description of Artificial Sequence: Synthetic polypeptide"
DIVMTQSPATLSLSPGERATLSCRSSKSLLNSNGNTYLYWFQQKPGQSPQLLIYRMSNLASGVPDRFSGSGSGTEFTLTISSLEPEDFAVYYCMQHLNYPFTFGAGTKLEIK

SEQ ID NO: 6103 - protein, 112 aa, Artificial Sequence
  source: /note="Description of Artificial Sequence: Synthetic polypeptide"
DIVMTQSPATLSLSPGERATLSCRSSKSLLNSNGNTYLYWFQQKPGQSPQLLIYRMSNWASGVPDRFSGSGSGTEFTLTISSLEPEDFAVYYCMQHLEYPFTFGAGTKLEIK

SEQ ID NO: 6104 - protein, 112 aa, Artificial Sequence
  source: /note="Description of Artificial Sequence: Synthetic polypeptide"
DIVMTQSPATLSLSPGERATLSCRSSKSLLNVNGNTYLYWFQQKPGQSPQLLIYRMSNLNSGVPDRFSGSGSGTEFTLTISSLEPEDFAVYYCMQHLEYPFTFGAGTKLEIK

SEQ ID NO: 6105 - protein, 112 aa, Artificial Sequence
  source: /note="Description of Artificial Sequence: Synthetic polypeptide"
DIVMTQSPATLSLSPGERATLSCRSSKSLLNVNGNTYLYWFQQKPGQSPQLLIYRMSNLASGVPDRFSGSGSGTEFTLTISSLEPEDFAVYYCMQHLEYPNTFGAGTKLEIK

SEQ ID NO: 6106 - protein, 112 aa, Artificial Sequence
  source: /note="Description of Artificial Sequence: Synthetic polypeptide"
DIVMTQSPATLSLSPGERATLSCRSSKSLLNSNGNTYLYWFQQKPGQSPQLLIYRMSNLNSGVPDRFSGSGSGTEFTLTISSLEPEDFAVYYCMQHLEYPNTFGAGTKLEIK

SEQ ID NO: 6107 - protein, 112 aa, Artificial Sequence
  source: /note="Description of Artificial Sequence: Synthetic polypeptide"
DIVMTQSPATLSLSPGERATLSCRSSKSLQNSNGNTYLYWFQQKPGQSPQLLIYRMSNLNSGVPDRFSGSGSGTEFTLTISSLEPEDFAVYYCMQHLEYPFTFGAGTKLEIK

SEQ ID NO: 6108 - protein, 112 aa, Artificial Sequence
  source: /note="Description of Artificial Sequence: Synthetic polypeptide"
DIVMTQSPATLSLSPGERATLSCRSSKSLQNSNGNTYLYWFQQKPGQSPQLLIYRMSNLASGVPDRFSGSGSGTEFTLTISSLEPEDFAVYYCMQHLEYPNTFGAGTKLEIK

SEQ ID NO: 6109 - protein, 112 aa, Artificial Sequence
  source: /note="Description of Artificial Sequence: Synthetic polypeptide"
DIVMTQSPATLSLSPGERATLSCRSSKSLQNSNGNTYLYWFQQKPGQSPQLLIYRMSNLASGVPDRFSGSGSGTEFTLTISSLEPEDFAVYYCMQHLEYPITFGAGTKLEIK

SEQ ID NO: 6110 - protein, 112 aa, Artificial Sequence
  source: /note="Description of Artificial Sequence: Synthetic polypeptide"
DIVMTQSPATLSLSPGERATLSCRSSKSLLNVNGNTYLYWFQQKPGQSPQLLIYRMSNLNSGVPDRFSGSGSGTEFTLTISSLEPEDFAVYYCMQHLEYPNTFGAGTKLEIK

SEQ ID NO: 6111 - protein, 112 aa, Artificial Sequence
  source: /note="Description of Artificial Sequence: Synthetic polypeptide"
DIVMTQSPATLSLSPGERATLSCRSSKSLQNSNGNTYLYWFQQKPGQSPQLLIYRMSNLNSGVPDRFSGSGSGTEFTLTISSLEPEDFAVYYCMQHLEYPNTFGAGTKLEIK

SEQ ID NO: 6112 - protein, 112 aa, Artificial Sequence
  source: /note="Description of Artificial Sequence: Synthetic polypeptide"
DIVMTQSPATLSLSPGERATLSCRSSKSLQNSNGNTYLYWFQQKPGQSPQLLIYRMSNLNSGVPDRFSGSGSGTEFTLTISSLEPEDFAVYYCMQHLEYPITFGAGTKLEIK

SEQ ID NO: 6113 - protein, 112 aa, Artificial Sequence
  source: /note="Description of Artificial Sequence: Synthetic polypeptide"
DIVMTQSPATLSLSPGERATLSCRSSKSLQNVNGNTYLYWFQQKPGQSPQLLIYRMSNLASGVPDRFSGSGSGTEFTLTISSLEPEDFAVYYCMQHLEYPNTFGAGTKLEIK

SEQ ID NO: 6114 - protein, 112 aa, Artificial Sequence
  source: /note="Description of Artificial Sequence: Synthetic polypeptide"
DIVMTQSPATLSLSPGERATLSCRSSKSLQNVNGNTYLYWFQQKPGQSPQLLIYRMSNLNSGVPDRFSGSGSGTEFTLTISSLEPEDFAVYYCMQHLEYPNTFGAGTKLEIK

SEQ ID NO: 6115 - protein, 112 aa, Artificial Sequence
  source: /note="Description of Artificial Sequence: Synthetic polypeptide"
DIVMTQSPATLSLSPGERATLSCRSSKSLQNVNGNTYLYWFQQKPGQSPQLLIYRMSNLNSGVPDRFSGSGSGTEFTLTISSLEPEDFAVYYCMQHLEYPITFGAGTKLEIK

SEQ ID NO: 6116 - protein, 112 aa, Artificial Sequence
  source: /note="Description of Artificial Sequence: Synthetic polypeptide"
DIVMTQSPATLSLSPGERATLSCRSSKSLQNVNANTYLYWFQQKPGQSPQLLIYRMSNLNSGVPDRFSGSGSGTEFTLTISSLEPEDFAVYYCMQHLEYPITFGAGTKLEIK

SEQ ID NO: 6117 - protein, 112 aa, Artificial Sequence
  source: /note="Description of Artificial Sequence: Synthetic polypeptide"
DIVMTQSPATLSLSPGERATLSCRSSKSLQNVNSNTYLYWFQQKPGQSPQLLIYRMSNLNSGVPDRFSGSGSGTEFTLTISSLEPEDFAVYYCMQHLEYPITFGAGTKLEIK

SEQ ID NO: 6118 - protein, 112 aa, Artificial Sequence
  source: /note="Description of Artificial Sequence: Synthetic polypeptide"
DIVMTQSPATLSLSPGERATLSCRSSKSLQNANANTYLYWFQQKPGQSPQLLIYRMSNLNSGVPDRFSGSGSGTEFTLTISSLEPEDFAVYYCMQHLEYPITFGAGTKLEIK

SEQ ID NO: 6119 - protein, 112 aa, Artificial Sequence
  source: /note="Description of Artificial Sequence: Synthetic polypeptide"
DIVMTQSPATLSLSPGERATLSCRSSKSLQNANSNTYLYWFQQKPGQSPQLLIYRMSNLNSGVPDRFSGSGSGTEFTLTISSLEPEDFAVYYCMQHLEYPITFGAGTKLEIK

SEQ ID NO: 6120 - protein, 112 aa, Artificial Sequence
  source: /note="Description of Artificial Sequence: Synthetic polypeptide"
DIVMTQSPATLSLSPGERATLSCRSSKSLQNANGNTYLYWFQQKPGQSPQLLIYRMSNLNSGVPDRFSGSGSGTEFTLTISSLEPEDFAVYYCMQHLEYPITFGAGTKLEIK

SEQ ID NO: 6121 - protein, 112 aa, Artificial Sequence
  source: /note="Description of Artificial Sequence: Synthetic polypeptide"
DIVMTQSPATLSLSPGERATLSCRSSKSLLNSNGNTYLYWFQQKPGQSPQLLIYRMSNLASGVPDRFSGSGSGTEFTLTISSLEPEDFAVYYCMQHLTYPFTFGAGTKLEIK

SEQ ID NO: 6122 - protein, 112 aa, Artificial Sequence
  source: /note="Description of Artificial Sequence: Synthetic polypeptide"
DIVMTQSPATLSLSPGERATLSCRSSKSLLNSNGNTYLYWFQQKPGQSPQLLIYRMSNLASGVPDRFSGSGSGTEFTLTISSLEPEDFAVYYCMQHLYYPFTFGAGTKLEIK

SEQ ID NO: 6123 - protein, 112 aa, Artificial Sequence
  source: /note="Description of Artificial Sequence: Synthetic polypeptide"
DIVMTQSPATLSLSPGERATLSCRSSKSLQNSNGNTYLYWFQQKPGQSPQLLIYRMSNLASGVPDRFSGSGSGTEFTLTISSLEPEDFAVYYCMQHLEYPFTFGAGTKLEIK

SEQ ID NO: 6124 - protein, 112 aa, Artificial Sequence
  source: /note="Description of Artificial Sequence: Synthetic polypeptide"
DIVMTQSPATLSLSPGERATLSCRSSKSLLNSNGNTYLYWFQQKPGQSPQLLIYRMQNLASGVPDRFSGSGSGTEFTLTISSLEPEDFAVYYCMQHLEYPFTFGAGTKLEIK

SEQ ID NO: 6125 - protein, 112 aa, Artificial Sequence
  source: /note="Description of Artificial Sequence: Synthetic polypeptide"
DIVMTQSPATLSLSPGERATLSCRSSKSLLNVNGNTYLYWFQQKPGQSPQLLIYRMSNLASGVPDRFSGSGSGTEFTLTISSLEPEDFAVYYCMQHLEYPFTFGAGTKLEIK

SEQ ID NO: 6126 - protein, 112 aa, Artificial Sequence
  source: /note="Description of Artificial Sequence: Synthetic polypeptide"
DIVMTQSPATLSLSPGERATLSCRSSKSLLNSNGNTYLYWFQQKPGQSPQLLIYRMSHLASGVPDRFSGSGSGTEFTLTISSLEPEDFAVYYCMQHLEYPFTFGAGTKLEIK

SEQ ID NO: 6127 - protein, 112 aa, Artificial Sequence
  source: /note="Description of Artificial Sequence: Synthetic polypeptide"
DIVMTQSPATLSLSPGERATLSCRSSKSLLNSNGNTYLYWFQQKPGQSPQLLIYRMSGLASGVPDRFSGSGSGTEFTLTISSLEPEDFAVYYCMQHLEYPFTFGAGTKLEIK

SEQ ID NO: 6128 - protein, 112 aa, Artificial Sequence
  source: /note="Description of Artificial Sequence: Synthetic polypeptide"
DIVMTQSPATLSLSPGERATLSCRSSKSLLNSNGNTYLYWFQQKPGQSPQLLIYRMSYLASGVPDRFSGSGSGTEFTLTISSLEPEDFAVYYCMQHLEYPFTFGAGTKLEIK

SEQ ID NO: 6129 - protein, 112 aa, Artificial Sequence
  source: /note="Description of Artificial Sequence: Synthetic polypeptide"
DIVMTQSPATLSLSPGERATLSCRSSKSLLNSNGNTYLYWFQQKPGQSPQLLIYRMSNLASGVPDRFSGSGSGTEFTLTISSLEPEDFAVYYCMQHLEYPITFGAGTKLEIK

SEQ ID NO: 6130 - protein, 112 aa, Artificial Sequence
  source: /note="Description of Artificial Sequence: Synthetic polypeptide"
DIVMTQSPATLSLSPGERATLSCRSSKSLLNSNGNTYLYWFQQKPGQSPQLLIYRMSNLASGVPDRFSGSGSGTEFTLTISSLEPEDFAVYYCMQHLEYPVTFGAGTKLEIK

SEQ ID NO: 6131 - protein, 112 aa, Artificial Sequence
  source: /note="Description of Artificial Sequence: Synthetic polypeptide"
DIVMTQSPATLSLSPGERATLSCRSSKSLLNSNGNTYLYWFQQKPGQSPQLLIYRMSNLASGVPDRFSGSGSGTEFTLTISSLEPEDFAVYYCMQHLEYPNTFGAGTKLEIK

SEQ ID NO: 6132 - protein, 112 aa, Artificial Sequence
  source: /note="Description of Artificial Sequence: Synthetic polypeptide"
DIVMTQSPATLSLSPGERATLSCRSSKSLLNSNGNTYLYWFQQKPGQSPQLLIYRMKNLASGVPDRFSGSGSGTEFTLTISSLEPEDFAVYYCMQHLEYPFTFGAGTKLEIK

SEQ ID NO: 6133 - protein, 112 aa, Artificial Sequence
  source: /note="Description of Artificial Sequence: Synthetic polypeptide"
DIVMTQSPATLSLSPGERATLSCRSSKSLLNSNGNTYLFWFQQKPGQSPQLLIYRMSNLASGVPDRFSGSGSGTEFTLTISSLEPEDFAVYYCMQHLEYPFTFGAGTKLEIK

SEQ ID NO: 6134 - protein, 112 aa, Artificial Sequence
  source: /note="Description of Artificial Sequence: Synthetic polypeptide"
DIVMTQSPATLSLSPGERATLSCRSSKSLLNSNGNTYLYWFQQKPGQSPQLLIYRMLNLASGVPDRFSGSGSGTEFTLTISSLEPEDFAVYYCMQHLEYPFTFGAGTKLEIK

SEQ ID NO: 6135 - protein, 112 aa, Artificial Sequence
  source: /note="Description of Artificial Sequence: Synthetic polypeptide"
DIVMTQSPATLSLSPGERATLSCRSSKSLLNSNGNTYLYWFQQKPGQSPQLLIYRMSNLLSGVPDRFSGSGSGTEFTLTISSLEPEDFAVYYCMQHLEYPFTFGAGTKLEIK

SEQ ID NO: 6136 - protein, 112 aa, Artificial Sequence
  source: /note="Description of Artificial Sequence: Synthetic polypeptide"
DIVMTQSPATLSLSPGERATLSCRSSKSLLNSNGNTYLYWFQQKPGQSPQLLIYRMSNLNSGVPDRFSGSGSGTEFTLTISSLEPEDFAVYYCMQHLEYPFTFGAGTKLEIK

SEQ ID NO: 6137 - protein, 451 aa, Artificial Sequence
  source: /note="Description of Artificial Sequence: Synthetic polypeptide"
EVQLVESGGGLVKPGGSLKLSCAASGYTFTSYVMHWVRQAPGKGLEWIGYINPYNEGTEYNEKFQGRVTISSDKSISTAYMELSSLRSEDTAMYYCARGTYYYGTRVFDYWGQGTLVTVSSASTKGPSVFPLAPSSKSTSGGTAALGCLVKDYFPEPVTVSWNSGALTSGVHTFPAVLQSSGLYSLSSVVTVPSSSLGTQTYICNVNHKPSNTKVDKKVEPKSCDKTHTCPPCPAPELLGGPDVFLFPPKPKDTLMISRTPEVTCVVVDVSHEDPEVQFNWYVDGVEVHNAKTKPREEQFNSTFRVVSVLTVVHQDWLNGKEYKCKVSNKALPAPEEKTISKTKGQPREPQVYTLPPSREEMTKNQVSLTCLVKGFYPSDIAVEWESNGQPENNYKTTPPMLDSDGSFFLYSKLTVDKSRWQQGNVFSCSVMHEALHNHYTQKSLSLSPGK

SEQ ID NO: 6138 - protein, 219 aa, Artificial Sequence
  source: /note="Description of Artificial Sequence: Synthetic polypeptide"
DIVMTQSPATLSLSPGERATLSCRSSKSLLNSNGNTYLYWFQQKPGQSPQLLIYRMSNLASGVPDRFSGSGSGTEFTLTISSLEPEDFAVYYCMQHLEYPFTFGAGTKLEIKRTVAAPSVFIFPPSDEQLKSGTASVVCLLNNFYPREAKVQWKVDNALQSGNSQESVTEQDSKDSTYSLSSTLTLSKADYEKHKVYACEVTHQGLSSPVTKSFNRGEC

SEQ ID NO: 6139 - protein, 219 aa, Artificial Sequence
  source: /note="Description of Artificial Sequence: Synthetic polypeptide"
DIVMTQSPATLSLSPGERATLSCRSSKSLQNSNGNTYLYWFQQKPGQSPQLLIYRMSNLASGVPDRFSGSGSGTEFTLTISSLEPEDFAVYYCMQHLEYPFTFGAGTKLEIKRTVAAPSVFIFPPSDEQLKSGTASVVCLLNNFYPREAKVQWKVDNALQSGNSQESVTEQDSKDSTYSLSSTLTLSKADYEKHKVYACEVTHQGLSSPVTKSFNRGEC

SEQ ID NO: 6140 - protein, 219 aa, Artificial Sequence
  source: /note="Description of Artificial Sequence: Synthetic polypeptide"
DIVMTQSPATLSLSPGERATLSCRSSKSLLNVNGNTYLYWFQQKPGQSPQLLIYRMSNLASGVPDRFSGSGSGTEFTLTISSLEPEDFAVYYCMQHLEYPFTFGAGTKLEIKRTVAAPSVFIFPPSDEQLKSGTASVVCLLNNFYPREAKVQWKVDNALQSGNSQESVTEQDSKDSTYSLSSTLTLSKADYEKHKVYACEVTHQGLSSPVTKSFNRGEC

SEQ ID NO: 6141 - protein, 219 aa, Artificial Sequence
  source: /note="Description of Artificial Sequence: Synthetic polypeptide"
DIVMTQSPATLSLSPGERATLSCRSSKSLLNSNGNTYLYWFQQKPGQSPQLLIYRMSNLASGVPDRFSGSGSGTEFTLTISSLEPEDFAVYYCMQHLEYPITFGAGTKLEIKRTVAAPSVFIFPPSDEQLKSGTASVVCLLNNFYPREAKVQWKVDNALQSGNSQESVTEQDSKDSTYSLSSTLTLSKADYEKHKVYACEVTHQGLSSPVTKSFNRGEC

SEQ ID NO: 6142 - protein, 219 aa, Artificial Sequence
  source: /note="Description of Artificial Sequence: Synthetic polypeptide"
DIVMTQSPATLSLSPGERATLSCRSSKSLLNSNGNTYLYWFQQKPGQSPQLLIYRMSNLASGVPDRFSGSGSGTEFTLTISSLEPEDFAVYYCMQHLEYPNTFGAGTKLEIKRTVAAPSVFIFPPSDEQLKSGTASVVCLLNNFYPREAKVQWKVDNALQSGNSQESVTEQDSKDSTYSLSSTLTLSKADYEKHKVYACEVTHQGLSSPVTKSFNRGEC

SEQ ID NO: 6143 - protein, 219 aa, Artificial Sequence
  source: /note="Description of Artificial Sequence: Synthetic polypeptide"
DIVMTQSPATLSLSPGERATLSCRSSKSLLNSNGNTYLYWFQQKPGQSPQLLIYRMSNLNSGVPDRFSGSGSGTEFTLTISSLEPEDFAVYYCMQHLEYPFTFGAGTKLEIKRTVAAPSVFIFPPSDEQLKSGTASVVCLLNNFYPREAKVQWKVDNALQSGNSQESVTEQDSKDSTYSLSSTLTLSKADYEKHKVYACEVTHQGLSSPVTKSFNRGEC

SEQ ID NO: 6144 - protein, 219 aa, Artificial Sequence
  source: /note="Description of Artificial Sequence: Synthetic polypeptide"
DIVMTQSPATLSLSPGERATLSCRSSKSLQNSNGNTYLYWFQQKPGQSPQLLIYRMSNLASGVPDRFSGSGSGTEFTLTISSLEPEDFAVYYCMQHLEYPITFGAGTKLEIKRTVAAPSVFIFPPSDEQLKSGTASVVCLLNNFYPREAKVQWKVDNALQSGNSQESVTEQDSKDSTYSLSSTLTLSKADYEKHKVYACEVTHQGLSSPVTKSFNRGEC

SEQ ID NO: 6145 - protein, 219 aa, Artificial Sequence
  source: /note="Description of Artificial Sequence: Synthetic polypeptide"
DIVMTQSPATLSLSPGERATLSCRSSKSLQNSNGNTYLYWFQQKPGQSPQLLIYRMSNLNSGVPDRFSGSGSGTEFTLTISSLEPEDFAVYYCMQHLEYPNTFGAGTKLEIKRTVAAPSVFIFPPSDEQLKSGTASVVCLLNNFYPREAKVQWKVDNALQSGNSQESVTEQDSKDSTYSLSSTLTLSKADYEKHKVYACEVTHQGLSSPVTKSFNRGEC

SEQ ID NO: 6146 - protein, 219 aa, Artificial Sequence
  source: /note="Description of Artificial Sequence: Synthetic polypeptide"
DIVMTQSPATLSLSPGERATLSCRSSKSLQNSNGNTYLYWFQQKPGQSPQLLIYRMSNLNSGVPDRFSGSGSGTEFTLTISSLEPEDFAVYYCMQHLEYPITFGAGTKLEIKRTVAAPSVFIFPPSDEQLKSGTASVVCLLNNFYPREAKVQWKVDNALQSGNSQESVTEQDSKDSTYSLSSTLTLSKADYEKHKVYACEVTHQGLSSPVTKSFNRGEC

SEQ ID NO: 6147 - protein, 219 aa, Artificial Sequence
  source: /note="Description of Artificial Sequence: Synthetic polypeptide"
DIVMTQSPATLSLSPGERATLSCRSSKSLQNVNGNTYLYWFQQKPGQSPQLLIYRMSNLNSGVPDRFSGSGSGTEFTLTISSLEPEDFAVYYCMQHLEYPNTFGAGTKLEIKRTVAAPSVFIFPPSDEQLKSGTASVVCLLNNFYPREAKVQWKVDNALQSGNSQESVTEQDSKDSTYSLSSTLTLSKADYEKHKVYACEVTHQGLSSPVTKSFNRGEC

SEQ ID NO: 6148 - protein, 219 aa, Artificial Sequence
  source: /note="Description of Artificial Sequence: Synthetic polypeptide"
DIVMTQSPATLSLSPGERATLSCRSSKSLQNVNGNTYLYWFQQKPGQSPQLLIYRMSNLNSGVPDRFSGSGSGTEFTLTISSLEPEDFAVYYCMQHLEYPITFGAGTKLEIKRTVAAPSVFIFPPSDEQLKSGTASVVCLLNNFYPREAKVQWKVDNALQSGNSQESVTEQDSKDSTYSLSSTLTLSKADYEKHKVYACEVTHQGLSSPVTKSFNRGEC

SEQ ID NO: 6149 - protein, 219 aa, Artificial Sequence
  source: /note="Description of Artificial Sequence: Synthetic polypeptide"
DIVMTQSPATLSLSPGERATLSCRSSKSLQNVNANTYLYWFQQKPGQSPQLLIYRMSNLNSGVPDRFSGSGSGTEFTLTISSLEPEDFAVYYCMQHLEYPITFGAGTKLEIKRTVAAPSVFIFPPSDEQLKSGTASVVCLLNNFYPREAKVQWKVDNALQSGNSQESVTEQDSKDSTYSLSSTLTLSKADYEKHKVYACEVTHQGLSSPVTKSFNRGEC

SEQ ID NO: 6150 - protein, 219 aa, Artificial Sequence
  source: /note="Description of Artificial Sequence: Synthetic polypeptide"
DIVMTQSPATLSLSPGERATLSCRSSKSLQNANANTYLYWFQQKPGQSPQLLIYRMSNLNSGVPDRFSGSGSGTEFTLTISSLEPEDFAVYYCMQHLEYPITFGAGTKLEIKRTVAAPSVFIFPPSDEQLKSGTASVVCLLNNFYPREAKVQWKVDNALQSGNSQESVTEQDSKDSTYSLSSTLTLSKADYEKHKVYACEVTHQGLSSPVTKSFNRGEC

SEQ ID NO: 6151 - protein, 219 aa, Artificial Sequence
  source: /note="Description of Artificial Sequence: Synthetic polypeptide"
DIVMTQSPATLSLSPGERATLSCRSSKSLQNANSNTYLYWFQQKPGQSPQLLIYRMSNLNSGVPDRFSGSGSGTEFTLTISSLEPEDFAVYYCMQHLEYPITFGAGTKLEIKRTVAAPSVFIFPPSDEQLKSGTASVVCLLNNFYPREAKVQWKVDNALQSGNSQESVTEQDSKDSTYSLSSTLTLSKADYEKHKVYACEVTHQGLSSPVTKSFNRGEC

SEQ ID NO: 6152 - protein, 219 aa, Artificial Sequence
  source: /note="Description of Artificial Sequence: Synthetic polypeptide"
DIVMTQSPATLSLSPGERATLSCRSSKSLQNANGNTYLYWFQQKPGQSPQLLIYRMSNLNSGVPDRFSGSGSGTEFTLTISSLEPEDFAVYYCMQHLEYPITFGAGTKLEIKRTVAAPSVFIFPPSDEQLKSGTASVVCLLNNFYPREAKVQWKVDNALQSGNSQESVTEQDSKDSTYSLSSTLTLSKADYEKHKVYACEVTHQGLSSPVTKSFNRGEC

SEQ ID NO: 6153 - protein, 112 aa, Artificial Sequence
  source: /note="Description of Artificial Sequence: Synthetic polypeptide"
DVVMTQTPLTLSVTIGQPASISCKSSQSLLYSNGKTYLNWLLQRPGQSPKRLIYLVSKLDSGVPDRFTGSGSGTDFTLKISRVEAEDLGFYYCVQDTHFPLTFGAGTKLELK

SEQ ID NO: 6154 - protein, 112 aa, Artificial Sequence
  source: /note="Description of Artificial Sequence: Synthetic polypeptide"
DVVMTQSPLSLPVTLGQPASISCKSSQSLLYSNGKTYLNWFQQRPGQSPRRLIYLVSKLDSGVPDRFSGSGSGTDFTLKISRVEAEDVGVYYCVQDTHFPLTFGGGTKVEIK

SEQ ID NO: 6155 - protein, 112 aa, Artificial Sequence
  source: /note="Description of Artificial Sequence: Synthetic polypeptide"
DVVMTQSPLSLPVTLGQPASISCKSSQSLLYSNGKTYLNWFQQRPGQSPRRLIYQVSKLDSGVPDRFSGSGSGTDFTLKISRVEAEDVGVYYCGQDTHFPLTFGGGTKVEIK

SEQ ID NO: 6156 - protein, 112 aa, Artificial Sequence
  source: /note="Description of Artificial Sequence: Synthetic polypeptide"
DVVMTQSPLSLPVTLGQPASISCKSSQSLLYSNDKTYTNWFQQRPGQSPRRLIYEVSKLDVGVPDRFSGSGSGTDFTLKISRVEAEDVGVYYCGQDTHFPLTFGGGTKVEIK

SEQ ID NO: 6157 - protein, 107 aa, Artificial Sequence
  source: /note="Description of Artificial Sequence: Synthetic polypeptide"
EVVLTQSPATLSVSPGERATLSCRASQSVRSNLAWYQQKSGQAPRLLIYGSTIRATGVPARFSGSGSGTEFTLTISSLQSEDFAVYYCQQYSDWPFTFGPGTKVDIK

SEQ ID NO: 6158 - protein, 107 aa, Artificial Sequence
  source: /note="Description of Artificial Sequence: Synthetic polypeptide"
EVVMTQSPATLSVSPGERVTLSCRASQSVSSNFAWYQQRPGQAPRLLLYGATTRATGLPGRFSGSGSGTENILTISSLQSEDFAIYFCQQYKDWPFTFGPGSKVDIK

SEQ ID NO: 6159 - protein, 107 aa, Artificial Sequence
  source: /note="Description of Artificial Sequence: Synthetic polypeptide"
EIVMTQSPATLSVSPGERATLSCRVSQSIGANLAWYQQKFGQAPRLLIYGASTRATGIPVRFSGGGSGTEFTLTISSLQSEDFAIYSCQQYIYWPFTFGPGTTVDIK

SEQ ID NO: 6160 - protein, 107 aa, Artificial Sequence
  source: /note="Description of Artificial Sequence: Synthetic polypeptide"
EIVMTQSPATLSVSPGERATLSCRASQSVSNNLAWYQQKPGQAPRLLIYGASTRATGVPARFSGSDSGTEFSLTISSLQSEDFAVYFCQQYKDWPFTFGPGTKVEIK

SEQ ID NO: 6161 - protein, 107 aa, Artificial Sequence
  source: /note="Description of Artificial Sequence: Synthetic polypeptide"
DMVVTQSPATLSVSPGERATLSCRASQSVGSDLAWYQQPPGQSPRLLIYGASTRATGVPARFSGSGSGTDFTLTITSLESEDFAVYYCQQYNDWPFTFGPGTKVDIK

SEQ ID NO: 6162 - protein, 107 aa, Artificial Sequence
  source: /note="Description of Artificial Sequence: Synthetic polypeptide"
EMEVTQSPATLSVSPGERATLSCRASQNIGSDLAWYQQQSGQAPRLLISGASTRATGVPTRFSGSGSGTDFTLTITSLQSEDFAVYYCQQYNDWPFTFGPGTKVDIK

SEQ ID NO: 6163 - protein, 107 aa, Artificial Sequence
  source: /note="Description of Artificial Sequence: Synthetic polypeptide"
EVVMTQSPPNLSVSPGERATLSCRASQSVTSNFAWYQQRPGQSPRLLLYGASTRATGVPGRFSGSGSGTENILTISSLQSEDFAVYFCQQYKDWPFTFGPGSKVDIK

SEQ ID NO: 6164 - protein, 107 aa, Artificial Sequence
  source: /note="Description of Artificial Sequence: Synthetic polypeptide"
EVVMTQSPATLSVSPGERATLSCRASQGVSSNFAWYQQRPGQSPRLLLYGASTRATGVPGRFSGSGSGTENILTISSLQSEDFAIYFCQQYKDWPFTFGPGSKVDIK

SEQ ID NO: 6165 - protein, 107 aa, Artificial Sequence
  source: /note="Description of Artificial Sequence: Synthetic polypeptide"
EVVMTQSPATLSVSPGERATLSCRASQSVNRNLAWYQQKPGQAPRLLIFGTSTRATGIPARFSGSGSGTEFTLTIDSLQSEHSGLYYCQQYNDWPFTFGPGTKVDIK

SEQ ID NO: 6166 - protein, 107 aa, Artificial Sequence
  source: /note="Description of Artificial Sequence: Synthetic polypeptide"
EVLMTQSPATLSVSPGERATLSCRASQSVSTNFAWYQQRPGQAPRLLLFGASTRATGIPGRFSGSGSGTENILTISSLQSEDFAIYFCQQYKDWPFTFGPGSKVEIK

SEQ ID NO: 6167 - protein, 107 aa, Artificial Sequence
  source: /note="Description of Artificial Sequence: Synthetic polypeptide"
DVVLTQSPATLSVSPGERATLSCRASQSVNSNLAWYQQNPGQAPRLLIFGSSTRATGIPASFSGSGSGTEFTLTINSLQSEHSAVYYCQQYNDWPFTFGPGTKVDIK

SEQ ID NO: 6168 - protein, 107 aa, Artificial Sequence
  source: /note="Description of Artificial Sequence: Synthetic polypeptide"
EVVMTQSPATLSVSPGERATLSCRASQSVINNLAWYQQKPGQAPRLLIYGTSTRATDIPARFSGSGSGTEFTLTISSLQSEDFAVYYCQDYNNWPFTFGPGTKVDIK

SEQ ID NO: 6169 - protein, 107 aa, Artificial Sequence
  source: /note="Description of Artificial Sequence: Synthetic polypeptide"
EIVMTQSPATLSVSPGERTTLSCRASQSVGSNLAWYQQKPGQAPRLLIYGASTRASGVPARFSGSGSGTEFTLTISSLQSEDFAVYSCQEYNNWPFTFGQGTKVEIK

SEQ ID NO: 6170 - protein, 107 aa, Artificial Sequence
  source: /note="Description of Artificial Sequence: Synthetic polypeptide"
KIVMTQSPATLSVSPGERATLSCRANQIVSSNLAWYQQKPGQAPRLLVFGTSTRATGIPIRFSGSGSGTEFTLTVSSLQSEDFAVYVCQQYNDWPFTFGPGTKVDIK

SEQ ID NO: 6171 - protein, 112 aa, Artificial Sequence
  source: /note="Description of Artificial Sequence: Synthetic polypeptide"
DIVMTQSPLSLPVTPGEPASISCRSSQSLLHNKRNNYLDWFLQKPGQSPQLLIYLASNRASGVPDRFSGGGSGTDFTLKISRVEAEDVGVYYCMQAQQTPITFGQGTRLEIK

SEQ ID NO: 6172 - protein, 112 aa, Artificial Sequence
  source: /note="Description of Artificial Sequence: Synthetic polypeptide"
DIVLTQSPLSLSVTPGEPASISCRSSQSLLYSNGKNYLDWFLHKPGQSPQLLIYLGSNRASGVPDRFSGSGSGIDFILKISRVEAEDVGVYYCMQAQQTPITFGQGTRLEIK

SEQ ID NO: 6173 - protein, 112 aa, Artificial Sequence
  source: /note="Description of Artificial Sequence: Synthetic polypeptide"
DIVLTQSPLSLPVTPGEPASISCRSSQSLLHRDGFNYLDWFLQKPGQSPQLLIYLASSRASGVPDRFSGSDSGTDFTLKISRVEAEDVGVYYCMQALQTPITFGQGTRLEIK

SEQ ID NO: 6174 - protein, 112 aa, Artificial Sequence
  source: /note="Description of Artificial Sequence: Synthetic polypeptide"
DIVLTQSPLSLSVTPGEPASISCRSTQSLLYSNGKNYLDWFLHKPGQSPQLLIFLGSIRASGVPDRFSGSGSGIDFILKISRVEAEDVGVYYCMQAQQTPITFGQGTRLEIK

SEQ ID NO: 6175 - protein, 112 aa, Artificial Sequence
  source: /note="Description of Artificial Sequence: Synthetic polypeptide"
DIVLTQSPLSLPVTPGEPASISCRSSQSLLYSDRRNYLDWFLQKPGQSPHLLIYLGSYRASGVPDRFSGSGSGTDFTLKISRVEAEDVGVYYCMQALQIPITFGQGTRLEIK

SEQ ID NO: 6176 - protein, 112 aa, Artificial Sequence
  source: /note="Description of Artificial Sequence: Synthetic polypeptide"
ELQSVLTQPPSASGTPGQRVTISCSGSSSNIGSNYVYWYQQLPGTAPKILIYRNNQRPSGVPDRFSGSKSGTSASLAISGLRSEDEADYYCAAWDDNLSGWVFGTGTKLTVL

SEQ ID NO: 6177 - protein, 107 aa, Artificial Sequence [sequence omitted]

SEQ ID NO: 6178 - protein, 112 aa, Artificial Sequence
  source: /note="Description of Artificial Sequence: Synthetic polypeptide"
  MOD_RES (33)..(34): Any naturally occurring amino acid
DIVLTQSPLSLSVTPGEPASISCRSSQSLLYSXXKNYLDWFLHKPGQSPQLLIYLGSNRASGVPDRFSGSGSGIDFILKISRVEAEDVGVYYCMQAQQTPITFGQGTRLEIK

SEQ ID NO: 6179 - protein, 112 aa, Artificial Sequence
  source: /note="Description of Artificial Sequence: Synthetic polypeptide"
  MOD_RES (33)..(34): Any naturally occurring amino acid
DIVLTQSPLSLPVTPGEPASISCRSSQSLLHRXXFNYLDWFLQKPGQSPQLLIYLASSRASGVPDRFSGSDSGTDFTLKISRVEAEDVGVYYCMQALQTPITFGQGTRLEIK

SEQ ID NO: 6180 - protein, 112 aa, Artificial Sequence
  source: /note="Description of Artificial Sequence: Synthetic polypeptide"
  MOD_RES (33)..(34): Any naturally occurring amino acid
DIVLTQSPLSLSVTPGEPASISCRSTQSLLYSXXKNYLDWFLHKPGQSPQLLIFLGSIRASGVPDRFSGSGSGIDFILKISRVEAEDVGVYYCMQAQQTPITFGQGTRLEIK

SEQ ID NO: 6181 - protein, 213 aa, Artificial Sequence
  source: /note="Description of Artificial Sequence: Synthetic polypeptide"
DIQLTQSPSFLSASVGDRVTITCRASSGVNYLYWYQQKPGKAPKLWIYFTSTLASGVPSRFSGSGSGNEYTLTISSLQPEDFATYYCQQFTSSPYTFGQGTKLEIKRTVAAPSVFIFPPSDEQLKSGTASVVCLLNNFYPREAKVQWKVDNALQSGNSQESVTEQDSKDSTYSLSSTLTLSKADYEKHKVYACEVTHQGLSSPVTKSFNRGEC

SEQ ID NO: 6182 - protein, 213 aa, Artificial Sequence
  source: /note="Description of Artificial Sequence: Synthetic polypeptide"
DIQLTQSPSFLSASVGDRVTITCRASSGVNYLYWYQQKPGKAPKLWIYFTSTLASGVPSRFSGSGSGNEYTLTISSLQPEDFATYYCQQFTSSPYTFGGGTKLEIKRTVAAPSVFIFPPSDEQLKSGTASVVCLLNNFYPREAKVQWKVDNALQSGNSQESVTEQDSKDSTYSLSSTLTLSKADYEKHKVYACEVTHQGLSSPVTKSFNRGEC

SEQ ID NO: 6183 - protein, 213 aa, Artificial Sequence
  source: /note="Description of Artificial Sequence: Synthetic polypeptide"
DIQLTQSPSFLSASVGDRVTITCRASSGVNYLYWYQQKPGKAPKLWIYFTSTLAPGVPSRFSGSGSGNEYTLTISSLQPEDFATYYCQQFTSSPYTFGQGTKLEIKRTVAAPSVFIFPPSDEQLKSGTASVVCLLNNFYPREAKVQWKVDNALQSGNSQESVTEQDSKDSTYSLSSTLTLSKADYEKHKVYACEVTHQGLSSPVTKSFNRGEC

SEQ ID NO: 6184 - protein, 213 aa, Artificial Sequence
  source: /note="Description of Artificial Sequence: Synthetic polypeptide"
DIQLTQSPSFLSASVGDRVTITCRASSGVNYLYWYQQKPGKAPKLWIYFTSTLAPGVPSRFSGSGSGNEYTLTISSLQPEDFATYYCQQFTSSPYTFGGGTKLEIKRTVAAPSVFIFPPSDEQLKSGTASVVCLLNNFYPREAKVQWKVDNALQSGNSQESVTEQDSKDSTYSLSSTLTLSKADYEKHKVYACEVTHQGLSSPVTKSFNRGEC

SEQ ID NO: 6185 - protein, 32 aa, Artificial Sequence
  source: /note="Description of Artificial Sequence: Synthetic polypeptide"
GVPDRFTGSGSGTDFTLTISSLQAEDVAVYYC

SEQ ID NO: 6186 - protein, 32 aa, Artificial Sequence
  source: /note="Description of Artificial Sequence: Synthetic polypeptide"
GIPSRFSGSGSGTDFTLTISSLQPEDVATYYC

SEQ ID NO: 6187 - protein, 32 aa, Artificial Sequence
  source: /note="Description of Artificial Sequence: Synthetic polypeptide"
GIPSRFSGSGSGTDFTLTISSLQPEDFATYYC

SEQ ID NO: 6188 - protein, 219 aa, Artificial Sequence
  source: /note="Description of Artificial Sequence: Synthetic polypeptide"
DIVMTQSPSSLAVSLGERVTINCKSSRSLLNSRIRKNYLAWYQQKPGQSPKLLIYWASTRESGVPDRFSGSGSGTDFTLTISSLQAEDVAVYYCKQSYNLLTFGQGTKVEIKRTVAAPSVFIFPPSDEQLKSGTASVVCLLNNFYPREAKVQWKVDNALQSGNSQESVTEQDSKDSTYSLSSTLTLSKADYEKHKVYACEVTHQGLSSPVTKSFNRGEC

SEQ ID NO: 6189 - protein, 218 aa, Artificial Sequence
  source: /note="Description of Artificial Sequence: Synthetic polypeptide"
DIVLTQSPLSLAVSLGQPAIISCKASQSVSFAGTSLMHWYHQKPGQQPRLLIYRASNLEAGVPDRFSGSGSKTDFTLNISPVEAEDAATYYCQQSREYPYTFGGGTKLEIKRTVAAPSVFIFPPSDEQLKSGTASVVCLLNNFYPREAKVQWKVDNALQSGNSQESVTEQDSKDSTYSLSSTLTLSKADYEKHKVYACEVTHQGLSSPVTKSFNRGEC

SEQ ID NO: 6190 - protein, 218 aa, Artificial Sequence
  source: /note="Description of Artificial Sequence: Synthetic polypeptide"
DIVLTQSPLSLAVSLGQPAIISCKASQSVSFAGTSLMHWYHQKPGQQPRLLIYRASNLEAGVPDRFSGSGSKTDFTLTISPVEAEDAATYYCQQSREYPYTFGGGTKLEIKRTVAAPSVFIFPPSDEQLKSGTASVVCLLNNFYPREAKVQWKVDNALQSGNSQESVTEQDSKDSTYSLSSTLTLSKADYEKHKVYACEVTHQGLSSPVTKSFNRGEC

SEQ ID NO: 6191 - protein, 219 aa, Artificial Sequence
  source: /note="Description of Artificial Sequence: Synthetic polypeptide"
DIQMTQSPSSLSASVGDRVTITCKASQSIRTSLVWYQQKPGKAPKLLIYKASDLPSGVPSRFSGSGSGTDFTLTISSLQPEDFATYYCQSYDFRDTINNGHSFGQGTKVEIKRTVAAPSVFIFPPSDEQLKSGTASVVCLLNNFYPREAKVQWKVDNALQSGNSQESVTEQDSKDSTYSLSSTLTLSKADYEKHKVYACEVTHQGLSSPVTKSFNRGEC

SEQ ID NO: 6192 - protein, 233 aa, Artificial Sequence
  source: /note="Description of Artificial Sequence: Synthetic polypeptide"
MEAPAQLLFLLLLWLPDTTGEIVLTQSPATLSLSPGERATLSCRASESVSSNLAWYQQKPGQAPRLLIYGAFNRATGIPARFSGSGSGTDFTLTISSLEPEDFAVYYCQQRSDWFTFGGGTKVEIKRADAAPTVSIFPPSTEQLATGGASVVCLMNNFYPRDISVKWKIDGTERRDGVLDSVTDQDSKDSTYSMSSTLSLTKADYESHNLYTCEVVHKTSSSPVVKSFNRNEC

SEQ ID NO: 6193 - protein, 213 aa, Artificial Sequence
  source: /note="Description of Artificial Sequence: Synthetic polypeptide"
EIVLTQSPATLSLSPGERATLSCRASESVSSNLAWYQQKPGQAPRLLIYGAFNRATGIPARFSGSGSGTDFTLTISSLEPEDFAVYYCQQRSDWFTFGGGTKVEIKRADAAPTVSIFPPSTEQLATGGASVVCLMNNFYPRDISVKWKIDGTERRDGVLDSVTDQDSKDSTYSMSSTLSLTKADYESHNLYTCEVVHKTSSSPVVKSFNRNEC

SEQ ID NO: 6194 - protein, 212 aa, Artificial Sequence
  source: /note="Description of Artificial Sequence: Synthetic polypeptide"
EIVLTQSPATLSLSPGERATLSCRASESVSSNLAWYQQKPGQAPRLLIYGAFNRATGIPARFSGSGSGTDFTLTISSLEPEDFAVYYCQQRSDWFTFGGGTKVEIKTVAAPSVFIFPPSDEQLKSGTASVVCLLNNFYPREAKVQWKVDNALQSGNSQESVTEQDSKDSTYSLSSTLTLSKADYEKHKVYACEVTHQGLSSPVTKSFNRGEC

SEQ ID NO: 6195 - protein, 107 aa, Artificial Sequence
  source: /note="Description of Artificial Sequence: Synthetic polypeptide"
NIQMTQSPSAMSASVGDRVTITCKASQDIHRYLSWFQQKPGKVPKHLIYRANRLVSGVPSRFSGSGSGTEFTLTISSLQPEDFATYYCLQYDEFPYTFGGGTKVEIK

SEQ ID NO: 6196 - protein, 238 aa, Artificial Sequence
  source: /note="Description of Artificial Sequence: Synthetic polypeptide"
MVLQTQVFISLLLWISGAYGDIVMTQSPDSLAVSLGERATISCRASESVDNYGISFMKWFQQKPGQPPKLLIYAASNQGSGVPDRFSGSGSGTDFTLTISSLQAEDVAVYYCQQSKEVPWTFGGGTKVEIKRTVAAPSVFIFPPSDEQLKSGTASVVCLLNNFYPREAKVQWKVDNALQSGNSQESVTEQDSKDSTYSLSSTLTLSKADYEKHKVYACEVTHQGLSSPVTKSFNRGEC

SEQ ID NO: 6197 - protein, 217 aa, Artificial Sequence
  source: /note="Description of Artificial Sequence: Synthetic polypeptide"
DIVMTQSPDSLAVSLGERATISCRASESVDNYGISFMKWFQQKPGQPPKLLIYAASNQGSGVPDRFSGSGSGTDFTLTISSLQAEDVAVYYCQQSKEVPWTFGGGTKVEIKRTVAAPSVIFPPSDEQLKSGTASVVCLLNNFYPREAKVQWKVDNALQSGNSQESVTEQDSKDSTYSLSSTLTLSKADYEKHKVYACEVTHQGLSSPVTKSFNRGEC

SEQ ID NO: 6198 - protein, 216 aa, Homo sapiens
DIVLTQPPSVSGAPGQRVTISCSGSSSNIGSNSVSWYQQLPGTAPKLLIYDNSKRPSGVPDRFSGSKSGTSASLAITGLQSEDEADYYCQSRDTYGYYWVFGGGTKLTVLGQPKAAPSVTLFPPSSEELQANKATLVCLISDFYPGAVTVAWKGDSSPVKAGVETTTPSKQSNNKYAASSYLSLTPEQWKSHRSYSCQVTHEGSTVEKTVAPTECS

SEQ ID NO: 6199 - protein, 219 aa, Artificial Sequence
  source: /note="Description of Artificial Sequence: Synthetic polypeptide"
DIVMTQTPLSLSVTPGQPASISCKSSQSLENSNGNTYLNWYLQKPGQSPQLLIYRVSKRFSGVPDRFSGSGSGTDFTLKISRVEAEDVGVYYCLQLTHVPYTFGQGTKLEIKRTVAAPSVFIFPPSDEQLKSGTASVVCLLNNFYPREAKVQWKVDNALQSGNSQESVTEQDSKDSTYSLSSTLTLSKADYEKHKVYACEVTHQGLSSPVTKSFNRGEC

SEQ ID NO: 6200 - protein, 219 aa, Artificial Sequence
  source: /note="Description of Artificial Sequence: Synthetic polypeptide"
DIVMTQTPLSLSVTPGQPASISCKSSQSLETSTGTTYLNWYLQKPGQSPQLLIYRVSKRFSGVPDRFSGSGSGTDFTLKISRVEAEDVGVYYCLQLLEDPYTFGQGTKLEIKRTVAAPSVFIFPPSDEQLKSGTASVVCLLNNFYPREAKVQWKVDNALQSGNSQESVTEQDSKDSTYSLSSTLTLSKADYEKHKVYACEVTHQGLSSPVTKSFNRGEC

SEQ ID NO: 6201 - protein, 219 aa, Artificial Sequence
  source: /note="Description of Artificial Sequence: Synthetic polypeptide"
DIVMTQTPLSLSVTPGQPASISCKSSQSLETSTGNTYLNWYLQKPGQSPQLLIYRVSKRFSGVPDRFSGSGSGTDFTLKISRVEAEDVGVYYCLQATHIPYTFGQGTKLEIKRTVAAPSVFIFPPSDEQLKSGTASVVCLLNNFYPREAKVQWKVDNALQSGNSQESVTEQDSKDSTYSLSSTLTLSKADYEKHKVYACEVTHQGLSSPVTKSFNRGEC

SEQ ID NO: 6202 - protein, 451 aa, Artificial Sequence
  source: /note="Description of Artificial Sequence: Synthetic polypeptide"
QVQLVQSGAEVKKPGASVKVSCKASGYTFTDYIMHWVRQAPGQGLEWMGYINPYNDGSKYTEKFQGRVTMTSDTSISTAYMELSRLRSDDTAVYYCARGTYYYGSELFDYWGQGTTVTVSSASTKGPSVFPLAPSSKSTSGGTAALGCLVKDYFPEPVTVSWNSGALTSGVHTFPAVLQSSGLYSLSSVVTVPSSSLGTQTYICNVNHKPSNTKVDKKVEPKSCDKTHTCPPCPAPEAAGGPSVFLFPPKPKDTLMISRTPEVTCVVVDVSHEDPEVKFNWYVDGVEVHNAKTKPREEQYNSTYRVVSVLTVLHQDWLNGKEYKCKVSNKALGAPIEKTISKAKGQPREPQVYTLPPSRDELTKNQVSLTCLVKGFYPSDIAVEWESNGQPENNYKTTPPVLDSDGSFFLYSKLTVDKSRWQQGNVFSCSVMHEALHNHYTQKSLSLSPGK

SEQ ID NO: 6203 - protein, 219 aa, Artificial Sequence
  source: /note="Description of Artificial Sequence: Synthetic polypeptide"
  MOD_RES (107)..(107): Any amino acid
DIVMTQTPLSLSVTPGQPASISCKSSQSLETSTGNTYLNWYLQKPGQSPQLLIYRVSKRFSGVPDRFSGSGSGTDFTLKISRVEAEDVGVYYCLQLTHVPYTFGQGXKLEIKRTVAAPSVFIFPPSDEQLKSGTASVVCLLNNFYPREAKVQWKVDNALQSGNSQESVTEQDSKDSTYSLSSTLTLSKADYEKHKVYACEVTHQGLSSPVTKSFNRGEC

SEQ ID NO: 6204 - protein, 219 aa, Artificial Sequence
  source: /note="Description of Artificial Sequence: Synthetic polypeptide"
DIVMTQTPLSLSVTPGQPASISCKSSQSLETSTGNTYLNWYLQKPGQSPQLLIYRVSKRFSGVPDRFSGSGSGTDFTLKISRVEAEDVGVYYCLQPGHYPGTFGQGTKLEIKRTVAAPSVFIFPPSDEQLKSGTASVVCLLNNFYPREAKVQWKVDNALQSGNSQESVTEQDSKDSTYSLSSTLTLSKADYEKHKVYACEVTHQGLSSPVTKSFNRGEC

SEQ ID NO: 6205 - protein, 219 aa, Artificial Sequence
  source: /note="Description of Artificial Sequence: Synthetic polypeptide"
DIVMTQTPLSLSVTPGQPASISCKSSQSLETSTGNTYLNWYLQKPGQSPQLLIYRVSKRFSGVPDRFSGSGSGTDFTLKISRVEAEDVGVYYCLQLTHEPYTFGQGTKLEIKRTVAAPSVFIFPPSDEQLKSGTASVVCLLNNFYPREAKVQWKVDNALQSGNSQESVTEQDSKDSTYSLSSTLTLSKADYEKHKVYACEVTHQGLSSPVTKSFNRGEC

SEQ ID NO: 6206 - protein, 219 aa, Artificial Sequence
  source: /note="Description of Artificial Sequence: Synthetic polypeptide"
DIVMTQTPLSLSVTPGQPASISCKSSQSLETSTGNTYLNWYLQKPGQSPQLLIYRVSKRFSGVPDRFSGSGSGTDFTLKISRVEAEDVGVYYCLQLDSYPNTFGQGTKLEIKRTVAAPSVFIFPPSDEQLKSGTASVVCLLNNFYPREAKVQWKVDNALQSGNSQESVTEQDSKDSTYSLSSTLTLSKADYEKHKVYACEVTHQGLSSPVTKSFNRGEC

SEQ ID NO: 6207 - protein, 219 aa, Artificial Sequence
  source: /note="Description of Artificial Sequence: Synthetic polypeptide"
DIVMTQTPLSLSVTPGQPASISCKSSQSLESSTGNTYLNWYLQKPGQSPQLLIYRVSKRFSGVPDRFSGSGSGTDFTLKISRVEAEDVGVYYCLQLIDYPVTFGQGTKLEIKRTVAAPSVFIFPPSDEQLKSGTASVVCLLNNFYPREAKVQWKVDNALQSGNSQESVTEQDSKDSTYSLSSTLTLSKADYEKHKVYACEVTHQGLSSPVTKSFNRGEC

SEQ ID NO: 6208 - protein, 213 aa, Homo sapiens
DIELTQPPSVSVAPGQTARISCSGDNLGDYYASWYQQKPGQAPVLVIYDDSNRPSGIPERFSGSNSGNTATLTISGTQAEDEADYYCQTWDGTLHFVFGGGTKLTVLGQPKAAPSVTLFPPSSEELQANKATLVCLISDFYPGAVTVAWKADSSPVKAGVETTTPSKQSNNKYAASSYLSLTPEQWKSHRSYSCQVTHEGSTVEKTVAPTECS

SEQ ID NO: 6209 - protein, 213 aa, Homo sapiens
DIELTQPPSVSVAPGQTARISCSGDNIGSKYVSWYQQKPGQAPVLVIYSDSERPSGIPERFSGSNSGNTATLTISGTQAEDEADYYCQSWDGSISRVFGGGTKLTVLGQPKAAPSVTLFPPSSEELQANKATLVCLISDFYPGAVTVAWKADSSPVKAGVETTTPSKQSNNKYAASSYLSLTPEQWKSHRSYSCQVTHEGSTVEKTVAPTECS

SEQ ID NO: 6210 - protein, 214 aa, Homo sapiens
DIELTQPPSVSVAPGQTARISCSGDNIGDQYAHWYQQKPGQAPVVVIYQDKNRPSGIPERFSGSNSGNTATLTISGTQAEDEADYYCATYTGFGSLAVFGGGTKLTVLGQPKAAPSVTLFPPSSEELQANKATLVCLISDFYPGAVTVAWKADSSPVKAGVETTTPSKQSNNKYAASSYLSLTPEQWKSHRSYSCQVTHEGSTVEKTVAPTECS

SEQ ID NO: 6211 - protein, 214 aa, Homo sapiens
SYELTQPPSVSVSPGQTASITCSGDNIGDQYAHWYQQKPGQSPVLVIYQDKNRPSGIPERFSGSNSGNTATLTISGTQAMDEADYYCATYTGFGSLAVFGGGTKLTVLGQPKAAPSVTLFPPSSEELQANKATLVCLISDFYPGAVTVAWKADSSPVKAGVETTTPSKQSNNKYAASSYLSLTPEQWKSHRSYSCQVTHEGSTVEKTVAPTECS

SEQ ID NO: 6212 - protein, 214 aa, Homo sapiens
DIELTQPPSVSVAPGQTARISCSGDNIGDQYAHWYQQKPGQAPVVVIYQDKNRPSGIPERFSGSNSGNTATLTISGTQAEDEADYYCSTYTFVGFTTVFGGGTKLTVLGQPKAAPSVTLFPPSSEELQANKATLVCLISDFYPGAVTVAWKADSSPVKAGVETTTPSKQSNNKYAASSYLSLTPEQWKSHRSYSCQVTHEGSTVEKTVAPTECS

SEQ ID NO: 6213 - protein, 214 aa, Homo sapiens
SYELTQPPSVSVSPGQTASITCSGDNIGDQYAHWYQQKPGQSPVVVIYQDKNRPSGIPERFSGSNSGNTATLTISGTQAMDEADYYCSTYTFVGFTTVFGGGTKLTVLGQPKAAPSVTLFPPSSEELQANKATLVCLISDFYPGAVTVAWKADSSPVKAGVETTTPSKQSNNKYAASSYLSLTPEQWKSHRSYSCQVTHEGSTVEKTVAPTECS

SEQ ID NO: 6214 - protein, 215 aa, Artificial Sequence
  source: /note="Description of Artificial Sequence: Synthetic polypeptide"
DIQMTQSPSTLSASVGDRVTITCRASQSISSWLAWYQQKPGKAPKLLIYDASSLESGVPSRFSGSGSGTEFTLTISSLQPDDFATYYCQQYLTYSRFTFGQGTKVEIKRTVAAPSVFIFPPSDEQLKSGTASVVCLLNNFYPREAKVQWKVDNALQSGNSQESVTEQDSKDSTYSLSSTLTLSKADYEKHKVYACEVTHQGLSSPVTKSFNRGEC

SEQ ID NO: 6215 - protein, 214 aa, Artificial Sequence
  source: /note="Description of Artificial Sequence: Synthetic polypeptide"
DIQMTQSPSTLSASVGDRVTITCRASQSISSWLAWYQQKPGKAPKLLIYDASSLESGVPSRFSGSGSGTEFTLTISSLQPDDFATYYCQQYSSQPYTFGQGTKVEIKRTVAAPSVFIFPPSDEQLKSGTASVVCLLNNFYPREAKVQWKVDNALQSGNSQESVTEQDSKDSTYSLSSTLTLSKADYEKHKVYACEVTHQGLSSPVTKSFNRGEC

SEQ ID NO: 6216 - protein, 215 aa, Artificial Sequence
  source: /note="Description of Artificial Sequence: Synthetic polypeptide"
DIQMTQSPSTLSASVGDRVTITCRASQSISSWLAWYQQKPGKAPKLLIYDASSLESGVPSRFSGSGSGTEFTLTISSLQPDDFATYYCQQYISYSMLTFGQGTKVEIKRTVAAPSVFIFPPSDEQLKSGTASVVCLLNNFYPREAKVQWKVDNALQSGNSQESVTEQDSKDSTYSLSSTLTLSKADYEKHKVYACEVTHQGLSSPVTKSFNRGEC

SEQ ID NO: 6217 - protein, 214 aa, Artificial Sequence
  source: /note="Description of Artificial Sequence: Synthetic polypeptide"
DIQMTQSPSTLSASVGDRVTITCRASQSISSWLAWYQQKPGKAPKLLIYDASSLESGVPSRFSGSGSGTEFTLTISSLQPDDFATYYCQQYQAFSLTFGQGTKVEIKRTVAAPSVFIFPPSDEQLKSGTASVVCLLNNFYPREAKVQWKVDNALQSGNSQESVTEQDSKDSTYSLSSTLTLSKADYEKHKVYACEVTHQGLSSPVTKSFNRGEC

SEQ ID NO: 6218 - protein, 213 aa, Artificial Sequence
  source: /note="Description of Artificial Sequence: Synthetic polypeptide"
SSELTQDPAVSVALGQTVRITCQGDSLRSYYASWYQQKPGQAPVLVIYGKNNRPSGIPDRFSGSSSGNTASLTITGAQAEDEADYYCNSRVMPHNRVFGGGTKLTVLGQPKAAPSVTLFPPSSEELQANKATLVCLISDFYPGAVTVAWKADSSPVKAGVETTTPSKQSNNKYAASSYLSLTPEQWKSHRSYSCQVTHEGSTVEKTVAPTECS

SEQ ID NO: 6219 - protein, 214 aa, Artificial Sequence
  source: /note="Description of Artificial Sequence: Synthetic polypeptide"
DIQMTQSPSTLSASVGDRVTITCRASQSISSWLAWYQQKPGKAPKLLIYDASSLESGVPSRFSGSGSGTEFTLTISSLQPDDFATYYCQQYHSYPQTFGQGTKVEIKRTVAAPSVFIFPPSDEQLKSGTASVVCLLNNFYPREAKVQWKVDNALQSGNSQESVTEQDSKDSTYSLSSTLTLSKADYEKHKVYACEVTHQGLSSPVTKSFNRGEC

SEQ ID NO: 6220 - protein, 213 aa, Artificial Sequence
  source: /note="Description of Artificial Sequence: Synthetic polypeptide"
SSELTQDPAVSVALGQTVRITCQGDSLRSYYASWYQQKPGQAPVLVIYGKNNRPSGIPDRFSGSSSGNTASLTITGAQAEDEADYYCNSLDRRGMWVFGGGTKLTVLGQPKAAPSVTLFPPSSEELQANKATLVCLISDFYPGAVTVAWKADSSPVKAGVETTTPSKQSNNKYAASSYLSLTPEQWKSHRSYSCQVTHEGSTVEKTVAPTECS

SEQ ID NO: 6221 - protein, 214 aa, Artificial Sequence
  source: /note="Description of Artificial Sequence: Synthetic polypeptide"
DIQMTQSPSTLSASVGDRVTITCRASQSISSWLAWYQQKPGKAPKLLIYDASSLESGVPSRFSGSGSGTEFTLTISSLQPDDFATYYCQQLNSYPQTFGQGTKVEIKRTVAAPSVFIFPPSDEQLKSGTASVVCLLNNFYPREAKVQWKVDNALQSGNSQESVTEQDSKDSTYSLSSTLTLSKADYEKHKVYACEVTHQGLSSPVTKSFNRGEC

SEQ ID NO: 6222 - protein, 214 aa, Artificial Sequence
  source: /note="Description of Artificial Sequence: Synthetic polypeptide"
DIQMTQSPSTLSASVGDRVTITCRASQSISSWLAWYQQKPGKAPKLLIYDASSLESGVPSRFSGSGSGTEFTLTISSLQPDDFATYYCQQVNSYPQTFGQGTKVEIKRTVAAPSVFIFPPSDEQLKSGTASVVCLLNNFYPREAKVQWKVDNALQSGNSQESVTEQDSKDSTYSLSSTLTLSKADYEKHKVYACEVTHQGLSSPVTKSFNRGEC

SEQ ID NO: 6223 - protein, 213 aa, Artificial Sequence
  source: /note="Description of Artificial Sequence: Synthetic polypeptide"
DIQMTQSPSTLSASVGDRVTITCRASQSISSWLAWYQQKPGKAPKLLIYDASSLESGVPSRFSGSGSGTEFTLTISSLQPDDFATYYCQQQHSYYTFGQGTKVEIKRTVAAPSVFIFPPSDEQLKSGTASVVCLLNNFYPREAKVQWKVDNALQSGNSQESVTEQDSKDSTYSLSSTLTLSKADYEKHKVYACEVTHQGLSSPVTKSFNRGEC

SEQ ID NO: 6224 - protein, 211 aa, Artificial Sequence
  source: /note="Description of Artificial Sequence: Synthetic polypeptide"
DIVLTQSPSFLSASVGDRVTITCKASQNVGTNVAWFQQKPGKSPKALIYSASYRYSGVPDRFTGSGSGTEFTLTISSLQPEDFAAYFCQQYNNFPYTFGGGTKLEIKRAPSVFIFPPSDEQLKSGTASVVCLLNNFYPREAKVQWKVDNALQSGNSQESVTEQDSKDSTYSLSSTLTLSKADYEKHKVYACEVTHQGLSSPVTKSFNRGEC

SEQ ID NO: 6225 - protein, 103 aa, Artificial Sequence
  source: /note="Description of Artificial Sequence: Synthetic polypeptide"
APSVFIFPPSDEQLKSGTASVVCLLNNFYPREAKVQWKVDNALQSGNSQESVTEQDSKDSTYSLSSTLTLSKADYEKHKVYACEVTHQGLSSPVTKSFNRGEC

SEQ ID NO: 6226 - protein, 214 aa, Artificial Sequence
  source: /note="Description of Artificial Sequence: Synthetic polypeptide"
DIVLTQSPKFMSTSVGDRVSVTCKASQNVGTNVAWFLQKPGQSPKALIYSASYRYSGVPDRFTGSGSGTDFTLTISNVQSEDLAEYFCQQYNNFPYTFGGGTKLEIKRTVAAPSVFIFPPSDEQLKSGTASVVCLLNNFYPREAKVQWKVDNALQSGNSQESVTEQDSKDSTYSLSSTLTLSKADYEKHKVYACEVTHQGLSSPVTKSFNRGEC

SEQ ID NO: 6227 - protein, 212 aa, Artificial Sequence
  source: /note="Description of Artificial Sequence: Synthetic polypeptide"
SYELTQPPSVSVSPGQTASITCSGDKLGDKYACWYQQKPGQSPVLVIYQDSRRPSGIPERFSGSNSGNTATLTISGTQAMDEADYYCQAWASSTVVFGGGTKLTVLGQPKAAPSVTLFPPSSEELQANKATLVCLISDFYPGAVTVAWKADSSPVKAGVETTTPSKQSNNKYAASSYLSLTPEQWKSHRSYSCQVTHEGSTVEKTVAPTECS

SEQ ID NO: 6228 - protein, 212 aa, Artificial Sequence
  source: /note="Description of Artificial Sequence: Synthetic polypeptide"
SYELTQPPSVSVSPGQTASITCSGDKLGDKYAAWYQQKPGQSPVLVIYQDSRRPSGIPERFSGSNSGNTATLTISGTQAMDEADYYCQAWASSTVVFGGGTKLTVLGQPKAAPSVTLFPPSSEELQANKATLVCLISDFYPGAVTVAWKADSSPVKAGVETTTPSKQSNNKYAASSYLSLTPEQWKSHRSYSCQVTHEGSTVEKTVAPTECS

SEQ ID NO: 6229 - protein, 213 aa, Artificial Sequence
  source: /note="Description of Artificial Sequence: Synthetic polypeptide"
AIQLTQSPSSLSASVGDRVTITCRASQGISSALAWYQQKPGKAPKLLIYDASNLESGVPSRFSGSGSGTDFTLTISSLQPEDFATYYCQQFNSYPTFGQGTKVEIKRTVAAPSVFIFPPSDEQLKSGTASVVCLLNNFYPREAKVQWKVDNALQSGNSQESVTEQDSKDSTYSLSSTLTLSKADYEKHKVYACEVTHQGLSSPVTKSFNRGEC

SEQ ID NO: 6230 - protein, 220 aa, Artificial Sequence
  source: /note="Description of Artificial Sequence: Synthetic polypeptide"
DIVMTQSPDSLAVSLGEKVTINCKSSQSLLNSGNQKNYLTWHQQKPGQPPKLLIYWTSTRESGVPDRFSGSGSGTDFTLTISSLQAEDVAVYYCQNDYTYPLTFGGGTKVEIKRTVAAPSVFIFPPSDEQLKSGTASVVCLLNNFYPREAKVQWKVDNALQSGNSQESVTEQDSKDSTYSLSSTLTLSKADYEKHKVYACEVTHQGLSSPVTKSFNRGEC

SEQ ID NO: 6231 - protein, 219 aa, Artificial Sequence
  source: /note="Description of Artificial Sequence: Synthetic polypeptide"
DIVMTQSPLSLTVTPGEPASISCRSSQSLLYSNGYNYLDWYLQKPGQSPQVLISLGSNRASGVPDRFSGSGSGTDFTLKISRVEAEDVGVYYCMQARQTPFTFGPGTKVDIRRTVAAPSVFIFPPSDEQLKSGTASVVCLLNNFYPREAKVQWKVDNALQSGNSQESVTEQDSKDSTYSLSSTLTLSKADYEKHKVYACEVTHQGLSSPVTKSFNRGEC

SEQ ID NO: 6232 - protein, 215 aa, Artificial Sequence
  source: /note="Description of Artificial Sequence: Synthetic polypeptide"
EIVLTQSPGTLSLSPGERATLSCRASQSVKNSSLAWYQQKPGQAPRLLIYTASSRATGIPDRFSGSGSGTDFTLTISRLEPEDFAVYYCQQSSAPPWTFGQGTKVEIKRTVAAPSVFIFPPSDEQLKSGTASVVCLLNNFYPREAKVQWKVDNALQSGNSQESVTEQDSKDSTYSLSSTLTLSKADYEKHKVYACEVTHQGLSSPVTKSFNRGEC

SEQ ID NO: 6233 - protein, 220 aa, Artificial Sequence
  source: /note="Description of Artificial Sequence: Synthetic polypeptide"
DIVMTQSPDSLAVSLGERATINCKSSQSVLYSSNNKNYLAWYQQKPGQPPKLLIYWASTRESGVPDRFSGSGSGTDFTLTISSLQAEDVAVYYCQQYYSTPLTFGQGTKVEIKRTVAAPSVFIFPPSDEQLKSGTASVVCLLNNFYPREAKVQWKVDNALQSGNSQESVTEQDSKDSTYSLSSTLTLSKADYEKHKVYACEVTHQGLSSPVTKSFNRGEC

SEQ ID NO: 6234 - protein, 214 aa, Artificial Sequence
  source: /note="Description of Artificial Sequence: Synthetic polypeptide"
DIQMTQSPSSLSASVGDRVTITCRASQSISSYLNWYQQKPGKAPKLLIYAASSLQSGVPSRFSGSGSGTDFTLTISSLQPEDFATYYCQQSYSTPLTFGQGTKVEIKRTVAAPSVFIFPPSDEQLKSGTASVVCLLNNFYPREAKVQWKVDNALQSGNSQESVTEQDSKDSTYSLSSTLTLSKADYEKHKVYACEVTHQGLSSPVTKSFNRGEC

SEQ ID NO: 6235 - protein, 212 aa, Artificial Sequence
  source: /note="Description of Artificial Sequence: Synthetic polypeptide"
SYELTQPPSVSVSPGQTASITCSGDKLGDKYVCWYQQKPGQSPVVVIYQDSKRPSGIPERFSGSNSGNTATLTISGTQAMDEAYYYCQAWVSSTVVFGGGTKLTVLGQPKAAPSVTLFPPSSEELQANKATLVCLISDFYPGAVTVAWKADSSPVKAGVETTTPSKQSNNKYAASSYLSLTPEQWKSHRSYSCQVTHEGSTVEKTVAPTECS

SEQ ID NO: 6236 - protein, 212 aa, Artificial Sequence
  source: /note="Description of Artificial Sequence: Synthetic polypeptide"
SYELTQPPSVSVSPGQTASIICSGDKLGDKYVCWYQQKPGQSPVVVIYHDNKRPSGIPERFSGSNSGNTATLTISGTQAMDEADYYCQVWDSSTVVFGGGTKLTVLGQPKAAPSVTLFPPSSEELQANKATLVCLISDFYPGAVTVAWKADSSPVKAGVETTTPSKQSNNKYAASSYLSLTPEQWKSHRSYSCQVTHEGSTVEKTVAPTECS

SEQ ID NO: 6237 - protein, 216 aa, Artificial Sequence
  source: /note="Description of Artificial Sequence: Synthetic polypeptide"
QSALTQPPSASGSPGQSVTISCTGTSSDVGGYNYVSWYQQHPGKAPKLMIYEVSKRPSGVPDRFSGSKSGNTASLTVSGLQAEDEADYYCSSYAGSNNLVFGGGTKLTVLGQPKAAPSVTLFPPSSEELQANKATLVCLISDFYPGAVTVAWKADSSPVKAGVETTTPSKQSNNKYAASSYLSLTPEQWKSHRSYSCQVTHEGSTVEKTVAPTECS

SEQ ID NO: 6238 - protein, 212 aa, Artificial Sequence
  source: /note="Description of Artificial Sequence: Synthetic polypeptide"
SYELTQPPSVSVSPGQTASITCSGDKLGDKYVCWYQQKPGQSPVLVIYQDSKRPSGIPERFSGSNSGNTATLTISGTQAMDEADYYCQAWVSSTVVFGGGTKLTVLGQPKAAPSVTLFPPSSEELQANKATLVCLISDFYPGAVTVAWKADSSPVKAGVETTTPSKQSNNKYAASSYLSLTPEQWKSHRSYSCQVTHEGSTVEKTVAPTECS

SEQ ID NO: 6239 - protein, 212 aa, Artificial Sequence
  source: /note="Description of Artificial Sequence: Synthetic polypeptide"
SYELTQPPSVSVSPGQTASITCSGDKLGDKYVSWYQQKPGQSPVLVIYQDSKRPSGIPERFSGSNSGNTATLTISGTQAMDEADYYCQAWVSSTVVFGGGTKLTVLGQPKAAPSVTLFPPSSEELQANKATLVCLISDFYPGAVTVAWKADSSPVKAGVETTTPSKQSNNKYAASSYLSLTPEQWKSHRSYSCQVTHEGSTVEKTVAPTECS

SEQ ID NO: 6240 - protein, 212 aa, Artificial Sequence
  source: /note="Description of Artificial Sequence: Synthetic polypeptide"
SYELTQPPSVSVSPGQTASITCSGDKLGDKYVSWYQQKPGQSPVVVIYQDSKRPSGIPERFSGSNSGNTATLTISGTQAMDEAYYYCQAWVSSTVVFGGGTKLTVLGQPKAAPSVTLFPPSSEELQANKATLVCLISDFYPGAVTVAWKADSSPVKAGVETTTPSKQSNNKYAASSYLSLTPEQWKSHRSYSCQVTHEGSTVEKTVAPTECS

SEQ ID NO: 6241 - protein, 234 aa, Mus musculus
MESQIQVFVFVFLWLSGVDGDIVMTQSHKFMSTSVGDRVSITCKASQDVRNTVAWYQQKTGQSPKLLIYSSSYRNTGVPDRFTGSGSGTDFTFTISSVQAEDLAVYFCQQHYITPYTFGGGTKLEIKRADAAPTVSIFPPSSEQLTSGGASVVCFLNNFYPKDINVKWKIDGSERQNGVLNSWTDQDSKDSTYSMSSTLTLTKDEYERHNSYTCEATHKTSTSPIVKSFNRNEC

SEQ ID NO: 6242 - protein, 213 aa, Artificial Sequence
  source: /note="Description of Artificial Sequence: Synthetic polypeptide"
SSELTQDPAVSVALGQTVRITCQGDSLRSYYASWYQQKPGQAPVLVIYGKNNRPSGIPDRFSGSSSGNTASLTITGAQAEDEADYYCNSPQTSGSAVFGGGTKLTVLGQPKAAPSVTLFPPSSEELQANKATLVCLISDFYPGAVTVAWKADSSPVKAGVETTTPSKQSNNKYAASSYLSLTPEQWKSHRSYSCQVTHEGSTVEKTVAPTECS

SEQ ID NO: 6243 - protein, 214 aa, Artificial Sequence
  source: /note="Description of Artificial Sequence: Synthetic polypeptide"
EIVMTQSPATLSVSPGERATLSCKASQNVGTNVAWYQQKPGQAPRLLIYSASYRYSGIPARFSGSGSGTEFTLTISSLQSEDFAVYYCQQYNTDPLTFGGGTKVEIKRTVAAPSVFIFPPSDEQLKSGTASVVCLLNNFYPREAKVQWKVDNALQSGNSQESVTEQDSKDSTYSLSSTLTLSKADYEKHKVYACEVTHQGLSSPVTKSFNRGEC

SEQ ID NO: 6244 - protein, 213 aa, Artificial Sequence
  source: /note="Description of Artificial Sequence: Synthetic polypeptide"
EIVLTQSPGTLSLSPGERATLSCRASQSVSRSYLAWYQQKPGQAPRLLIIGASTRATGIPDRFSGSGSGTDFTLTISRLEPEDFAVYYCQQGQVIPPTFGQGTKVEIKSSASTKGPSVFPLAPSSKSTSGGTAALGCLVKDYFPEPVTVSWNSGALTSGVHTFPAVLQSSGLYSLSSVVTVPSSSLGTQTYICNVNHKPSNTKVDKKVEPKSC

SEQ ID NO: 6245 - protein, 214 aa, Artificial Sequence
  source: /note="Description of Artificial Sequence: Synthetic polypeptide"
DILLTQSPVILSVSPGERVSFSCRASQSIGTNIHWYQQRTNGSPRLLIKYASESISGIPSRFSGSGSGTDFTLSINSVESEDIADYYCQQNNNWPTTFGAGTKLELKRTVAAPSVFIFPPSDEQLKSGTASVVCLLNNFYPREAKVQWKVDNALQSGNSQESVTEQDSKDSTYSLSSTLTLSKADYEKHKVYACEVTHQGLSSPVTKSFNRGEC

SEQ ID NO: 6246 - protein, 214 aa, Artificial Sequence
  source: /note="Description of Artificial Sequence: Synthetic polypeptide"
DIQMTQSPSSLSASVGDRVTITCQASQDISNYLNWYQQKPGKAPKLLIYDASNLETGVPSRFSGSGSGTDFTFTISSLQPEDIATYFCQHFDHLPLAFGGGTKVEIKRTVAAPSVFIFPPSDEQLKSGTASVVCLLNNFYPREAKVQWKVDNALQSGNSQESVTEQDSKDSTYSLSSTLTLSKADYEKHKVYACEVTHQGLSSPVTKSFNRGEC

SEQ ID NO: 6247 - protein, 219 aa, Artificial Sequence
  source: /note="Description of Artificial Sequence: Synthetic polypeptide"
DIQMTQSPSSLSASVGDRVTITCRSSQNIVHSNGNTYLDWYQQTPGKAPKLLIYKVSNRFSGVPSRFSGSGSGTDFTFTISSLQPEDIATYYCFQYSHVPWTFGQGTKLQITRTVAAPSVFIFPPSDEQLKSGTASVVCLLNNFYPREAKVQWKVDNALQSGNSQESVTEQDSKDSTYSLSSTLTLSKADYEKHKVYACEVTHQGLSSPVTKSFNRGEC

SEQ ID NO: 6248 - protein, 214 aa, Artificial Sequence
  source: /note="Description of Artificial Sequence: Synthetic polypeptide"
DIQLTQSPSFLSASVGDRVTITCKASQNVDTNVAWYQQKPGKAPKALIYSASYRYSGVPSRFSGSGSGTDFTLTISSLQPEDFATYYCQQYNNYPFTFGQGTKLEIKRTVAAPSVFIFPPSDEQLKSGTASVVCLLNNFYPREAKVQWKVDNALQSGNSQESVTEQDSKDSTYSLSSTLTLSKADYEKHKVYACEVTHQGLSSPVTKSFNRGEC

SEQ ID NO: 6249 - protein, 213 aa, Artificial Sequence
  source: /note="Description of Artificial Sequence: Synthetic polypeptide"
DIQMTQSPSSLSASLGGKVTITCKASQDIKKYIAWYQHKPGKGPRLLIHYTSTLQPGIPSRFSGSGSGRDYSFSISNLEPVDIATYYCLQYDNLLTFGAGTKLELKRADAAPTVSIFPPSSEQLTSGGASVVCFLNNFYPRDINVKWKIDGSERQNGVLNSWTDQDSKDSTYNMSSTLTLTKDEYERHNSYTCEATHKTSTSPIVKSFNRNEC

SEQ ID NO: 6250 - protein, 214 aa, Artificial Sequence
  source: /note="Description of Artificial Sequence: Synthetic polypeptide"
DIVMTQSHKFMSTLVGDRVSITCKASQDVSTTVAWYQQKPGQSPKLLIYSASYRYTGVPDRFTGSGSGTDFTFTISSVQAEDLAVYYCQQHYSIPRTFGGGTKLEIKRADAAPTVSIFPPSSEQLTSGGASVVCFLNNFYPRDINVKWKIDGSERQNGVLNSWTDQDSKDSTYSMSSTLTLTKDEYERHNSYTCEATHKTSTSPIVKSFNRNEC

SEQ ID NO: 6251 - protein, 213 aa, Artificial Sequence
  source: /note="Description of Artificial Sequence: Synthetic polypeptide"
DIQMTQSPSSLSASLGGKVTITCKASQDIKKYIAWYQHKPGKGPRLLIHYTSTLQPGIPSRFSGSGSGRDYSFSISNLEPVDIATYYCLQYDNLLTFGAGTKLELKRTVAAPSVFIFPPSDEQLKSGTASVVCLLNNFYPREAKVQWKVDNALQSGNSQESVTEQDSKDSTYSLSSTLTLSKADYEKHKVYACEVTHQGLSSPVTKSFNRGEC

SEQ ID NO: 6252 - protein, 214 aa, Artificial Sequence
  source: /note="Description of Artificial Sequence: Synthetic polypeptide"
DIVMTQSHKFMSTLVGDRVSITCKASQDVSTTVAWYQQKPGQSPKLLIYSASYRYTGVPDRFTGSGSGTDFTFTISSVQAEDLAVYYCQQHYSIPRTFGGGTKLEIKRTVAAPSVFIFPPSDEQLKSGTASVVCLLNNFYPREAKVQWKVDNALQSGNSQESVTEQDSKDSTYSLSSTLTLSKADYEKHKVYACEVTHQGLSSPVTKSFNRGEC

SEQ ID NO: 6253 - protein, 234 aa, Mus musculus
MAWISLILSLLALSSGAISQAVVTQESALTTSPGETVTLTCRSSSGPVTTSNYANWVQERPDHLFTNLIGGTNNRAPGVPARFSGSLIGDKAALTITGAQTEDEAIYFCALWYSNHLVFGGGTKLTVLGQPKSSPSVTLFPPSSEELETNKATLVCTITDFYPGVVTVDWKVDGTPVTQGMETTQPSKQSNNKYMASSYLTLTARAWERHSSYSCQVTHEGHTVEKSLSRADCS

SEQ ID NO: 6254 - protein, 217 aa, Artificial Sequence
  source: /note="Description of Artificial Sequence: Synthetic polypeptide"
DIQMTQSPSSLSASVGDRVTITCQSSQSVYKNNDLSWYQQKPGKAPKLLIYQASKLASGVPSRFSGSGSGTDFTLTISSLQPEDFATYYCAGGYTASIYAFGQGTKVEIKRTVAAPSVFIFPPSDEQLKSGTASVVCLLNNFYPREAKVQWKVDNALQSGNSQESVTEQDSKDSTYSLSSTLTLSKADYEKHKVYACEVTHQGLSSPVTKSFNRGEC

SEQ ID NO: 6255 - protein, 241 aa, Artificial Sequence
  source: /note="Description of Artificial Sequence: Synthetic polypeptide"
EPKSCDKTHTCPPCPAPELLGGPSVFLFPPKPKDTLMISRTPEVTCVVVDVSHEDPEVKFNWYVDGVEVHNAKTKPREEQYNSTYRVVSVLTVLHQDWLNGKEYKCKVSNKALPAPIEKTISKAKGQPREPQVYTLPPSRDELTKNQVSLTCLVKGFYPSDIAVEWESNGQPENNYKTTPPVLDSDGSFFLYSKLTVDKSRWQQGNVFSCSVMHEALHNHYTQKSLSLSPGKKDPKAAAIE

SEQ ID NO: 6256 - protein, 241 aa, Artificial Sequence
  source: /note="Description of Artificial Sequence: Synthetic polypeptide"
QVQLQQSGAELVRPGASVTLSCKASGYTFTDYEMHWVKKIPVYGLEWIGAIDPETYGTAYNQKFKGKATLTADKSSSTAYMEVRSLTSEDSAVYYCTRGGYYGSDFDYWGQGTTLTVSSGGGGSGGGGSGGGGSNIVMTQSPKSMSMSVGERVTLTCKASENVVTYVSWYQQKPEQSPKLLIYGASNRYTGVPDRFTGSGSATDFTLTISSVQAEDLADYHCGQGYSDPYTFGGGTKLEIK

SEQ ID NO: 6257 - protein, 246 aa, Artificial Sequence
  source: /note="Description of Artificial Sequence: Synthetic polypeptide"
QVQLEQSGAELVRPGASVTLSCKASGYTFTDYEMHWVKQTPVHGLEWIGAIDPETGGTAYNQKFKGKAILTADKSSSTAYMELRSLTSEDSAVYYCTRGNYYGSDYDYWGQGTTLTVSSGGGGSGGGGSGGGGSDVVMTQTPLTLSVTIGQPASISCKSSQSLLDSDGETYLNWLLKRPGQSPKRLIYLVSKLDSGVPDRFTGSGSGTDFTLKISRVEAEDLGVYYCWQGTHFPQTFGGGTKLEIK

SEQ ID NO: 6258 - protein, 233 aa, Artificial Sequence
  source: /note="Description of Artificial Sequence: Synthetic polypeptide"
QVQLQQSGAELVRPGASVTLSCKASGYTFTDYEMHWVKKIPVYGLEWIGAIDPETYGTAYNQKFKGKATLTADKSSSTAYMEVRSLTSEDSAVYYCTRGGYYGSDFDYWGQGGGGSGGGGSGGGGSDIQMNQSPSSLSASLGDTITITCHASQNINVWLSWYQQKPGNIPKLLIYKASNLHTGVPSRFSGSGSGTGFTLTISSLQPEDIATYYCQQGQSYPWTFGGGTKLEIK

SEQ ID NO: 6259 - protein, 242 aa, Artificial Sequence
  source: /note="Description of Artificial Sequence: Synthetic polypeptide"
QVQLQQSGAEVKKPGSSVKVSCKASGYTFTDYEISWVRQAPGQGLEWMGGIDPETYGTNYAQKFQGRVTITADESTSTAYMELSSLRSEDTAVYYCTRGGYYGSDFDYWWGQGTMVTVSSGGGGSGGGGSGGGGSEIVLTQSPATLSLSPGERATLSCRASENVVTYAWYQQKPGQAPRLLIYGASRATGIPARFSGSGSGTDFTLTISSLEPEDFAVYYCGQGYSDPYTFFGQGTKLEIKR

SEQ ID NO: 6260 - protein, 243 aa, Artificial Sequence
  source: /note="Description of Artificial Sequence: Synthetic polypeptide"
QVQLQQSGAEVKKPGSSVKVSCKASGYTFTDYEISWVRQAPGQGLEWMGGIDPETGGTNYAQKFQGRVTITADESTSTAYMELSSLRSEDTAVYYCTRGNYYGSDYDYWWGQGTMVTVSSGGGGSGGGGSGGGGSEIVLTQSPATLSLSPGERATLSCRASQSLLDSDAWYQQKPGQAPRLLIYLVSRATGIPARFSGSGSGTDFTLTISSLEPEDFAVYYCWQGTHFPQTFFGQGTKLEIKR

SEQ ID NO: 6261 - protein, 242 aa, Artificial Sequence
  source: /note="Description of Artificial Sequence: Synthetic polypeptide"
QVQLQQSGAEVKKPGSSVKVSCKASGYTFTDYEISWVRQAPGQGLEWMGGIDPETYGTNYAQKFQGRVTITADESTSTAYMELSSLRSEDTAVYYCTRGGYYGSDFDYWWGQGTMVTVSSGGGGSGGGGSGGGGSEIVLTQSPATLSLSPGERATLSCRASQNINVWAWYQQKPGQAPRLLIYKASRATGIPARFSGSGSGTDFTLTISSLEPEDFAVYYCQQGQSYPWTFFGQGTKLEIKR

SEQ ID NO: 6262 - protein, 264 aa, Artificial Sequence
  source: /note="Description of Artificial Sequence: Synthetic polypeptide"
QSVKESEGRLVTPGTPLTLTCTVSGFSLSSNSVGWVRQAPGKGLEWIGIISSSGNRYYASWAKGRFTISKTSTTVDLKITSPTTEDTATYFCGGDPVSWYGDIWGPGTLVTVSSGGGGSGGGGSGGGGSLLVTSLLLCELPHPAFLLIPDTELVLTQTPSSVSAAVGGTVTINCQSSPSLYKNNYLSWYQQKPGQPPKLLIYSASTLASGVPSRFKGSGSGTEYTLTISGVQCDDAATYYCLGGYSLSSDSPRAFGGGTEVVVK

SEQ ID NO: 6263 - protein, 267 aa, Artificial Sequence
  source: /note="Description of Artificial Sequence: Synthetic polypeptide"
QSVKESEGRLVTPGTPLTLTCTVSGFSLSTYAMSWVRQAPEKGLEWIGIIYATAETYYATWARGRFTISKTSTTVDLKITSPATEDTATYFCARLNGDGSGTYAYDIWGPGTLVTVSSGGGGSGGGGSGGGGSLLVTSLLLCELPHPAFLLIPDTELVMTQTPSPVSAAVGGTVTINCQASQSISSSYLSWYQQKPGQPPKLLIYKASTRPSGVSSRFKGSGSGTQFTLTISGVQCADAATYYCLYGYYIDSGADNSFGGGTEVVVK

SEQ ID NO: 6264 - protein, 246 aa, Artificial Sequence
  source: /note="Description of Artificial Sequence: Synthetic polypeptide"
QVQLQQSGAEVKKPGSSVKVSCKASGFSLSSNSISWVRQAPGQGLEWMGGISSSGNRNYAQKFQGRVTITADESTSTAYMELSSLRSEDTAVYYCGGDPVSWYGDIWWGQGTMVTVSSGGGGSGGGGSGGGGSEIVLTQSPATLSLSPGERATLSCRASPSLYKNNYAWYQQKPGQAPRLLIYSASRATGIPARFSGSGSGTDFTLTISSLEPEDFAVYYCLGGYSLSSDSPRAFFGQGTKLEIKR

SEQ ID NO: 6265 - protein, 249 aa, Artificial Sequence
  source: /note="Description of Artificial Sequence: Synthetic polypeptide"
QVQLQQSGAEVKKPGSSVKVSCKASGFSLSTYAISWVRQAPGQGLEWMGGIYATAETNYAQKFQGRVTITADESTSTAYMELSSLRSEDTAVYYCARLNGDGSGTYAYDIWWGQGTMVTVSSGGGGSGGGGSGGGGSEIVLTQSPATLSLSPGERATLSCRASQSISSSYAWYQQKPGQAPRLLIYKASRATGIPARFSGSGSGTDFTLTISSLEPEDFAVYYCLYGYYIDSGADNSFFGQGTKLEIKR

SEQ ID NO: 6266 - protein, 243 aa, Artificial Sequence
  source: /note="Description of Artificial Sequence: Synthetic polypeptide"
EVQLVQSGVEGKKPEAPVKVSCKASGYTFTNYYMHWVQQAPGKGLEWMGLVDPEDGETIYAEKFQGRVTITADTSTDTAYMELSSLRSEDTAVYYCARDPVLLWDGMDVWGQGTTVTVSSGGGGSGGGASSGGGSDIQMTQSPSSLSASVGDRVTITCRASQTISRYLNWYQQKPGKAPKLLIYAASSLQSGVSSRFSGSGSGTEFTLTISSLQPEDFATYFCQQTYSPPITFGQGTRLEIKR

SEQ ID NO: 6267 - protein, 251 aa, Artificial Sequence
  source: /note="Description of Artificial Sequence: Synthetic polypeptide"
AAQAAQVQLQQSGPGLVKPSQTLSLTCAISGDSVSSNSAAWNWIRQSPSRGLEWLGRTYYRSKWYNDYAVSVKSRITINPDASKNQFSLQLNSVTPEDTAVYYCSGSYSTFDIWGQGTMVTVSSGGGGSGGGASSGGGSNFMLTQPHSVSGSPGKTVTLSCTCSGGNIADAYVQWYQQRPGSAPRIVIYEDKQRPSGVPDRFSGSIDSSSNSASLTISGLRTEDEADYYCQSYDTNNFWVFGGGTKLTVLG

SEQ ID NO: 6268 - protein, 253 aa, Artificial Sequence
  source: /note="Description of Artificial Sequence: Synthetic polypeptide"
QVQLQQSGAEVKKPGSSVKVSCKASGGTFSSYAISWVRQAPGQGLEWMGGIIPIFGTANYAQKFQGRVTITADESTSTAYMELSSLRSEDTAVYYCASTIPYYGDYVEDYYGMDVWGQGTTVTVSSGGGGSGGGASSGGGSNFMLTQPHSVSESPGRTVSISCTRGSGSIADDYVQWYQQRPGGSPTIVIYEDNQRPSGVPDRFSGSIDTSSNSASLTISGLTTEDEAVYYCQSYDYRDHWVFGGGTQLTVLG

SEQ ID NO: 6269 - protein, 244 aa, Artificial Sequence
  source: /note="Description of Artificial Sequence: Synthetic polypeptide"
QAAQVQLVESGGGLVQPGGSLRLSCAASGFTFSSYAMSWVRQAPGKGLEWVSVIYSGGSTYYADSVKGRFTMSRDNSKNTLYLQMNSLRAEDTAVYYCARVGLQSGAFDIWGQGTTVTVSSGGGGSGGGASGGGGSDIQMTQSPSSLSASVGDRVTITCQASQDIYTYLNWYQQKPGKAPMLVIHDTSNLETGAPSRFSGGGSGTDFSFTISSLQPEDFATYYCQQYDALPFTFGQGTKLEIKR

SEQ ID NO: 6270 - protein, 247 aa, Artificial Sequence
  source: /note="Description of Artificial Sequence: Synthetic polypeptide"
EVQLVQFGAEVKKPGSSVKVSCKASGGTFSSYAISWVQQAPGKGLEWMGLVDPEDGETIYAEKFQGRVTMTRDTSTSTVYMELSSLRSEDTAVYYCARDPGGEGLGAIDGFDIWGQGTTVTVSSGGGGSGGGASGGGGSDIQMTQSPSSLSASVGDRVTIACRASQTISRYLNWYQQKPGKAPKLLIYAASSLQSGVSSRFSGSGSGTEFTLTISSLQPEDFATYFCQQTYSPPITFGQGTRLEIKR

SEQ ID NO: 6271 - protein, 256 aa, Artificial Sequence
  source: /note="Description of Artificial Sequence: Synthetic polypeptide"
QVQLVESGGGVVQPGGSLRLSCAASGFTFSSYAMHWVRQAPGKGLEWVAVISYDGSNKYYADSVKGRFTISRDNSKNTLYLQMNSLRAEDTAVYYCARAWPEYSSSADAFDIWGQGTMVTVSSGGGGSGGGASGGGGSDIQLTQSPSSLSASVGDRVTITCQASQDIDNYLNWFQQKPGKPPKLLISDASSLETGVPSRFSGSGSGTDFTFTISSLQPEDIATYYCQQYDNFPITFGQGTKLEIKRGQAGQGPDKT

SEQ ID NO: 6272 - protein, 238 aa, Artificial Sequence
  source: /note="Description of Artificial Sequence: Synthetic polypeptide"
EVQLVESGGALVQPGGSLRLSCAASGFTFTNYGIIWVRQAPGKGPEWVSGVSGNAVHTYYADSVKGRFTISRDNSKNMVYLQMNSLRSDDTAVYYCARGWDLDYWGQGTLVTVSSGGGGSGGGASGGGGSEIVLTQSPSSLSASVGDRVTITCQASQDISNYLNWYQQKPGKAPKLLIYDASNLETGVPSRFIGGGSGTDFTLTISSLQPEDFATYYCQQHDSLPLSFGGGTKLEIKR

SEQ ID NO: 6273 - protein, 242 aa, Artificial Sequence
  source: /note="Description of Artificial Sequence: Synthetic polypeptide"
QLQLQESGPGLVKPSETLSLTCVVFDYSISSGYYWGWIRQPPGKGLEWIGSINYSGNTYYNPSLKSRVTISVDTSKNQFSLNLRSVTAADTAVYYCARSVDTAPGFDYWGQGTLVTVSSGGGGSGGGASSGGGSDIQMTQSPSFLSASVGDRVTITCRASQGISSYLAWYQQKPGKAPKLLIYDASNLETGVPSRFSGSGSGTDFTFTISSLQPEDIATYYCQQYDNLPLTFGGGTKLDIKR

SEQ ID NO: 6274 - protein, 244 aa, Artificial Sequence
  source: /note="Description of Artificial Sequence: Synthetic polypeptide"
EVQLVQSGAEVKKPGATVKISCKVSGYTFTDYYMHWVQQAPGKGLEWMGLVDPEDGETIYAEKFQGRVTITADTSTDTAYMELSSLRSEDTAVYYCATERAVAGPGAFDIWGQGTMVTVSSGGGGSGGGASGGGGSEIVLTQSPSSLSASVGDRVTIACRASQTISRYLNWYQQKPGKAPKLLIYAASSLQSGVSSRFSGSGSGTEFTLTISSLQPEDFATYFCQQTYSPPITFGQGTRLEIKR

SEQ ID NO: 6275 - protein, 242 aa, Artificial Sequence
  source: /note="Description of Artificial Sequence: Synthetic polypeptide"
QVQLVETGGGVVQPGTSLRLSCAGSGFTFSESGMHWVRQAPGKGLEWMALILNDGISNFYADSVKGRFTISRDNSKNTLYLQMNSLRAEDTAVYYCASSLGGNGAFDIWGQGTMVTVSSGGGGSGGGASSGGGSDIQLTQSPSSLSASVGDRVTITCQASQDISNYLNWYQQKPGKAPKLLIYDASNLEIGVPSRFSGSGSGTDFTFTISSLQPEDIATYYCQQHDNLPLSFGGGTKLDIKR

SEQ ID NO: 6276 - protein, 366 aa, Artificial Sequence
  source: /note="Description of Artificial Sequence: Synthetic polypeptide"
QSLEESGGDLVKPGASLTLTCTASGFSFSSGYDMCWVRQAPGKGLEWIACIDTDNDATYYASWAKGRFTISKPSSTTVLLQITSLTAADTATYFCATTHGDYVAFKLWGPGTLVTVSGGGSGGGSGGGSGGGSQVLTQTASSVSAAVGGTVTINCQSSQSVYKNNDLSWYQQKPRQPPKLLIYQASKLASGVPSRFKGSGSGTQFTLTIGDLESDDGATYYCAGGYTASIYAFGGGTEVVGSGSSGQPREPQVYTLPPSREEMTKNQVSLTCLVKGFYPSDIAVEWESQGSPENNYKTTPPVLDSDGSFFLYSKLTVDKSRWQQGNVFSCSVMHEALHNHYTQKSLSLSPGSSSSSSAWSHPQFEK

SEQ ID NO: 6277 - protein, 371 aa, Artificial Sequence
  source: /note="Description of Artificial Sequence: Synthetic polypeptide"
EVQLVESGGGLVQPGGSLRLSCAASGFSFSSGYDMCWVRQAPGKGLEWVACIDTDNDATYYASWAKGRFTISKDSSKNTLYLQMNSLRAEDTAVYYCARTHGDYVAFKLWGQGTLVTVSGGGSGGGSGGGSGGGSDIQMTQSPSSLSASVGDRVTITCQSSQSVYKNNDLSWYQQKPGKAPKLLIYQASKLASGVPSRFSGSGSGTDFTLTISSLQPEDFATYYCAGGYTASIYAFGQGTKVEIKGSGSSGQPREPQVYTLPPSREEMTKNQVSLTCLVKGFYPSDIAVEWESQGSPENNYKTTPPVLDSDGSFFLYSKLTVDKSRWQQGNVFSCSVMHEALHNHYTQKSLSLSPGSSSSSSAWSHPQFEK

SEQ ID NO: 6278 - protein, 371 aa, Artificial Sequence
  source: /note="Description of Artificial Sequence: Synthetic polypeptide"
EVQLVESGGGLVQPGGSLRLSCAASGFSFSSGYDMCWVRQAPGKGLEWVACIDTDNDATYYADSVKGRFTISKDSSKNTLYLQMNSLRAEDTAVYYCARTHGDYVAFKLWGQGTLVTVSGGGSGGGSGGGSGGGSDIQMTQSPSSLSASVGDRVTITCQSSQSVYKNNDLSWYQQKPGKAPKLLIYQASKLASGVPSRFSGSGSGTDFTLTISSLQPEDFATYYCAGGYTASIYAFGQGTKVEIKGSGSSGQPREPQVYTLPPSREEMTKNQVSLTCLVKGFYPSDIAVEWESQGSPENNYKTTPPVLDSDGSFFLYSKLTVDKSRWQQGNVFSCSVMHEALHNHYTQKSLSLSPGSSSSSSAWSHPQFEK

SEQ ID NO: 6279 - protein, 371 aa, Artificial Sequence
  source: /note="Description of Artificial Sequence: Synthetic polypeptide"
EVQLVESGGGLVQPGGSLRLSCAASGFSFSSGYDMSWVRQAPGKGLEWVSAIDTDNDATYYADSVKGRFTISKDSSKNTLYLQMNSLRAEDTAVYYCARTHGDYVAFKLWGQGTLVTVSGGGSGGGSGGGSGGGSDIQMTQSPSSLSASVGDRVTITCQSSQSVYKNNDLSWYQQKPGKAPKLLIYQASKLASGVPSRFSGSGSGTDFTLTISSLQPEDFATYYCAGGYTASIYAFGQGTKVEIKGSGSSGQPREPQVYTLPPSREEMTKNQVSLTCLVKGFYPSDIAVEWESQGSPENNYKTTPPVLDSDGSFFLYSKLTVDKSRWQQGNVFSCSVMHEALHNHYTQKSLSLSPGSSSSSSAWSHPQFEK

SEQ ID NO: 6280 - protein, 373 aa, Artificial Sequence
  source: /note="Description of Artificial Sequence: Synthetic polypeptide"
QSLEESGGDLVKPGGTLTLTCTTSGFSFSDHYWMCWVRQAPGKGLEWIACIYTADSDSYYASWAKGRFTISKTSSTTVTLQMTSLTAADTATYFCARNGAYAGGPYGDLWGPGTLVTVSGGGSGGGSGGGSGGGSDIVMTQTPSSVEAAVGGTVTIKCQASQSIRTSLVWYQQKPGQPPKLLIYKASDLPSGVPSRFKGSGSGTQFTLTISDLESADAATYYCQSYDFRDTINNGHSFGGGTEVVVKGSGSSGQPREPQVYTLPPSREEMTKNQVSLTCLVKGFYPSDIAVEWESQGSPENNYKTTPPVLDSDGSFFLYSKLTVDKSRWQQGNVFSCSVMHEALHNHYTQKSLSLSPGSSSSSSAWSHPQFEK

SEQ ID NO: 6281 - protein, 375 aa, Artificial Sequence
  source: /note="Description of Artificial Sequence: Synthetic polypeptide"
EVQLVESGGGLVQPGGSLRLSCAASGFSFSDHYWMCWVRQAPGKGLEWVACIYTADSDSYYASWAKGRFTISKDSSKNTLYLQMNSLRAEDTAVYYCARNGAYAGGPYGDLWGQGTLVTVSGGGSGGGSGGGSGGGSDIQMTQSPSSLSASVGDRVTITCKASQSIRTSLVWYQQKPGKAPKLLIYKASDLPSGVPSRFSGSGSGTDFTLTISSLQPEDFATYYCQSYDFRDTINNGHSFGQGTKVEIKGSGSSGQPREPQVYTLPPSREEMTKNQVSLTCLVKGFYPSDIAVEWESQGSPENNYKTTPPVLDSDGSFFLYSKLTVDKSRWQQGNVFSCSVMHEALHNHYTQKSLSLSPGSSSSSSAWSHPQFEK

SEQ ID NO: 6282 - protein, 375 aa, Artificial Sequence
  source: /note="Description of Artificial Sequence: Synthetic polypeptide"
EVQLVESGGGLVQPGGSLRLSCAASGFSFSDHYWMCWVRQAPGKGLEWVACIYTADSDSYYADSVKGRFTISKDSSKNTLYLQMNSLRAEDTAVYYCARNGAYAGGPYGDLWGQGTLVTVSGGGSGGGSGGGSGGGSDIQMTQSPSSLSASVGDRVTITCKASQSIRTSLVWYQQKPGKAPKLLIYKASDLPSGVPSRFSGSGSGTDFTLTISSLQPEDFATYYCQSYDFRDTINNGHSFGQGTKVEIKGSGSSGQPREPQVYTLPPSREEMTKNQVSLTCLVKGFYPSDIAVEWESQGSPENNYKTTPPVLDSDGSFFLYSKLTVDKSRWQQGNVFSCSVMHEALHNHYTQKSLSLSPGSSSSSSAWSHPQFEK

SEQ ID NO: 6283 - protein, 375 aa, Artificial Sequence
  source: /note="Description of Artificial Sequence: Synthetic polypeptide"
EVQLVESGGGLVQPGGSLRLSCAASGFSFSDHYWMSWVRQAPGKGLEWVSAIYTADSDSYYADSVKGRFTISKDSSKNTLYLQMNSLRAEDTAVYYCARNGAYAGGPYGDLWGQGTLVTVSGGGSGGGSGGGSGGGSDIQMTQSPSSLSASVGDRVTITCKASQSIRTSLVWYQQKPGKAPKLLIYKASDLPSGVPSRFSGSGSGTDFTLTISSLQPEDFATYYCQSYDFRDTINNGHSFGQGTKVEIKGSGSSGQPREPQVYTLPPSREEMTKNQVSLTCLVKGFYPSDIAVEWESQGSPENNYKTTPPVLDSDGSFFLYSKLTVDKSRWQQGNVFSCSVMHEALHNHYTQKSLSLSPGSSSSSSAWSHPQFEK

SEQ ID NO: 6284 - protein, 507 aa, Artificial Sequence
  source: /note="Description of Artificial Sequence: Synthetic polypeptide"
DIQMTQSPSSLSASVGDRVTITCKSSQSLLYRSNQKNYLAWYQQKPGKAPKLLIYWASTRESGVPSRFSGSGSGTDFTLTISSLQPEDFATYYCQQYYNYPRTFGQGTKVEIKRGGGGSGGGGSGGGGSEVQLVESGGGLVQPGGSLRLSCAVSGYSITSDYAWNWVRQAPGKGLEWVGYISNSGSTSYNPSLKSRFTISRDNSKNTLYLQMNSLRAEDTAVYYCARERNYDYDDYYYAMDYWGQGTLVTVSSGGGGSDIKLQQSGAELARPGASVKMSCKTSGYTFTRYTMHWVKQRPGQGLEWIGYINPSRGYTNYNQKFKDKATLTTDKSSSTAYMQLSSLTSEDSAVYYCARYYDDHYCLDYWGQGTTLTVSSVEGGSGGSGGSGGSGGVDDIQLTQSPAIMSASPGEKVTMTCRASSSVSYMNWYQQKSGTSPKRWIYDTSKVASGVPYRFSGSGSGTSYSLTISSMEAEDAATYYCQQWSSNPLTFGAGTKLELKHHHHHH

SEQ ID NO: 6285 - protein, 118 aa, Artificial Sequence
  source: /note="Description of Artificial Sequence: Synthetic polypeptide"
QVQLQESGPGLVKPSETLSLTCTVSGFSLTSYGVHWIRQPPGKGLEWIGVIYADGSTNYNPSLKSRVTISKDTSKNQVSLKLSSVTAADTAVYYCARAYGNYWYIDVWGQGTTVTVSS

SEQ ID NO: 6286 - protein, 114 aa, Artificial Sequence
  source: /note="Description of Artificial Sequence: Synthetic polypeptide"
QVQLVQSGSELKKPGASVKVSCKASGYTFTNYGMNWVRQAPGQGLKWMGWINNNNAEPTYAQDFRGRFVFSLDTSASTAYLQISSLKTEDTAVYYCARDVMDYWGQGTLVTVSS

SEQ ID NO: 6287 - protein, 118 aa, Artificial Sequence
  source: /note="Description of Artificial Sequence: Synthetic polypeptide"
QVQLQESGPGLVKPSETLSLTCTVSGFSLTSYGVHWIRQPPGKGLEWIGVIYAGGSTNYNPSLKSRVTISKDTSKNQFSLKLSSVTAADTAVYYCARAYGNYWYIDVWGQGTTVTVSS

SEQ ID NO: 6288 - protein, 118 aa, Artificial Sequence
  source: /note="Description of Artificial Sequence: Synthetic polypeptide"
QVQLQESGPGLVKPSETLSLTCTVSGFSLTSYGVHWIRQPPGKGLEWIGVIYAGGSTNYNPSLKSRVTISKDTSKNQVSLKLSSVTAADTAVYYCARAYGNYWYIDVWGQGTTVTVSS

SEQ ID NO: 6289 - protein, 118 aa, Artificial Sequence
  source: /note="Description of Artificial Sequence: Synthetic polypeptide"
QVQLQESGPGLVKPSETLSLTCTVSGFSLTSYGVHWIRQPPGKGLEWLGVIWAGGSTNYNPSLKSRLTISKDNSKSQVSLKMSSVTAADTAVYYCARAYGNYWYIDVWGQGTTVTVSS

SEQ ID NO: 6290 - protein, 114 aa, Artificial Sequence
  source: /note="Description of Artificial Sequence: Synthetic polypeptide"
QVQLVQSGSELKKPGASVKVSCKASGYTFTNYGMNWVRQAPGQGLKWMGWINNNNGEPTYAQDFRGRFVFSLDTSASTAYLQISSLKTEDTAVYYCARDVMDYWGQGTLVTVSS

SEQ ID NO: 6291 - protein, 114 aa, Artificial Sequence
  source: /note="Description of Artificial Sequence: Synthetic polypeptide"
QVQLVQSGPELKKPGASVKVSCKASGYTFTNYGMNWVRQAPGQGLKWMGWINNNNGEPTYAQDFRGRFVFSLDTSASTAYLQISSLKTEDTAVYYCARDVMDYWGQGTLVTVSS

SEQ ID NO: 6292 - protein, 114 aa, Artificial Sequence
  source: /note="Description of Artificial Sequence: Synthetic polypeptide"
QVQLVQSGSELKKPGASVKVSCKASGYTFTNYGMNWVRQAPGQGLEWMGWINNNNGEPTYAQGFRGRFVFSLDTSASTAYLQISSLKTEDTAVYFCARDVMDYWGQGTTVTVSS

SEQ ID NO: 6293 - protein, 118 aa, Artificial Sequence
  source: /note="Description of Artificial Sequence: Synthetic polypeptide"
QVQLQESGPGLVKPSETLSLTCTVSGFSLTSYGVHWIRQPPGKGLEWIGVIWAGGSTNYNPSLKSRVTISVDTSKNQFSLKLSSVTAADTAVYYCARAYGNYWYIDVWGQGTTVTVSS

SEQ ID NO: 6294 - protein, 118 aa, Artificial Sequence
  source: /note="Description of Artificial Sequence: Synthetic polypeptide"
QVQLQESGPGLVKPSETLSLTCTVSGFSLTSYGVHWIRQPPGKGLEWLGVIWAGGSTNYNPSLKSRVTISVDTSKNQFSLKLSSVTAADTAVYYCARAYGNYWYIDVWGQGTTVTVSS

SEQ ID NO: 6295 - protein, 118 aa, Artificial Sequence
  source: /note="Description of Artificial Sequence: Synthetic polypeptide"
QVQLQESGPGLVKPSETLSLTCTVSGFSLTSYGVHWIRQPPGKGLEWIGVIWAGGSTNYNPSLKSRVTISVDTSKSQFSLKLSSVTAADTAVYYCARAYGNYWYIDVWGQGTTVTVSS

SEQ ID NO: 6296 - protein, 118 aa, Artificial Sequence
  source: /note="Description of Artificial Sequence: Synthetic polypeptide"
QVQLQESGPGLVKPSETLSLTCTVSGFSLTSYGVHWIRQPPGKGLEWIGVIWAGGSTNYNPSLKSRVTISVDTSKNQVSLKLSSVTAADTAVYYCARAYGNYWYIDVWGQGTTVTVSS

SEQ ID NO: 6297 - protein, 118 aa, Artificial Sequence
  source: /note="Description of Artificial Sequence: Synthetic polypeptide"
QVQLQESGPGLVKPSETLSLTCTVSGFSLTSYGVHWIRQPPGKGLEWIGVIWAGGSTNYNPSLKSRVTISVDTSKSQVSLKLSSVTAADTAVYYCARAYGNYWYIDVWGQGTTVTVSS

SEQ ID NO: 6298 - protein, 118 aa, Artificial Sequence
  source: /note="Description of Artificial Sequence: Synthetic polypeptide"
QVQLQESGPGLVKPSETLSLTCTVSGFSLTSYGVHWIRQPPGKGLEWIGVIWAGGSTNYNPSLKSRVTISKDTSKSQVSLKLSSVTAADTAVYYCARAYGNYWYIDVWGQGTTVTVSS

SEQ ID NO: 6299 - protein, 118 aa, Artificial Sequence
  source: /note="Description of Artificial Sequence: Synthetic polypeptide"
QVQLQESGPGLVKPSETLSLTCTVSGFSLTSYGVHWIRQPPGKGLEWIGVIWAGGSTNYNPSLKSRVTISKDTSKNQVSLKLSSVTAADTAVYYCARAYGNYWYIDVWGQGTTVTVSS

SEQ ID NO: 6300 - protein, 118 aa, Artificial Sequence
  source: /note="Description of Artificial Sequence: Synthetic polypeptide"
QVQLQESGPGLVKPSETLSLTCTVSGFSLTSYGVHWIRQPPGKGLEWIGVIWAGGSTNYNPSLKSRVTISKDTSKNQFSLKLSSVTAADTAVYYCARAYGNYWYIDVWGQGTTVTVSS

SEQ ID NO: 6301 - protein, 118 aa, Artificial Sequence
  source: /note="Description of Artificial Sequence: Synthetic polypeptide"
QVQLQESGPGLVKPSETLSLTCTVSGFSLTSYGVHWIRQPPGKGLEWIGVINAGGSTNYNPSLKSRVTISKDTSKNQFSLKLSSVTAADTAVYYCARAYGNYWYIDVWGQGTTVTVSS

SEQ ID NO: 6302 - protein, 118 aa, Artificial Sequence
  source: /note="Description of Artificial Sequence: Synthetic polypeptide"
QVQLQESGPGLVKPSETLSLTCTVSGFSLTSYGVHWIRQPPGKGLEWIGVIWAGGSTNYNPSLKSRVTISKDTSKNQFSLKLSSVTAADTAVYYCARAYGNYPYIDVWGQGTTVTVSS

SEQ ID NO: 6303 - protein, 107 aa, Artificial Sequence
  source: /note="Description of Artificial Sequence: Synthetic polypeptide"
DIVMTQSPDSLAVSLGERATINCKSSQSVSNDVAWYQQKPGQPPKLLINYAFHRFTGVPDRFSGSGYGTDFTLTISSLQAEDVAVYYCHQAYSSPYTFGQGTKLEIK

SEQ ID NO: 6304 - protein, 114 aa, Artificial Sequence
  source: /note="Description of Artificial Sequence: Synthetic polypeptide"
QVQLVQSGPELKKPGASVKVSCKASGYTFTNYGMNWVRQAPGQGLEWMGWINNNNGEPTYAQGFRGRFVFSLDTSASTAYLQISSLKTEDTAVYYCARDVMDYWGQGTLVTVSS

SEQ ID NO: 6305 - protein, 114 aa, Artificial Sequence
  source: /note="Description of Artificial Sequence: Synthetic polypeptide"
QVQLVQSGPELKKPGASVKVSCKASGYTFTNYGMNWVRQAPGQGLKWMGWINNNNGEPTYAQDFRGRFVFSLDTSASTAYLQISSLKTEDTAVYYCARDVMDYWGQGTTVTVSS

SEQ ID NO: 6306 - protein, 114 aa, Artificial Sequence
  source: /note="Description of Artificial Sequence: Synthetic polypeptide"
QVQLVQSGSELKKPGASVKVSCKASGYTFTNYGMNWVRQAPGQGLEWMGWINNNNGEPTYAQGFRGRFVFSLDTSASTAYLQISSLKTEDTAVYYCARDVMDYWGQGTLVTVSS

SEQ ID NO: 6307 - protein, 114 aa, Artificial Sequence
  source: /note="Description of Artificial Sequence: Synthetic polypeptide"
QVQLVQSGSELKKPGASVKVSCKASGYTFTNYGMNWVRQAPGQGLKWMGWINNNNGEPTYAQDFRGRFVFSLDTSASTAYLQISSLKTEDTAVYYCARDVMDYWGQGTTVTVSS

SEQ ID NO: 6308 - protein, 114 aa, Artificial Sequence
  source: /note="Description of Artificial Sequence: Synthetic polypeptide"
QVQLVQSGPELKKPGASVKVSCKASGYTFTNYGMNWVRQAPGQGLEWMGWINNNNGEPTYAQGFRGRFVFSLDTSASTAYLQISSLKTEDTAVYYCARDVMDYWGQGTTVTVSS

SEQ ID NO: 6309 - protein, 114 aa, Artificial Sequence
  source: /note="Description of Artificial Sequence: Synthetic polypeptide"
QVQLVQSGSELKKPGASVKVSCKASGYTFTNYGMNWVRQAPGQGLKWMGWINNNDGEPTYAQDFRGRFVFSLDTSASTAYLQISSLKTEDTAVYYCARDVMDYWGQGTLVTVSS

SEQ ID NO: 6310 - protein, 122 aa, Mus musculus
QAYLQQSGAELVRPGASVKMSCKASGYTFTSYNMHWVKQTPRQGLEWIGAIYPGNGDTSYNQKFKGKATLTVDKSSSTAYMQLSSLTSEDSAVYFCARVVYYSNSYWYFDVWGTGTTVTVSS

SEQ ID NO: 6311 - protein, 122 aa, Artificial Sequence [sequence omitted]

SEQ ID NO: 6312 - protein, 126 aa, Artificial Sequence
  source: /note="Description of Artificial Sequence: Synthetic polypeptide"
EVQLVQSGGGVERPGGSLRLSCAASGFTFDDYAMWVRQAPGKGLEWVSGINWQGGSTGYADSVKGRVTISRDNAKNSLYLQMNSLRAEDTAVYYCAKILGAGRGWYFDYWGKGTTVTVSSASTKGP

SEQ ID NO: 6313 - protein, 122 aa, Artificial Sequence
  source: /note="Description of Artificial Sequence: Synthetic polypeptide"
EVQLVESGGGLVQPGGSLRLSCAASGYTFTSYNMHWVRQAPGKGLEWVGAIYPGNGATSYNQKFKGRFTISVDKSKNTLYLQMNSLRAEDTAVYYCARVVYYSYRYWYFDVWGQGTLVTVSS

SEQ ID NO: 6314 - protein, 120 aa, Mus Musculus
EVILVESGGGLVKPGGSLKLSCAASGFSFSSYTMSWVRQTPEKRLDWVATISGGGRDIYYPDSVKGRFTISRDNAKNTLYLEMSSLMSEDTALYYCVLLTGRVYFALDSWGQGTSVTVSS

SEQ ID NO: 6315 - protein, 120 aa, Mus Musculus
DVQLQESGPGLVKPSQSLSLTCTVTGYSITSDYAWNWIRQFPGDKLEWLGYITYSGFTNYNPSLKSRISISRDTSKNQFFLQLNSVATEDTATYYCARWHGSAPWYFDYWGRGTTLTVSS

SEQ ID NO: 6316 - protein, 120 aa, Mus Musculus
DVQLQESGPGLVKPSQSLSLTCTVTGYSITSDYAWNWIRQFPGNKLEWMGYITYTGRTSYNPSLKSRISITRDTSKNQFFLQLNSVTTEDTATYYCAREMDYYGSTLDYWGQGTTLTVSS

SEQ ID NO: 6317 - protein, 118 aa, Mus Musculus
QVQLQQSGPELVRPGVSVKISCKGSGYTFTDYAMHWVKQSHARTLEWIGVISTYSGDTNYNQKFKDKATMTVDKSSSTAYLELARMTSEDSAIYYCARLGITTGFAYWGQGTLVTVSA

SEQ ID NO: 6318 - protein, 116 aa, Mus Musculus
EVKLVESGGGLVKPGGSLKLSCAASGFTFSNYGMSWIRQTPEKGLEWVATISGGGRDTYYPDSVKGRFTISRDNVKNNLYLQMSSLRSEDTAFYYCASYYYGIDYWGQGTSVTVSS

SEQ ID NO: 6319 - protein, 114 aa, Mus Musculus
QVQLQQPGAELVKPGASVKMSCKASGYTFTSTWMHWVKQRPGQGLEWIGAIDPSDSYTTYNQKFKGKATLTVDTSSTTAYMQLSSLTSEDSAVYYCTRSPFDYWGQGTTLTVSS

SEQ ID NO: 6320 - protein, 117 aa, Mus Musculus
DVQLQESGPDLVKPSQSLSLTCTVTGYSITSGYSWHWIRQFPGNKLEWMGFIHSSGDTNYNPSLKSRISFTRDTSKNQFFLQLSSLTDEDTATYYCATYRNWYFDVWGAGTTVTVSS

SEQ ID NO: 6321 - protein, 120 aa, Artificial Sequence
  source: /note="Description of Artificial Sequence: Synthetic polypeptide"
EVQLLESGGGLVQPGGSLRLSCAASGFSFSSYTMSWVRQAPGKGLEWVATISGGGRDIYYPDSVKGRFTISRDNSKNTLYLQMNSLRAEDTAVYYCVLLTGRVYFALDSWGQGTLVTVSS

SEQ ID NO: 6322 - protein, 124 aa, Artificial Sequence
  source: /note="Description of Artificial Sequence: Synthetic polypeptide"
EVQLLESGGGLVQPGGSLRLSCAASGFTFTRYDMVWVRQAPGKGLEWVAGIGDSNKMTRYAPAVKGRATISRDNSKNTLYLQMNSLRAEDTAVYYCAKGSCIACWDEAGRIDAWGQGTLVTVSS

SEQ ID NO: 6323 - protein, 131 aa, Artificial Sequence
  source: /note="Description of Artificial Sequence: Synthetic polypeptide"
EVQLLESGGGLVQPGGSLRLSCAASGFTFSDYAMNWVRQAPGKGLEWVAGIGNDGSYTNYGAAVKGRATISRDNSKNTLYLQMNSLRAEDTAVYYCASDIRSRNDCSYFLGGCSSGFIDVWGQGTLVTVSS

SEQ ID NO: 6324 - protein, 126 aa, Artificial Sequence
  source: /note="Description of Artificial Sequence: Synthetic polypeptide"
EVQLLESGGGLVQPGGSLRLSCAASGFDFSDHGMQWVRQAPGKGLEYVGVIDTTGRYTYYAPAVKGRATISRDNSKNTLYLQMNSLRAEDTAVYYCAKTTCVGGYLCNTVGSIDAWGQGTLVTVSS

SEQ ID NO: 6325 - protein, 123 aa, Artificial Sequence
  source: /note="Description of Artificial Sequence: Synthetic polypeptide"
EVQLLESGGGLVQPGGSLRLSCAASGFDFSSYTMQWVRQAPGKGLEWVGVISSTGGSTGYGPAVKGRATISRDNSKNTLYLQMNSLRAEDTAVYYCVKSISGDAWSVDGLDAWGQGTLVTVSS

SEQ ID NO: 6326 - protein, 123 aa, Artificial Sequence
  source: /note="Description of Artificial Sequence: Synthetic polypeptide"
EVQLLESGGGLVQPGGSLRLSCAASGFDFSSYTMQWVRQAPGKGLEWVGVISSTGGSTGYGPAVKGRATISRDNSKNTLYLQMNSLRAEDTAVYYCVKSVSGDAWSVDGLDAWGQGTLVTVSS

SEQ ID NO: 6327 - protein, 126 aa, Artificial Sequence
  source: /note="Description of Artificial Sequence: Synthetic polypeptide"
EVQLLESGGGLVQPGGSLRLSCAASGFDFSSYGMQWVRQAPGKGLEWVGVISGSGITTLYAPAVKGRATISRDNSKNTVYLQMNSLRAEDTAVYYCTRSPSITDGWTYGGAWIDAWGQGTLVTVSS

SEQ ID NO: 6328 - protein, 127 aa, Artificial Sequence
  source: /note="Description of Artificial Sequence: Synthetic polypeptide"
EVQLLESGGGLVQPGGSLRLSCAASGFTFSTFNMVWVRQAPGKGLEYVAEISSDGSFTWYATAVKGRATISRDNSKNTVYLQMNSLRAEDTAVYYCAKSDCSSSYYGYSCIGIIDAWGQGTLVTVSS

SEQ ID NO: 6329 - protein, 131 aa, Artificial Sequence
  source: /note="Description of Artificial Sequence: Synthetic polypeptide"
EVQLLESGGGLVQPGGSLRLSCAASGFTFSSYNMFWVRQAPGKGLEFVAEISGSNTGSRTWYAPAVKGRATISRDNSKNTLYLQMNSLRAEDTAVYYCAKSIYGGYCAGGYSCGVGLIDAWGQGTLVTVSS

SEQ ID NO: 6330 - protein, 121 aa, Mus musculus
  source: /note="VH Domain of Anti-Human PD-1 Antibody PD-1 mAb 3"
QVQLQQSGAELAKPGASVQMSCKASGYSFTSSWIHWVKQRPGQGLEWIGYIYPSTGFTEYNQKFKDKATLTADKSSSTAYMQLSSLTSEDSAVYYCARWRDSSGYHAMDYWGQGTSVTVSS

SEQ ID NO: 6331 - protein, 117 aa, Mus musculus
  source: /note="VH Domain of Anti-Human PD-1 Antibody PD-1 mAb 4"
QVQLVQSGSELKKPGASVKISCKASGYTFTNYGMNWVRQAPGQGLQWMGWINTDSGESTYAEEFKGRFVFSLDTSVNTAYLQITSLTAEDTGMYFCVRVGYDALDYWGQGTLVTVSS

SEQ ID NO: 6332 - protein, 116 aa, Mus musculus
  source: /note="VH Domain of Anti-Human PD-1 Antibody PD-1 mAb 5"
EVQLVESGGGLVQPGGSLRLSCAASGFVFSSFGMHWVRQAPGKGLEWVAYISSGSMSISYADTVKGRFTISRDNAKNTLYLQMNSLRTEDTALYYCASLSDYFDYWGQGTTVTVSS

SEQ ID NO: 6333 - protein, 119 aa, Mus musculus
  source: /note="VH Domain of Anti-Human PD-1 Antibody PD-1 mAb 6"
  VARIANT (48)..(48): /replace="Ala"
  SITE (1)..(119): /note="Variant residues given in the sequence have no preference with respect to those in the annotations for variant positions"
QVQLVQSGAEVKKPGASVKVSCKASGYSFTSYWMNWVRQAPGQGLEWIGVIHPSDSETWLDQKFKDRVTITVDKSTSTAYMELSSLRSEDTAVYYCAREHYGTSPFAYWGQGTLVTVSS

SEQ ID NO: 6334 - protein, 119 aa, Mus musculus
  source: /note="VH Domain of Anti-Human PD-1 Antibody PD-1 mAb 7"
  VARIANT (12)..(12): /replace="Ala"
  VARIANT (35)..(35): /replace="Gly"
  VARIANT (48)..(48): /replace="Thr"
  VARIANT (86)..(86): /replace="Ala"
  SITE (1)..(119): /note="Variant residues given in the sequence have no preference with respect to those in the annotations for variant positions"
EVQLVESGGGLVRPGGSLKLSCAASGFTFSSYLVSWVRQAPGKGLEWVATISGGGGNTYYSDSVKGRFTISRDNAKNSLYLQMNSLRAEDTATYYCARYGFDGAWFAYWGQGTLVTVSS

SEQ ID NO: 6335 - protein, 117 aa, Mus musculus
  source: /note="VH Domain of Anti-Human PD-1 Antibody PD-1 mAb 8"
EVQLVESGGGLVRPGGSLRLSCAASGFTFSSYLISWVRQAPGKGLEWVAAISGGGADTYYADSVKGRFTISRDNAKNSLYLQMNSLRAEDTATYYCARRGTYAMDYWGQGTLVTVSS

SEQ ID NO: 6336 - protein, 106 aa, Artificial Sequence
  source: /note="Description of Artificial Sequence: Synthetic polypeptide"
DIQLTQSPSSLSASVGDRVTITCRASSSVSYMHWYQQKPGKAPKPWIYATSNLASGVPSRFSGSGSGTDYTLTISSLQPEDFATYYCQQWSSNPLTFGGGTKVEIK

SEQ ID NO: 6337 - protein, 118 aa, Artificial Sequence
  source: /note="Description of Artificial Sequence: Synthetic polypeptide"
EVQLVESGGGLVKPGGSLRLSCAASGFTFSDAWMDWVRQAPGKGLEWVGEIRSKASNHATYYAESVKGRFTISRDDSKNTLYLQMNSLKTEDTAVYYCTTWRRFFDSWGQGTLVTVSS

SEQ ID NO: 6338 - protein, 118 aa, Artificial Sequence
  source: /note="Description of Artificial Sequence: Synthetic polypeptide"
EVQLVESGGGLVKPGGSLRLSCAASGFTFSDAWMDWVRQAPGKGLEWVGEIRSKASNHATYYAESVKGRFTISRDDSKNTLYLQMNSLKTEDTAVYYCTRWRRFFDSWGQGTLVTVSS

SEQ ID NO: 6339 - protein, 118 aa, Artificial Sequence
  source: /note="Description of Artificial Sequence: Synthetic polypeptide"
EVQLVESGGGLVKPGGSLRLSCAASGFTFSDAWMDWVRQAPGKGLEWVAEIRSKASNHATYYAESVKGRFTISRDDSKNTLYLQMNSLKTEDTAVYYCTRWRRFFDSWGQGTLVTVSS

SEQ ID NO: 6340 - protein, 118 aa, Artificial Sequence
  source: /note="Description of Artificial Sequence: Synthetic polypeptide"
EVQLVESGGGLVKPGGSLRLSCAASGFTFSDAWMDWVRQAPGKGLEWVGEARSKASNHATYYAESVKGRFTISRDDSKNTLYLQMNSLKTEDTAVYYCTRWRRFFDSWGQGTLVTVSS

SEQ ID NO: 6341 - protein, 118 aa, Artificial Sequence
  source: /note="Description of Artificial Sequence: Synthetic polypeptide"
EVQLVESGGGLVKPGGSLRLSCAASGFTFSDAWMDWVRQAPGKGLEWVGEIRSQASNHATYYAESVKGRFTISRDDSKNTLYLQMNSLKTEDTAVYYCTRWRRFFDSWGQGTLVTVSS

SEQ ID NO: 6342 - protein, 118 aa, Artificial Sequence
  source: /note="Description of Artificial Sequence: Synthetic polypeptide"
EVQLVESGGGLVKPGGSLRLSCAASGFTFSDAWMDWVRQAPGKGLEWVGEIRSRASNHATYYAESVKGRFTISRDDSKNTLYLQMNSLKTEDTAVYYCTRWRRFFDSWGQGTLVTVSS

SEQ ID NO: 6343 - protein, 118 aa, Artificial Sequence
  source: /note="Description of Artificial Sequence: Synthetic polypeptide"
EVQLVESGGGLVKPGGSLRLSCAASGFTFSDAWMDWVRQAPGKGLEWVSEIRSKASNHATYYAESVKGRFTISRDDSKNTLYLQMNSLKTEDTAVYYCTRWRRFFDSWGQGTLVTVSS

SEQ ID NO: 6344 - protein, 118 aa, Artificial Sequence; identical to SEQ ID NO: 6340
  source: /note="Description of Artificial Sequence: Synthetic polypeptide"
  VARIANT (49)..(49): /replace="Ala" or "Ser"
  VARIANT (51)..(51): /replace="Ile"
  VARIANT (54)..(54): /replace="Gln" or "Arg"
  VARIANT (81)..(81): /replace="Val"
  SITE (1)..(118): /note="Variant residues given in the sequence have no preference with respect to those in the annotations for variant positions"

SEQ ID NO: 6345 - protein, 122 aa, Artificial Sequence [sequence omitted]

SEQ ID NO: 6346 - protein, 122 aa, Artificial Sequence [sequence omitted]

SEQ ID NO: 6347 - protein, 123 aa, Homo sapiens
EVQLLESGGGLVQPGGSLRLSCAASGFTFSSYAMSWVRQAPGKGLEWVSAISGSGGSTYYADSVKGRFTISRDNSKNTLYLQMNSLRAEDTAVYYCAKDGSSGWYVPHWFDPWGQGTLVTVSS

SEQ ID NO: 6348 - protein, 123 aa, Homo sapiens
EVQLLESGGGLVQPGGSLRLSCAASGFTFSSYAMSWVRQAPGKGLEWVSAISGSGGSTYYADSVKGRFTISRDNSKNTLYLQMNSLRAEDTAVYYCAKDHSSGWYVISGMDVWGRGTMVTVSS

SEQ ID NO: 6349 - protein, 122 aa, Homo sapiens
EVQLLESGGGLVQPGGSLRLSCAASGFTFSSYAMSWVRQAPGKGLEWVSAISGSGGSTYYADSVKGRFTISRDNPKNTLYLQMNSLRAEDTAVYYCAKDLTVGGPWYYFDYWGQGTLVTVSS

SEQ ID NO: 6350 - protein, 120 aa, Homo sapiens
EVQLLESGGGLVQPGGSLRLSCAASGFTFSSYAMSWVRQAPGKGLEWVSAISGSGGSTYYADSVKGRFTISRDNSKNTLYLQMNSLRAEDTAVYYCAKDGWNALGWLESWGRGTLVTVSS

SEQ ID NO: 6351 - protein, 123 aa, Homo sapiens
EVQLLESGGGLVQPGGSLRLSCAASGFTFSSYAMSWVRQAPGKGLEWVSAISGSGGSTYYADSVKGRFTISRDNSKNTLYLQMNSLRAEDTAVYYCAKDGSSGWYVPHWFDPWGRGTMVTVSS

SEQ ID NO: 6352 - protein, 120 aa, Homo sapiens
EVQLLESGGGLVQPGGSLKLSCAASGFTFSSNAMSWVRQAPGKGLEWVSTLTGSGGTAYYADSVEGRFSISRDNSKNTLYLQMNSLRAEDTAVYYCAKGTELVGGGLDNWGQGTLVTVSS

SEQ ID NO: 6353 - protein, 120 aa, Homo sapiens
EVQLLESGGGLVQPGGSLRLSCAASGFTFSSYAMSWVRQAPGKGLEWVSAISGSGGSTYYADSVKGRFTISRDNSKNTLYLQMNSLRAEDTAVYYCAKDGWNALGWLESWGKGTMVTVSS

SEQ ID NO: 6354 - protein, 120 aa, Homo sapiens
EVQLLESGGGLVQPGGSLRLSCAASGFTFSSYAMSWVRQAPGKGLEWVSAISGSGGSTYYADSVKGRFTISRDNSKNTLYLQMNSLRAEDTAVYYCVKRSFDSGGSFEYWGQGTMVTVSS

SEQ ID NO: 6355 - protein, 120 aa, Homo sapiens
EVQLLESGGGLVQPGGSLRLSCAASGFTFSSYAMSWVRQAPGKGLEWVSAISGSGGSTYYADSVKGRFTISRDNSKNTLYLQMNSLRAEDTAVYYCARVGSWYLEDFDIWGRGTMVTVSS

SEQ ID NO: 6356 - protein, 122 aa, Homo sapiens
EVQLLESGGGLVQPGGSLRLSCAASGFTFSSYAMSWVRQAPGKGLEWVSAISGSGGSTYYADSVKGRFTISRDNSKNTLYLQMNSLRAEDTAVYYCAKGGNYGDYFDYFDYWGRGTMVTVSS

SEQ ID NO: 6357 - protein, 120 aa, Homo sapiens
EVQLLESGGGLVQPGGSLRLSCAASGFTFSSYAMSWVRQAPGKGLEWVSAISGSGGSTYYADSVKGRFTISRDNSKNTLYLQMNSLRAEDTAVYYCAKDGWNALGWLESWGQGTMVTVSS

SEQ ID NO: 6358 - protein, 120 aa, Homo sapiens
EVQLLESGGGLVQPGGSLRLSCAASGFTFSSYAMSWVRQAPGKGLEWVSAISGSGGSTYYADSVKGRFTISRDNSKNTLYLQMNSLRAEDTAVYYCAKDFWVITSGNDYWGRGTTVTVSS

SEQ ID NO: 6359 - protein, 120 aa, Homo sapiens
EVQLLESGGGLVQPGGSLRLSCAASGFTFSSYAMSWVRQAPGKGLEWVSAISGSGGSTYYADSVKGRFTISRDNSKNTLYLQMNSLRAEDTAVYYCAKDGWNALGWLESWGKGTTVTVSS

SEQ ID NO: 6360 - protein, 123 aa, Homo sapiens
EVQLLESGGGLVQPGGSLRLSCAASGFTFSSYAMSWVRQAPGKGLEWVSAISGSGGSTYYADSVKGRFTISRDNSKNTLYLQMNSLRAEDTAVYYCAKDGSSGWYVPHWFDPWGRGTLVTVSS

SEQ ID NO: 6361 - protein, 140 aa, Artificial Sequence
  source: /note="Description of Artificial Sequence: Synthetic polypeptide"
MAVLALLFCLVTFPSCILSQVQLKESGPGLVAPSQSLSITCTVSGFSLTGYGINWVRQPPGKGLEWLGMIWSDGSTDYNSVLTSRLRISKDNSNSQVFLKMNSLQVDDTARYYCARDRNYYDYDGAMDYWGQGTSVTVSS

SEQ ID NO: 6362 - protein, 126 aa, Artificial Sequence
  source: /note="Description of Artificial Sequence: Synthetic polypeptide"
EVQLVQPGAELRNSGASVKVSCKASGYRFTSYYIDWVRQAPGQGLEWMGRIDPEDGGTKYAQKFQGRVTFTADTSTSTAYVELSSLRSEDTAVYYCARNEWETVVVGDLMYEYEYWGQGTQVTVSS

SEQ ID NO: 6363 - protein, 121 aa, Artificial Sequence
  source: /note="Description of Artificial Sequence: Synthetic polypeptide"
QVQLKESGPGLVAPSQSLSITCTVSGFSLTGYGINWVRQPPGKGLEWLGMIWSDGSTDYNSVLTSRLRISKDNSNSQVFLKMNSLQVDDTARYYCARDRNYYDYDGAMDYWGQGTSVTVSS

SEQ ID NO: 6364 - protein, 121 aa, Artificial Sequence
  source: /note="Description of Artificial Sequence: Synthetic polypeptide"
EVQLVESGGGLVQPGGSLRLSCAASGFTFSDYYMTWVRQAPGKGLEWVAFIRNRARGYTSDHNPSVKGRFTISRDNAKNSLYLQMNSLRAEDTAVYYCARDRPSYYVLDYWGQGTTVTVSS

SEQ ID NO: 6365 - protein, 118 aa, Artificial Sequence
  source: /note="Description of Artificial Sequence: Synthetic polypeptide"
QVQLVQSGAEVKKPGSSVKVSCKASGYSFSDYYMHWVRQAPGQGLEWMGQINPTTGGASYNQKFKGKATITVDKSTSTAYMELSSLRSEDTAVYYCARYYYGRHFDVWGQGTTVTVSS

SEQ ID NO: 6366 - protein, 118 aa, Artificial Sequence
  source: /note="Description of Artificial Sequence: Synthetic polypeptide"
QVQLQQSGPELVKPGASVKISCKASGYSFSDYYMHWVKQSPENSLEWIGQINPTTGGASYNQKFKGKATLTVDKSSSTAYMQLKSLTSEESAVYYCTRYYYGRHFDVWGQGTTVTVSS

SEQ ID NO: 6367 - protein, 118 aa, Artificial Sequence
  source: /note="Description of Artificial Sequence: Synthetic polypeptide"
QVQLQQSGAELAKPGASVKMSCKASGYTFTRYWMHWVKQRPGQGLEWIGYINPSTGYSDYNQKFKDKATLTADKSSSTAYMQLSSLTSEDSAVYYCARDPYGWTMDSWGQGTLVTVSS

SEQ ID NO: 6368 - protein, 126 aa, Artificial Sequence
  source: /note="Description of Artificial Sequence: Synthetic polypeptide"
QVQLVQPGAEVRKPGASVKVSCKASGYRFTSYYIDWVRQAPGQGLEWMGRIDPEDAGTKYAQKFQGRVTMTADTSTSTVYVELSSLRSEDTAVYYCARYEWETVVVGDLMYEYEYWGQGTLVTVSS

SEQ ID NO: 6369 - protein, 452 aa, Artificial Sequence
  source: /note="Description of Artificial Sequence: Synthetic polypeptide"
QVQLVQPGAEVRKPGASVKVSCKASGYRFTSYYIDWVRQAPGQGLEWMGRIDPEDAGTKYAQKFQGRVTMTADTSTSTVYVELSSLRSEDTAVYYCARYEWETVVVGDLMYEYEYWGQGTLVTVSSASTKGPSVFPLAPCSRSTSESTAALGCLVKDYFPEPVTVSWNSGALTSGVHTFPAVLQSSGLYSLSSVVTVPSSSLGTKTYTCNVDHKPSNTKVDKRVESKYGPPCPPCPAPEFLGGPSVFLFPPKPKDTLMISRTPEVTCVVVDVSQEDPEVQFNWYVDGVEVHNAKTKPREEQFNSTYRVVSVLTVLHQDWLNGKEYKCKVSNKGLPSSIEKTISKAKGQPREPQVYTLPPSQEEMTKNQVSLTCLVKGFYPSDIAVEWESNGQPENNYKTTPPVLDSDGSFFLYSRLTVDKSRWQEGNVFSCSVMHEALHNHYTQKSLSLSLG

SEQ ID NO: 6370 - protein, 126 aa, Artificial Sequence
  source: /note="Description of Artificial Sequence: Synthetic polypeptide"
QVQLVQPGAEVRKPGASVKVSCKASGYRFTSYYIDWVRQAPGQGLEWMGRIDPEDGGTKYAQKFQGRVTMTADTSTSTVYVELSSLRSEDTAVYYCARNEWETVVVGDLMYEYEYWGQGTLVTVSS

SEQ ID NO: 6371 - protein, 126 aa, Artificial Sequence
  source: /note="Description of Artificial Sequence: Synthetic polypeptide"
EVQLVQPGAEVKKPGASVKVSCKASGYRFTSYYIDWVRQAPGQGLEWMGRIDPEEGGTKYAQKFQGRVTFTADTSTSTVYVELSSLRSEDTAVYYCARNEWETVVVGDLTYEYEYWGQGTLVTVSS

SEQ ID NO: 6372 - protein, 123 aa, Artificial Sequence
  source: /note="Description of Artificial Sequence: Synthetic polypeptide"
QVQLVQPGAELRNPGASVKVSCKASGYRFTSYYIDWVRQAPGQGLEWMGRIDPEDGGTKYAQKFQGRVTFTRDTSTSTVYMELSSLRSEDTAVYYCARNEWETVVVGDLMYEYEYWGQGTLVT

SEQ ID NO: 6373 - protein, 126 aa, Artificial Sequence
  source: /note="Description of Artificial Sequence: Synthetic polypeptide"
QVQLVQPGAELKKPGASVKVSCKASGYRFTSYYIDWVRQAPGQGLEWMGRIDPEDAGTKYAQKFQGRVTFTADTSTSTVYVELSSLRSEDTAVYYCARNEWETVVVGDLTYEYEYWGQGTLVTVSS

SEQ ID NO: 6374 - protein, 126 aa, Artificial Sequence
  source: /note="Description of Artificial Sequence: Synthetic polypeptide"
EVQLVQSGAELKKPGASVKVSCKASGYRFTSYYIDWVRQAPGQGLEWMGRIDPEEGGTKYAQKFQGRVTMTADTSTSTAYMELSSLRSEDTAVYYCARNEWETVVVGDLMYEYEYWGQGTLVTVSS

SEQ ID NO: 6375 - protein, 122 aa, Artificial Sequence
  source: /note="Description of Artificial Sequence: Synthetic polypeptide"
QVQLVQSGAEVKKPGSSVKVSCTASGYTFTDYYMDWVRQAPGQGLEWMGRVNPYHGYATYNQKFKGRVTITADKSTSTAYMELSSLRSEDTAVYYCAREENSYDGYYGMDYWGQGTLVTVSS

SEQ ID NO: 6376 - protein, 116 aa, Artificial Sequence
  source: /note="Description of Artificial Sequence: Synthetic polypeptide"
EVQLVESGGGLVQPGRSLRLSCAASRFTFDDYAMHWVRQAPGKGLEWVSGISWNSGRIGYADSVKGRFTISRDNAENSLFLQMNGLRAEDTALYYCAKGRDSFDIWGQGTMVTVSS

SEQ ID NO: 6377 - protein, 123 aa, Artificial Sequence
  source: /note="Description of Artificial Sequence: Synthetic polypeptide"
EVQLLESGGGLVQPGGSLRLSCAASGFTFTSYAMSWVRQAPGKGLEWVATISHGGTYTYYPDSVKGRFTISRDNAKNTLYLQMNSLRAEDTAMYYCARHPIYSGNYQGYFDYWGQGTLVTVSS

SEQ ID NO: 6378 - protein, 123 aa, Artificial Sequence
  source: /note="Description of Artificial Sequence: Synthetic polypeptide"
EVQLLESGGGLVQPGGSLRLSCAASGFTFTSYAMSWVRQAPGKGLEWVATISHGGTYTYYPDSVKGRFTISRDNAKNTLYLQMNSLRAEDTAVYYCARHPIYSGNYQGYFDYWGQGTLVTVSS

SEQ ID NO: 6379 - protein, 123 aa, Artificial Sequence
  source: /note="Description of Artificial Sequence: Synthetic polypeptide"
EVQLLESGGGLVQPGGSLRLSCAASGFTFTSYAMSWVRQAPGKGLEWVATISHKGTYTYYPDSVKGRFTISRDNAKNTLYLQMNSLRAEDTAVYYCARHPIYSGNYQGYFDYWGQGTLVTVSS

SEQ ID NO: 6380 - protein, 123 aa, Artificial Sequence
  source: /note="Description of Artificial Sequence: Synthetic polypeptide"
EVQLLESGGGLVQPGGSLRLSCAASGFTFTSYAMSWVRQAPGKGLEWVATISHKGTYTYYPDSVKGRFTISRDNAKNTLYLQMNSLRAEDTAVYYCARHPIYSGFYQGYFDYWGQGTLVTVSS

SEQ ID NO: 6381 - protein, 123 aa, Artificial Sequence
  source: /note="Description of Artificial Sequence: Synthetic polypeptide"
EVQLLESGGGLVQPGGSLRLSCAASGFTFTSYAMSWVRQAPGKGLEWVATISHKGKYTYYPDSVKGRFTISRDNAKNTLYLQMNSLRAEDTAVYYCARHPIYSGFYQGYFDYWGQGTLVTVSS

SEQ ID NO: 6382 - protein, 123 aa, Artificial Sequence
  source: /note="Description of Artificial Sequence: Synthetic polypeptide"
EVQLLESGGGLVQPGGSLRLSCAASGFTFTSYAMSWVRQAPGKGLEWVATISHRGTYTYYPDSVKGRFTISRDNAKNTLYLQMNSLRAEDTAVYYCARHPIYSGNYQGYFDYWGQGTLVTVSS

SEQ ID NO: 6383 - protein, 123 aa, Artificial Sequence
  source: /note="Description of Artificial Sequence: Synthetic polypeptide"
EVQLLESGGGLVQPGGSLRLSCAASGFTFTSYAMSWVRQAPGKGLEWVATISHRGTYTYYPDSVKGRFTISRDNAKNTLYLQMNSLRAEDTAVYYCARHPIYSGFYQGYFDYWGQGTLVTVSS

SEQ ID NO: 6384 - protein, 123 aa, Artificial Sequence
  source: /note="Description of Artificial Sequence: Synthetic polypeptide"
EVQLLESGGGLVQPGGSLRLSCAASGFTFTSYAMSWVRQAPGKGLEWVATISHRGTYTYYPDSVKGRFTISRDNAKNTLYLQMNSLRAEDTAVYYCARHPIYSGWYQGYFDYWGQGTLVTVSS

SEQ ID NO: 6385 - protein, 123 aa, Artificial Sequence
  source: /note="Description of Artificial Sequence: Synthetic polypeptide"
EVQLLESGGGLVQPGGSLRLSCAASGFTFTSYAMSWVRQAPGKGLEWVATISHRGRYTYYPDSVKGRFTISRDNAKNTLYLQMNSLRAEDTAVYYCARHPIYSGNYQGYFDYWGQGTLVTVSS

SEQ ID NO: 6386 - protein, 123 aa, Artificial Sequence
  source: /note="Description of Artificial Sequence: Synthetic polypeptide"
EVQLLESGGGLVQPGGSLRLSCAASGFTFTSYAMSWVRQAPGKGLEWVATISHRGRYTYYPDSVKGRFTISRDNAKNTLYLQMNSLRAEDTAVYYCARHPIYSGFYQGYFDYWGQGTLVTVSS

SEQ ID NO: 6387 - protein, 123 aa, Artificial Sequence
  source: /note="Description of Artificial Sequence: Synthetic polypeptide"
EVQLLESGGGLVQPGGSLRLSCAASGFTFTSYAMSWVRQAPGKGLEWVATISRGGTYTYYPDSVKGRFTISRDNAKNTLYLQMNSLRAEDTAVYYCARHPIYSGNYQGYFDYWGQGTLVTVSS

SEQ ID NO: 6388 - protein, 123 aa, Artificial Sequence
  source: /note="Description of Artificial Sequence: Synthetic polypeptide"
EVQLLESGGGLVQPGGSLRLSCAASGFTFTSYAMSWVRQAPGKGLEWVATISRGGTYTYYPDSVKGRFTISRDNAKNTLYLQMNSLRAEDTAVYYCARHPIYSGQYQGYFDYWGQGTLVTVSS

SEQ ID NO: 6389 - protein, 123 aa, Artificial Sequence
  source: /note="Description of Artificial Sequence: Synthetic polypeptide"
EVQLLESGGGLVQPGGSLRLSCAASGFTFTSYAMSWVRQAPGKGLEWVATISSGGTYTYYPDSVKGRFTISRDNAKNTLYLQMNSLRAEDTAVYYCARHPIYSGNYQGYFDYWGQGTLVTVSS

SEQ ID NO: 6390 - protein, 123 aa, Artificial Sequence
  source: /note="Description of Artificial Sequence: Synthetic polypeptide"
EVQLLESGGGLVQPGGSLRLSCAASGFTFTSYAMSWVRQAPGKGLEWVATISHGGTYTYYPDSVKGRFTISRDNAKNTLYLQMNSLRAEDTAVYYCARHPIYSGFYQGYFDYWGQGTLVTVSS

SEQ ID NO: 6391 - protein, 123 aa, Artificial Sequence
  source: /note="Description of Artificial Sequence: Synthetic polypeptide"
EVQLLESGGGLVQPGGSLRLSCAASGFTFTSYAMSWVRQAPGKGLEWVATISHGGTYTYYPDSVKGRFTISRDNAKNTLYLQMNSLRAEDTAVYYCARHPIYSGWYQGYFDYWGQGTLVTVSS

SEQ ID NO: 6392 - protein, 123 aa, Artificial Sequence
  source: /note="Description of Artificial Sequence: Synthetic polypeptide"
EVQLLESGGGLVQPGGSLRLSCAASGFTFTSYAMSWVRQAPGKGLEWVATISHGGTYTYYPDSVKGRFTISRDNAKNTLYLQMNSLRAEDTAVYYCARHPIYAGNYQGYFDYWGQGTLVTVSS

SEQ ID NO: 6393 - protein, 123 aa, Artificial Sequence
  source: /note="Description of Artificial Sequence: Synthetic polypeptide"
EVQLLESGGGLVQPGGSLRLSCAASGFTFTSYAMSWVRQAPGKGLEWVATISHGGTYTYYPDSVKGRFTISRDNAKNTLYLQMNSLRAEDTAVYYCARHPIYCGNYQGYFDYWGQGTLVTVSS

SEQ ID NO: 6394 - protein, 123 aa, Artificial Sequence
  source: /note="Description of Artificial Sequence: Synthetic polypeptide"
EVQLLESGGGLVQPGGSLRLSCAASGFTFTSYAMSWVRQAPGKGLEWVATISHGGTYTYYPDSVKGRFTISRDNAKNTLYLQMNSLRAEDTAVYYCARHPIYDGNYQGYFDYWGQGTLVTVSS

SEQ ID NO: 6395 - protein, 123 aa, Artificial Sequence
  source: /note="Description of Artificial Sequence: Synthetic polypeptide"
EVQLLESGGGLVQPGGSLRLSCAASGFTFTSYAMSWVRQAPGKGLEWVATISHGGTYTYYPDSVKGRFTISRDNAKNTLYLQMNSLRAEDTAVYYCARHPIYEGNYQGYFDYWGQGTLVTVSS

SEQ ID NO: 6396 - protein, 123 aa, Artificial Sequence
  source: /note="Description of Artificial Sequence: Synthetic polypeptide"
EVQLLESGGGLVQPGGSLRLSCAASGFTFTSYAMSWVRQAPGKGLEWVATISHGGTYTYYPDSVKGRFTISRDNAKNTLYLQMNSLRAEDTAVYYCARHPIYFGNYQGYFDYWGQGTLVTVSS

SEQ ID NO: 6397 - protein, 123 aa, Artificial Sequence
  source: /note="Description of Artificial Sequence: Synthetic polypeptide"
EVQLLESGGGLVQPGGSLRLSCAASGFTFTSYAMSWVRQAPGKGLEWVATISHGGTYTYYPDSVKGRFTISRDNAKNTLYLQMNSLRAEDTAVYYCARHPIYGGNYQGYFDYWGQGTLVTVSS

SEQ ID NO: 6398 - protein, 123 aa, Artificial Sequence
  source: /note="Description of Artificial Sequence: Synthetic polypeptide"
EVQLLESGGGLVQPGGSLRLSCAASGFTFTSYAMSWVRQAPGKGLEWVATISHGGTYTYYPDSVKGRFTISRDNAKNTLYLQMNSLRAEDTAVYYCARHPIYHGNYQGYFDYWGQGTLVTVSS

SEQ ID NO: 6399 - protein, 123 aa, Artificial Sequence
  source: /note="Description of Artificial Sequence: Synthetic polypeptide"
EVQLLESGGGLVQPGGSLRLSCAASGFTFTSYAMSWVRQAPGKGLEWVATISHGGTYTYYPDSVKGRFTISRDNAKNTLYLQMNSLRAEDTAVYYCARHPIYIGNYQGYFDYWGQGTLVTVSS

SEQ ID NO: 6400 - protein, 123 aa, Artificial Sequence
  source: /note="Description of Artificial Sequence: Synthetic polypeptide"
EVQLLESGGGLVQPGGSLRLSCAASGFTFTSYAMSWVRQAPGKGLEWVATISHGGTYTYYPDSVKGRFTISRDNAKNTLYLQMNSLRAEDTAVYYCARHPIYKGNYQGYFDYWGQGTLVTVSS

SEQ ID NO: 6401 - protein, 123 aa, Artificial Sequence
  source: /note="Description of Artificial Sequence: Synthetic polypeptide"
EVQLLESGGGLVQPGGSLRLSCAASGFTFTSYAMSWVRQAPGKGLEWVATISHGGTYTYYPDSVKGRFTISRDNAKNTLYLQMNSLRAEDTAVYYCARHPIYLGNYQGYFDYWGQGTLVTVSS

SEQ ID NO: 6402 - protein, 123 aa, Artificial Sequence
  source: /note="Description of Artificial Sequence: Synthetic polypeptide"
EVQLLESGGGLVQPGGSLRLSCAASGFTFTSYAMSWVRQAPGKGLEWVATISHGGTYTYYPDSVKGRFTISRDNAKNTLYLQMNSLRAEDTAVYYCARHPIYMGNYQGYFDYWGQGTLVTVSS

SEQ ID NO: 6403 - protein, 123 aa, Artificial Sequence
  source: /note="Description of Artificial Sequence: Synthetic polypeptide"
EVQLLESGGGLVQPGGSLRLSCAASGFTFTSYAMSWVRQAPGKGLEWVATISHGGTYTYYPDSVKGRFTISRDNAKNTLYLQMNSLRAEDTAVYYCARHPIYNGNYQGYFDYWGQGTLVTVSS

SEQ ID NO: 6404 - protein, 123 aa, Artificial Sequence
  source: /note="Description of Artificial Sequence: Synthetic polypeptide"
EVQLLESGGGLVQPGGSLRLSCAASGFTFTSYAMSWVRQAPGKGLEWVATISHGGTYTYYPDSVKGRFTISRDNAKNTLYLQMNSLRAEDTAVYYCARHPIYPGNYQGYFDYWGQGTLVTVSS

SEQ ID NO: 6405 - protein, 123 aa, Artificial Sequence
  source: /note="Description of Artificial Sequence: Synthetic polypeptide"
EVQLLESGGGLVQPGGSLRLSCAASGFTFTSYAMSWVRQAPGKGLEWVATISHGGTYTYYPDSVKGRFTISRDNAKNTLYLQMNSLRAEDTAVYYCARHPIYQGNYQGYFDYWGQGTLVTVSS

SEQ ID NO: 6406 - protein, 123 aa, Artificial Sequence
  source: /note="Description of Artificial Sequence: Synthetic polypeptide"
EVQLLESGGGLVQPGGSLRLSCAASGFTFTSYAMSWVRQAPGKGLEWVATISHGGTYTYYPDSVKGRFTISRDNAKNTLYLQMNSLRAEDTAVYYCARHPIYRGNYQGYFDYWGQGTLVTVSS

SEQ ID NO: 6407 - protein, 123 aa, Artificial Sequence
  source: /note="Description of Artificial Sequence: Synthetic polypeptide"
EVQLLESGGGLVQPGGSLRLSCAASGFTFTSYAMSWVRQAPGKGLEWVATISHGGTYTYYPDSVKGRFTISRDNAKNTLYLQMNSLRAEDTAVYYCARHPIYTGNYQGYFDYWGQGTLVTVSS

SEQ ID NO: 6408 - protein, 123 aa, Artificial Sequence
  source: /note="Description of Artificial Sequence: Synthetic polypeptide"
EVQLLESGGGLVQPGGSLRLSCAASGFTFTSYAMSWVRQAPGKGLEWVATISHGGTYTYYPDSVKGRFTISRDNAKNTLYLQMNSLRAEDTAVYYCARHPIYVGNYQGYFDYWGQGTLVTVSS

SEQ ID NO: 6409 - protein, 123 aa, Artificial Sequence
  source: /note="Description of Artificial Sequence: Synthetic polypeptide"
EVQLLESGGGLVQPGGSLRLSCAASGFTFTSYAMSWVRQAPGKGLEWVATISHGGTYTYYPDSVKGRFTISRDNAKNTLYLQMNSLRAEDTAVYYCARHPIYWGNYQGYFDYWGQGTLVTVSS

SEQ ID NO: 6410 - protein, 123 aa, Artificial Sequence
  source: /note="Description of Artificial Sequence: Synthetic polypeptide"
EVQLLESGGGLVQPGGSLRLSCAASGFTFTSYAMSWVRQAPGKGLEWVATISHGGTYTYYPDSVKGRFTISRDNAKNTLYLQMNSLRAEDTAVYYCARHPIYYGNYQGYFDYWGQGTLVTVSS

SEQ ID NO: 6411 - protein, 123 aa, Artificial Sequence
  source: /note="Description of Artificial Sequence: Synthetic polypeptide"
EVQLLESGGGLVQPGGSLRLSCAASGFTFRSYAMSWVRQAPGKGLEWVATISHGGTYTYYPDSVKGRFTISRDNAKNTLYLQMNSLRAEDTAVYYCARHPIYSGNYQGYFDYWGQGTLVTVSS

SEQ ID NO: 6412 - protein, 123 aa, Artificial Sequence
  source: /note="Description of Artificial Sequence: Synthetic polypeptide"
EVQLLESGGGLVQPGGSLRLSCAASGFTFTSYAMSWVRQAPGKGLEWVATISHGGKYTYYPDSVKGRFTISRDNAKNTLYLQMNSLRAEDTAVYYCARHPIYSGNYQGYFDYWGQGTLVTVSS

SEQ ID NO: 6413 - protein, 123 aa, Artificial Sequence
  source: /note="Description of Artificial Sequence: Synthetic polypeptide"
EVQLLESGGGLVQPGGSLRLSCAASGFTFTSYAMSWVRQAPGKGLEWVATISHGGKYTYYPDSVKGRFTISRDNAKNTLYLQMNSLRAEDTAVYYCARHPIYSGWYQGYFDYWGQGTLVTVSS

SEQ ID NO: 6414 - protein, 123 aa, Artificial Sequence
  source: /note="Description of Artificial Sequence: Synthetic polypeptide"
EVQLLESGGGLVQPGGSLRLSCAASGFTFTSYAMSWVRQAPGKGLEWVATISHGGRYTYYPDSVKGRFTISRDNAKNTLYLQMNSLRAEDTAVYYCARHPIYSGNYQGYFDYWGQGTLVTVSS

SEQ ID NO: 6415 - protein, 123 aa, Artificial Sequence
  source: /note="Description of Artificial Sequence: Synthetic polypeptide"
EVQLLESGGGLVQPGGSLRLSCAASGFTFTSYAMSWVRQAPGKGLEWVATISHGGRYTYYPDSVKGRFTISRDNAKNTLYLQMNSLRAEDTAVYYCARHPIYSGFYQGYFDYWGQGTLVTVSS

SEQ ID NO: 6416 - protein, 123 aa, Artificial Sequence
  source: /note="Description of Artificial Sequence: Synthetic polypeptide"
EVQLLESGGGLVQPGGSLRLSCAASGFTFTSYAMSWVRQAPGKGLEWVATISHGGWYTYYPDSVKGRFTISRDNAKNTLYLQMNSLRAEDTAVYYCARHPIYSGNYQGYFDYWGQGTLVTVSS

SEQ ID NO: 6417 - protein, 123 aa, Artificial Sequence
  source: /note="Description of Artificial Sequence: Synthetic polypeptide"
EVQLLESGGGLVQPGGSLRLSCAASGFTFTSYAMSWVRQAPGKGLEWVATISHGGYYTYYPDSVKGRFTISRDNAKNTLYLQMNSLRAEDTAVYYCARHPIYSGNYQGYFDYWGQGTLVTVSS

SEQ ID NO: 6418 - protein, 123 aa, Artificial Sequence
  source: /note="Description of Artificial Sequence: Synthetic polypeptide"
EVQLLESGGGLVQPGGSLRLSCAASGFTFTSYAMSWVRQAPGKGLEWVATISHGGTKTYYPDSVKGRFTISRDNAKNTLYLQMNSLRAEDTAVYYCARHPIYSGNYQGYFDYWGQGTLVTVSS

SEQ ID NO: 6419 - protein, 123 aa, Artificial Sequence
  source: /note="Description of Artificial Sequence: Synthetic polypeptide"
EVQLLESGGGLVQPGGSLRLSCAASGFTFTSYAMSWVRQAPGKGLEWVATISHGGTYTYYPDSVKGRFTISRDNAKNTLYLQMNSLRAEDTAVYYCARHPIHSGNYQGYFDYWGQGTLVTVSS

SEQ ID NO: 6420 - protein, 123 aa, Artificial Sequence
  source: /note="Description of Artificial Sequence: Synthetic polypeptide"
EVQLLESGGGLVQPGGSLRLSCAASGFTFTSYAMSWVRQAPGKGLEWVARISHGGTYTYYPDSVKGRFTISRDNAKNTLYLQMNSLRAEDTAVYYCARHPIYSGNYQGYFDYWGQGTLVTVSS

SEQ ID NO: 6421 - protein, 123 aa, Artificial Sequence
  source: /note="Description of Artificial Sequence: Synthetic polypeptide"
EVQLLESGGGLVQPGGSLRLSCAASGFTFTSYAMSWVRQAPGKGLEWVATISHGGTYTWYPDSVKGRFTISRDNAKNTLYLQMNSLRAEDTAVYYCARHPIYSGNYQGYFDYWGQGTLVTVSS

SEQ ID NO: 6422 - protein, 161 aa, Artificial Sequence
  source: /note="Description of Artificial Sequence: Synthetic polypeptide"
MDTRLCLVFLVLFIKGVQCEVQLVESGGGLVQPGRSLKLSCAASGFTFSNYYMAWVRQAPTKGLEWVASISFEGNRNHYGDSVKGRITISRDNAKSTLYLQMTSLRPEDTATYYCARHRGYSTNFYHDVLDAWGQGALVTVSSAETTAPSVYPLAPGTALK

SEQ ID NO: 6423 - protein, 156 aa, Artificial Sequence
  source: /note="Description of Artificial Sequence: Synthetic polypeptide"
MDIRLSLAFLVLFIKGVQCEVRLVESGGGLVQPGKSMKLSCVASGFKFSNYYMSWVRQAPAKGLEWVASISDGGGDTFCRDLVKGRFTISRDNAKSTLYLQMDSLRPEDTATYYCARRGAAMGGVMDAWGQGTSVTVSSAETTAPSVYPLAPGTAL

SEQ ID NO: 6424 - protein, 121 aa, Artificial Sequence
  source: /note="Description of Artificial Sequence: Synthetic polypeptide"
QIQLVQSGPELKKPGETVKISCKASGYTFTNYGMNWVKQAPGKGLKWMGWINTYTGEPTYADDFKGRFALSLETSASTAYLQINNLKNEDMATYFCARYRYNKYERAMDYWGQGTSVTVSS

SEQ ID NO: 6425 - protein, 117 aa, Artificial Sequence
  source: /note="Description of Artificial Sequence: Synthetic polypeptide"
EIQLQQTGPELVKPGASVKISCKASGYSFTDYIMLWVKQSHGKSLEWIGNINPYSGSSGYNLKFKGKATLTVDKSSSTAYMQLNSLTSEDSAVYYCARGKDFAMDYWGQGTSVTVSS

SEQ ID NO: 6426 - protein, 122 aa, Artificial Sequence
  source: /note="Description of Artificial Sequence: Synthetic polypeptide"
QVQLQQPGAELVQPGAPVKLSCKASGYIFTSYWMNWVKQRPGRGLEWIGRIDPSDSKIHYNQKFKDKATLTVDRSSSTAYIQLGSLTSEDSAVYYCAKEGGLRRGDYAMDYWGQGTSVTVSS

SEQ ID NO: 6427 - protein, 120 aa, Artificial Sequence
  source: /note="Description of Artificial Sequence: Synthetic polypeptide"
DVKLVESGGDLVKPGGSLKLSCAASGFTFSSYIMSWVRQTPEKRLEWVATISSGGSSTYYPDSVKGRFTISRDNAKNTLYLQMSSLKSEDTAMYYCTRDDDYDVKVFAYWGQGTLVTVSA

SEQ ID NO: 6428 - protein, 118 aa, Artificial Sequence
  source: /note="Description of Artificial Sequence: Synthetic polypeptide"
QVQLKESGPGLVQPSQTLSLTCTVSGFSLTSNGVSWVRQPPGKGLEWIAAISSGGTTYYNSAFKSRLSISRNTSKSQVLLKMNSLQTEDTAMYFCARRYGYGWYFDFWGPGTMVTVSS

SEQ ID NO: 6429 - protein, 116 aa, Artificial Sequence
  source: /note="Description of Artificial Sequence: Synthetic polypeptide"
QVQLKESGPGLVQSSQTLSLTCTVSGFSLTSNGVSWVRQPPGKGLEWIAAISSGGSTYYNSAFKSRLSISRNTSKSQVLLKMNSLQTEDTGMYFCARHRPFYFDYWGQGVMVTVSS

SEQ ID NO: 6430 - protein, 120 aa, Artificial Sequence
  source: /note="Description of Artificial Sequence: Synthetic polypeptide"
EVQLVESGGGLVQPGGSLRLSCAASGFTFSSYIMSWVRQAPGKGLEWVATISSGGSSTYYPDSVKGRFTISRDNAKNSLYLQMNSLRAEDTAVYYCTRDDDYDVKVFAYWGQGTMVTVSS

SEQ ID NO: 6431 - protein, 120 aa, Artificial Sequence
  source: /note="Description of Artificial Sequence: Synthetic polypeptide"
EVQLVESGGGLVQPGGSLRLSCAASGFTFSSYIMSWVRQAPGKRLEWVATISSGGSSTYYPDSVKGRFTISRDNAKNSLYLQMNSLRAEDTAVYYCTRDDDYDVKVFAYWGQGTMVTVSS

SEQ ID NO: 6432 - protein, 120 aa, Artificial Sequence
  source: /note="Description of Artificial Sequence: Synthetic polypeptide"
EVQLVESGGGLVQPGGSLRLSCAASGFTFSSYWMSWVRQAPGKGLEWVANIKQDGSEKYYVDSVKGRFTISRDNAKNSLYLQMNSLRAEDTAVYYCARDGAIFGVVSHIWGQGTMVTVSS

SEQ ID NO: 6433 - protein, 116 aa, Artificial Sequence
  source: /note="Description of Artificial Sequence: Synthetic polypeptide"
QVQLKESGPGLVQSSQTLSLTCTVSGFSLTSNGVSWVRQPPGKGLEWIAAISSGGSTYYNSAFKSRLSISPNTSKSQVLLKMNSLQTEDTGMYFCARHRPFYFDYWGQGVMVTVSS

SEQ ID NO: 6434 - protein, 116 aa, Artificial Sequence
  source: /note="Description of Artificial Sequence: Synthetic polypeptide"
QVTLKESGPVLVKPTETLTLTCTVSGFSLTSNGVSWVRQPPGKALEWIAAISSGGSTYYNSAFKSRLTISRDTSKSQVVLTMTNMDPVDTATYYCARHRPFYFDYWGQGTLVTVSS

SEQ ID NO: 6435 - protein, 116 aa, Artificial Sequence
  source: /note="Description of Artificial Sequence: Synthetic polypeptide"
QVTLKESGPVLVKPTETLTLTCTVSGFSLTSNGVSWVRQPPGKALEWIAAISSGGSTYYNSAFKSRLSISRDTSKSQVVLTMTNMDPVDTATYYCARHRPFYFDYWGQGTLVTVSS

SEQ ID NO: 6436 - protein, 116 aa, Artificial Sequence
  source: /note="Description of Artificial Sequence: Synthetic polypeptide"
QVTLKESGPVLVKPTETLTLTCTVSGFSLTSNGVSWVRQPPGKALEWIAAISSGGSTYYNSAFKSRLTISRNTSKSQVVLTMTNMDPVDTATYYCARHRPFYFDYWGQGTLVTVSS

SEQ ID NO: 6437 - protein, 116 aa, Artificial Sequence
  source: /note="Description of Artificial Sequence: Synthetic polypeptide"
QVTLKESGPVLVKPTETLTLTCTVSGFSLTSSGVSWVRQPPGKALEWIAAISSGGSTYYNSAFKSRLTISPDTSKSQVVLTMTNMDPVDTATYYCARHRPFYFDYWGQGTLVTVSS

SEQ ID NO: 6438 - protein, 116 aa, Artificial Sequence
  source: /note="Description of Artificial Sequence: Synthetic polypeptide"
QVTLKESGPVLVKPTETLTLTCTVSGFSLTSQGVSWVRQPPGKALEWIAAISSGGSTYYNSAFKSRLTISPDTSKSQVVLTMTNMDPVDTATYYCARHRPFYFDYWGQGTLVTVSS

SEQ ID NO: 6439 - protein, 116 aa, Artificial Sequence
  source: /note="Description of Artificial Sequence: Synthetic polypeptide"
QVTLKESGPVLVKPTETLTLTCTVSGFSLTSNAVSWVRQPPGKALEWIAAISSGGSTYYNSAFKSRLTISRDTSKSQVVLTMTNMDPVDTATYYCARHRPFYFDYWGQGTLVTVSS

SEQ ID NO: 6440 - protein, 131 aa, Artificial Sequence
  source: /note="Description of Artificial Sequence: Synthetic polypeptide"
QVTLKESGPVLVKPTETLTLTCTVSGFSLSNARMGVSWIRQPPGKALEWLAHIFSNDEKSYSTSLKSRLTISKDTSKSQVVLTMTNMDPVDTATYYCARIGESASDRYCSGGSCFGWFDPWGQGTLVTVSS

SEQ ID NO: 6441 - protein, 118 aa, Artificial Sequence
  source: /note="Description of Artificial Sequence: Synthetic polypeptide"
QVTLKESGPVLVKPTETLTLTCTVSGFSLTSNGVSWVRQPPGKALEWIAAISSGGTTYYNSAFKSRLTISRDTSKSQVVLTMTNMDPVDTATYYCARRYGYGWYFDFWGQGTLVTVSS

SEQ ID NO: 6442 - protein, 118 aa, Artificial Sequence
  source: /note="Description of Artificial Sequence: Synthetic polypeptide"
QVTLKESGPVLVKPTETLTLTCTVSGFSLTSNGVSWVRQPPGKALEWIAAISSGGTTYYNSAFKSRLSISRDTSKSQVVLTMTNMDPVDTATYYCARRYGYGWYFDFWGQGTLVTVSS

SEQ ID NO: 6443 - protein, 118 aa, Artificial Sequence
  source: /note="Description of Artificial Sequence: Synthetic polypeptide"
QVTLKESGPVLVKPTETLTLTCTVSGFSLTSSGVSWVRQPPGKALEWIAAISSGGTTYYNSAFKSRLTISRDTSKSQVVLTMTNMDPVDTATYYCARRYGYGWYFDFWGQGTLVTVSS

SEQ ID NO: 6444 - protein, 118 aa, Artificial Sequence
  source: /note="Description of Artificial Sequence: Synthetic polypeptide"
QVTLKESGPVLVKPTETLTLTCTVSGFSLTSQGVSWVRQPPGKALEWIAAISSGGTTYYNSAFKSRLTISRDTSKSQVVLTMTNMDPVDTATYYCARRYGYGWYFDFWGQGTLVTVSS

SEQ ID NO: 6445 - protein, 118 aa, Artificial Sequence
  source: /note="Description of Artificial Sequence: Synthetic polypeptide"
QVTLKESGPVLVKPTETLTLTCTVSGFSLTSNAVSWVRQPPGKALEWIAAISSGGTTYYNSAFKSRLTISRDTSKSQVVLTMTNMDPVDTATYYCARRYGYGWYFDFWGQGTLVTVSS

SEQ ID NO: 6446 - protein, 120 aa, Artificial Sequence
  source: /note="Description of Artificial Sequence: Synthetic polypeptide"
EVKLVESGGGLVQPGGSLRLSCAASGFTFSSYIMSWVRQTPEKRLEWVATISSGGSSTYYPDSVKGRFTISRDNAKNTLYLQMSSLKSEDTAMYYCTRDDDYDVKVFAYWGQGTLVTVSS

SEQ ID NO: 6447 - protein, 120 aa, Artificial Sequence
  source: /note="Description of Artificial Sequence: Synthetic polypeptide"
EVQLVESGGDLVKPGGSLKLSCAASGFSFSSYGMSWVRQTPDKRLEWVATISNGGGYTYYPDSVKGRFTISRDNAKNTLYLQMSSLKSEDSAMYYCARRERYDENGFAYWGQGTLVTVSA

SEQ ID NO: 6448 - protein, 120 aa, Artificial Sequence
  source: /note="Description of Artificial Sequence: Synthetic polypeptide"
QVQLQESGGGLVKPGGSLKLSCAASGFTFSSYGMSWVRQTPDKRLEWVATISSGGSYTYYPDSVKGRFTISRDNAKNTLYLQMSSLKSEDTAMYYCARLYYGYRYYFDYWGQGTMVTVSS

SEQ ID NO: 6449 - protein, 120 aa, Artificial Sequence
  source: /note="Description of Artificial Sequence: Synthetic polypeptide"
EVQLVESGGGLVQPGGSLRLSCAASGFTFSSYEMNWVRQAPGKGLEWVSYISSSGSTIYYADSVKGRFTISRDNAKNSLYLQMNSLRAEDTAMYYCARGDLGELSHFDYWGQGTLVTVSS

SEQ ID NO: 6450 - protein, 116 aa, Artificial Sequence
  source: /note="Description of Artificial Sequence: Synthetic polypeptide"
QVTLKESGPVLVKPTETLTLTCTVSGFSLTSSGVSWVRQPPGKALEWIAAISSGGSTYYNSAFKSRLTISRDTSKSQVVLTMTNMDPVDTATYYCARHRPFYFDYWGQGTLVTVSS

SEQ ID NO: 6451 - protein, 116 aa, Artificial Sequence
  source: /note="Description of Artificial Sequence: Synthetic polypeptide"
QVTLKESGPVLVKPTETLTLTCTVSGFSLTSQGVSWVRQPPGKALEWIAAISSGGSTYYNSAFKSRLTISRDTSKSQVVLTMTNMDPVDTATYYCARHRPFYFDYWGQGTLVTVSS

SEQ ID NO: 6452 - protein, 122 aa, Homo sapiens
EVQLVESGGGLVKPGGSLRLSCAASGFTFSNAWMSWVRQAPGKGLEWVGRIKSKTDGGTTDYAAPVKGRFTISRDDSKNTLYLQMNSLKTEDTAVYYCTTNDYGDYEAFDIWGQGTMVTVSS

SEQ ID NO: 6453 - protein, 118 aa, Homo sapiens
QVQLVQSGPEVKKPGASVKVSCKASGYTFTGYYMHWVRQAPGQGLEWMGWINPISGGTNYAQKFQGRVTMTRDTSISTAYMELSRLRSDDTAVYYCARQDNWNYFDYWGQGTLVTVSS

SEQ ID NO: 6454 - protein, 123 aa, Homo sapiens
EVQLVESGGGLVKPGGSLRLSCAASGFTFSNAWMSWVRQAPGKGLDWVGRVKSKTDGGTTDYAAPVKGRFTISRDDSKNTLYLQMNSLKTEDTAVYYCTTNDYGGPVDAFDIWGQGTMVTVSS

SEQ ID NO: 6455 - protein, 116 aa, Homo sapiens
QVQLQESGPGLVKPSETLSLTCTVSGGSISSYYWSWIRQPAGKGLEWIGHIFSSGSTNYNPSLKSRVTMSVDTSKSQFSLKLSSVTAADTAVYLCARGGVTWFDPWGQGTLVTVSS

SEQ ID NO: 6456 - protein, 116 aa, Homo sapiens
QVQLQESGPGLVKPSETLSLTCTVSGGSISSYYWSWIRQPAGKGLEWIGRIYTSGSTNYHPSFKSRVTMSVDTSKTQFSLKLSSLTAADTAVYYCARGGITWFDPWGQGTLVTVSS

SEQ ID NO: 6457 - protein, 120 aa, Homo sapiens
EVQLVESGGGLVQPGRSLRLSCTASGFTFGDYAMSWFRQAPGKGLEWVGFIRSKAYGGTTEYAASVKGRFTISRDDTKSIAYLQMNSLKIEDTAVHYCTREGSFGALDIWGQGIMVTVSS

SEQ ID NO: 6458 - protein, 119 aa, Homo sapiens
QVQLVQSGAEVKKPGASVKVSCKASGYTFTGYYMHWVRQAPGQGLEWMGWINPNSGGTNNAQKFQGRVTMTRDTSISTAYMELSRLRSDDTAVYYCARGGYSGPYFDYWGQGTLVTVSS

SEQ ID NO: 6459 - protein, 122 aa, Homo sapiens
EVQLVESGGGLVKPGGSLRLSCAASGFTFSNAWMSWVRQAPGKGLEWVGRIKSKTDGGTTDYAAPVKGRFTISRDDSKNTLYLQMNSLKTEDTAVHYCTTGDYSYTDAFDIWGQGTMVTVSS

SEQ ID NO: 6460 - protein, 112 aa, Homo sapiens
QVQLQESGPGLVKPSETLSLTCTVSGGSISSSYWTWIRQPPGKGLEWIGYIHYSGSTNYNPSLKSRVTISVDTSKNQFSLKLSSVTAADTAVYYCARGFDYWGQGTLVTVSS

SEQ ID NO: 6461 - protein, 124 aa, Homo sapiens
EVQLVESGGDLVQPGGSLRLSCADSRFTFSSYSMNWVRQAPGKGLEWVSYISPSSSTIYYADSVRGRFTISRDNAKNSLYLQMNSLRNEDTAVYYCARDFPHDYGYYPHYFDYWGQGTLVTVSS

SEQ ID NO: 6462 - protein, 118 aa, Homo sapiens
QVTLRESGPALVKPTQTLTLTCTFSGFSLSTSGMCVSWIRQPPGKALECLALIDWDDDKYYSTSLKTRLTISKDTSKNQVVLTMTNMDPVDTATYYCARTQLGIADYWGQGTLVTVSS

SEQ ID NO: 6463 - protein, 120 aa, Homo sapiens
QVQLQESGPGLVKPSETLSLTCTVSGGSISSYYWSWIRQPAGKGLEWIGRIYTSGTTNFNPSLKSRVTMSVDTSKNQFSLKLSSVTAADTAVYYCATLSGTNWGSPFDYWGQGTLVTVSS

SEQ ID NO: 6464 - protein, 125 aa, Homo sapiens
QVQLQESGPGLVKPSETLSLTCTVTGGSISSYYWSWIRQPAGKGLEWIGRIYTSGSTNYNPSLKSRVTMSVDTSKNHFSLKLSSVTAADTAVYYCAREILVVVAATRTGGVFDIWGQGTMVTVSS

SEQ ID NO: 6465 - protein, 112 aa, Homo sapiens
QVQLQESGPGLVKPSETLSLTCSVSGGSISSYYWSWIRQPPGKGLEWIGYVSYSGGTNYNPSLKSRVTISVDTSKNQFSLKLSSVTAADTAVYYCARGFDYWGQGTLVTVSS

SEQ ID NO: 6466 - protein, 119 aa, Homo sapiens
QVQLEQSGAEVKRPGASVKVSCKASGYTFTGYYMHWVRQAPGQGLEWMGWINPNRGDTNYAQKFQGRVTMTRDTSISTAYMELSRLRSDDTAVYYCARDLEGGGPFDYWGQGTLVTVSS

SEQ ID NO: 6467 - protein, 112 aa, Homo sapiens
QVQLQESGPGLVKPSETLSLTCTVSGGSISSYYWSWIRQPPGKVLEWIGYFSYNGNTNYNPSLKSRVTISVDTSKNQFSLKLSSVTAADTAVYYCTRGMDVWGQGTTVTVSS

SEQ ID NO: 6468 - protein, 117 aa, Homo sapiens
QVQLQESGPGLVKPSETLSLTCTVSGGSISSYYWSWIRQPAGKGLEWIGRIYTSGSTNYNPSLKSRVTMSVDTSKNQFSLKLSSVTAADTAVYYCARDRTFYAFDMWGQGTMVTVSS

SEQ ID NO: 6469 - protein, 119 aa, Homo sapiens
EVQLVESGGGLVQPGGSLRLSCAASGFTFSSYDMHWVRQATGKGLEWVSAIGTAGDTYYPGSVKGRFTISRENAKNSLYLQMNSLRAGDTAVYYCARGHIVVVTAMDYWGQGTLVTVSS

SEQ ID NO: 6470 - protein, 115 aa, Homo sapiens
QVQLQQWGAGLLKPSETLSLTCAVYGGSCSAYYWSWIRQPPGKGLEWIGEINHSGSTNYNPSLKSRVTISVDTSRNQFSLKLSSVTAADTAVYYCAREADAFDIWGQGTMVTVSS

SEQ ID NO: 6471 - protein, 122 aa, Homo sapiens
EVQLVESGGGLVKPGGSLRLSCAASGFTFSNAWMSWVRQAPGKGLEWVGRIKSKTDGGTTDYAAPVKNRFTISRDDSKNTLYLQMNSLKTEDTAVYYCTTSDYGDFDAFDIWGQGTMVTVSS

SEQ ID NO: 6472 - protein, 115 aa, Homo sapiens
QVQLQQWGAGLLKPSETLSLTCAVYGGSFSAYYWSWIRQPPGKGLEWIGEINHSGSTNYNPSLKSRVTISGDTSKNQFSLKLSSVTAADTAVYYCAREADAFDIWGQGTMVTVSS

SEQ ID NO: 6473 - protein, 119 aa, Homo sapiens
EVQLVESGGGLVQPGGSLRLSCAASGFTFSSYWMHWVRQAPGKGLVWVSRINSDGSSTSYADSVKGRFTISRDNAKNTLYLQMNSLRAEDTAVYYCARDGGTTGAFDIWGQGTMVTVSS

SEQ ID NO: 6474 - protein, 122 aa, Homo sapiens
EVHLVESGGGLVKPGGSLRLSCAASGFTFSSYSMNWFRQAPGKGLEWVSSISSSSSYIYYADSVKGRFTISRDNAKNSLSLQMNSLRAEDTAVYYCARAGAVAALYNWFDPWGQGTLVTVSS

SEQ ID NO: 6475 - protein, 120 aa, Homo sapiens
QITLKESGPPLVKPTQTLTLTCTFSGFSLSTSGVGVGWIRQPPGKALEWLALIYWNDDKRYSPSLKSRLTITKDTSKNQVVLTMTNMDPVDTATYYCAHSPRYSGYFDYWGQGTLVTVSS

SEQ ID NO: 6476 - protein, 118 aa, Homo sapiens
QVQLVQSGAEVKKPGASVKVSCKASGYTFTGYYMHWVRQAPGQGLEWMGWINPNSGGTNYAQKFQGKFTMTRDTSISTAYMELSRLRSDDTAVYYCARESPYWYFDLWGRGTLVTVSS

SEQ ID NO: 6477 - protein, 116 aa, Homo sapiens
QVQLQESGPGLVKPSETLSLTCTVSGGSISSYYWSWIRQPPGKGLEWIGYIYYSGSTKNPSLKSRVTISVDTSKNQFSLKLSSVTAADTAVYYCARWRTFYGMDVWGQGTTVTVSS

SEQ ID NO: 6478 - protein, 113 aa, Homo sapiens
QVQLQESGPGLVKPSETLSLTCTVSGGSISSYYWTWIRQPPGKGLEWIGYISYSGGTNYNPSLKSRVTISVDTSKNQFSLKLSSVTAADTAVYYCARELGNYWGQGTLVTVSS

SEQ ID NO: 6479 - protein, 123 aa, Homo sapiens
EVQLVESGGGLVKPGGSLRLSCAASGFTFSSYNMNWVRQAPGKGLEWVSSISSSSTYIYYADSLKGRFTISRDNAMNSLYLQMSSLRAEDTAVYYCARDSGTYPYYYFGMDVWGQGTTVTVSS

SEQ ID NO: 6480 - protein, 117 aa, Homo sapiens
QVQLQESGPGLVKPSETLSLSCTVSGGSISSYYWSWIRQPAGKGLEWIGRIYTSGSTNYNPSLKSRVTMSVDTSKNQFSLKLSSVTAADTAVYYCARDRSFYGMDVWGQGTTVTVSS

SEQ ID NO: 6481 - protein, 120 aa, Homo sapiens
EVQLVESGGGLVKPGGSLRLSCAASGFTFSSYSMNWVRQAPGKGLEWVSSISSSSSYIYYADSVKGRFTISRDNAKNSLFLQMNSLRAEDTAVYYCARGGSFPYNWFDPWGQGTLVTVSS

SEQ ID NO: 6482 - protein, 120 aa, Homo sapiens
EVQLVESGGGLVQPGRSLRLSCTASGFTFGDYAMTWFRQAPGKGLEWVGFIRSKAYGGTTEYAASVKGRFTISRDDSKSIAYLQMNSLKTEDTAVYYCTREGSFGALDIWGQGTMVTVSS

SEQ ID NO: 6483 - protein, 121 aa, Homo sapiens
EVQLVESGGGLVKPGGSLRLSCAASGFTFSNAWMNWVRQAPGKGLEWVGRINSKTDGGTTDYAAPVKGRFTISRDDSKTTLYLQMNSLKTEDTAVYYCTTDGVYPDVFDIWGQGTMVTVSS

SEQ ID NO: 6484 - protein, 118 aa, Homo sapiens
QVQVVQSGAEVKKPGASVKVSCKASGYTFTGYYMHWVRQAPGQGLEWMGWINPNSGGTNYAQRFQGRVTMTRDTSISTAYMELSRLRSDDTAVYYCARLSPYWYFDLWGRGTLVTVSS

SEQ ID NO: 6485 - protein, 126 aa, Homo sapiens
EVQLVESGGGLVQPGGSLRLSCAASGFTFSSYSMNWVRQAPGKGLEWVSYISSSSSTIYYADSVKGRFTISRDNAKNSLYLQMNSLRDEDTAVYYCAREGERFCGADCYPHWFDPWGQGTLVTVSS

SEQ ID NO: 6486 - protein, 126 aa, Homo sapiens
QVQLQESGPGLVKPSETLSLTCTVSGGSISSYYWSWIRQPPGKGLEWIGYIYYRGSTNYNPSLKSRVTISVDTSKNQFSLKLSSVTAADTAVYYCARDNWNYGGPTYYYYYGMDVWGQGTTVTVSS

SEQ ID NO: 6487 - protein, 116 aa, Homo sapiens
EVQVVESGGGLVQPGKSLRLSCAASGFPFSVYWMTWVRQAPGKGLEWVANIKQDGSEKYYVDSVKGRFTISRDNAKNSLYLQMNSLRAEDTAVYCCASGYHLFDYWGQGTLVTVSS

SEQ ID NO: 6488 - protein, 122 aa, Homo sapiens
EVQLVESGGGLVKPGGSLRLSCAASGFTFSNAWMIWVRQAPGKGLEWVGRIKSKTDGGTTDYAAPVKGRFTISRDDSKNTLYLQMNSLKTEDTAVYYCTSTDYGDYDAFDIWGQGTMVTVSS

SEQ ID NO: 6489 - protein, 120 aa, Homo sapiens
EVQLVESGGGLVKPGGSLRLSCAASGFTFSSYSMNWVRQAPGKGLEWVSSISSSSSYIYYADSVKGRFTISRDNAKNSLYLQMNSLRAEDTAVYYCARGGSYPYNWFDPWGQGTLVTVSS

SEQ ID NO: 6490 - protein, 118 aa, Homo sapiens
QVQLVQSGAEVKKPGASVKVSCKASGYTFTGYYMHWVRQAPGQGLEWMGWINPNSGGTNYAQKFQGRVTMTRDTSISTAYMELSRLRSDDTAVYYCARDNHDGAFDIWGQGTMVTVSS

SEQ ID NO: 6491 - protein, 119 aa, Homo sapiens
QVQLVQSGAEVKKPGASVKVSCKASGYTFTGYYMHWVRQAPGQGLEWMGWINPNSGGTNYAQKFQGRVTMTRDTSISTAYMELSRLRSDDTAVYYCARDEDSGSYFDYWGQGTLVTVSS

SEQ ID NO: 6492 - protein, 121 aa, Homo sapiens
QITLKESGPTLVKPTQTLTLTCTFSGFSLSTSGVGVGWIRQPPGKALEWLALIYWNDDKRYSPSLKSRLTITKDTSKNQVVLTMTNMDPVDTATYYCAHQERRSGWSFDYWGQGTLVSVSS

SEQ ID NO: 6493 - protein, 126 aa, Homo sapiens
QVQLVESGGGVVQPGRSLRLSCAASGFTFSSYGMHWVRQAPGKGLEWVAVIWYDGSIKYYADSVKGRFTISRDNSKNTLYLQMNSLRAEDTAVYYCARATYYYDSSGYYSNWFDPWGQGTLVTVSS

SEQ ID NO: 6494 - protein, 116 aa, Homo sapiens
EVQVVESGGGLVQPGKSLRLSCAASGFTFSTYWMTWVRQAPGKGLEWVANIKQDGSEKYYVDSVKGRFTISRDNAKNSLYLQMNSLRAEDTAVYCCASGYHLFDYWGQGTLVTVSS

SEQ ID NO: 6495 - protein, 118 aa, Homo sapiens
QVQLVQSGAEVKKPGASVKVSCKASGYTFTGYYMHWVRQAPGQGLEWMGRINPNSGGTYYAQKFQGRVTMTRDTSISTAYVELSRLRSDDTAVYYCARKNPWGHFDYWGQGTLVTVSS

SEQ ID NO: 6496 - protein, 118 aa, Homo sapiens
QVQLVESGGGVVQPGRSLRLSCAASGFTFSTFAMHWVRQAPGKGLEWVAVISYDGSNKYYVDSVKGRFTISRDNSKNTLYLQMNSLRAEDTAMYYCARDGTGDALDIWGQGTMVTVSS

SEQ ID NO: 6497 - protein, 117 aa, Homo sapiens
QVQLQESGPGLVKPSETLSLTCTVSGASISTYFWSWLRQPPGKGLEWIGYIFYSGSINYNPSLKSRVTISVDTSKNQFSLELSSVTAADTAVYYCARDRTFYGMDVWGQGTTVTVSS

SEQ ID NO: 6498 - protein, 117 aa, Homo sapiens
QVQLQESGPGLVKPSETLSLTCTVSGGSISSYYWSWIRQPAGKGLEWIGRIYSSGSINYNPSLKSRVTMSVDTSKNQFSLKLSSVTAADTAVFYCARDRAFYGMDVWGQGTTVTVSS

SEQ ID NO: 6499 - protein, 117 aa, Homo sapiens
QVQFVESGGGVVQPGRSLRLSCAASGFTLSSYGMHWVRQAPGKGLEWVAVIWYDGSNEYYADSVKGRFTISRDNSKNTLYLQMNSLRAEDTAVYYCARDRAWGSGDWGQGTLVTVSS

SEQ ID NO: 6500 - protein, 117 aa, Homo sapiens
QVQLQESGPGLVKPSETLSLTCTVSGGSISSYYWIWIRQPPGKGLEWIGYFYYSGSTNYNPSLKSRVTISVGTSKNQFSLKLSSVTAADTAVYYCARSRLGSIFDYWGQGTLVTVSS

SEQ ID NO: 6501 - protein, 117 aa, Homo sapiens
QVQLQESGPGLVKPSETLSLTCTVSGGSISSYYWNWIRQPPGKGLEWIGYIYYSGSTNYNPSLKSRVTISLDTSKNQFSLKLSSVTAADTAVYHCARGRLNGAFDYWGQGTLVTVSS

SEQ ID NO: 6502 - protein, 117 aa, Homo sapiens
QVQLQESGPGLVKPSETLSLTCTISSGSISSYYWSWIRQPAGKGLEWIGRIYTSGSTNYHPSLKSRVTMSVDTSKNHFSLKLTSVTAADTAVYYCARERLTGFFDYWGQGTLVTVSS

SEQ ID NO: 6503 - protein, 117 aa, Homo sapiens
QVQLQESGPGLVKPSETLSLTCTVSGGSISSYYWSWIRQPAGKGLEWIGRIYISGSIYNNPSLKSRVTMSVDTSKNQFSLKLSSVTAADTAVYYCARDRVGMTFDIWGQGTMVTVSS

SEQ ID NO: 6504 - protein, 117 aa, Homo sapiens
QVQLQESGPGLVKPSETLSLTCTVSGGSISSYYWTWIRQPPGKGLEWIGYIYYSGITNYNPSLKSRVTMSMDTSKNQFSLRLSSVTAADTAVYYCARGRIIGAFDIWGQGTMVTVSS

SEQ ID NO: 6505 - protein, 116 aa, Homo sapiens
QVQLQESGPGLVKPSETLSLTCTVSGGSISSYYWSWIRQPAGKGLEWIGRIYTSGTTNYNPSLKSRVTMSVDTSKNQFSLKLNSVTAADTAVYYCARERVIWFDPWGQGTLVTVSS

SEQ ID NO: 6506 - protein, 117 aa, Homo sapiens
QVQLVQSGAEVKKPGASVKVSCKASGYTFTDYYMHWVRQAPGQGLEWMGWINPNSGGANYAQKFQGRVTMTRDTSISIAYMELSRLRSDDTAIYYCARGRLTFFDYWGQGTLVTVSS

SEQ ID NO: 6507 - protein, 117 aa, Homo sapiens
QVQLQESGPGLVKPSETLSLTCTVSGGSISSFYWSWIRQSPGRGLEWIGYIFYSGSTKYNPSLMSRVTISADTSKNQFSLKLSSVTAADTAVYYCARGRLGNYFDYWGQGTLVTVSS

SEQ ID NO: 6508 - protein, 117 aa, Homo sapiens
QVQLQESGPGLVKPSETLSLTCTVSGGSISSYYWSWIRQPAGKGLEWIGRIYISGTTNYNPSLMSRVTMSVDTSKNQFSLKLTSVTAADTAVYYCARERLVRAFDIWGQGTMVTVSS

SEQ ID NO: 6509 - protein, 117 aa, Homo sapiens
QVQLQESGPGLVKPSETLSLTCTVSGGSISSYYWSWIRQPAGKGLEWIGRIYTSGSTKYNPSLKSRVTMSVDTSKNQFSLKLSSVTAADTAVYYCAREGVTGGFDPWGQGTLVTVSS

SEQ ID NO: 6510 - protein, 116 aa, Homo sapiens
QVQLQESGPGLVKPSETLSLTCTVSGGSISSYYWSWIRQPAGKGLEWIGRIYTSGSTKNPSLKSRVTMSVDTSKNQFSLKLSSVTAADTAVYYCARLTVVGALDYWGQGTLVTVSS

SEQ ID NO: 6511 - protein, 118 aa, Homo sapiens
EVQLVESGGGLVQPGGSLRLSCAASGFTFSSYSMNWVRQAPGKGLEWVSYISSSSSTIYYADSVKGRFTISSDNAKNSLYLQMDSLRDEDTAVYYCARDRLGIPFDYWGQGTLVTVSS

SEQ ID NO: 6512 - protein, 116 aa, Homo sapiens
QVQLQESGPGLVKPSETLSLTCTVSGDSISNYYWSWIRQPAGKGLEWIGRIYTSGSTNNNPSLKSRVTMSVDTSKNQFSLKLSSVTAADTAVYYCARERINWFDPWGQGTLVTVSS

SEQ ID NO: 6513 - protein, 117 aa, Homo sapiens
QVQLQESGPGLVKPSETLSLTCTVSGGSISSYYWSWIRQPAGKGLEWIGRIYSSGTTNYNPSLKSRVTMSVETSKNQFSLNLSSVTAADTAVYYCARERITGHFDYWGQGTLVTVSS

SEQ ID NO: 6514 - protein, 117 aa, Homo sapiens
QVQLQESGPGLVKPSETLSLTCTVSGGSISSYYWSWIRQPAGKGLEWIGRIYTSGSTNYNPSLKSRVTMSVDTSKNQFSLKLSSVTAADTAVYYCAREVLGYYFDYWGQGTLVTVSS

SEQ ID NO: 6515 - protein, 116 aa, Homo sapiens
QVQLQESGPGLVKPSETLSLTCTVSGGSISSYYWSWIRQPAGKGLEGIGRIYTSGSTNYNPSLKSRVTMSVDTSKNQFSLKLSSVTAADTAVYYCARERLYGMDVWGQGTTVTVSS

SEQ ID NO: 6516 - protein, 119 aa, Homo sapiens
QVQLQESGPGLVKPSETLSLTCTVSGGSISSYYWSWIRQPAGKGLEWIGRIYTSGNTNYNPSLKSRVTMSLDTSKNQFSLKLSSVTAADTAVYYCARVGAIGVDAFDIWGQGTMVTVSS

SEQ ID NO: 6517 - protein, 116 aa, Homo sapiens
QVQLQESGPGLVKPSETLSLTCTVSGGSISSYYWSWIRQPAGKGLEWIGRIYTSGSTNYNPSLKSRVSMSVDTSKNQFSLKLSSVTAADTAVYYCARERIIWFDPWGQGTLVTVSS

SEQ ID NO: 6518 - protein, 118 aa, Homo sapiens
EVQLVESGGGLVKPGGSLRLSCAASGFTFSSYNMNWVRQAPGKGLEWVSSISSSSNYIYYADSVKGRFTISGDTAKNSLFLQMISLRVEDTAVYYCARDRLGIPFDYWGQGSLVTVSS

SEQ ID NO: 6519 - protein, 117 aa, Homo sapiens
QVQLQESGPGLVKPSETLSLTCTVSGASISSYYWSWIRQPPGKGLEWIGYFYYSGSTNYSPSLKSRVTFSVDTSKNQFSLKLSSVTAADTAVYFCARGKVGVPFDYWGQGTLVTVSS

SEQ ID NO: 6520 - protein, 117 aa, Homo sapiens
QVQLQESGPGLVKPSETLSLTCTVSGGSISSYYWSWIWQPAGKGLEWIGRIYTSGSTNYNPSLKSRVTMSVDTPKNQFSLKLSSVTAADTAVYYCARERLTGAFDIWGQGTMVTVSS

SEQ ID NO: 6521 - protein, 117 aa, Homo sapiens
QVQLVQSGAEVKKPGASVKVSCKASGYTFTGYYMHWVRQAPGQGLEWMVWINPNSGGTNYAQKFQGRVTMTRDTSISTAYMELSRLRSDDTAVYYCARGRLTFFDYWGQGTLVTVSS

SEQ ID NO: 6522 - protein, 117 aa, Homo sapiens
QVQLVQSGAEVKKPGASVKVSCKASGYTFTGYYMHWVRQAPGQGLEWMGWINPNSGGTYCAQKFQGRVTMTRDTSISTAYMELSRLRSDDTAVYYCARGRLTFFDYWGQGTLVTVSS

SEQ ID NO: 6523 - protein, 117 aa, Homo sapiens
QVQLQESGPGLVKPSETLSLTCTVSDGSISSYYWSWIRQPAGKGLEWIGRIYTSGSTNYNPSLKSRVTMSVDTSKNQFSLKLTSVTAADTAVYYCARERITSFFDPWGQGTLVTVSS

SEQ ID NO: 6524 - protein, 117 aa, Homo sapiens
QVQLQESGPGLVKPSETLSLTCTVSGGSISSYYWSWIRQPAGKGLEWVGRLFTSGSTNYNPSLKSRVTMSVDTSKNQFSLKLSSVIAADTAVYYCARERLTGYFDYWGQGTLVTVSS

SEQ ID NO: 6525 - protein, 117 aa, Homo sapiens
QVQLQESGPGLVKPSETLSLTCTVSGGSISSYYWSWIRQPAGKGLEWIGRIYTSGSTNYNPSLKSRVTMSVDTSKNQFSLKLSSVTAADTAVYYCARERLVIAFDIWGQGTMVTVSS

SEQ ID NO: 6526 - protein, 117 aa, Homo sapiens
QVQLQESGPGLVKPSETLSLTCTVSGGSISSYYWSWIRQPAGKGLEWIGRIYTSGSTNYNPSLKSRVTMSVDTSKNQFSLKLSSMTAADTAVYYCARDRLGRAFDIWGQGTMVTVSS

SEQ ID NO: 6527 - protein, 117 aa, Homo sapiens
QVQLQESGPGLVKPSETLSLTCTVSGGSISSYYWSWIRQPPGKGLEWIGYIYYSGSTNYNPSLKSRVTISVDTSKNQFSLKLSSVTAADTAVYYCARGRLTGHFDYWGQGTLVTVSS

SEQ ID NO: 6528 - protein, 117 aa, Homo sapiens
QVQLQESGPGLVKPSETLSLTCTVSGGSISSYYWSWIRQPAGKGLEWIGRIYTSGYTNYNPSLKSRVSMSVDTSKNQFSLKLSSVTAADTAVYYCARERLGAFFDYWGQGTLVTVSS

SEQ ID NO: 6529 - protein, 117 aa, Homo sapiens
QVQLQESGPGLVKPSETLSLTCTVSGGSISSYYWSWIRQPPGKGLEWIGYIYYSGSTNYNPSLKSRVTISVDTSKNQFSLKLSSVTAADTAVFYCARITVTSAFDIWGQGTMVTVSS

SEQ ID NO: 6530 - protein, 116 aa, Homo sapiens
QVQLQESGPGLVKPSETLSLTCTVSGGSISSYYWSWIRQPPGKGLEWIGYIYYSGSTKKPSLKSRVTISVDTSKNQFSLKLSSVTAADTAVYYCARSTVVNAFDIWGQGTMVTVSS

SEQ ID NO: 6531 - protein, 126 aa, Homo sapiens
EVQLVESGGGLVQPGGSLRLSCAASGFTFSTYSMNWVRQAPGKGLEWVSYISSSSAIIYYADSVKGRFTISRDNAKNSLYLQMNSLRDEDTAVYYCARDLPITMIVVVMPDAFDIWGQGTMVTVSS

SEQ ID NO: 6532 - protein, 117 aa, Homo sapiens
EVQLVESGGGLVQPGGSLRLSCAASGFTFSNYWMRWVRQAPGKGLEWVANIKQDGSEKYYVDSVKGRFTISRDNAKYSLYLQMNSLRAEDTAVYYCARDRLGIFDYWGQGTLVTVSS

SEQ ID NO: 6533 - protein, 117 aa, Homo sapiens
EVQLVQSGAEVKKPGESLKISCKGSGYSFTNYWIGWVRQMPGKGLEWMGIIYPGDSDTRYSPSFQGQVTISADISITTAYLQWSSLKASDTAMYYCARHRLGFFDYWGQGTLVTVSS

SEQ ID NO: 6534 - protein, 118 aa, Homo sapiens
QVQLVQSGAEVKKPGASVKVSCKASGYTFTGYYMHWVRQAPGQGLEWMGWINPNSGGTNYAQKFQGRVTMTRDTSISTAYMELSRLRSDDTAVYYCARLYYYYNMDVWGQGTTVTVSS

SEQ ID NO: 6535 - protein, 118 aa, Homo sapiens
QVQLQESGPGLVKPSETLSLTCTVSGGSISSYYWSWIRQPPGKGLEWIGYIYYTGSTNYNPSLKSRVTISVDTSKNQFSLKLSSVTAADTAVYYCARGWWELTFFDYWGQGTLVTVSS

SEQ ID NO: 6536 - protein, 116 aa, Homo sapiens
QVQLQESGPGLVKPSETLSLTCTVSGGSISSYYWSWIRQPAGKGLEWIGRIYASGGTNYNPSLKSRVTMSVDTSKNQFSLKVSSVIAADTAIYYCARNRLGIYDYWGQGSLVTVSS

SEQ ID NO: 6537 - protein, 117 aa, Homo sapiens
QVQLQESGPGLVKPSETLSLTCTVSGGSISSYYWSWIRQSPGKGLEWIGYIYYSGSTNYNPSLKSRVTISVDTSKNQFSLKLSSVTAADTAVYFCARALLTGGFAYWGQGTLVTVSS

SEQ ID NO: 6538 - protein, 117 aa, Homo sapiens
QVQLQESGPGLVKPSETLSLTCTVSVGSISSYYWSWIRQPAGKGLEWIGRIYASGSTNYNPSLKSRVTMSVDTSKNQFSLKLTSVTAADTAVYYCARERVGIYFDYWGQGTLVTVSS

SEQ ID NO: 6539 - protein, 125 aa, Homo sapiens
EVQLVESGGGLVQPGGSLRLSCAASGFTFSSYSMNWVRQAPGKGLEWVSYISSSSSTIYYSDSVRGRFTISRDNAKNSLYLQMDSLRDEDTAVYYCARDSTMIVVVKVPDAFDIWGQGTMVTVSS

SEQ ID NO: 6540 - protein, 117 aa, Homo sapiens
QVQLQESGPGLVKPSETLSLTCTVSGGSISSYYWSWIRQPAGKGLEWIGRIYTSGSIKYNPSLKSRVAMSVDTSKNQFSLKLSSVTAADTAVYYCAREGILGYFDYWGQGTLVTVSS

SEQ ID NO: 6541 - protein, 117 aa, Homo sapiens
QVQLQESGPGLVKPSETLSLTCTVSGGSISSYYWSWIRQPPGKGLEWIGYVYYSGSTNYNPSLKSRVTTSVDTSKNQFSLKLRSVTAADTAVYYCARDRLGIAFDIWGQGTMVTVSS

SEQ ID NO: 6542 - protein, 118 aa, Homo sapiens
QVQLQESGPGLVKPSETLSLTCTVSGGSISSYYWSWIRQSAGKGLEWIGHIYTSGSTNYNPSLKSRVTMSVDTSKNQFSLKLSSVTAADTAVYYCARERTVVTYFDYWGQGTLVTVSS

SEQ ID NO: 6543 - protein, 117 aa, Homo sapiens
QVQLQESGPGLVKPSETLSLTCSVSGGSISSYHWSWIRQPAGKGLEWIGRIYTGGSTNYNPSLKSRVTMSVDTSKNQFSLKLSSVTAADTAVYYCARERLTGYFDYWGQGTLVTVSS

SEQ ID NO: 6544 - protein, 116 aa, Homo sapiens
QVQLQESGPGLVKPSETLSLTCTVSGGSISSYYWSWIRQPAGKGLEWIGRIYTSGSTNYNPSLKSRVTMSIDTSKNQFSLKLSSVTAADTAVYYCARSRLGIFDYWGQGTLVTVSS

SEQ ID NO: 6545 - protein, 117 aa, Homo sapiens
QVQPQESGPGLVKPSETLSLTCTVSGGSISGYYWSWIRQPAGTGLEWIGRIYTSGSTNYNSSLKSRVTMSVDTSKNQFSLKLSSVTAADTAVYYCARERMATIFDYWGQGTLVTVSS

SEQ ID NO: 6546 - protein, 116 aa, Homo sapiens
QVQLQESGPGLVKPSETLSLTCTVSGGSISSYYWSWIRQPAGKGLEWIGRIYTSGSTNYNPSLKSRVTMSVDTSKNQFSLKLSSVTAADTAVYYCAREGLRGFDPWGQGTLVTVSS

SEQ ID NO: 6547 - protein, 125 aa, Homo sapiens
EVQLVESGGGLVQPGGSLRLSCAASGFTFSSYSMNWVRQAPGKGLEWVSYISSSSSTIYYADSVKGRFTISRDNAKNSLYLQMNSLRDEDTAVYYCARDYYGSSGYYYPHAFDIWGQGTMVTVSS

SEQ ID NO: 6548 - protein, 116 aa, Homo sapiens
EVQLVESGGGLVKPGGSLRLSCAASGFTFSYYSMNWVRQAPGKGLEWVSSISDSSDYIYYADSVKGRFTISRDNAKNSLYLQMNSLRAEDTAVYYCARGGLRFDYWGQGTLVTVSS

SEQ ID NO: 6549 - protein, 117 aa, Homo sapiens
QVQLQESGPGLVKPSETLSLTCTVSGGSISSYYWSWIRQSPGKGLEWIGYIYYSGSTNYNPSLKSRVTISVDTSKNQFSLKLSSVTAADTAVYYCARALLTGGFAYWGQGTLVTVSS

SEQ ID NO: 6550 - protein, 117 aa, Homo sapiens
QVQLQESGPGLVKPSETLSLTCTVSGGSINSYYWSWIRQPAGKGLEWIGRIYTSGNTNYNPSLKSRVTMSVDTSKNLFSLKLSSVTAADTAVYYCARERLTGYFDYWAQGTLVTVSS

SEQ ID NO: 6551 - protein, 117 aa, Homo sapiens
QVQLQESGPGLVKPSETLSLTCTVSGGSISSYYWSWIRQPPGKGLEWIGYIYYSGTTNYNPSLKSRVTISVDTSKNQFSLKLSSVTAADTAVYYCARALIVGAFAYWGQGTLVTVSS

SEQ ID NO: 6552 - protein, 117 aa, Homo sapiens
QVQLQESGPGLVKPSETLSLTCTVSGGSISSNYWSWIRQPAGKGLEWIGRIYTSGSTKYNPSLKSRVTMSVDTSKNQFSLKLSSVTAADTAVYYCAREGIVGAFHYWGQGALVTVSS

SEQ ID NO: 6553 - protein, 118 aa, Homo sapiens
EVQLVESGGGLVKPGGSLRLSCAASGFTFSSYSMKWVRQAPVKGLEWVSSISSSSSYIYYGDSVKGRFTISRDNAKNSLYLQMNSLRAEDTAVYYCARERLGRAFDIWGQGTMVTVSS

SEQ ID NO: 6554 - protein, 117 aa, Homo sapiens
QVQLQESGPGLVKPSETLSLTCTVSGGSISSYYWSWIRQPAGKGLEWIGRFYTSGSTSCNPSLKSRVTMSVDTSKNQFSLKLSSVTAADTAVYYCAREGILGYFDYWGQGTLVTVSS

SEQ ID NO: 6555 - protein, 117 aa, Homo sapiens
QVQLQESGPGLVKPSETLSLTCTVSGGSISIYYWNWIRQPPGKGLEWIGYIYYIGSTNYNPSLKSRVTISVDTSKNQFSLKLSSVTAADTAVYYCARGRLTYAFDIWGQGTMVTVSS

SEQ ID NO: 6556 - protein, 118 aa, Artificial Sequence
  source: /note="Description of Artificial Sequence: Synthetic polypeptide"
EVQLVESGGGLVQPGGSLRLSCAASGFTFSNYWMSWVRQSPEKGLEWVSEIRLRSDNYATHYAESVKGRFTISRDNSKNTLYLQMNSLRAEDTGIYYCKTYFYSFSYWGQGTLVTVSS

SEQ ID NO: 6557 - protein, 574 aa, Artificial Sequence
  source: /note="Description of Artificial Sequence: Synthetic polypeptide"
EVQLVESGGGLVQPGGSLRLSCAASGFNIKDTYIHWVRQAPGKGLEWVARIYPTNGYTRYADSVKGRFTISADTSKNTAYLQMNSLRAEDTAVYYCSRWGGDGFYAMDYWGQGTLVTVSSASTKGPEVQLVESGGGLVQPGGSLRLSCAASGFTFSNYWMSWVRQSPEKGLEWVSEIRLRSDNYATHYAESVKGRFTISRDNSKNTLYLQMNSLRAEDTGIYYCKTYFYSFSYWGQGTLVTVSSASTKGPSVFPLAPSSKSTSGGTAALGCLVKDYFPEPVTVSWNSGALTSGVHTFPAVLQSSGLYSLSSVVTVPSSSLGTQTYICNVNHKPSNTKVDKRVEPKSCDKTHTCPPCPAPELLGGPSVFLFPPKPKDTLMISRTPEVTCVVVDVSHEDPEVKFNWYVDGVEVHNAKTKPREEQYNSTYRVVSVLTVLHQDWLNGKEYKCKVSNKALPAPIEKTISKAKGQPREPQVYTLPPSREEMTKNQVSLTCLVKGFYPSDIAVEWESNGQPENNYKTTPPVLDSDGSFFLYSKLTVDKSRWQQGNVFSCSVMHEALHNHYTQKSLSLSPGK

SEQ ID NO: 6558 - protein, 580 aa, Artificial Sequence
  source: /note="Description of Artificial Sequence: Synthetic polypeptide"
EVQLVESGGGLVQPGGSLRLSCAASGFNIKDTYIHWVRQAPGKGLEWVARIYPTNGYTRYADSVKGRFTISADTSKNTAYLQMNSLRAEDTAVYYCSRWGGDGFYAMDYWGQGTLVTVSSTVAAPSVFIFPPEVQLVESGGGLVQPGGSLRLSCAASGFTFSNYWMSWVRQSPEKGLEWVSEIRLRSDNYATHYAESVKGRFTISRDNSKNTLYLQMNSLRAEDTGIYYCKTYFYSFSYWGQGTLVTVSSASTKGPSVFPLAPSSKSTSGGTAALGCLVKDYFPEPVTVSWNSGALTSGVHTFPAVLQSSGLYSLSSVVTVPSSSLGTQTYICNVNHKPSNTKVDKRVEPKSCDKTHTCPPCPAPELLGGPSVFLFPPKPKDTLMISRTPEVTCVVVDVSHEDPEVKFNWYVDGVEVHNAKTKPREEQYNSTYRVVSVLTVLHQDWLNGKEYKCKVSNKALPAPIEKTISKAKGQPREPQVYTLPPSREEMTKNQVSLTCLVKGFYPSDIAVEWESNGQPENNYKTTPPVLDSDGSFFLYSKLTVDKSRWQQGNVFSCSVMHEALHNHYTQKSLSLSPGK

SEQ ID NO: 6559 - protein, 572 aa, Artificial Sequence
  source: /note="Description of Artificial Sequence: Synthetic polypeptide"
QVQLVQSGAEVVKPGASVKISCKASGYTFTGYFMNWVKQSPGQSLEWIGRIHPYDGDTFYNQKFQGKATLTVDKSSNTAHMELLSLTSEDFAVYYCTRYDGSRAMDYWGQGTTVTVSSASTKGPEVQLVESGGGLVQPGGSLRLSCAASGFTFSNYWMSWVRQSPEKGLEWVSEIRLRSDNYATHYAESVKGRFTISRDNSKNTLYLQMNSLRAEDTGIYYCKTYFYSFSYWGQGTLVTVSSASTKGPSVFPLAPSSKSTSGGTAALGCLVKDYFPEPVTVSWNSGALTSGVHTFPAVLQSSGLYSLSSVVTVPSSSLGTQTYICNVNHKPSNTKVDKRVEPKSCDKTHTCPPCPAPELLGGPSVFLFPPKPKDTLMISRTPEVTCVVVDVSHEDPEVKFNWYVDGVEVHNAKTKPREEQYNSTYRVVSVLTVLHQDWLNGKEYKCKVSNKALPAPIEKTISKAKGQPREPQVYTLPPSREEMTKNQVSLTCLVKGFYPSDIAVEWESNGQPENNYKTTPPVLDSDGSFFLYSKLTVDKSRWQQGNVFSCSVMHEALHNHYTQKSLSLSPGK

SEQ ID NO: 6560 - protein, 578 aa, Artificial Sequence
  source: /note="Description of Artificial Sequence: Synthetic polypeptide"
QVQLVQSGAEVVKPGASVKISCKASGYTFTGYFMNWVKQSPGQSLEWIGRIHPYDGDTFYNQKFQGKATLTVDKSSNTAHMELLSLTSEDFAVYYCTRYDGSRAMDYWGQGTTVTVSSTVAAPSVFIFPPEVQLVESGGGLVQPGGSLRLSCAASGFTFSNYWMSWVRQSPEKGLEWVSEIRLRSDNYATHYAESVKGRFTISRDNSKNTLYLQMNSLRAEDTGIYYCKTYFYSFSYWGQGTLVTVSSASTKGPSVFPLAPSSKSTSGGTAALGCLVKDYFPEPVTVSWNSGALTSGVHTFPAVLQSSGLYSLSSVVTVPSSSLGTQTYICNVNHKPSNTKVDKRVEPKSCDKTHTCPPCPAPELLGGPSVFLFPPKPKDTLMISRTPEVTCVVVDVSHEDPEVKFNWYVDGVEVHNAKTKPREEQYNSTYRVVSVLTVLHQDWLNGKEYKCKVSNKALPAPIEKTISKAKGQPREPQVYTLPPSREEMTKNQVSLTCLVKGFYPSDIAVEWESNGQPENNYKTTPPVLDSDGSFFLYSKLTVDKSRWQQGNVFSCSVMHEALHNHYTQKSLSLSPGK

SEQ ID NO: 6561 - protein, 572 aa, Artificial Sequence
  source: /note="Description of Artificial Sequence: Synthetic polypeptide"
EVQLVESGGGWQPGRSLRLSCSASGFTFSGYGLSWVRQAPGKGLEWVAMISSGGSYTYYADSVKGRFAISRDNAKNTLFLQMDSLRPEDTGVYFCARHGDDPAWFAYWGQGTPVTVSSASTKGPEVQLVESGGGLVQPGGSLRLSCAASGFTFSNYWMSWVRQSPEKGLEWVSEIRLRSDNYATHYAESVKGRFTISRDNSKNTLYLQMNSLRAEDTGIYYCKTYFYSFSYWGQGTLVTVSSASTKGPSVFPLAPSSKSTSGGTAALGCLVKDYFPEPVTVSWNSGALTSGVHTFPAVLQSSGLYSLSSVVTVPSSSLGTQTYICNVNHKPSNTKVDKRVEPKSCDKTHTCPPCPAPELLGGPSVFLFPPKPKDTLMISRTPEVTCVVVDVSHEDPEVKFNWYVDGVEVHNAKTKPREEQYNSTYRVVSVLTVLHQDWLNGKEYKCKVSNKALPAPIEKTISKAKGQPREPQVYTLPPSREEMTKNQVSLTCLVKGFYPSDIAVEWESNGQPENNYKTTPPVLDSDGSFFLYSKLTVDKSRWQQGNVFSCSVMHEALHNHYTQKSLSLSPGK

SEQ ID NO: 6562 - protein, 578 aa, Artificial Sequence
  source: /note="Description of Artificial Sequence: Synthetic polypeptide"
EVQLVESGGGWQPGRSLRLSCSASGFTFSGYGLSWVRQAPGKGLEWVAMISSGGSYTYYADSVKGRFAISRDNAKNTLFLQMDSLRPEDTGVYFCARHGDDPAWFAYWGQGTPVTVSSTVAAPSVFIFPPEVQLVESGGGLVQPGGSLRLSCAASGFTFSNYWMSWVRQSPEKGLEWVSEIRLRSDNYATHYAESVKGRFTISRDNSKNTLYLQMNSLRAEDTGIYYCKTYFYSFSYWGQGTLVTVSSASTKGPSVFPLAPSSKSTSGGTAALGCLVKDYFPEPVTVSWNSGALTSGVHTFPAVLQSSGLYSLSSVVTVPSSSLGTQTYICNVNHKPSNTKVDKRVEPKSCDKTHTCPPCPAPELLGGPSVFLFPPKPKDTLMISRTPEVTCVVVDVSHEDPEVKFNWYVDGVEVHNAKTKPREEQYNSTYRVVSVLTVLHQDWLNGKEYKCKVSNKALPAPIEKTISKAKGQPREPQVYTLPPSREEMTKNQVSLTCLVKGFYPSDIAVEWESNGQPENNYKTTPPVLDSDGSFFLYSKLTVDKSRWQQGNVFSCSVMHEALHNHYTQKSLSLSPGK

SEQ ID NO: 6563 - protein, 576 aa, Artificial Sequence
  source: /note="Description of Artificial Sequence: Synthetic polypeptide"
QVQLQQSGSELMMPGASVKISCKATGYTFSNYWIEWVKQRPGHGLEWIGEILPGTGRTIYNEKFKGKATFTADISSNTVQMQLSSLTSEDSAVYYCARRDYYGNFYYAMDYWGQGTSVTVSSASTKGPEVQLVESGGGLVQPGGSLRLSCAASGFTFSNYWMSWVRQSPEKGLEWVSEIRLRSDNYATHYAESVKGRFTISRDNSKNTLYLQMNSLRAEDTGIYYCKTYFYSFSYWGQGTLVTVSSASTKGPSVFPLAPSSKSTSGGTAALGCLVKDYFPEPVTVSWNSGALTSGVHTFPAVLQSSGLYSLSSVVTVPSSSLGTQTYICNVNHKPSNTKVDKRVEPKSCDKTHTCPPCPAPELLGGPSVFLFPPKPKDTLMISRTPEVTCVVVDVSHEDPEVKFNWYVDGVEVHNAKTKPREEQYNSTYRVVSVLTVLHQDWLNGKEYKCKVSNKALPAPIEKTISKAKGQPREPQVYTLPPSREEMTKNQVSLTCLVKGFYPSDIAVEWESNGQPENNYKTTPPVLDSDGSFFLYSKLTVDKSRWQQGNVFSCSVMHEALHNHYTQKSLSLSPGK

SEQ ID NO: 6564 - protein, 582 aa, Artificial Sequence
  source: /note="Description of Artificial Sequence: Synthetic polypeptide"
QVQLQQSGSELMMPGASVKISCKATGYTFSNYWIEWVKQRPGHGLEWIGEILPGTGRTIYNEKFKGKATFTADISSNTVQMQLSSLTSEDSAVYYCARRDYYGNFYYAMDYWGQGTSVTVSSTVAAPSVFIFPPEVQLVESGGGLVQPGGSLRLSCAASGFTFSNYWMSWVRQSPEKGLEWVSEIRLRSDNYATHYAESVKGRFTISRDNSKNTLYLQMNSLRAEDTGIYYCKTYFYSFSYWGQGTLVTVSSASTKGPSVFPLAPSSKSTSGGTAALGCLVKDYFPEPVTVSWNSGALTSGVHTFPAVLQSSGLYSLSSVVTVPSSSLGTQTYICNVNHKPSNTKVDKRVEPKSCDKTHTCPPCPAPELLGGPSVFLFPPKPKDTLMISRTPEVTCVVVDVSHEDPEVKFNWYVDGVEVHNAKTKPREEQYNSTYRVVSVLTVLHQDWLNGKEYKCKVSNKALPAPIEKTISKAKGQPREPQVYTLPPSREEMTKNQVSLTCLVKGFYPSDIAVEWESNGQPENNYKTTPPVLDSDGSFFLYSKLTVDKSRWQQGNVFSCSVMHEALHNHYTQKSLSLSPGK

SEQ ID NO: 6565 - protein, 571 aa, Artificial Sequence
  source: /note="Description of Artificial Sequence: Synthetic polypeptide"
EVQLVESGGGLVQPGGSLRLSCAASGYTFSSYWIEWVRQAPGKGLEWIGEILPGGGDTNYNEIFKGRATFSADTSKNTAYLQMNSLRAEDTAVYYCTRRVPIRLDYWGQGTLVTVSSASTKGPEVQLVESGGGLVQPGGSLRLSCAASGFTFSNYWMSWVRQSPEKGLEWVSEIRLRSDNYATHYAESVKGRFTISRDNSKNTLYLQMNSLRAEDTGIYYCKTYFYSFSYWGQGTLVTVSSASTKGPSVFPLAPSSKSTSGGTAALGCLVKDYFPEPVTVSWNSGALTSGVHTFPAVLQSSGLYSLSSVVTVPSSSLGTQTYICNVNHKPSNTKVDKRVEPKSCDKTHTCPPCPAPELLGGPSVFLFPPKPKDTLMISRTPEVTCVVVDVSHEDPEVKFNWYVDGVEVHNAKTKPREEQYNSTYRVVSVLTVLHQDWLNGKEYKCKVSNKALPAPIEKTISKAKGQPREPQVYTLPPSREEMTKNQVSLTCLVKGFYPSDIAVEWESNGQPENNYKTTPPVLDSDGSFFLYSKLTVDKSRWQQGNVFSCSVMHEALHNHYTQKSLSLSPGK

SEQ ID NO: 6566 - protein, 577 aa, Artificial Sequence
  source: /note="Description of Artificial Sequence: Synthetic polypeptide"
EVQLVESGGGLVQPGGSLRLSCAASGYTFSSYWIEWVRQAPGKGLEWIGEILPGGGDTNYNEIFKGRATFSADTSKNTAYLQMNSLRAEDTAVYYCTRRVPIRLDYWGQGTLVTVSSTVAAPSVFIFPPEVQLVESGGGLVQPGGSLRLSCAASGFTFSNYWMSWVRQSPEKGLEWVSEIRLRSDNYATHYAESVKGRFTISRDNSKNTLYLQMNSLRAEDTGIYYCKTYFYSFSYWGQGTLVTVSSASTKGPSVFPLAPSSKSTSGGTAALGCLVKDYFPEPVTVSWNSGALTSGVHTFPAVLQSSGLYSLSSVVTVPSSSLGTQTYICNVNHKPSNTKVDKRVEPKSCDKTHTCPPCPAPELLGGPSVFLFPPKPKDTLMISRTPEVTCVVVDVSHEDPEVKFNWYVDGVEVHNAKTKPREEQYNSTYRVVSVLTVLHQDWLNGKEYKCKVSNKALPAPIEKTISKAKGQPREPQVYTLPPSREEMTKNQVSLTCLVKGFYPSDIAVEWESNGQPENNYKTTPPVLDSDGSFFLYSKLTVDKSRWQQGNVFSCSVMHEALHNHYTQKSLSLSPGK

SEQ ID NO: 6567 - protein, 118 aa, Artificial Sequence
  source: /note="Description of Artificial Sequence: Synthetic polypeptide"
QVQLVQSGAEVVKPGASVKISCKASGYTFTGYFMNWVKQSPGQSLEWIGRIHPYDGDTFYNQKFQGKATLTVDKSSNTAHMELLSLTSEDFAVYYCTRYDGSRAMDYWGQGTTVTVSS

SEQ ID NO: 6568 - protein, 119 aa, Artificial Sequence
  source: /note="Description of Artificial Sequence: Synthetic polypeptide"
QVQLQQSGAELVRPGASVTLSCKASGYTFTDYEMHWVKKIPVYGLEWIGAIDPETYGTAYNQKFKGKATLTADKSSSTAYMEVRSLTSEDSAVYYCTRGGYYGSDFDYWGQGTTLTVSS

SEQ ID NO: 6569 - protein, 119 aa, Artificial Sequence
  source: /note="Description of Artificial Sequence: Synthetic polypeptide"
QVQLEQSGAELVRPGASVTLSCKASGYTFTDYEMHWVKQTPVHGLEWIGAIDPETGGTAYNQKFKGKAILTADKSSSTAYMELRSLTSEDSAVYYCTRGNYYGSDYDYWGQGTTLTVSS

SEQ ID NO: 6570 - protein, 111 aa, Artificial Sequence
  source: /note="Description of Artificial Sequence: Synthetic polypeptide"
QVQLQQSGAELVRPGASVTLSCKASGYTFTDYEMHWVKKIPVYGLEWIGAIDPETYGTAYNQKFKGKATLTADKSSSTAYMEVRSLTSEDSAVYYCTRGGYYGSDFDYWGQ

SEQ ID NO: 6571 - protein, 114 aa, Artificial Sequence
  source: /note="Description of Artificial Sequence: Synthetic polypeptide"
QSVKESEGRLVTPGTPLTLTCTVSGFSLSSNSVGWVRQAPGKGLEWIGIISSSGNRYYASWAKGRFTISKTSTTVDLKITSPTTEDTATYFCGGDPVSWYGDIWGPGTLVTVSS

SEQ ID NO: 6572 - protein, 118 aa, Artificial Sequence
  source: /note="Description of Artificial Sequence: Synthetic polypeptide"
QSVKESEGRLVTPGTPLTLTCTVSGFSLSTYAMSWVRQAPEKGLEWIGIIYATAETYYATWARGRFTISKTSTTVDLKITSPATEDTATYFCARLNGDGSGTYAYDIWGPGTLVTVSS

SEQ ID NO: 6573 - protein, 115 aa, Artificial Sequence
  source: /note="Description of Artificial Sequence: Synthetic polypeptide"
EVQLVQSGVEGKKPEAPVKVSCKASGYTFTNYYMHWVQQAPGKGLEWMGLVDPEDGETIYAEKFQGRVTITADTSTDTAYMELSSLRSEDTAVYYCARDPVLLWDGMDVWGQGTT

SEQ ID NO: 6574 - protein, 119 aa, Artificial Sequence
  source: /note="Description of Artificial Sequence: Synthetic polypeptide"
AAQAAQVQLQQSGPGLVKPSQTLSLTCAISGDSVSSNSAAWNWIRQSPSRGLEWLGRTYYRSKWYNDYAVSVKSRITINPDASKNQFSLQLNSVTPEDTAVYYCSGSYSTFDIWGQGTM

SEQ ID NO: 6575 - protein, 121 aa, Artificial Sequence
  source: /note="Description of Artificial Sequence: Synthetic polypeptide"
QVQLQQSGAEVKKPGSSVKVSCKASGGTFSSYAISWVRQAPGQGLEWMGGIIPIFGTANYAQKFQGRVTITADESTSTAYMELSSLRSEDTAVYYCASTIPYYGDYVEDYYGMDVWGQGTT

SEQ ID NO: 6576 - protein, 116 aa, Artificial Sequence
  source: /note="Description of Artificial Sequence: Synthetic polypeptide"
QAAQVQLVESGGGLVQPGGSLRLSCAASGFTFSSYAMSWVRQAPGKGLEWVSVIYSGGSTYYADSVKGRFTMSRDNSKNTLYLQMNSLRAEDTAVYYCARVGLQSGAFDIWGQGTT

SEQ ID NO: 6577 - protein, 119 aa, Artificial Sequence
  source: /note="Description of Artificial Sequence: Synthetic polypeptide"
EVQLVQFGAEVKKPGSSVKVSCKASGGTFSSYAISWVQQAPGKGLEWMGLVDPEDGETIYAEKFQGRVTMTRDTSTSTVYMELSSLRSEDTAVYYCARDPGGEGLGAIDGFDIWGQGTT

SEQ ID NO: 6578 - protein, 118 aa, Artificial Sequence
  source: /note="Description of Artificial Sequence: Synthetic polypeptide"
QVQLVESGGGVVQPGGSLRLSCAASGFTFSSYAMHWVRQAPGKGLEWVAVISYDGSNKYYADSVKGRFTISRDNSKNTLYLQMNSLRAEDTAVYYCARAWPEYSSSADAFDIWGQGTM

SEQ ID NO: 6579 - protein, 110 aa, Artificial Sequence
  source: /note="Description of Artificial Sequence: Synthetic polypeptide"
EVQLVESGGALVQPGGSLRLSCAASGFTFTNYGIIWVRQAPGKGPEWVSGVSGNAVHTYYADSVKGRFTISRDNSKNMVYLQMNSLRSDDTAVYYCARGWDLDYWGQGTL

SEQ ID NO: 6580 - protein, 114 aa, Artificial Sequence
  source: /note="Description of Artificial Sequence: Synthetic polypeptide"
QLQLQESGPGLVKPSETLSLTCVVFDYSISSGYYWGWIRQPPGKGLEWIGSINYSGNTYYNPSLKSRVTISVDTSKNQFSLNLRSVTAADTAVYYCARSVDTAPGFDYWGQGTL

SEQ ID NO: 6581 - protein, 116 aa, Artificial Sequence
  source: /note="Description of Artificial Sequence: Synthetic polypeptide"
EVQLVQSGAEVKKPGATVKISCKVSGYTFTDYYMHWVQQAPGKGLEWMGLVDPEDGETIYAEKFQGRVTITADTSTDTAYMELSSLRSEDTAVYYCATERAVAGPGAFDIWGQGTM

SEQ ID NO: 6582 - protein, 114 aa, Artificial Sequence
  source: /note="Description of Artificial Sequence: Synthetic polypeptide"
QVQLVETGGGVVQPGTSLRLSCAGSGFTFSESGMHWVRQAPGKGLEWMALILNDGISNFYADSVKGRFTISRDNSKNTLYLQMNSLRAEDTAVYYCASSLGGNGAFDIWGQGTM

SEQ ID NO: 6583 - protein, 124 aa, Artificial Sequence
  source: /note="Description of Artificial Sequence: Synthetic polypeptide"
EVQLVESGGGLVQPGGSLRLSCAASGFTVSDYYMNWIRQAPGKGLEWVSYISSSASGSTIYYADSVKGRFTISRDNANNSLYLHMDSLRAEDTAIYFCARVVPAGSGWRWFDPWGQGTLVTVSS

SEQ ID NO: 6584 - protein, 123 aa, Artificial Sequence
  source: /note="Description of Artificial Sequence: Synthetic polypeptide"
QVQLQQSGPGLVKPSQTLSLTCAISGDSVSSNSAAWNWIRQSPSRGLEWLGRTYYRSKWYNDYAPSVESRITINPDTSKNQFSLQLSSVTPEDTAVYYCARDPPYVLSTFDIWGQGTMVTVSS

SEQ ID NO: 6585 - protein, 123 aa, Artificial Sequence
  source: /note="Description of Artificial Sequence: Synthetic polypeptide"
QVQLQQSGPGLVKPSQTLSLTCAISGDSVSSNSAAWNWIRQSPSRGLEWLGRTYYRSRWYSDYASSVESRITINPDTSKNQFSLQLSSVTPEDTAVYYCARDPPYVLSTFDIWGQGTMVTVSS

SEQ ID NO: 6586 - protein, 123 aa, Artificial Sequence
  source: /note="Description of Artificial Sequence: Synthetic polypeptide"
QVQLQQSGPGLVKPSQTLSLTCAISGDSVSSDSAAWNWIRQSPSRGLEWLGRTYYRSKWYNDYAPSVESRITINPDTSKNQFSLQLSSVTPEDTAVYYCARDPPYVLSTFDIWGQGTMVTVSS

SEQ ID NO: 6587 - protein, 111 aa, Artificial Sequence
  source: /note="Description of Artificial Sequence: Synthetic polypeptide"
QSLEESGGRLVAPGGSLTLTCTVSGIDLSSDNIQWVRQAPGKGLEWIGAVDYNNKPFYANWAKGRFTISKTSSTTVDLKMTSLTTEDTATYFCAKNTFSPWGPGTLVTVSS

SEQ ID NO: 6588 - protein, 120 aa, Artificial Sequence
  source: /note="Description of Artificial Sequence: Synthetic polypeptide"
QSLEESGGDLVKPGGTLTLTCTTSGFSFSDHYWMCWVRQAPGKGLEWIACIYTADSDSYYASWAKGRFTISKTSSTTVTLQMTSLTAADTATYFCARNGAYAGGPYGDLWGPGTLVTVSS

SEQ ID NO: 6589 - protein, 462 aa, Artificial Sequence
  source: /note="Description of Artificial Sequence: Synthetic polypeptide"
METGLRWLLLVAVLKGVQCQSLEESGGDLVKPGGTLTLTCTTSGFSFSDHYWMCWVRQAPGKGLEWIACIYTADSDSYYASWAKGRFTISKTSSTTVTLQMTSLTAADTATYFCARNGAYAGGPYGDLWGPGTLVTVSSGQPKAPSVFPLAPCCGDTPSSTVTLGCLVKGYLPEPVTVTWNSGTLTNGVRTFPSVRQSSGLYSLSSVVSVTSSSQPVTCNVAHPATNTKVDKTVAPSTCSKPTCPPPELLGGPSVFIFPPKPKDTLMISRTPEVTCVVVDVSQDDPEVQFTWYINNEQVRTARPPLREQQFNSTIRVVSTLPIAHQDWLRGKEFKCKVHNKALPAPIEKTISKARGQPLEPKVYTMGPPREELSSRSVSLTCMINGFYPSDISVEWEKNGKAEDNYKTTPAVLDSDGSYFLYSKLSVPTSEWQRGDVFTCSVMHEALHNHYTQKSISRSPGK

SEQ ID NO: 6590 - protein, 118 aa, Artificial Sequence
  source: /note="Description of Artificial Sequence: Synthetic polypeptide"
QSLEESGGDLVKPGASLTLTCTASGFSFSSGYDMCWVRQAPGKGLEWIACIDTDNDATYYASWAKGRFTISKPSSTTVLLQITSLTAADTATYFCATTHGDYVAFKLWGPGTLVTVSS

SEQ ID NO: 6591 - protein, 460 aa, Artificial Sequence
  source: /note="Description of Artificial Sequence: Synthetic polypeptide"
METGLRWLLLVAVFKGSQCQSLEESGGDLVKPGASLTLTCTASGFSFSSGYDMCWVRQAPGKGLEWIACIDTDNDATYYASWAKGRFTISKPSSTTVLLQITSLTAADTATYFCATTHGDYVAFKLWGPGTLVTVSSGQPKAPSVFPLAPCCGDTPSSTVTLGCLVKGYLPEPVTVTWNSGTLTNGVRTFPSVRQSSGLYSLSSVVSVTSSSQPVTCNVAHPATNTKVDKTVAPSTCSKPTCPPPELLGGPSVFIFPPKPKDTLMISRTPEVTCVVVDVSQDDPEVQFTWYINNEQVRTARPPLREQQFNSTIRVVSTLPIAHQDWLRGKEFKCKVHNKALPAPIEKTISKARGQPLEPKVYTMGPPREELSSRSVSLTCMINGFYPSDISVEWEKNGKAEDNYKTTPAVLDSDGSYFLYSKLSVPTSEWQRGDVFTCSVMHEALHNHYTQKSISRSPGK

SEQ ID NO: 6592 - protein, 120 aa, Artificial Sequence
  source: /note="Description of Artificial Sequence: Synthetic polypeptide"
EVQLVESGGGLVQPGGSLRLSCAASGFSFSSGYDMCWVRQAPGKGLEWVACIDTDNDATYYASWAKGRFTISKDSSKNTLYLQMNSLRAEDTAVYYCARTHGDYVAFKLWGQGTLVTVSS

SEQ ID NO: 6593 - protein, 120 aa, Artificial Sequence
  source: /note="Description of Artificial Sequence: Synthetic polypeptide"
EVQLVESGGGLVQPGGSLRLSCAASGFSFSSGYDMCWVRQAPGKGLEWVACIDTDNDATYYADSVKGRFTISKDSSKNTLYLQMNSLRAEDTAVYYCARTHGDYVAFKLWGQGTLVTVSS

SEQ ID NO: 6594 - protein, 120 aa, Artificial Sequence
  source: /note="Description of Artificial Sequence: Synthetic polypeptide"
EVQLVESGGGLVQPGGSLRLSCAASGFSFSSGYDMSWVRQAPGKGLEWVSAIDTDNDATYYADSVKGRFTISKDSSKNTLYLQMNSLRAEDTAVYYCARTHGDYVAFKLWGQGTLVTVSS

SEQ ID NO: 6595 - protein, 122 aa, Artificial Sequence
  source: /note="Description of Artificial Sequence: Synthetic polypeptide"
EVQLVESGGGLVQPGGSLRLSCAASGFSFSDHYWMCWVRQAPGKGLEWVACIYTADSDSYYASWAKGRFTISKDSSKNTLYLQMNSLRAEDTAVYYCARNGAYAGGPYGDLWGQGTLVTVSS

SEQ ID NO: 6596 - protein, 122 aa, Artificial Sequence
  source: /note="Description of Artificial Sequence: Synthetic polypeptide"
EVQLVESGGGLVQPGGSLRLSCAASGFSFSDHYWMCWVRQAPGKGLEWVACIYTADSDSYYADSVKGRFTISKDSSKNTLYLQMNSLRAEDTAVYYCARNGAYAGGPYGDLWGQGTLVTVSS

SEQ ID NO: 6597 - protein, 122 aa, Artificial Sequence
  source: /note="Description of Artificial Sequence: Synthetic polypeptide"
EVQLVESGGGLVQPGGSLRLSCAASGFSFSDHYWMSWVRQAPGKGLEWVSAIYTADSDSYYADSVKGRFTISKDSSKNTLYLQMNSLRAEDTAVYYCARNGAYAGGPYGDLWGQGTLVTVSS

SEQ ID NO: 6598 - protein, 136 aa, Mus Musculus
MNFGLSLIFLALILKGVQCEVQLVESGGDLVKSGGSLKLSCAASGFIFSSFGMSWVRQTPDKRLEWVATISSGGRNIYYLDSVKGRFTISRDNVKNILYLQMSGLKSEDSAMYYCAREGHYALDYCGQGTSVTVSS

SEQ ID NO: 6599 - protein, 144 aa, Artificial Sequence
  source: /note="Description of Artificial Sequence: Synthetic polypeptide"
MKHLWFFLLLVAAPRWVLSQVQLQESGPGLVKPSGTLSLTCAVSGVSIRSINWWNWVRQPPGKGLEWIGEIYHSGSTNYNPSLKSRVTISVDKSKNQFSLKLNSVTAADTAVYYCARDGGIAVTDYYYYGLDVWGQGTTVTVSS

SEQ ID NO: 6600 - protein, 117 aa, Artificial Sequence
  source: /note="Description of Artificial Sequence: Synthetic polypeptide"
QVQLVQSGAEVKKPGASVKVSCKASGYTFTNYNMHWVRQAPGQRLEWMGTIYPGNDDTSYNQKFKDRVTITADTSASTAYMELSSLRSEDTAVYYCARGGYRAMDYWGQGTLVTVSS

SEQ ID NO: 6601 - protein, 118 aa, Artificial Sequence
  source: /note="Description of Artificial Sequence: Synthetic polypeptide"
EVQLVESGGDLVKPGGSLKLSCAASGFTFSGYGMSWVRQTPDKRLEWVATITSGGTYTYYPDSVKGRFTISRDNAKNTLYLQIDSLKSEDTAIYFCARSLAGNAMDYWGQGTSVTVSS

SEQ ID NO: 6602 - protein, 119 aa, Artificial Sequence
  source: /note="Description of Artificial Sequence: Synthetic polypeptide"
QVQLVQSGAEVKKPGASVKISCKASGYSFTAYYIHWVKQAPGQGLEWIGYIANYNRATNYNQKFKGRVTFTTDTSTSTAYMELRSLRSDDTAVYYCARDYDYDVGMDYWGQGTLVTVSS

SEQ ID NO: 6603 - protein, 121 aa, Artificial Sequence
  source: /note="Description of Artificial Sequence: Synthetic polypeptide"
QVQLVQSGAEVKKPGASVKVSCKASGYTFTNYWMHWVRQAPGQGLEWMGDINPSNGRTSYKEKFKRRVTLSVDKSSSTAYMELSSLRSEDTAVYFCTIHYDDKYYPLMDYWGQGTLVTVSS

SEQ ID NO: 6604 - protein, 119 aa, Artificial Sequence
  source: /note="Description of Artificial Sequence: Synthetic polypeptide"
QVQLVQSGAEVKKPGASVKISCKASGYSFTAYYIHWVKQAPGQGLEWIGYIAGYKDATNYNQKFKGRVTFTTDTSTSTAYMELRSLRSDDTAVYYCARDYDYDVGMDYWGQGTLVTVSS

SEQ ID NO: 6605 - protein, 119 aa, Artificial Sequence
  source: /note="Description of Artificial Sequence: Synthetic polypeptide"
QVQLVQSGAEVKKPGASVKISCKASGYSFTAYYIHWVKQAPGQGLEWIGYISNYNRATNYNQKFKGRVTFTTDTSTSTAYMELRSLRSDDTAVYYCARDYDYDVGMDYWGQGTLVTVSS

SEQ ID NO: 6606 - protein, 120 aa, Homo sapiens
QVQLVQSGSELKKPGASVKVSCKASGYTLTNYPMNWVRQAPGRGLEWMGWINTNTGSPAYAQDFTERFVFSLDTSVTTAYLQISSLKAEDTAVYYCARTAITSVYHFDYWGQGTLVTVSS

SEQ ID NO: 6607 - protein, 120 aa, Homo sapiens
EVQLVQSGSELKKPGASVKVSCKASGYTLTNYPMNWVRQAPGRGLEWMGWINTNTGSPAYAQDFTERFVFSLDTSVTTAYLQISSLKAEDTAVYYCARTAITSVYHFDYWGQGTLVTVSS

SEQ ID NO: 6608 - protein, 121 aa, Rattus norvegicus
QVSLKESGPGILQPSHTLSLTCSFSGFSLSTYGMGVSWIRQPSEKGLEWLASIWWNGNTYYNPSLKSRLTVSKDASNDQAFLNVTSVDTTDTATYYCAHTGGAVITWFAYWGQGTLVTVSS

SEQ ID NO: 6609 - protein, 121 aa, Artificial Sequence
  source: /note="Description of Artificial Sequence: Synthetic polypeptide"
EVTLKESGPALVKPTQTLTLTCTFSGFSLSTYGMGVSWIRQPPGKALEWLASIWWNGNTYYNPSLKSRLTVTKDASKNQAVLTMTNMDPVDTATYYCAHTGGAVITWFAYWGQGTLVTVSS

SEQ ID NO: 6610 - protein, 121 aa, Artificial Sequence
  source: /note="Description of Artificial Sequence: Synthetic polypeptide"
EVTLKESGPALVKPTQTLTLTCTFSGFSLSTYGMGVSWIRQPPGKALEWLASIWWNGNTYYNPSLKSRLTITKDASKNQAVLTMTNMDPVDTATYYCAHTGGAVITWFAYWGQGTLVTVSS

SEQ ID NO: 6611 - protein, 121 aa, Artificial Sequence
  source: /note="Description of Artificial Sequence: Synthetic polypeptide"
EVTLKESGPALVKPTQTLTLTCTFSGFSLSTYGMGVSWIRQPPGKALEWLASIWWNGNTYYNPSLKSRLTVTKDTSKNQAVLTMTNMDPVDTATYYCAHTGGAVITWFAYWGQGTLVTVSS

SEQ ID NO: 6612 - protein, 121 aa, Artificial Sequence
  source: /note="Description of Artificial Sequence: Synthetic polypeptide"
EVTLKESGPALVKPTQTLTLTCTFSGFSLSTYGMGVSWIRQPPGKALEWLASIWWNGNTYYNPSLKSRLTVTKDASKNQVVLTMTNMDPVDTATYYCAHTGGAVITWFAYWGQGTLVTVSS

SEQ ID NO: 6613 - protein, 121 aa, Artificial Sequence
  source: /note="Description of Artificial Sequence: Synthetic polypeptide"
EVTLKESGPALVKPTQTLTLTCTFSGFSLSTYGMGVSWIRQPPGKALEWLASIWWNGNTYYNPSLKSRLTITKDTSKNQVVLTMTNMDPVDTATYYCAHTGGAVITWFAYWGQGTLVTVSS

SEQ ID NO: 6614 - protein, 121 aa, Artificial Sequence
  source: /note="Description of Artificial Sequence: Synthetic polypeptide"
EVTLKESGPALVKPTQTLTLTCTFSGFSLTTYGMGVSWIRQPPGKALEWLASIWWNGNTYYNPSLRSRLTVTKDTSKNQAVLTMTNMDPVDTATYYCAHTGGAVITWFAYWGQGTLVTVSS

SEQ ID NO: 6615 - protein, 121 aa, Artificial Sequence
  source: /note="Description of Artificial Sequence: Synthetic polypeptide"
EVTLKESGPALVKPTQTLTLTCTFSGFSLTTYGMGVSWIRQPPGKALEWLASIWWNGNTYYNPSLRSRLTITKDTSKNQAVLTMTNMDPVDTATYYCAHTGGAVITWFAYWGQGTLVTVSS

SEQ ID NO: 6616 - protein, 121 aa, Artificial Sequence
  source: /note="Description of Artificial Sequence: Synthetic polypeptide"
EVTLKESGPALVKPTQTLTLTCTFSGFSLTTYGMGVSWIRQPPGKALEWLASIWWNGNTYYNPSLRSRLTVTKDTSKNQVVLTMTNMDPVDTATYYCAHTGGAVITWFAYWGQGTLVTVSS

SEQ ID NO: 6617 - protein, 121 aa, Artificial Sequence
  source: /note="Description of Artificial Sequence: Synthetic polypeptide"
EVTLKESGPALVKPTQTLTLTCTFSGFSLTTYGMGVSWIRQPPGKALEWLASIWWNGNTYYNPSLRSRLTITKDTSKNQVVLTMTNMDPVDTATYYCAHTGGAVITWFAYWGQGTLVTVSS

SEQ ID NO: 6618 - protein, 117 aa, Rattus norvegicus
EVQLQQSGPELQRPGASVKLSCKATGYTFTEYSIYWVKQRPKQSLEIIGRIDPKNGRTYYVDKFKNRATLTADTSSNTAYMQLSSLTSEDTATYFCTRIYGFYFDFWGQGVMVTASS

SEQ ID NO: 6619 - protein, 117 aa, Artificial Sequence
  source: /note="Description of Artificial Sequence: Synthetic polypeptide"
EVQLVQSGAEVKKPGASVKVSCKASGYTFTEYSIYWVRQAPGQRLEIIGRIDPKNGRTYYVDKFKNRATLTADTSASTAYMELSSLRSEDTAVYFCTRIYGFYFDFWGQGTLVTVSS

SEQ ID NO: 6620 - protein, 117 aa, Artificial Sequence
  source: /note="Description of Artificial Sequence: Synthetic polypeptide"
EVQLVQSGAEVKKPGASVKVSCKASGYTFTEYSIYWVRQAPGQRLEWIGRIDPKNGRTYYVDKFKNRATLTADTSASTAYMELSSLRSEDTAVYFCTRIYGFYFDFWGQGTLVTVSS

SEQ ID NO: 6621 - protein, 117 aa, Artificial Sequence
  source: /note="Description of Artificial Sequence: Synthetic polypeptide"
EVQLVQSGAEVKKPGASVKVSCKASGYTFTEYSIYWVRQAPGQRLEIMGRIDPKNGRTYYVDKFKNRATLTADTSASTAYMELSSLRSEDTAVYFCTRIYGFYFDFWGQGTLVTVSS

SEQ ID NO: 6622 - protein, 117 aa, Artificial Sequence
  source: /note="Description of Artificial Sequence: Synthetic polypeptide"
EVQLVQSGAEVKKPGASVKVSCKASGYTFTEYSIYWVRQAPGQRLEIIGRIDPKNGRTYYVDKFKNRVTLTADTSASTAYMELSSLRSEDTAVYFCTRIYGFYFDFWGQGTLVTVSS

SEQ ID NO: 6623 - protein, 117 aa, Artificial Sequence
  source: /note="Description of Artificial Sequence: Synthetic polypeptide"
EVQLVQSGAEVKKPGASVKVSCKASGYTFTEYSIYWVRQAPGQRLEIIGRIDPKNGRTYYVDKFKNRATITADTSASTAYMELSSLRSEDTAVYFCTRIYGFYFDFWGQGTLVTVSS

SEQ ID NO: 6624 - protein, 117 aa, Artificial Sequence
  source: /note="Description of Artificial Sequence: Synthetic polypeptide"
EVQLVQSGAEVKKPGASVKVSCKASGYTFTEYSIYWVRQAPGQRLEIIGRIDPKNGRTYYVDKFKNRATLTRDTSASTAYMELSSLRSEDTAVYFCTRIYGFYFDFWGQGTLVTVSS

SEQ ID NO: 6625 - protein, 117 aa, Artificial Sequence
  source: /note="Description of Artificial Sequence: Synthetic polypeptide"
EVQLVQSGAEVKKPGASVKVSCKASGYTFTEYSIYWVRQAPGQRLEIIGRIDPKNGRTYYVDKFKNRATLTADTSASTAYMELSSLRSEDTAVYYCTRIYGFYFDFWGQGTLVTVSS

SEQ ID NO: 6626 - protein, 117 aa, Artificial Sequence
  source: /note="Description of Artificial Sequence: Synthetic polypeptide"
EVQLVQSGAEVKKPGASVKVSCKASGYTFTEYSIYWVRQAPGQRLEIIGRIDPKNGRTYYVDKFKNRATLTADTSASTAYMELSSLRSEDTAVYFCARIYGFYFDFWGQGTLVTVSS

SEQ ID NO: 6627 - protein, 117 aa, Artificial Sequence
  source: /note="Description of Artificial Sequence: Synthetic polypeptide"
EVQLVQSGAEVKKPGASVKVSCKASGYTFTEYSIYWVRQAPGQRLEWMGRIDPKNGRTYYVDKFKNRVTITRDTSASTAYMELSSLRSEDTAVYYCARIYGFYFDFWGQGTLVTVSS

SEQ ID NO: 6628 - protein, 117 aa, Artificial Sequence
  source: /note="Description of Artificial Sequence: Synthetic polypeptide"
EVQLVQSGAEVKKPGASVKVSCKASGYTFTEYSIYWVRQAPGQRLEIMGRIDPKNGRTYYVDKFKNRVTITRDTSASTAYMELSSLRSEDTAVYYCARIYGFYFDFWGQGTLVTVSS

SEQ ID NO: 6629 - protein, 117 aa, Rattus norvegicus
EVQLQQSGPELQRPGASVKLSCKASGYTFTEHSIYWLKQRPKQSLEIIGRIDPKNGRTYFVDKFKNRATLTTNTSSNTAYMQLSSLTSEDTAIYFCARIDGFYFDFWGQGVMVTASS

SEQ ID NO: 6630 - protein, 117 aa, Artificial Sequence
  source: /note="Description of Artificial Sequence: Synthetic polypeptide"
EVQLVQSGAEVKKPGASVKVSCKASGYTFTEHSIYWLRQAPGQRLEIIGRIDPKNGRTYFVDKFKNRATLTTDTSASTAYMELSSLRSEDTAVYFCARIDGFYFDFWGQGTLVTVSS

SEQ ID NO: 6631 - protein, 117 aa, Artificial Sequence
  source: /note="Description of Artificial Sequence: Synthetic polypeptide"
EVQLVQSGAEVKKPGASVKVSCKASGYTFTEHSIYWVRQAPGQRLEIIGRIDPKNGRTYFVDKFKNRATLTTDTSASTAYMELSSLRSEDTAVYFCARIDGFYFDFWGQGTLVTVSS

SEQ ID NO: 6632 - protein, 117 aa, Artificial Sequence
  source: /note="Description of Artificial Sequence: Synthetic polypeptide"
EVQLVQSGAEVKKPGASVKVSCKASGYTFTEHSIYWLRQAPGQRLEWIGRIDPKNGRTYFVDKFKNRATLTTDTSASTAYMELSSLRSEDTAVYFCARIDGFYFDFWGQGTLVTVSS

SEQ ID NO: 6633 - protein, 117 aa, Artificial Sequence
  source: /note="Description of Artificial Sequence: Synthetic polypeptide"
EVQLVQSGAEVKKPGASVKVSCKASGYTFTEHSIYWLRQAPGQRLEIMGRIDPKNGRTYFVDKFKNRATLTTDTSASTAYMELSSLRSEDTAVYFCARIDGFYFDFWGQGTLVTVSS

SEQ ID NO: 6634 - protein, 117 aa, Artificial Sequence
  source: /note="Description of Artificial Sequence: Synthetic polypeptide"
EVQLVQSGAEVKKPGASVKVSCKASGYTFTEHSIYWLRQAPGQRLEIIGRIDPKNGRTYFVDKFKNRVTLTTDTSASTAYMELSSLRSEDTAVYFCARIDGFYFDFWGQGTLVTVSS

SEQ ID NO: 6635 - protein, 117 aa, Artificial Sequence
  source: /note="Description of Artificial Sequence: Synthetic polypeptide"
EVQLVQSGAEVKKPGASVKVSCKASGYTFTEHSIYWLRQAPGQRLEIIGRIDPKNGRTYFVDKFKNRATITTDTSASTAYMELSSLRSEDTAVYFCARIDGFYFDFWGQGTLVTVSS

SEQ ID NO: 6636 - protein, 117 aa, Artificial Sequence
  source: /note="Description of Artificial Sequence: Synthetic polypeptide"
EVQLVQSGAEVKKPGASVKVSCKASGYTFTEHSIYWLRQAPGQRLEIIGRIDPKNGRTYFVDKFKNRATLTRDTSASTAYMELSSLRSEDTAVYFCARIDGFYFDFWGQGTLVTVSS

SEQ ID NO: 6637 - protein, 117 aa, Artificial Sequence
  source: /note="Description of Artificial Sequence: Synthetic polypeptide"
EVQLVQSGAEVKKPGASVKVSCKASGYTFTEHSIYWLRQAPGQRLEIIGRIDPKNGRTYFVDKFKNRATLTTDTSASTAYMELSSLRSEDTAVYYCARIDGFYFDFWGQGTLVTVSS

SEQ ID NO: 6638 - protein, 117 aa, Artificial Sequence
  source: /note="Description of Artificial Sequence: Synthetic polypeptide"
EVQLVQSGAEVKKPGASVKVSCKASGYTFTEHSIYWVRQAPGQRLEWMGRIDPKNGRTYFVDKFKNRVTITRDTSASTAYMELSSLRSEDTAVYYCARIDGFYFDFWGQGTLVTVSS

SEQ ID NO: 6639 - protein, 117 aa, Artificial Sequence
  source: /note="Description of Artificial Sequence: Synthetic polypeptide"
EVQLVQSGAEVKKPGASVKVSCKASGYTFTEHSIYWLRQAPGQRLEIMGRIDPKNGRTYFVDKFKNRATITTDTSASTAYMELSSLRSEDTAVYYCARIDGFYFDFWGQGTLVTVSS

SEQ ID NO: 6640 - protein, 117 aa, Artificial Sequence
  source: /note="Description of Artificial Sequence: Synthetic polypeptide"
EVQLVQSGAEVKKPGASVKVSCKASGYTFTDSYMSWVRQAPGQGLEWIGDMYPDNGDSSYNQKFRERVTITRDTSTSTAYLELSSLRSEDTAVYYCVLAPRWYFSVWGQGTLVTVSS

SEQ ID NO: 6641 - protein, 117 aa, Artificial Sequence
  source: /note="Description of Artificial Sequence: Synthetic polypeptide"
EVQLVQSGAEVKKPGASVKVSCKASGYTFTDSYMSWVRQAPGQGLEWIGDMYPDNGDSSYNQKFRERVTITVDTSTSTAYLELSSLRSEDTAVYYCVLAPRWYFSVWGQGTLVTVSS

SEQ ID NO: 6642 - protein, 117 aa, Artificial Sequence
  source: /note="Description of Artificial Sequence: Synthetic polypeptide"
EVQLVQSGAEVKKPGASVKVSCKASGYTFTDSYMSWVRQAPGQGLEWIGDMYPDNGDSSYNQKFRERVTLTVDTSTSTAYLELSSLRSEDTAVYYCVLAPRWYFSVWGQGTLVTVSS

SEQ ID NO: 6643 - protein, 117 aa, Artificial Sequence
  source: /note="Description of Artificial Sequence: Synthetic polypeptide"
EVQLVQSGAEVKKPGASVKVSCKASGYTFTDAYMSWVRQAPGQGLEWIGDMYPDNGDSSYNQKFRERVTITRDTSTSTAYLELSSLRSEDTAVYYCVLAPRWYFSVWGQGTLVTVSS

SEQ ID NO: 6644 - protein, 117 aa, Artificial Sequence
  source: /note="Description of Artificial Sequence: Synthetic polypeptide"
EVQLVQSGAEVKKPGASVKVSCKASGYTFTESYMSWVRQAPGQGLEWIGDMYPDNGDSSYNQKFRERVTITRDTSTSTAYLELSSLRSEDTAVYYCVLAPRWYFSVWGQGTLVTVSS

SEQ ID NO: 6645 - protein, 117 aa, Artificial Sequence
  source: /note="Description of Artificial Sequence: Synthetic polypeptide"
EVQLVQSGAEVKKPGASVKVSCKASGYTFTDSYMSWVRQAPGQGLEWIGDMYPDNADSSYNQKFRERVTITRDTSTSTAYLELSSLRSEDTAVYYCVLAPRWYFSVWGQGTLVTVSS

SEQ ID NO: 6646 - protein, 117 aa, Artificial Sequence
  source: /note="Description of Artificial Sequence: Synthetic polypeptide"
EVQLVQSGAEVKKPGASVKVSCKASGYTFTDSYMSWVRQAPGQGLEWIGDMYPDNADASYNQKFRERVTITRDTSTSTAYLELSSLRSEDTAVYYCVLAPRWYFSVWGQGTLVTVSS

SEQ ID NO: 6647 - protein, 117 aa, Artificial Sequence
  source: /note="Description of Artificial Sequence: Synthetic polypeptide"
EVQLVQSGAEVKKPGASVKVSCKASGYTFTDSYMSWVRQAPGQGLEWIGDMYPDNGDASYNQKFRERVTITRDTSTSTAYLELSSLRSEDTAVYYCVLAPRWYFSVWGQGTLVTVSS

SEQ ID NO: 6648 - protein, 117 aa, Artificial Sequence
  source: /note="Description of Artificial Sequence: Synthetic polypeptide"
EVQLVQSGAEVKKPGASVKVSCKASGYTFTDSYMSWVRQAPGQGLEWIGDMYPDSGDSSYNQKFRERVTITRDTSTSTAYLELSSLRSEDTAVYYCVLAPRWYFSVWGQGTLVTVSS

SEQ ID NO: 6649 - protein, 117 aa, Artificial Sequence
  source: /note="Description of Artificial Sequence: Synthetic polypeptide"
EVQLVQSGAEVKKPGASVKVSCKASGYTFTDSYMSWVRQAPGQGLEWIGDMYPDNGSSSYNQKFRERVTITRDTSTSTAYLELSSLRSEDTAVYYCVLAPRWYFSVWGQGTLVTVSS

SEQ ID NO: 6650 - protein, 117 aa, Artificial Sequence
  source: /note="Description of Artificial Sequence: Synthetic polypeptide"
EVQLVQSGAEVKKPGASVKVSCKASGYTFTDAYMSWVRQAPGQGLEWIGDMYPDNADASYNQKFRERVTITRDTSTSTAYLELSSLRSEDTAVYYCVLAPRWYFSVWGQGTLVTVSS

SEQ ID NO: 6651 - protein, 117 aa, Artificial Sequence
  source: /note="Description of Artificial Sequence: Synthetic polypeptide"
EVQLVQSGAEVKKPGASVKVSCKASGYTFTDSYMSWVRQAPGQGLEWIGDMYPDNGDSSYNQKFRERVTITRDTSTSTAYLELSSLRSEDTAVYYCVLAPRWYFSAWGQGTLVTVSS

SEQ ID NO: 6652 - protein, 117 aa, Artificial Sequence
  source: /note="Description of Artificial Sequence: Synthetic polypeptide"
EVQLVQSGAEVKKPGASVKVSCKASGYTFTDSYMSWVRQAPGQGLEWIGDMYPDNGDSSYNQKFRERVTITRDTSTSTAYLELSSLRSEDTAVYYCVLAPRWYFAVWGQGTLVTVSS

SEQ ID NO: 6653 - protein, 117 aa, Artificial Sequence
  source: /note="Description of Artificial Sequence: Synthetic polypeptide"
EVQLVQSGAEVKKPGASVKVSCKASGYTFTDSYMSWVRQAPGQGLEWIGDMYPDNGDSSYNQKFRERVTITRDTSTSTAYLELSSLRSEDTAVYYCALAPRWYFSVWGQGTLVTVSS

SEQ ID NO: 6654 - protein, 117 aa, Artificial Sequence
  source: /note="Description of Artificial Sequence: Synthetic polypeptide"
EVQLVQSGAEVKKPGASVKVSCKASGYTFTDSYMSWVRQAPGQGLEWIGDMYPDNGDSSYNQKFRERVTITRDTSTSTAYLELSSLRSEDTAVYYCVAAPRWYFSVWGQGTLVTVSS

SEQ ID NO: 6655 - protein, 124 aa, Artificial Sequence
  source: /note="Description of Artificial Sequence: Synthetic polypeptide"
EVQLVESGGGLVQPGRSLRLSCAASGFTFDDYSMHWVRQAPGKGLEWVSGISWNSGSKGYADSVKGRFTISRDNAKNSLYLQMNSLRAEDTALYYCAKYGSGYGKFYHYGLDVWGQGTTVTVSS

SEQ ID NO: 6656 - protein, 124 aa, Artificial Sequence
  source: /note="Description of Artificial Sequence: Synthetic polypeptide"
EVQLVESGGGLVQPGRSLRLSCAASGFTFDDYAMHWVRQAPGKGLEWVSGISWNSGSIGYADSVKGRFTISRDNAKNSLYLQMNSLRAEDTALYYCAKDGSGYGYFYYYGMDVWGQGTTVTVSS

SEQ ID NO: 6657 - protein, 124 aa, Artificial Sequence
  source: /note="Description of Artificial Sequence: Synthetic polypeptide"
EVQLVESGGGLVQPGRSLRLSCAASGFTFDDYSMHWVRQAPGKGLEWVSGISWNSGSIGYADSVKGRFTISRDNAKNSLYLQMNSLRAEDTALYYCAKDGSGYGYFYYYGMDVWGQGTTVTVSS

SEQ ID NO: 6658 - protein, 124 aa, Artificial Sequence
  source: /note="Description of Artificial Sequence: Synthetic polypeptide"
EVQLVESGGGLVQPGRSLRLSCAASGFTFDDYAMHWVRQAPGKGLEWVSGISWNSGSIGYADSVKGRFTISRDNAKNSLYLQMNSLRAEDTALYYCAKDGSGYGKFYYYGMDVWGQGTTVTVSS

SEQ ID NO: 6659 - protein, 124 aa, Artificial Sequence
  source: /note="Description of Artificial Sequence: Synthetic polypeptide"
EVQLVESGGGLVQPGRSLRLSCAASGFTFDDYSMHWVRQAPGKGLEWVSGISWNSGSIGYADSVKGRFTISRDNAKNSLYLQMNSLRAEDTALYYCAKDGSGYGKFYYYGMDVWGQGTTVTVSS

SEQ ID NO: 6660 - protein, 124 aa, Artificial Sequence
  source: /note="Description of Artificial Sequence: Synthetic polypeptide"
EVQLVESGGGLVQPGRSLRLSCAASGFTFDDYSMHWVRQAPGKGLEWVSGISWNSGSIGYADSVKGRFTISRDNAKNSLYLQMNSLRAEDTALYYCAKYGSGYGKFYHYGLDVWGQGTTVTVSS

SEQ ID NO: 6661 - protein, 124 aa, Artificial Sequence
  source: /note="Description of Artificial Sequence: Synthetic polypeptide"
EVQLVESGGGLVQPGRSLRLSCAASGFTFDDYSMHWVRQAPGKGLEWVSGISWNSGSKGYADSVKGRFTISRDNAKNSLYLQMNSLRAEDTALYYCAKDGSGYGKFYHYGLDVWGQGTTVTVSS

SEQ ID NO: 6662 - protein, 124 aa, Artificial Sequence
  source: /note="Description of Artificial Sequence: Synthetic polypeptide"
EVQLVESGGGLVQPGRSLRLSCAASGFTFDDYSMHWVRQAPGKGLEWVSGISWNSGSKGYADSVKGRFTISRDNAKNSLYLQMNSLRAEDTALYYCAKYGSGYGKFYYYGLDVWGQGTTVTVSS

SEQ ID NO: 6663 - protein, 124 aa, Artificial Sequence
  source: /note="Description of Artificial Sequence: Synthetic polypeptide"
EVQLVESGGGLVQPGRSLRLSCAASGFTFDDYSMHWVRQAPGKGLEWVSGISWNSGSKGYADSVKGRFTISRDNAKNSLYLQMNSLRAEDTALYYCAKYGSGYGKFYHYGMDVWGQGTTVTVSS

SEQ ID NO: 6664 - protein, 124 aa, Artificial Sequence
  source: /note="Description of Artificial Sequence: Synthetic polypeptide"
EVQLVESGGGLVQPGRSLRLSCAASGFTFDDYSMHWVRQAPGKGLEWVSGISWNSGSIGYADSVKGRFTISRDNAKNSLYLQMNSLRAEDTALYYCAKDGSGYGKFYHYGLDVWGQGTTVTVSS

SEQ ID NO: 6665 - protein, 124 aa, Artificial Sequence
  source: /note="Description of Artificial Sequence: Synthetic polypeptide"
EVQLVESGGGLVQPGRSLRLSCAASGFTFDDYSMHWVRQAPGKGLEWVSGISWNSGSIGYADSVKGRFTISRDNAKNSLYLQMNSLRAEDTALYYCAKYGSGYGKFYYYGLDVWGQGTTVTVSS

SEQ ID NO: 6666 - protein, 124 aa, Artificial Sequence
  source: /note="Description of Artificial Sequence: Synthetic polypeptide"
EVQLVESGGGLVQPGRSLRLSCAASGFTFDDYSMHWVRQAPGKGLEWVSGISWNSGSIGYADSVKGRFTISRDNAKNSLYLQMNSLRAEDTALYYCAKYGSGYGKFYHYGMDVWGQGTTVTVSS

SEQ ID NO: 6667 - protein, 124 aa, Artificial Sequence
  source: /note="Description of Artificial Sequence: Synthetic polypeptide"
EVQLVESGGGLVQPGRSLRLSCAASGFTFDDYSMHWVRQAPGKGLEWVSGISWNSGSKGYADSVKGRFTISRDNAKNSLYLQMNSLRAEDTALYYCAKDGSGYGKFYYYGLDVWGQGTTVTVSS

SEQ ID NO: 6668 - protein, 124 aa, Artificial Sequence
  source: /note="Description of Artificial Sequence: Synthetic polypeptide"
EVQLVESGGGLVQPGRSLRLSCAASGFTFDDYSMHWVRQAPGKGLEWVSGISWNSGSKGYADSVKGRFTISRDNAKNSLYLQMNSLRAEDTALYYCAKDGSGYGKFYHYGMDVWGQGTTVTVSS

SEQ ID NO: 6669 - protein, 124 aa, Artificial Sequence
  source: /note="Description of Artificial Sequence: Synthetic polypeptide"
EVQLVESGGGLVQPGRSLRLSCAASGFTFDDYSMHWVRQAPGKGLEWVSGISWNSGSKGYADSVKGRFTISRDNAKNSLYLQMNSLRAEDTALYYCAKYGSGYGKFYYYGMDVWGQGTTVTVSS

SEQ ID NO: 6670 - protein, 124 aa, Artificial Sequence
  source: /note="Description of Artificial Sequence: Synthetic polypeptide"
EVQLVESGGGLVQPGRSLRLSCAASGFTFDDYSMHWVRQAPGKGLEWVSGISWNSGSIGYADSVKGRFTISRDNAKNSLYLQMNSLRAEDTALYYCAKDGSGYGKFYYYGLDVWGQGTTVTVSS

SEQ ID NO: 6671 - protein, 124 aa, Artificial Sequence
  source: /note="Description of Artificial Sequence: Synthetic polypeptide"
EVQLVESGGGLVQPGRSLRLSCAASGFTFDDYSMHWVRQAPGKGLEWVSGISWNSGSIGYADSVKGRFTISRDNAKNSLYLQMNSLRAEDTALYYCAKDGSGYGKFYHYGMDVWGQGTTVTVSS

SEQ ID NO: 6672 - protein, 124 aa, Artificial Sequence
  source: /note="Description of Artificial Sequence: Synthetic polypeptide"
EVQLVESGGGLVQPGRSLRLSCAASGFTFDDYSMHWVRQAPGKGLEWVSGISWNSGSIGYADSVKGRFTISRDNAKNSLYLQMNSLRAEDTALYYCAKYGSGYGKFYYYGMDVWGQGTTVTVSS

SEQ ID NO: 6673 - protein, 124 aa, Artificial Sequence
  source: /note="Description of Artificial Sequence: Synthetic polypeptide"
EVQLVESGGGLVQPGRSLRLSCAASGFTFDDYSMHWVRQAPGKGLEWVSGISWNSGSKGYADSVKGRFTISRDNAKNSLYLQMNSLRAEDTALYYCAKDGSGYGKFYYYGMDVWGQGTTVTVSS

SEQ ID NO: 6674 - protein, 124 aa, Artificial Sequence
  source: /note="Description of Artificial Sequence: Synthetic polypeptide"
EVQLVESGGGLVQPGRSLRLSCVASGFTFDDYSMHWVRQAPGKGLEWVSGISWNSGSKDYADSVKGRFTISRDNAKNSLYLQMNSLRAEDTALYYCAKYGSGYGKFYHYGLDVWGQGTTVTVSS

SEQ ID NO: 6675 - protein, 119 aa, Artificial Sequence
  source: /note="Description of Artificial Sequence: Synthetic polypeptide"
VQLQQSGGGLVKPGGSLKLSCAASGFTFSNYAMSWVRQTPEKRLEWVATISGGSSYTYYPDSVKGRFTISRDNAKNNLYLQMSSLRSEDTALYYCATHYGNYGSWFAYWGQGTTVTVSS

SEQ ID NO: 6676 - protein, 123 aa, Artificial Sequence
  source: /note="Description of Artificial Sequence: Synthetic polypeptide"
VQLQESGPGLVKPSQSLSLTCTVTGYSITSDYAWNWIRQFPGNKLEWMGYISYSGSTGYNPSLKSRISITRDTSKNQFFLQLNSVTTEDTATYYCARIFYYGSTYFHYAMDYWGQGTTVTVSS

SEQ ID NO: 6677 - protein, 117 aa, Homo sapiens
QVELVESGGGLVQPGGSLRLSCAASGFTFTSYWMSWVRQAPGKGLELVSSITSYGSFTYYADSVKGRFTISRDNSKNTLYLQMNSLRAEDTAVYYCARNMYTHFDSWGQGTLVTVSS

SEQ ID NO: 6678 - protein, 125 aa, Artificial Sequence
  source: /note="Description of Artificial Sequence: Synthetic polypeptide"
EVQLLESGGGLVQPGGSLRLSCAASGFTFSTYAMNWVRQAPGKGLEWVSRIRSKYNNYATYYADSVKGRFTISRDDSKNTLYLQMNSLRAEDTAVYYCVRHGNFGNSYVSWFAYWGQGTLVTVSS

SEQ ID NO: 6679 - protein, 121 aa, Artificial Sequence
  source: /note="Description of Artificial Sequence: Synthetic polypeptide"
QVQLVQSGAEVKKPGASVKVSCKASGYTFTDYIMHWVRQAPGQGLEWMGYINPYNDGSKYTEKFQGRVTMTSDTSISTAYMELSRLRSDDTAVYYCARGTYYYGSALFDYWGQGTTVTVSS

SEQ ID NO: 6680 - protein, 449 aa, Artificial Sequence
  source: /note="Description of Artificial Sequence: Synthetic polypeptide"
EVQLQQSGPELVKPGASVKMACKASGYTFTDYIMHWVKQKTGQGLEWIGYINPYNDGSKYTEKFNGKATLTSDKSSITAYMELSSLTSEDSAVYYCARGTYYYGSALFDYWGQGTTLTVSSASTKGPSVFPLAPSSKSTSGGTAALGCLVEDYFPEPVTVSWNSGALTSGVHTFPAVLQSSGLYSLSSVVTVPSSSLGTQTYICNVNHKPSNTKVDEKVEPKSCDKTHTCPPCPAPEAAGGPSVFLFPPKPKDTLMISRTPEVTCVVVDVSHEDPEVKFNWYVDGVEVHNAKTKPREEQYNSTYRVVSVLTVLHQDWLNGKEYKCKVSNKALGAPIEKTISKAKGQPREPQVCTLPPSRDELTKNQVSLSCAVKGFYPSDIAVEWESNGQPENNYKTTPPVLDSDGSFFLVSKLTVDKSRWQQGNVFSCSVMHEALHNHYTQKSLSLSP

SEQ ID NO: 6681 - protein, 674 aa, Artificial Sequence
  source: /note="Description of Artificial Sequence: Synthetic polypeptide"
EVQLQQSGPELVKPGASVKMACKASGYTFTDYIMHWVKQKTGQGLEWIGYINPYNDGSKYTEKFNGKATLTSDKSSITAYMELSSLTSEDSAVYYCARGTYYYGSALFDYWGQGTTLTVSSASTKGPSVFPLAPSSKSTSGGTAALGCLVEDYFPEPVTVSWNSGALTSGVHTFPAVLQSSGLYSLSSVVTVPSSSLGTQTYICNVNHKPSNTKVDEKVEPKSCDGGGGSGGGGSQAVVTQEPSLTVSPGGTVTLTCGSSTGAVTTSNYANWVQEKPGQAFRGLIGGTNKRAPGTPARFSGSLLGGKAALTLSGAQPEDEAEYYCALWYSNLWVFGGGTKLTVLSSASTKGPSVFPLAPSSKSTSGGTAALGCLVKDYFPEPVTVSWNSGALTSGVHTFPAVLQSSGLYSLSSVVTVPSSSLGTQTYICNVNHKPSNTKVDKKVEPKSCDKTHTCPPCPAPEAAGGPSVFLFPPKPKDTLMISRTPEVTCVVVDVSHEDPEVKFNWYVDGVEVHNAKTKPREEQYNSTYRVVSVLTVLHQDWLNGKEYKCKVSNKALGAPIEKTISKAKGQPREPQVYTLPPCRDELTKNQVSLWCLVKGFYPSDIAVEWESNGQPENNYKTTPPVLDSDGSFFLYSKLTVDKSRWQQGNVFSCSVMHEALHNHYTQKSLSLSP

SEQ ID NO: 6682 - protein, 232 aa, Artificial Sequence
  source: /note="Description of Artificial Sequence: Synthetic polypeptide"
EVQLLESGGGLVQPGGSLRLSCAASGFTFSTYAMNWVRQAPGKGLEWVSRIRSKYNNYATYYADSVKGRFTISRDDSKNTLYLQMNSLRAEDTAVYYCVRHGNFGNSYVSWFAYWGQGTLVTVSSASVAAPSVFIFPPSDEQLKSGTASVVCLLNNFYPREAKVQWKVDNALQSGNSQESVTEQDSKDSTYSLSSTLTLSKADYEKHKVYACEVTHQGLSSPVTKSFNRGEC

SEQ ID NO: 6683 - protein, 449 aa, Artificial Sequence
  source: /note="Description of Artificial Sequence: Synthetic polypeptide"
EVQLQQSGPELVKPGASVKMACKASGYTFTDYIMHWVKQKTGQGLEWIGYINPYNDGSKYTEKFNGKATLTSDKSSITAYMELSSLTSEDSAVYYCARGTYYYGSALFDYWGQGTTLTVSSASTKGPSVFPLAPSSKSTSGGTAALGCLVKDYFPEPVTVSWNSGALTSGVHTFPAVLQSSGLYSLSSVVTVPSSSLGTQTYICNVNHKPSNTKVDKKVEPKSCDKTHTCPPCPAPEAAGGPSVFLFPPKPKDTLMISRTPEVTCVVVDVSHEDPEVKFNWYVDGVEVHNAKTKPREEQYNSTYRVVSVLTVLHQDWLNGKEYKCKVSNKALGAPIEKTISKAKGQPREPQVCTLPPSRDELTKNQVSLSCAVKGFYPSDIAVEWESNGQPENNYKTTPPVLDSDGSFFLVSKLTVDKSRWQQGNVFSCSVMHEALHNHYTQKSLSLSP

SEQ ID NO: 6684 - protein, 692 aa, Artificial Sequence
  source: /note="Description of Artificial Sequence: Synthetic polypeptide"
EVQLQQSGPELVKPGASVKMACKASGYTFTDYIMHWVKQKTGQGLEWIGYINPYNDGSKYTEKFNGKATLTSDKSSITAYMELSSLTSEDSAVYYCARGTYYYGSALFDYWGQGTTLTVSSASTKGPSVFPLAPSSKSTSGGTAALGCLVKDYFPEPVTVSWNSGALTSGVHTFPAVLQSSGLYSLSSVVTVPSSSLGTQTYICNVNHKPSNTKVDKKVEPKSCDGGGGSGGGGSEVQLLESGGGLVQPGGSLRLSCAASGFTFSTYAMNWVRQAPGKGLEWVSRIRSKYNNYATYYADSVKGRFTISRDDSKNTLYLQMNSLRAEDTAVYYCVRHGNFGNSYVSWFAYWGQGTLVTVSSASVAAPSVFIFPPSDEQLKSGTASVVCLLNNFYPREAKVQWKVDNALQSGNSQESVTEQDSKDSTYSLSSTLTLSKADYEKHKVYACEVTHQGLSSPVTKSFNRGECDKTHTCPPCPAPEAAGGPSVFLFPPKPKDTLMISRTPEVTCVVVDVSHEDPEVKFNWYVDGVEVHNAKTKPREEQYNSTYRVVSVLTVLHQDWLNGKEYKCKVSNKALGAPIEKTISKAKGQPREPQVYTLPPCRDELTKNQVSLWCLVKGFYPSDIAVEWESNGQPENNYKTTPPVLDSDGSFFLYSKLTVDKSRWQQGNVFSCSVMHEALHNHYTQKSLSLSP

SEQ ID NO: 6685 - protein, 449 aa, Artificial Sequence
  source: /note="Description of Artificial Sequence: Synthetic polypeptide"
QVQLVQSGAEVKKPGASVKVSCKASGYTFTDYIMHWVRQAPGQGLEWMGYINPYNDGSKYTEKFQGRVTMTSDTSISTAYMELSRLRSDDTAVYYCARGTYYYGSALFDYWGQGTTVTVSSASTKGPSVFPLAPSSKSTSGGTAALGCLVEDYFPEPVTVSWNSGALTSGVHTFPAVLQSSGLYSLSSVVTVPSSSLGTQTYICNVNHKPSNTKVDEKVEPKSCDKTHTCPPCPAPEAAGGPSVFLFPPKPKDTLMISRTPEVTCVVVDVSHEDPEVKFNWYVDGVEVHNAKTKPREEQYNSTYRVVSVLTVLHQDWLNGKEYKCKVSNKALGAPIEKTISKAKGQPREPQVCTLPPSRDELTKNQVSLSCAVKGFYPSDIAVEWESNGQPENNYKTTPPVLDSDGSFFLVSKLTVDKSRWQQGNVFSCSVMHEALHNHYTQKSLSLSP

SEQ ID NO: 6686 - protein, 674 aa, Artificial Sequence
  source: /note="Description of Artificial Sequence: Synthetic polypeptide"
QVQLVQSGAEVKKPGASVKVSCKASGYTFTDYIMHWVRQAPGQGLEWMGYINPYNDGSKYTEKFQGRVTMTSDTSISTAYMELSRLRSDDTAVYYCARGTYYYGSALFDYWGQGTTVTVSSASTKGPSVFPLAPSSKSTSGGTAALGCLVEDYFPEPVTVSWNSGALTSGVHTFPAVLQSSGLYSLSSVVTVPSSSLGTQTYICNVNHKPSNTKVDEKVEPKSCDGGGGSGGGGSQAVVTQEPSLTVSPGGTVTLTCGSSTGAVTTSNYANWVQEKPGQAFRGLIGGTNKRAPGTPARFSGSLLGGKAALTLSGAQPEDEAEYYCALWYSNLWVFGGGTKLTVLSSASTKGPSVFPLAPSSKSTSGGTAALGCLVKDYFPEPVTVSWNSGALTSGVHTFPAVLQSSGLYSLSSVVTVPSSSLGTQTYICNVNHKPSNTKVDKKVEPKSCDKTHTCPPCPAPEAAGGPSVFLFPPKPKDTLMISRTPEVTCVVVDVSHEDPEVKFNWYVDGVEVHNAKTKPREEQYNSTYRVVSVLTVLHQDWLNGKEYKCKVSNKALGAPIEKTISKAKGQPREPQVYTLPPCRDELTKNQVSLWCLVKGFYPSDIAVEWESNGQPENNYKTTPPVLDSDGSFFLYSKLTVDKSRWQQGNVFSCSVMHEALHNHYTQKSLSLSP

SEQ ID NO: 6687 - protein, 121 aa, Artificial Sequence
  source: /note="Description of Artificial Sequence: Synthetic polypeptide"
EVQLQQSGPELVKPGASVKMSCKASGYTFTSYVMHWVKQKPGQGLEWIGYINPYNDGTKFNEKFKGKATLTSDKSSSTAYMELSSLTSEDSAVYYCTRGVYYYGSSQGDYWGQGTTLTVSS

SEQ ID NO: 6688 - protein, 115 aa, Artificial Sequence
  source: /note="Description of Artificial Sequence: Synthetic polypeptide"
EVQLLESGGGLVQPGGSLRLSCAASGFTFSSYAMSWVRQAPGKGLEWVSAISGSGGSTYYADSVKGRFTISRDNSKNTLYLQMNSLRAEDTAVYYCAKGSGFDYWGQGTLVTVSS

SEQ ID NO: 6689 - protein, 125 aa, Artificial Sequence
  source: /note="Description of Artificial Sequence: Synthetic polypeptide"
EVQLLESGGGLVQPGGSLRLSCAASGFTFSTYAMNWVRQAPGKGLEWVSRIRSKYNNYATYYADSVKDRFTISRDDSKNTLYLQMNSLRAEDTAVYYCVRHGNFGNSYVSWFAYWGQGTLVTVSS

SEQ ID NO: 6690 - protein, 449 aa, Artificial Sequence
  source: /note="Description of Artificial Sequence: Synthetic polypeptide"
EVQLQQSGPELVKPGASVKMSCKASGYTFTSYVMHWVKQKPGQGLEWIGYINPYNDGTKFNEKFKGKATLTSDKSSSTAYMELSSLTSEDSAVYYCTRGVYYYGSSQGDYWGQGTTLTVSSASTKGPSVFPLAPSSKSTSGGTAALGCLVKDYFPEPVTVSWNSGALTSGVHTFPAVLQSSGLYSLSSVVTVPSSSLGTQTYICNVNHKPSNTKVDKKVEPKSCDKTHTCPPCPAPEAAGGPSVFLFPPKPKDTLMISRTPEVTCVVVDVSHEDPEVKFNWYVDGVEVHNAKTKPREEQYNSTYRVVSVLTVLHQDWLNGKEYKCKVSNKALGAPIEKTISKAKGQPREPQVCTLPPSRDELTKNQVSLSCAVKGFYPSDIAVEWESNGQPENNYKTTPPVLDSDGSFFLVSKLTVDKSRWQQGNVFSCSVMHEALHNHYTQKSLSLSP

SEQ ID NO: 6691 - protein, 692 aa, Artificial Sequence
  source: /note="Description of Artificial Sequence: Synthetic polypeptide"
EVQLQQSGPELVKPGASVKMSCKASGYTFTSYVMHWVKQKPGQGLEWIGYINPYNDGTKFNEKFKGKATLTSDKSSSTAYMELSSLTSEDSAVYYCTRGVYYYGSSQGDYWGQGTTLTVSSASTKGPSVFPLAPSSKSTSGGTAALGCLVKDYFPEPVTVSWNSGALTSGVHTFPAVLQSSGLYSLSSVVTVPSSSLGTQTYICNVNHKPSNTKVDKKVEPKSCDGGGGSGGGGSEVQLLESGGGLVQPGGSLRLSCAASGFTFSTYAMNWVRQAPGKGLEWVSRIRSKYNNYATYYADSVKGRFTISRDDSKNTLYLQMNSLRAEDTAVYYCVRHGNFGNSYVSWFAYWGQGTLVTVSSASVAAPSVFIFPPSDEQLKSGTASVVCLLNNFYPREAKVQWKVDNALQSGNSQESVTEQDSKDSTYSLSSTLTLSKADYEKHKVYACEVTHQGLSSPVTKSFNRGECDKTHTCPPCPAPEAAGGPSVFLFPPKPKDTLMISRTPEVTCVVVDVSHEDPEVKFNWYVDGVEVHNAKTKPREEQYNSTYRVVSVLTVLHQDWLNGKEYKCKVSNKALGAPIEKTISKAKGQPREPQVYTLPPCRDELTKNQVSLWCLVKGFYPSDIAVEWESNGQPENNYKTTPPVLDSDGSFFLYSKLTVDKSRWQQGNVFSCSVMHEALHNHYTQKSLSLSP

SEQ ID NO: 6692 - protein, 228 aa, Artificial Sequence
  source: /note="Description of Artificial Sequence: Synthetic polypeptide"
EVQLQQSGPELVKPGASVKMACKASGYTFTDYIMHWVKQKTGQGLEWIGYINPYNDGSKYTEKFNGKATLTSDKSSITAYMELSSLTSEDSAVYYCARGTYYYGSALFDYWGQGTTLTVSSASVAAPSVFIFPPSDEQLKSGTASVVCLLNNFYPREAKVQWKVDNALQSGNSQESVTEQDSKDSTYSLSSTLTLSKADYEKHKVYACEVTHQGLSSPVTKSFNRGEC

SEQ ID NO: 6693 - protein, 121 aa, Artificial Sequence
  source: /note="Description of Artificial Sequence: Synthetic polypeptide"
QVQLVQSGAEVKKPGASVKVSCKASGYTFTDYIMHWVRQAPGQGLEWMGYINPYNDGSKYTEKFQGRVTMTSDTSISTAYMELSRLRSDDTAVYYCARGTYYYGPQLFDYWGQGTTVTVSS

SEQ ID NO: 6694 - protein, 121 aa, Artificial Sequence
  source: /note="Description of Artificial Sequence: Synthetic polypeptide"
QVQLVQSGAEVKKPGASVKVSCKASGYTFTDYIMHWVRQAPGQGLEWMGYINPYNDGSKYTEKFQGRVTMTSDTSISTAYMELSRLRSDDTAVYYCARGTYYYGSELFDYWGQGTTVTVSS

SEQ ID NO: 6695 - protein, 121 aa, Artificial Sequence
  source: /note="Description of Artificial Sequence: Synthetic polypeptide"
QVQLVQSGAEVKKPGASVKVSCKASGYTFTDYITHWVRQAPGQGLEWMGYINPYNDGSKYTEKFQGRVTMTSDTSISTAYMELSRLRSDDTAVYYCARGTYYYGPDLFDYWGQGTTVTVSS

SEQ ID NO: 6696 - protein, 449 aa, Artificial Sequence
  source: /note="Description of Artificial Sequence: Synthetic polypeptide"
QVQLVQSGAEVKKPGASVKVSCKASGYTFTDYIMHWVRQAPGQGLEWMGYINPYNDGSKYTEKFQGRVTMTSDTSISTAYMELSRLRSDDTAVYYCARGTYYYGPQLFDYWGQGTTVTVSSASTKGPSVFPLAPSSKSTSGGTAALGCLVEDYFPEPVTVSWNSGALTSGVHTFPAVLQSSGLYSLSSVVTVPSSSLGTQTYICNVNHKPSNTKVDEKVEPKSCDKTHTCPPCPAPEAAGGPSVFLFPPKPKDTLMISRTPEVTCVVVDVSHEDPEVKFNWYVDGVEVHNAKTKPREEQYNSTYRVVSVLTVLHQDWLNGKEYKCKVSNKALGAPIEKTISKAKGQPREPQVCTLPPSRDELTKNQVSLSCAVKGFYPSDIAVEWESNGQPENNYKTTPPVLDSDGSFFLVSKLTVDKSRWQQGNVFSCSVMHEALHNHYTQKSLSLSP

SEQ ID NO: 6697 - protein, 674 aa, Artificial Sequence
  source: /note="Description of Artificial Sequence: Synthetic polypeptide"
QVQLVQSGAEVKKPGASVKVSCKASGYTFTDYIMHWVRQAPGQGLEWMGYINPYNDGSKYTEKFQGRVTMTSDTSISTAYMELSRLRSDDTAVYYCARGTYYYGPQLFDYWGQGTTVTVSSASTKGPSVFPLAPSSKSTSGGTAALGCLVEDYFPEPVTVSWNSGALTSGVHTFPAVLQSSGLYSLSSVVTVPSSSLGTQTYICNVNHKPSNTKVDEKVEPKSCDGGGGSGGGGSQAVVTQEPSLTVSPGGTVTLTCGSSTGAVTTSNYANWVQEKPGQAFRGLIGGTNKRAPGTPARFSGSLLGGKAALTLSGAQPEDEAEYYCALWYSNLWVFGGGTKLTVLSSASTKGPSVFPLAPSSKSTSGGTAALGCLVKDYFPEPVTVSWNSGALTSGVHTFPAVLQSSGLYSLSSVVTVPSSSLGTQTYICNVNHKPSNTKVDKKVEPKSCDKTHTCPPCPAPEAAGGPSVFLFPPKPKDTLMISRTPEVTCVVVDVSHEDPEVKFNWYVDGVEVHNAKTKPREEQYNSTYRVVSVLTVLHQDWLNGKEYKCKVSNKALGAPIEKTISKAKGQPREPQVYTLPPCRDELTKNQVSLWCLVKGFYPSDIAVEWESNGQPENNYKTTPPVLDSDGSFFLYSKLTVDKSRWQQGNVFSCSVMHEALHNHYTQKSLSLSP

SEQ ID NO: 6698 - protein, 116 aa, Artificial Sequence
  source: /note="Description of Artificial Sequence: Synthetic polypeptide"
QVQLVQSGAEVKKPGSSVKVSCKASGYTFTDYNMHWVRQAPGQGLEWIGYIYPYNGGTGYNQKFKSKATITADESTNTAYMELSSLRSEDTAVYYCARGRPAMDYWGQGTLVTVSS

SEQ ID NO: 6699 - protein, 116 aa, Artificial Sequence [sequence omitted]

SEQ ID NO: 6700 - protein, 444 aa, Artificial Sequence
  source: /note="Description of Artificial Sequence: Synthetic polypeptide"
QVQLVQSGAEVKKPGSSVKVSCKASGYTFTDYNMHWVRQAPGQGLEWIGYIYPYNGGTGYNQKFKSKATITADESTNTAYMELSSLRSEDTAVYYCARGRPAMDYWGQGTLVTVSSASTKGPSVFPLAPSSKSTSGGTAALGCLVEDYFPEPVTVSWNSGALTSGVHTFPAVLQSSGLYSLSSVVTVPSSSLGTQTYICNVNHKPSNTKVDEKVEPKSCDKTHTCPPCPAPEAAGGPSVFLFPPKPKDTLMISRTPEVTCVVVDVSHEDPEVKFNWYVDGVEVHNAKTKPREEQYNSTYRVVSVLTVLHQDWLNGKEYKCKVSNKALGAPIEKTISKAKGQPREPQVCTLPPSRDELTKNQVSLSCAVKGFYPSDIAVEWESNGQPENNYKTTPPVLDSDGSFFLVSKLTVDKSRWQQGNVFSCSVMHEALHNHYTQKSLSLSP

SEQ ID NO: 6701 - protein, 669 aa, Artificial Sequence
  source: /note="Description of Artificial Sequence: Synthetic polypeptide"
QVQLVQSGAEVKKPGSSVKVSCKASGYTFTDYNMHWVRQAPGQGLEWIGYIYPYNGGTGYNQKFKSKATITADESTNTAYMELSSLRSEDTAVYYCARGRPAMDYWGQGTLVTVSSASTKGPSVFPLAPSSKSTSGGTAALGCLVEDYFPEPVTVSWNSGALTSGVHTFPAVLQSSGLYSLSSVVTVPSSSLGTQTYICNVNHKPSNTKVDEKVEPKSCDGGGGSGGGGSQAVVTQEPSLTVSPGGTVTLTCGSSTGAVTTSNYANWVQEKPGQAFRGLIGGTNKRAPGTPARFSGSLLGGKAALTLSGAQPEDEAEYYCALWYSNLWVFGGGTKLTVLSSASTKGPSVFPLAPSSKSTSGGTAALGCLVKDYFPEPVTVSWNSGALTSGVHTFPAVLQSSGLYSLSSVVTVPSSSLGTQTYICNVNHKPSNTKVDKKVEPKSCDKTHTCPPCPAPEAAGGPSVFLFPPKPKDTLMISRTPEVTCVVVDVSHEDPEVKFNWYVDGVEVHNAKTKPREEQYNSTYRVVSVLTVLHQDWLNGKEYKCKVSNKALGAPIEKTISKAKGQPREPQVYTLPPCRDELTKNQVSLWCLVKGFYPSDIAVEWESNGQPENNYKTTPPVLDSDGSFFLYSKLTVDKSRWQQGNVFSCSVMHEALHNHYTQKSLSLSP

SEQ ID NO: 6702 - protein, 444 aa, Artificial Sequence
  source: /note="Description of Artificial Sequence: Synthetic polypeptide"
EVQLVQSGAEVKKPGSSVKVSCKASGYTITDSNIHWVRQAPGQSLEWIGYIYPYNGGTDYNQKFKNRATLTVDNPTNTAYMELSSLRSEDTAFYYCVNGNPWLAYWGQGTLVTVSSASTKGPSVFPLAPSSKSTSGGTAALGCLVEDYFPEPVTVSWNSGALTSGVHTFPAVLQSSGLYSLSSVVTVPSSSLGTQTYICNVNHKPSNTKVDEKVEPKSCDKTHTCPPCPAPEAAGGPSVFLFPPKPKDTLMISRTPEVTCVVVDVSHEDPEVKFNWYVDGVEVHNAKTKPREEQYNSTYRVVSVLTVLHQDWLNGKEYKCKVSNKALGAPIEKTISKAKGQPREPQVCTLPPSRDELTKNQVSLSCAVKGFYPSDIAVEWESNGQPENNYKTTPPVLDSDGSFFLVSKLTVDKSRWQQGNVFSCSVMHEALHNHYTQKSLSLSP

SEQ ID NO: 6703 - protein, 669 aa, Artificial Sequence
  source: /note="Description of Artificial Sequence: Synthetic polypeptide"
EVQLVQSGAEVKKPGSSVKVSCKASGYTITDSNIHWVRQAPGQSLEWIGYIYPYNGGTDYNQKFKNRATLTVDNPTNTAYMELSSLRSEDTAFYYCVNGNPWLAYWGQGTLVTVSSASTKGPSVFPLAPSSKSTSGGTAALGCLVEDYFPEPVTVSWNSGALTSGVHTFPAVLQSSGLYSLSSVVTVPSSSLGTQTYICNVNHKPSNTKVDEKVEPKSCDGGGGSGGGGSQAVVTQEPSLTVSPGGTVTLTCGSSTGAVTTSNYANWVQEKPGQAFRGLIGGTNKRAPGTPARFSGSLLGGKAALTLSGAQPEDEAEYYCALWYSNLWVFGGGTKLTVLSSASTKGPSVFPLAPSSKSTSGGTAALGCLVKDYFPEPVTVSWNSGALTSGVHTFPAVLQSSGLYSLSSVVTVPSSSLGTQTYICNVNHKPSNTKVDKKVEPKSCDKTHTCPPCPAPEAAGGPSVFLFPPKPKDTLMISRTPEVTCVVVDVSHEDPEVKFNWYVDGVEVHNAKTKPREEQYNSTYRVVSVLTVLHQDWLNGKEYKCKVSNKALGAPIEKTISKAKGQPREPQVYTLPPCRDELTKNQVSLWCLVKGFYPSDIAVEWESNGQPENNYKTTPPVLDSDGSFFLYSKLTVDKSRWQQGNVFSCSVMHEALHNHYTQKSLSLSP

SEQ ID NO: 6704 - protein, 444 aa, Artificial Sequence
  source: /note="Description of Artificial Sequence: Synthetic polypeptide"
QVQLVQSGAEVKKPGSSVKVSCKASGYTFTDYNMHWVRQAPGQGLEWIGYIYPYNGGTGYNQKFKSKATITADESTNTAYMELSSLRSEDTAVYYCARGRPAMDYWGQGTLVTVSSASTKGPSVFPLAPSSKSTSGGTAALGCLVKDYFPEPVTVSWNSGALTSGVHTFPAVLQSSGLYSLSSVVTVPSSSLGTQTYICNVNHKPSNTKVDKKVEPKSCDKTHTCPPCPAPEAAGGPSVFLFPPKPKDTLMISRTPEVTCVVVDVSHEDPEVKFNWYVDGVEVHNAKTKPREEQYNSTYRVVSVLTVLHQDWLNGKEYKCKVSNKALGAPIEKTISKAKGQPREPQVCTLPPSRDELTKNQVSLSCAVKGFYPSDIAVEWESNGQPENNYKTTPPVLDSDGSFFLVSKLTVDKSRWQQGNVFSCSVMHEALHNHYTQKSLSLSP

SEQ ID NO: 6705 - protein, 669 aa, Artificial Sequence
  source: /note="Description of Artificial Sequence: Synthetic polypeptide"
QVQLVQSGAEVKKPGSSVKVSCKASGYTFTDYNMHWVRQAPGQGLEWIGYIYPYNGGTGYNQKFKSKATITADESTNTAYMELSSLRSEDTAVYYCARGRPAMDYWGQGTLVTVSSASTKGPSVFPLAPSSKSTSGGTAALGCLVKDYFPEPVTVSWNSGALTSGVHTFPAVLQSSGLYSLSSVVTVPSSSLGTQTYICNVNHKPSNTKVDKKVEPKSCDGGGGSGGGGSQAVVTQEPSLTVSPGGTVTLTCGSSTGAVTTSNYANWVQEKPGQAFRGLIGGTNKRAPGTPARFSGSLLGGKAALTLSGAQPEDEAEYYCALWYSNLWVFGGGTKLTVLSSASTKGPSVFPLAPSSKSTSGGTAALGCLVKDYFPEPVTVSWNSGALTSGVHTFPAVLQSSGLYSLSSVVTVPSSSLGTQTYICNVNHKPSNTKVDKKVEPKSCDKTHTCPPCPAPEAAGGPSVFLFPPKPKDTLMISRTPEVTCVVVDVSHEDPEVKFNWYVDGVEVHNAKTKPREEQYNSTYRVVSVLTVLHQDWLNGKEYKCKVSNKALGAPIEKTISKAKGQPREPQVYTLPPCRDELTKNQVSLWCLVKGFYPSDIAVEWESNGQPENNYKTTPPVLDSDGSFFLYSKLTVDKSRWQQGNVFSCSVMHEALHNHYTQKSLSLSP

SEQ ID NO: 6706 - protein, 113 aa, Artificial Sequence
  source: /note="Description of Artificial Sequence: Synthetic polypeptide"
EVQLVQSGAEVEKPGASVKISCKASGSSFTGYNMNWVRQNIGKSLEWIGAIDPYYGGTSYNQKFKGRATLTVDKSTSTAYMHLKSLRSEDTAVYYCVSGMEYWGQGTSVTVSS

SEQ ID NO: 6707 - protein, 441 aa, Artificial Sequence
  source: /note="Description of Artificial Sequence: Synthetic polypeptide"
EVQLVQSGAEVEKPGASVKISCKASGSSFTGYNMNWVRQNIGKSLEWIGAIDPYYGGTSYNQKFKGRATLTVDKSTSTAYMHLKSLRSEDTAVYYCVSGMEYWGQGTSVTVSSASTKGPSVFPLAPSSKSTSGGTAALGCLVEDYFPEPVTVSWNSGALTSGVHTFPAVLQSSGLYSLSSVVTVPSSSLGTQTYICNVNHKPSNTKVDEKVEPKSCDKTHTCPPCPAPEAAGGPSVFLFPPKPKDTLMISRTPEVTCVVVDVSHEDPEVKFNWYVDGVEVHNAKTKPREEQYNSTYRVVSVLTVLHQDWLNGKEYKCKVSNKALGAPIEKTISKAKGQPREPQVCTLPPSRDELTKNQVSLSCAVKGFYPSDIAVEWESNGQPENNYKTTPPVLDSDGSFFLVSKLTVDKSRWQQGNVFSCSVMHEALHNHYTQKSLSLSP

SEQ ID NO: 6708 - protein, 666 aa, Artificial Sequence
  source: /note="Description of Artificial Sequence: Synthetic polypeptide"
EVQLVQSGAEVEKPGASVKISCKASGSSFTGYNMNWVRQNIGKSLEWIGAIDPYYGGTSYNQKFKGRATLTVDKSTSTAYMHLKSLRSEDTAVYYCVSGMEYWGQGTSVTVSSASTKGPSVFPLAPSSKSTSGGTAALGCLVEDYFPEPVTVSWNSGALTSGVHTFPAVLQSSGLYSLSSVVTVPSSSLGTQTYICNVNHKPSNTKVDEKVEPKSCDGGGGSGGGGSQAVVTQEPSLTVSPGGTVTLTCGSSTGAVTTSNYANWVQEKPGQAFRGLIGGTNKRAPGTPARFSGSLLGGKAALTLSGAQPEDEAEYYCALWYSNLWVFGGGTKLTVLSSASTKGPSVFPLAPSSKSTSGGTAALGCLVKDYFPEPVTVSWNSGALTSGVHTFPAVLQSSGLYSLSSVVTVPSSSLGTQTYICNVNHKPSNTKVDKKVEPKSCDKTHTCPPCPAPEAAGGPSVFLFPPKPKDTLMISRTPEVTCVVVDVSHEDPEVKFNWYVDGVEVHNAKTKPREEQYNSTYRVVSVLTVLHQDWLNGKEYKCKVSNKALGAPIEKTISKAKGQPREPQVYTLPPCRDELTKNQVSLWCLVKGFYPSDIAVEWESNGQPENNYKTTPPVLDSDGSFFLYSKLTVDKSRWQQGNVFSCSVMHEALHNHYTQKSLSLSP

SEQ ID NO: 6709 - protein, 124 aa, Artificial Sequence
  source: /note="Description of Artificial Sequence: Synthetic polypeptide"
EVQLVESGGGLVQPGGSLRLSCAVSGYSITSDYAWNWVRQAPGKGLEWVGYISNSGSTSYNPSLKSRFTISRDNSKNTLYLQMNSLRAEDTAVYYCARERNYDYDDYYYAMDYWGQGTLVTVSS

SEQ ID NO: 6710 - protein, 452 aa, Artificial Sequence
  source: /note="Description of Artificial Sequence: Synthetic polypeptide"
EVQLVESGGGLVQPGGSLRLSCAVSGYSITSDYAWNWVRQAPGKGLEWVGYISNSGSTSYNPSLKSRFTISRDNSKNTLYLQMNSLRAEDTAVYYCARERNYDYDDYYYAMDYWGQGTLVTVSSASTKGPSVFPLAPSSKSTSGGTAALGCLVEDYFPEPVTVSWNSGALTSGVHTFPAVLQSSGLYSLSSVVTVPSSSLGTQTYICNVNHKPSNTKVDEKVEPKSCDKTHTCPPCPAPEAAGGPSVFLFPPKPKDTLMISRTPEVTCVVVDVSHEDPEVKFNWYVDGVEVHNAKTKPREEQYNSTYRVVSVLTVLHQDWLNGKEYKCKVSNKALGAPIEKTISKAKGQPREPQVCTLPPSRDELTKNQVSLSCAVKGFYPSDIAVEWESNGQPENNYKTTPPVLDSDGSFFLVSKLTVDKSRWQQGNVFSCSVMHEALHNHYTQKSLSLSP

SEQ ID NO: 6711 - protein, 677 aa, Artificial Sequence
  source: /note="Description of Artificial Sequence: Synthetic polypeptide"
EVQLVESGGGLVQPGGSLRLSCAVSGYSITSDYAWNWVRQAPGKGLEWVGYISNSGSTSYNPSLKSRFTISRDNSKNTLYLQMNSLRAEDTAVYYCARERNYDYDDYYYAMDYWGQGTLVTVSSASTKGPSVFPLAPSSKSTSGGTAALGCLVEDYFPEPVTVSWNSGALTSGVHTFPAVLQSSGLYSLSSVVTVPSSSLGTQTYICNVNHKPSNTKVDEKVEPKSCDGGGGSGGGGSQAVVTQEPSLTVSPGGTVTLTCGSSTGAVTTSNYANWVQEKPGQAFRGLIGGTNKRAPGTPARFSGSLLGGKAALTLSGAQPEDEAEYYCALWYSNLWVFGGGTKLTVLSSASTKGPSVFPLAPSSKSTSGGTAALGCLVKDYFPEPVTVSWNSGALTSGVHTFPAVLQSSGLYSLSSVVTVPSSSLGTQTYICNVNHKPSNTKVDKKVEPKSCDKTHTCPPCPAPEAAGGPSVFLFPPKPKDTLMISRTPEVTCVVVDVSHEDPEVKFNWYVDGVEVHNAKTKPREEQYNSTYRVVSVLTVLHQDWLNGKEYKCKVSNKALGAPIEKTISKAKGQPREPQVYTLPPCRDELTKNQVSLWCLVKGFYPSDIAVEWESNGQPENNYKTTPPVLDSDGSFFLYSKLTVDKSRWQQGNVFSCSVMHEALHNHYTQKSLSLSP

SEQ ID NO: 6712 - protein, 124 aa, Artificial Sequence
  source: /note="Description of Artificial Sequence: Synthetic polypeptide"
EVQLVESGGGLVQPGGSLRLSCAVSGYSITSDYAWNWVRQAPGKGLEWVGYISNSGSTSYNPSLKSRFTISRDTSKNTLYLQMNSLRAEDTAVYYCARERNYDYDDYYYAMDYWGQGTLVTVSS

SEQ ID NO: 6713 - protein, 452 aa, Artificial Sequence
  source: /note="Description of Artificial Sequence: Synthetic polypeptide"
EVQLVESGGGLVQPGGSLRLSCAVSGYSITSDYAWNWVRQAPGKGLEWVGYISNSGSTSYNPSLKSRFTISRDTSKNTLYLQMNSLRAEDTAVYYCARERNYDYDDYYYAMDYWGQGTLVTVSSASTKGPSVFPLAPSSKSTSGGTAALGCLVEDYFPEPVTVSWNSGALTSGVHTFPAVLQSSGLYSLSSVVTVPSSSLGTQTYICNVNHKPSNTKVDEKVEPKSCDKTHTCPPCPAPEAAGGPSVFLFPPKPKDTLMISRTPEVTCVVVDVSHEDPEVKFNWYVDGVEVHNAKTKPREEQYNSTYRVVSVLTVLHQDWLNGKEYKCKVSNKALGAPIEKTISKAKGQPREPQVCTLPPSRDELTKNQVSLSCAVKGFYPSDIAVEWESNGQPENNYKTTPPVLDSDGSFFLVSKLTVDKSRWQQGNVFSCSVMHEALHNHYTQKSLSLSP

SEQ ID NO: 6714 - protein, 677 aa, Artificial Sequence
  source: /note="Description of Artificial Sequence: Synthetic polypeptide"
EVQLVESGGGLVQPGGSLRLSCAVSGYSITSDYAWNWVRQAPGKGLEWVGYISNSGSTSYNPSLKSRFTISRDTSKNTLYLQMNSLRAEDTAVYYCARERNYDYDDYYYAMDYWGQGTLVTVSSASTKGPSVFPLAPSSKSTSGGTAALGCLVEDYFPEPVTVSWNSGALTSGVHTFPAVLQSSGLYSLSSVVTVPSSSLGTQTYICNVNHKPSNTKVDEKVEPKSCDGGGGSGGGGSQAVVTQEPSLTVSPGGTVTLTCGSSTGAVTTSNYANWVQEKPGQAFRGLIGGTNKRAPGTPARFSGSLLGGKAALTLSGAQPEDEAEYYCALWYSNLWVFGGGTKLTVLSSASTKGPSVFPLAPSSKSTSGGTAALGCLVKDYFPEPVTVSWNSGALTSGVHTFPAVLQSSGLYSLSSVVTVPSSSLGTQTYICNVNHKPSNTKVDKKVEPKSCDKTHTCPPCPAPEAAGGPSVFLFPPKPKDTLMISRTPEVTCVVVDVSHEDPEVKFNWYVDGVEVHNAKTKPREEQYNSTYRVVSVLTVLHQDWLNGKEYKCKVSNKALGAPIEKTISKAKGQPREPQVYTLPPCRDELTKNQVSLWCLVKGFYPSDIAVEWESNGQPENNYKTTPPVLDSDGSFFLYSKLTVDKSRWQQGNVFSCSVMHEALHNHYTQKSLSLSP

SEQ ID NO: 6715 - protein, 452 aa, Artificial Sequence
  source: /note="Description of Artificial Sequence: Synthetic polypeptide"
EVQLVESGGGLVQPGGSLRLSCAVSGYSITSDYAWNWVRQAPGKGLEWVGYISNSGSTSYNPSLKSRFTISRDTSKNTLYLQMNSLRAEDTAVYYCARERNYDYDDYYYAMDYWGQGTLVTVSSASTKGPSVFPLAPSSKSTSGGTAALGCLVKDYFPEPVTVSWNSGALTSGVHTFPAVLQSSGLYSLSSVVTVPSSSLGTQTYICNVNHKPSNTKVDKKVEPKSCDKTHTCPPCPAPEAAGGPSVFLFPPKPKDTLMISRTPEVTCVVVDVSHEDPEVKFNWYVDGVEVHNAKTKPREEQYNSTYRVVSVLTVLHQDWLNGKEYKCKVSNKALGAPIEKTISKAKGQPREPQVCTLPPSRDELTKNQVSLSCAVKGFYPSDIAVEWESNGQPENNYKTTPPVLDSDGSFFLVSKLTVDKSRWQQGNVFSCSVMHEALHNHYTQKSLSLSP

SEQ ID NO: 6716 - protein, 677 aa, Artificial Sequence
  source: /note="Description of Artificial Sequence: Synthetic polypeptide"
EVQLVESGGGLVQPGGSLRLSCAVSGYSITSDYAWNWVRQAPGKGLEWVGYISNSGSTSYNPSLKSRFTISRDTSKNTLYLQMNSLRAEDTAVYYCARERNYDYDDYYYAMDYWGQGTLVTVSSASTKGPSVFPLAPSSKSTSGGTAALGCLVKDYFPEPVTVSWNSGALTSGVHTFPAVLQSSGLYSLSSVVTVPSSSLGTQTYICNVNHKPSNTKVDKKVEPKSCDGGGGSGGGGSQAVVTQEPSLTVSPGGTVTLTCGSSTGAVTTSNYANWVQEKPGQAFRGLIGGTNKRAPGTPARFSGSLLGGKAALTLSGAQPEDEAEYYCALWYSNLWVFGGGTKLTVLSSASTKGPSVFPLAPSSKSTSGGTAALGCLVKDYFPEPVTVSWNSGALTSGVHTFPAVLQSSGLYSLSSVVTVPSSSLGTQTYICNVNHKPSNTKVDKKVEPKSCDKTHTCPPCPAPEAAGGPSVFLFPPKPKDTLMISRTPEVTCVVVDVSHEDPEVKFNWYVDGVEVHNAKTKPREEQYNSTYRVVSVLTVLHQDWLNGKEYKCKVSNKALGAPIEKTISKAKGQPREPQVYTLPPCRDELTKNQVSLWCLVKGFYPSDIAVEWESNGQPENNYKTTPPVLDSDGSFFLYSKLTVDKSRWQQGNVFSCSVMHEALHNHYTQKSLSLSP

SEQ ID NO: 6717 - protein, 695 aa, Artificial Sequence
  source: /note="Description of Artificial Sequence: Synthetic polypeptide"
EVQLVESGGGLVQPGGSLRLSCAVSGYSITSDYAWNWVRQAPGKGLEWVGYISNSGSTSYNPSLKSRFTISRDTSKNTLYLQMNSLRAEDTAVYYCARERNYDYDDYYYAMDYWGQGTLVTVSSASTKGPSVFPLAPSSKSTSGGTAALGCLVEDYFPEPVTVSWNSGALTSGVHTFPAVLQSSGLYSLSSVVTVPSSSLGTQTYICNVNHKPSNTKVDEKVEPKSCDGGGGSGGGGSEVQLLESGGGLVQPGGSLRLSCAASGFTFSTYAMNWVRQAPGKGLEWVSRIRSKYNNYATYYADSVKGRFTISRDDSKNTLYLQMNSLRAEDTAVYYCVRHGNFGNSYVSWFAYWGQGTLVTVSSASVAAPSVFIFPPSDEQLKSGTASVVCLLNNFYPREAKVQWKVDNALQSGNSQESVTEQDSKDSTYSLSSTLTLSKADYEKHKVYACEVTHQGLSSPVTKSFNRGECDKTHTCPPCPAPEAAGGPSVFLFPPKPKDTLMISRTPEVTCVVVDVSHEDPEVKFNWYVDGVEVHNAKTKPREEQYNSTYRVVSVLTVLHQDWLNGKEYKCKVSNKALGAPIEKTISKAKGQPREPQVYTLPPCRDELTKNQVSLWCLVKGFYPSDIAVEWESNGQPENNYKTTPPVLDSDGSFFLYSKLTVDKSRWQQGNVFSCSVMHEALHNHYTQKSLSLSP

SEQ ID NO: 6718 - protein, 121 aa, Artificial Sequence
  source: /note="Description of Artificial Sequence: Synthetic polypeptide"
QVQLVQSGAEVKKPGSSVKVSCKASGFNIKDTYMHWVRQAPGQGLEWMGRIDPANGNSKYVPKFQGRVTITADTSTSTAYMELSSLRSEDTAVYYCAPFGYYVSDYAMAYWGQGTLVTVSS

SEQ ID NO: 6719 - protein, 121 aa, Artificial Sequence
  source: /note="Description of Artificial Sequence: Synthetic polypeptide"
QVQLVQSGAEVKKPGASVKVSCKASGYTFTEFGMNWVRQAPGQGLEWMGWINTKTGEATYVEEFKGRVTFTTDTSTSTAYMELRSLRSDDTAVYYCARWDFAYYVEAMDYWGQGTTVTVSS

SEQ ID NO: 6720 - protein, 449 aa, Artificial Sequence
  source: /note="Description of Artificial Sequence: Synthetic polypeptide"
EVQLQQSGAELVEPGASVKLSCTASGFNIKDTYMHWVKQRPEQGLEWIGRIDPANGNSKYVPKFQGKATITADTSSNTAYLQLTSLTSEDTAVYYCAPFGYYVSDYAMAYWGQGTSVTVSSASTKGPSVFPLAPSSKSTSGGTAALGCLVEDYFPEPVTVSWNSGALTSGVHTFPAVLQSSGLYSLSSVVTVPSSSLGTQTYICNVNHKPSNTKVDEKVEPKSCDKTHTCPPCPAPEAAGGPSVFLFPPKPKDTLMISRTPEVTCVVVDVSHEDPEVKFNWYVDGVEVHNAKTKPREEQYNSTYRVVSVLTVLHQDWLNGKEYKCKVSNKALGAPIEKTISKAKGQPREPQVCTLPPSRDELTKNQVSLSCAVKGFYPSDIAVEWESNGQPENNYKTTPPVLDSDGSFFLVSKLTVDKSRWQQGNVFSCSVMHEALHNHYTQKSLSLSP

SEQ ID NO: 6721 - protein, 674 aa, Artificial Sequence
  source: /note="Description of Artificial Sequence: Synthetic polypeptide"
EVQLQQSGAELVEPGASVKLSCTASGFNIKDTYMHWVKQRPEQGLEWIGRIDPANGNSKYVPKFQGKATITADTSSNTAYLQLTSLTSEDTAVYYCAPFGYYVSDYAMAYWGQGTSVTVSSASTKGPSVFPLAPSSKSTSGGTAALGCLVEDYFPEPVTVSWNSGALTSGVHTFPAVLQSSGLYSLSSVVTVPSSSLGTQTYICNVNHKPSNTKVDEKVEPKSCDGGGGSGGGGSQAVVTQEPSLTVSPGGTVTLTCGSSTGAVTTSNYANWVQEKPGQAFRGLIGGTNKRAPGTPARFSGSLLGGKAALTLSGAQPEDEAEYYCALWYSNLWVFGGGTKLTVLSSASTKGPSVFPLAPSSKSTSGGTAALGCLVKDYFPEPVTVSWNSGALTSGVHTFPAVLQSSGLYSLSSVVTVPSSSLGTQTYICNVNHKPSNTKVDKKVEPKSCDKTHTCPPCPAPEAAGGPSVFLFPPKPKDTLMISRTPEVTCVVVDVSHEDPEVKFNWYVDGVEVHNAKTKPREEQYNSTYRVVSVLTVLHQDWLNGKEYKCKVSNKALGAPIEKTISKAKGQPREPQVYTLPPCRDELTKNQVSLWCLVKGFYPSDIAVEWESNGQPENNYKTTPPVLDSDGSFFLYSKLTVDKSRWQQGNVFSCSVMHEALHNHYTQKSLSLSP

SEQ ID NO: 6722 - protein, 449 aa, Artificial Sequence
  source: /note="Description of Artificial Sequence: Synthetic polypeptide"
QVQLVQSGAEVKKPGSSVKVSCKASGFNIKDTYMHWVRQAPGQGLEWMGRIDPANGNSKYVPKFQGRVTITADTSTSTAYMELSSLRSEDTAVYYCAPFGYYVSDYAMAYWGQGTLVTVSSASTKGPSVFPLAPSSKSTSGGTAALGCLVEDYFPEPVTVSWNSGALTSGVHTFPAVLQSSGLYSLSSVVTVPSSSLGTQTYICNVNHKPSNTKVDEKVEPKSCDKTHTCPPCPAPEAAGGPSVFLFPPKPKDTLMISRTPEVTCVVVDVSHEDPEVKFNWYVDGVEVHNAKTKPREEQYNSTYRVVSVLTVLHQDWLNGKEYKCKVSNKALGAPIEKTISKAKGQPREPQVCTLPPSRDELTKNQVSLSCAVKGFYPSDIAVEWESNGQPENNYKTTPPVLDSDGSFFLVSKLTVDKSRWQQGNVFSCSVMHEALHNHYTQKSLSLSP

SEQ ID NO: 6723 - protein, 674 aa, Artificial Sequence
  source: /note="Description of Artificial Sequence: Synthetic polypeptide"
QVQLVQSGAEVKKPGSSVKVSCKASGFNIKDTYMHWVRQAPGQGLEWMGRIDPANGNSKYVPKFQGRVTITADTSTSTAYMELSSLRSEDTAVYYCAPFGYYVSDYAMAYWGQGTLVTVSSASTKGPSVFPLAPSSKSTSGGTAALGCLVEDYFPEPVTVSWNSGALTSGVHTFPAVLQSSGLYSLSSVVTVPSSSLGTQTYICNVNHKPSNTKVDEKVEPKSCDGGGGSGGGGSQAVVTQEPSLTVSPGGTVTLTCGSSTGAVTTSNYANWVQEKPGQAFRGLIGGTNKRAPGTPARFSGSLLGGKAALTLSGAQPEDEAEYYCALWYSNLWVFGGGTKLTVLSSASTKGPSVFPLAPSSKSTSGGTAALGCLVKDYFPEPVTVSWNSGALTSGVHTFPAVLQSSGLYSLSSVVTVPSSSLGTQTYICNVNHKPSNTKVDKKVEPKSCDKTHTCPPCPAPEAAGGPSVFLFPPKPKDTLMISRTPEVTCVVVDVSHEDPEVKFNWYVDGVEVHNAKTKPREEQYNSTYRVVSVLTVLHQDWLNGKEYKCKVSNKALGAPIEKTISKAKGQPREPQVYTLPPCRDELTKNQVSLWCLVKGFYPSDIAVEWESNGQPENNYKTTPPVLDSDGSFFLYSKLTVDKSRWQQGNVFSCSVMHEALHNHYTQKSLSLSP

SEQ ID NO: 6724 - protein, 684 aa, Artificial Sequence
  source: /note="Description of Artificial Sequence: Synthetic polypeptide"
QVQLVQSGAEVKKPGSSVKVSCKASGFNIKDTYMHWVRQAPGQGLEWMGRIDPANGNSKYVPKFQGRVTITADTSTSTAYMELSSLRSEDTAVYYCAPFGYYVSDYAMAYWGQGTLVTVSSASTKGPSVFPLAPSSKSTSGGTAALGCLVEDYFPEPVTVSWNSGALTSGVHTFPAVLQSSGLYSLSSVVTVPSSSLGTQTYICNVNHKPSNTKVDEKVEPKSCDGGGGSGGGGSGGGGSGGGGSQAVVTQEPSLTVSPGGTVTLTCGSSTGAVTTSNYANWVQEKPGQAFRGLIGGTNKRAPGTPARFSGSLLGGKAALTLSGAQPEDEAEYYCALWYSNLWVFGGGTKLTVLSSASTKGPSVFPLAPSSKSTSGGTAALGCLVKDYFPEPVTVSWNSGALTSGVHTFPAVLQSSGLYSLSSVVTVPSSSLGTQTYICNVNHKPSNTKVDKKVEPKSCDKTHTCPPCPAPEAAGGPSVFLFPPKPKDTLMISRTPEVTCVVVDVSHEDPEVKFNWYVDGVEVHNAKTKPREEQYNSTYRVVSVLTVLHQDWLNGKEYKCKVSNKALGAPIEKTISKAKGQPREPQVYTLPPCRDELTKNQVSLWCLVKGFYPSDIAVEWESNGQPENNYKTTPPVLDSDGSFFLYSKLTVDKSRWQQGNVFSCSVMHEALHNHYTQKSLSLSP

SEQ ID NO: 6725 - protein, 694 aa, Artificial Sequence
  source: /note="Description of Artificial Sequence: Synthetic polypeptide"
QVQLVQSGAEVKKPGASVKVSCKASGYTFTEFGMNWVRQAPGQGLEWMGWINTKTGEATYVEEFKGRVTFTTDTSTSTAYMELRSLRSDDTAVYYCARWDFAYYVEAMDYWGQGTTVTVSSASTKGPSVFPLAPSSKSTSGGTAALGCLVKDYFPEPVTVSWNSGALTSGVHTFPAVLQSSGLYSLSSVVTVPSSSLGTQTYICNVNHKPSNTKVDKKVEPKSCDGGGGSGGGGSEVQLLESGGGLVQPGGSLRLSCAASGFTFSTYAMNWVRQAPGKGLEWVSRIRSKYNNYATYYADSVKGRFTISRDDSKNTLYLQMNSLRAEDTAVYYCVRHGNFGNSYVSWFAYWGQGTLVTVSSASVAAPSVFIFPPSDEQLKSGTASVVCLLNNFYPREAKVQWKVDNALQSGNSQESVTEQDSKDSTYSLSSTLTLSKADYEKHKVYACEVTHQGLSSPVTKSFNRGECDKTHTCPPCPAPEAAGGPSVFLFPPKPKDTLMISRTPEVTCVVVDVSHEDPEVKFNWYVDGVEVHNAKTKPREEQYNSTYRVVSVLTVLHQDWLNGKEYKCKVSNKALGAPIEKTISKAKGQPREPQVYTLPPCRDELTKNQVSLWCLVKGFYPSDIAVEWESNGQPENNYKTTPPVLDSDGSFFLYSKLTVDKSRWQQGNVFSCSVMHEALHNHYTQKSLSLSPGK

SEQ ID NO: 6726 - protein, 451 aa, Artificial Sequence
  source: /note="Description of Artificial Sequence: Synthetic polypeptide"
QVQLVQSGAEVKKPGASVKVSCKASGYTFTEFGMNWVRQAPGQGLEWMGWINTKTGEATYVEEFKGRVTFTTDTSTSTAYMELRSLRSDDTAVYYCARWDFAYYVEAMDYWGQGTTVTVSSASTKGPSVFPLAPSSKSTSGGTAALGCLVKDYFPEPVTVSWNSGALTSGVHTFPAVLQSSGLYSLSSVVTVPSSSLGTQTYICNVNHKPSNTKVDKKVEPKSCDKTHTCPPCPAPEAAGGPSVFLFPPKPKDTLMISRTPEVTCVVVDVSHEDPEVKFNWYVDGVEVHNAKTKPREEQYNSTYRVVSVLTVLHQDWLNGKEYKCKVSNKALGAPIEKTISKAKGQPREPQVCTLPPSRDELTKNQVSLSCAVKGFYPSDIAVEWESNGQPENNYKTTPPVLDSDGSFFLVSKLTVDKSRWQQGNVFSCSVMHEALHNHYTQKSLSLSPGK

SEQ ID NO: 6727 - protein, 674 aa, Artificial Sequence
  source: /note="Description of Artificial Sequence: Synthetic polypeptide"
QVQLVQSGAEVKKPGSSVKVSCKASGFNIKDTYMHWVRQAPGQGLEWMGRIDPANGNSKYVPKFQGRVTITADTSTSTAYMELSSLRSEDTAVYYCAPFGYYVSDYAMAYWGQGTLVTVSSASTKGPSVFPLAPSSKSTSGGTAALGCLVKDYFPEPVTVSWNSGALTSGVHTFPAVLQSSGLYSLSSVVTVPSSSLGTQTYICNVNHKPSNTKVDKKVEPKSCDGGGGSGGGGSQAVVTQEPSLTVSPGGTVTLTCGSSTGAVTTSNYANWVQEKPGQAFRGLIGGTNKRAPGTPARFSGSLLGGKAALTLSGAQPEDEAEYYCALWYSNLWVFGGGTKLTVLSSASTKGPSVFPLAPSSKSTSGGTAALGCLVKDYFPEPVTVSWNSGALTSGVHTFPAVLQSSGLYSLSSVVTVPSSSLGTQTYICNVNHKPSNTKVDKKVEPKSCDKTHTCPPCPAPEAAGGPSVFLFPPKPKDTLMISRTPEVTCVVVDVSHEDPEVKFNWYVDGVEVHNAKTKPREEQYNSTYRVVSVLTVLHQDWLNGKEYKCKVSNKALGAPIEKTISKAKGQPREPQVYTLPPCRDELTKNQVSLWCLVKGFYPSDIAVEWESNGQPENNYKTTPPVLDSDGSFFLYSKLTVDKSRWQQGNVFSCSVMHEALHNHYTQKSLSLSP

SEQ ID NO: 6728 - protein, 449 aa, Artificial Sequence
  source: /note="Description of Artificial Sequence: Synthetic polypeptide"
QVQLVQSGAEVKKPGSSVKVSCKASGFNIKDTYMHWVRQAPGQGLEWMGRIDPANGNSKYVPKFQGRVTITADTSTSTAYMELSSLRSEDTAVYYCAPFGYYVSDYAMAYWGQGTLVTVSSASTKGPSVFPLAPSSKSTSGGTAALGCLVKDYFPEPVTVSWNSGALTSGVHTFPAVLQSSGLYSLSSVVTVPSSSLGTQTYICNVNHKPSNTKVDKKVEPKSCDKTHTCPPCPAPEAAGGPSVFLFPPKPKDTLMISRTPEVTCVVVDVSHEDPEVKFNWYVDGVEVHNAKTKPREEQYNSTYRVVSVLTVLHQDWLNGKEYKCKVSNKALGAPIEKTISKAKGQPREPQVCTLPPSRDELTKNQVSLSCAVKGFYPSDIAVEWESNGQPENNYKTTPPVLDSDGSFFLVSKLTVDKSRWQQGNVFSCSVMHEALHNHYTQKSLSLSP

SEQ ID NO: 6729 - protein, 119 aa, Artificial Sequence
  source: /note="Description of Artificial Sequence: Synthetic polypeptide"
QVQLVQSGAEVKKPGASVKVSCKASGYSFTGYTMNWVRQAPGQGLEWMGLITPYNGASSYNQKFRGKATMTVDTSTSTVYMELSSLRSEDTAVYYCARGGYDGRGFDYWGQGTLVTVSS

SEQ ID NO: 6730 - protein, 447 aa, Artificial Sequence
  source: /note="Description of Artificial Sequence: Synthetic polypeptide"
QVQLVQSGAEVKKPGASVKVSCKASGYSFTGYTMNWVRQAPGQGLEWMGLITPYNGASSYNQKFRGKATMTVDTSTSTVYMELSSLRSEDTAVYYCARGGYDGRGFDYWGQGTLVTVSSASTKGPSVFPLAPSSKSTSGGTAALGCLVEDYFPEPVTVSWNSGALTSGVHTFPAVLQSSGLYSLSSVVTVPSSSLGTQTYICNVNHKPSNTKVDEKVEPKSCDKTHTCPPCPAPEAAGGPSVFLFPPKPKDTLMISRTPEVTCVVVDVSHEDPEVKFNWYVDGVEVHNAKTKPREEQYNSTYRVVSVLTVLHQDWLNGKEYKCKVSNKALGAPIEKTISKAKGQPREPQVCTLPPSRDELTKNQVSLSCAVKGFYPSDIAVEWESNGQPENNYKTTPPVLDSDGSFFLVSKLTVDKSRWQQGNVFSCSVMHEALHNHYTQKSLSLSP

SEQ ID NO: 6731 - protein, 672 aa, Artificial Sequence
  source: /note="Description of Artificial Sequence: Synthetic polypeptide"
QVQLVQSGAEVKKPGASVKVSCKASGYSFTGYTMNWVRQAPGQGLEWMGLITPYNGASSYNQKFRGKATMTVDTSTSTVYMELSSLRSEDTAVYYCARGGYDGRGFDYWGQGTLVTVSSASTKGPSVFPLAPSSKSTSGGTAALGCLVEDYFPEPVTVSWNSGALTSGVHTFPAVLQSSGLYSLSSVVTVPSSSLGTQTYICNVNHKPSNTKVDEKVEPKSCDGGGGSGGGGSQAVVTQEPSLTVSPGGTVTLTCGSSTGAVTTSNYANWVQEKPGQAFRGLIGGTNKRAPGTPARFSGSLLGGKAALTLSGAQPEDEAEYYCALWYSNLWVFGGGTKLTVLSSASTKGPSVFPLAPSSKSTSGGTAALGCLVKDYFPEPVTVSWNSGALTSGVHTFPAVLQSSGLYSLSSVVTVPSSSLGTQTYICNVNHKPSNTKVDKKVEPKSCDKTHTCPPCPAPEAAGGPSVFLFPPKPKDTLMISRTPEVTCVVVDVSHEDPEVKFNWYVDGVEVHNAKTKPREEQYNSTYRVVSVLTVLHQDWLNGKEYKCKVSNKALGAPIEKTISKAKGQPREPQVYTLPPCRDELTKNQVSLWCLVKGFYPSDIAVEWESNGQPENNYKTTPPVLDSDGSFFLYSKLTVDKSRWQQGNVFSCSVMHEALHNHYTQKSLSLSP

SEQ ID NO: 6732 - protein, 117 aa, Artificial Sequence
  source: /note="Description of Artificial Sequence: Synthetic polypeptide"
EVQLVESGGGLVQPGGSLRLSCAASGFTFSDYFMSWVRQAPGKGLEWVATISNGGTYTYYPDSVKGRFTISRDNSKNTLYLQMNSLRAEDTAVYYCARFDGYIFDYWGQGTLVTVSS

SEQ ID NO: 6733 - protein, 115 aa, Artificial Sequence
  source: /note="Description of Artificial Sequence: Synthetic polypeptide"
EVQLVESGGGLVQPGGSLRLSCAASGYTFTTYWMHWVRQAPGKGLEWVGYIRPSTGYTEYNQKFKDRFTISADTSKNTAYLQMNSLRAEDTAVYYCARSRWLLDYWGQGTLVTVS

SEQ ID NO: 6734 - protein, 445 aa, Artificial Sequence
  source: /note="Description of Artificial Sequence: Synthetic polypeptide"
EVQLVESGGGLVQPGGSLRLSCAASGFTFSDYFMSWVRQAPGKGLEWVATISNGGTYTYYPDSVKGRFTISRDNSKNTLYLQMNSLRAEDTAVYYCARFDGYIFDYWGQGTLVTVSSASTKGPSVFPLAPSSKSTSGGTAALGCLVEDYFPEPVTVSWNSGALTSGVHTFPAVLQSSGLYSLSSVVTVPSSSLGTQTYICNVNHKPSNTKVDEKVEPKSCDKTHTCPPCPAPEAAGGPSVFLFPPKPKDTLMISRTPEVTCVVVDVSHEDPEVKFNWYVDGVEVHNAKTKPREEQYNSTYRVVSVLTVLHQDWLNGKEYKCKVSNKALGAPIEKTISKAKGQPREPQVCTLPPSRDELTKNQVSLSCAVKGFYPSDIAVEWESNGQPENNYKTTPPVLDSDGSFFLVSKLTVDKSRWQQGNVFSCSVMHEALHNHYTQKSLSLSP

SEQ ID NO: 6735 - protein, 670 aa, Artificial Sequence
  source: /note="Description of Artificial Sequence: Synthetic polypeptide"
EVQLVESGGGLVQPGGSLRLSCAASGFTFSDYFMSWVRQAPGKGLEWVATISNGGTYTYYPDSVKGRFTISRDNSKNTLYLQMNSLRAEDTAVYYCARFDGYIFDYWGQGTLVTVSSASTKGPSVFPLAPSSKSTSGGTAALGCLVEDYFPEPVTVSWNSGALTSGVHTFPAVLQSSGLYSLSSVVTVPSSSLGTQTYICNVNHKPSNTKVDEKVEPKSCDGGGGSGGGGSQAVVTQEPSLTVSPGGTVTLTCGSSTGAVTTSNYANWVQEKPGQAFRGLIGGTNKRAPGTPARFSGSLLGGKAALTLSGAQPEDEAEYYCALWYSNLWVFGGGTKLTVLSSASTKGPSVFPLAPSSKSTSGGTAALGCLVKDYFPEPVTVSWNSGALTSGVHTFPAVLQSSGLYSLSSVVTVPSSSLGTQTYICNVNHKPSNTKVDKKVEPKSCDKTHTCPPCPAPEAAGGPSVFLFPPKPKDTLMISRTPEVTCVVVDVSHEDPEVKFNWYVDGVEVHNAKTKPREEQYNSTYRVVSVLTVLHQDWLNGKEYKCKVSNKALGAPIEKTISKAKGQPREPQVYTLPPCRDELTKNQVSLWCLVKGFYPSDIAVEWESNGQPENNYKTTPPVLDSDGSFFLYSKLTVDKSRWQQGNVFSCSVMHEALHNHYTQKSLSLSP

SEQ ID NO: 6736 - protein, 447 aa, Artificial Sequence
  source: /note="Description of Artificial Sequence: Synthetic polypeptide"
QVQLVQSGAEVKKPGASVKVSCKASGYSFTGYTMNWVRQAPGQGLEWMGLITPYNGASSYNQKFRGKATMTVDTSTSTVYMELSSLRSEDTAVYYCARGGYDGRGFDYWGQGTLVTVSSASTKGPSVFPLAPSSKSTSGGTAALGCLVKDYFPEPVTVSWNSGALTSGVHTFPAVLQSSGLYSLSSVVTVPSSSLGTQTYICNVNHKPSNTKVDKKVEPKSCDKTHTCPPCPAPEAAGGPSVFLFPPKPKDTLMISRTPEVTCVVVDVSHEDPEVKFNWYVDGVEVHNAKTKPREEQYNSTYRVVSVLTVLHQDWLNGKEYKCKVSNKALGAPIEKTISKAKGQPREPQVCTLPPSRDELTKNQVSLSCAVKGFYPSDIAVEWESNGQPENNYKTTPPVLDSDGSFFLVSKLTVDKSRWQQGNVFSCSVMHEALHNHYTQKSLSLSP

SEQ ID NO: 6737 - protein, 672 aa, Artificial Sequence
  source: /note="Description of Artificial Sequence: Synthetic polypeptide"
QVQLVQSGAEVKKPGASVKVSCKASGYSFTGYTMNWVRQAPGQGLEWMGLITPYNGASSYNQKFRGKATMTVDTSTSTVYMELSSLRSEDTAVYYCARGGYDGRGFDYWGQGTLVTVSSASTKGPSVFPLAPSSKSTSGGTAALGCLVKDYFPEPVTVSWNSGALTSGVHTFPAVLQSSGLYSLSSVVTVPSSSLGTQTYICNVNHKPSNTKVDKKVEPKSCDGGGGSGGGGSQAVVTQEPSLTVSPGGTVTLTCGSSTGAVTTSNYANWVQEKPGQAFRGLIGGTNKRAPGTPARFSGSLLGGKAALTLSGAQPEDEAEYYCALWYSNLWVFGGGTKLTVLSSASTKGPSVFPLAPSSKSTSGGTAALGCLVKDYFPEPVTVSWNSGALTSGVHTFPAVLQSSGLYSLSSVVTVPSSSLGTQTYICNVNHKPSNTKVDKKVEPKSCDKTHTCPPCPAPEAAGGPSVFLFPPKPKDTLMISRTPEVTCVVVDVSHEDPEVKFNWYVDGVEVHNAKTKPREEQYNSTYRVVSVLTVLHQDWLNGKEYKCKVSNKALGAPIEKTISKAKGQPREPQVYTLPPCRDELTKNQVSLWCLVKGFYPSDIAVEWESNGQPENNYKTTPPVLDSDGSFFLYSKLTVDKSRWQQGNVFSCSVMHEALHNHYTQKSLSLSP

SEQ ID NO: 6738 - protein, 445 aa, Artificial Sequence
  source: /note="Description of Artificial Sequence: Synthetic polypeptide"
EVQLVESGGGLVQPGGSLRLSCAASGFTFSDYFMSWVRQAPGKGLEWVATISNGGTYTYYPDSVKGRFTISRDNSKNTLYLQMNSLRAEDTAVYYCARFDGYIFDYWGQGTLVTVSSASTKGPSVFPLAPSSKSTSGGTAALGCLVKDYFPEPVTVSWNSGALTSGVHTFPAVLQSSGLYSLSSVVTVPSSSLGTQTYICNVNHKPSNTKVDKKVEPKSCDKTHTCPPCPAPEAAGGPSVFLFPPKPKDTLMISRTPEVTCVVVDVSHEDPEVKFNWYVDGVEVHNAKTKPREEQYNSTYRVVSVLTVLHQDWLNGKEYKCKVSNKALGAPIEKTISKAKGQPREPQVCTLPPSRDELTKNQVSLSCAVKGFYPSDIAVEWESNGQPENNYKTTPPVLDSDGSFFLVSKLTVDKSRWQQGNVFSCSVMHEALHNHYTQKSLSLSP

SEQ ID NO: 6739 - protein, 670 aa, Artificial Sequence
  source: /note="Description of Artificial Sequence: Synthetic polypeptide"
EVQLVESGGGLVQPGGSLRLSCAASGFTFSDYFMSWVRQAPGKGLEWVATISNGGTYTYYPDSVKGRFTISRDNSKNTLYLQMNSLRAEDTAVYYCARFDGYIFDYWGQGTLVTVSSASTKGPSVFPLAPSSKSTSGGTAALGCLVKDYFPEPVTVSWNSGALTSGVHTFPAVLQSSGLYSLSSVVTVPSSSLGTQTYICNVNHKPSNTKVDKKVEPKSCDGGGGSGGGGSQAVVTQEPSLTVSPGGTVTLTCGSSTGAVTTSNYANWVQEKPGQAFRGLIGGTNKRAPGTPARFSGSLLGGKAALTLSGAQPEDEAEYYCALWYSNLWVFGGGTKLTVLSSASTKGPSVFPLAPSSKSTSGGTAALGCLVKDYFPEPVTVSWNSGALTSGVHTFPAVLQSSGLYSLSSVVTVPSSSLGTQTYICNVNHKPSNTKVDKKVEPKSCDKTHTCPPCPAPEAAGGPSVFLFPPKPKDTLMISRTPEVTCVVVDVSHEDPEVKFNWYVDGVEVHNAKTKPREEQYNSTYRVVSVLTVLHQDWLNGKEYKCKVSNKALGAPIEKTISKAKGQPREPQVYTLPPCRDELTKNQVSLWCLVKGFYPSDIAVEWESNGQPENNYKTTPPVLDSDGSFFLYSKLTVDKSRWQQGNVFSCSVMHEALHNHYTQKSLSLSP

SEQ ID NO: 6740 - protein, 114 aa, Artificial Sequence
  source: /note="Description of Artificial Sequence: Synthetic polypeptide"
EVQLVESGGGLVKPGGSLRLSCAASGFTFSSYDMSWVRQAPGKGLEWVSTISSGGSYTYYLDSIKGRFTISRDNAKNSLYLQMNSLRAEDTAVYYCARQGLDYWGRGTLVTVSS

SEQ ID NO: 6741 - protein, 442 aa, Artificial Sequence
  source: /note="Description of Artificial Sequence: Synthetic polypeptide"
EVQLVESGGGLVKPGGSLRLSCAASGFTFSSYDMSWVRQAPGKGLEWVSTISSGGSYTYYLDSIKGRFTISRDNAKNSLYLQMNSLRAEDTAVYYCARQGLDYWGRGTLVTVSSASTKGPSVFPLAPSSKSTSGGTAALGCLVEDYFPEPVTVSWNSGALTSGVHTFPAVLQSSGLYSLSSVVTVPSSSLGTQTYICNVNHKPSNTKVDEKVEPKSCDKTHTCPPCPAPEAAGGPSVFLFPPKPKDTLMISRTPEVTCVVVDVSHEDPEVKFNWYVDGVEVHNAKTKPREEQYNSTYRVVSVLTVLHQDWLNGKEYKCKVSNKALGAPIEKTISKAKGQPREPQVCTLPPSRDELTKNQVSLSCAVKGFYPSDIAVEWESNGQPENNYKTTPPVLDSDGSFFLVSKLTVDKSRWQQGNVFSCSVMHEALHNHYTQKSLSLSP

SEQ ID NO: 6742 - protein, 667 aa, Artificial Sequence
  source: /note="Description of Artificial Sequence: Synthetic polypeptide"
EVQLVESGGGLVKPGGSLRLSCAASGFTFSSYDMSWVRQAPGKGLEWVSTISSGGSYTYYLDSIKGRFTISRDNAKNSLYLQMNSLRAEDTAVYYCARQGLDYWGRGTLVTVSSASTKGPSVFPLAPSSKSTSGGTAALGCLVEDYFPEPVTVSWNSGALTSGVHTFPAVLQSSGLYSLSSVVTVPSSSLGTQTYICNVNHKPSNTKVDEKVEPKSCDGGGGSGGGGSQAVVTQEPSLTVSPGGTVTLTCGSSTGAVTTSNYANWVQEKPGQAFRGLIGGTNKRAPGTPARFSGSLLGGKAALTLSGAQPEDEAEYYCALWYSNLWVFGGGTKLTVLSSASTKGPSVFPLAPSSKSTSGGTAALGCLVKDYFPEPVTVSWNSGALTSGVHTFPAVLQSSGLYSLSSVVTVPSSSLGTQTYICNVNHKPSNTKVDKKVEPKSCDKTHTCPPCPAPEAAGGPSVFLFPPKPKDTLMISRTPEVTCVVVDVSHEDPEVKFNWYVDGVEVHNAKTKPREEQYNSTYRVVSVLTVLHQDWLNGKEYKCKVSNKALGAPIEKTISKAKGQPREPQVYTLPPCRDELTKNQVSLWCLVKGFYPSDIAVEWESNGQPENNYKTTPPVLDSDGSFFLYSKLTVDKSRWQQGNVFSCSVMHEALHNHYTQKSLSLSP

SEQ ID NO: 6743 - protein, 116 aa, Artificial Sequence
  source: /note="Description of Artificial Sequence: Synthetic polypeptide"
QVQLVQSGAEVKKPGSSVKVSCKASGGTFSSYAISWVRQAPGQGLEWMGGIIPIFGTANYAQKFQGRVTITADKSTSTAYMELSSLRSEDTAVYYCAREYGWMDYWGQGTTVTVSS

SEQ ID NO: 6744 - protein, 118 aa, Artificial Sequence
  source: /note="Description of Artificial Sequence: Synthetic polypeptide"
QVQLVQSGAEVKKPGSSVKVSCKASGGTFSSYAISWVRQAPGQGLEWMGGIIPIFGTANYAQKFQGRVTITADKSTSTAYMELSSLRSEDTAVYYCAREYYRGPYDYWGQGTTVTVSS

SEQ ID NO: 6745 - protein, 116 aa, Artificial Sequence
  source: /note="Description of Artificial Sequence: Synthetic polypeptide"
QVQLVQSGAEVKKPGSSVKVSCKASGGTFSSYAISWVRQAPGQGLEWMGGIIPIFGTANYAQKFQGRVTITADKSTSTAYMELSSLRSEDTAVYYCAREYGSMDYWGQGTTVTVSS

SEQ ID NO: 6746 - protein, 122 aa, Artificial Sequence
  source: /note="Description of Artificial Sequence: Synthetic polypeptide"
QVQLVQSGAEVKKPGSSVKVSCKASGGTFSSYAISWVRQAPGQGLEWMGGIIPIFGTANYAQKFQGRVTITADKSTSTAYMELSSLRSEDTAVYYCARVNYPYSYWGDFDYWGQGTTVTVSS

SEQ ID NO: 6747 - protein, 116 aa, Artificial Sequence
  source: /note="Description of Artificial Sequence: Synthetic polypeptide"
EVQLLESGGGLVQPGGSLRLSCAASGFTFSSYAMSWVRQAPGKGLEWVSAISGSGGSTYYADSVKGRFTISRDNSKNTLYLQMNSLRAEDTAVYYCALDVGAFDYWGQGALVTVSS

SEQ ID NO: 6748 - protein, 116 aa, Artificial Sequence
  source: /note="Description of Artificial Sequence: Synthetic polypeptide"
EVQLLESGGGLVQPGGSLRLSCAASGFTFSSYAMSWVRQAPGKGLEWVSAISGSGGSTYYADSVKGRFTISRDNSKNTLYLQMNSLRAEDTAVYYCAFDVGPFDYWGQGTLVTVSS

SEQ ID NO: 6749 - protein, 120 aa, Artificial Sequence
  source: /note="Description of Artificial Sequence: Synthetic polypeptide"
EVQLLESGGGLVQPGGSLRLSCAASGFTFSSYAMSWVRQAPGKGLEWVSAISGSGGSTYYADSVKGRFTISRDNSKNTLYLQMNSLRAEDTAVYYCARVFYRGGVSMDYWGQGTLVTVSS

SEQ ID NO: 6750 - protein, 119 aa, Homo sapiens
QVQLVQSGAEVKKPGSSVKVSCKASGGTFNSYAISWVRQAPGQGLEWMGGIIPGFGTANYAQKFQGRVTITADESTSTAYMELSSLRSEDTAVYYCARKNEEDGGFDHWGQGTLVTVSS

SEQ ID NO: 6751 - protein, 118 aa, Homo sapiens
QVQLVESGGGLVQPGGSLRLSCAASGFTFSDYYMHWVRQAPGKGLEWVSVISGSGSNTYYADSVKGRFTISRDNSKNTLYLQMNSLRAEDTAVYYCARLYAQFEGDFWGQGTLVTVSS

SEQ ID NO: 6752 - protein, 116 aa, Homo sapiens
QVQLVQSGAEVKKPGESLKISCKGSGYSFSTYWISWVRQMPGKGLEWMGKIYPGDSYTNYSPSFQGQVTISADKSISTAYLQWSSLKASDTAMYYCARGYGIFDYWGQGTLVTVSS

SEQ ID NO: 6753 - protein, 116 aa, Homo sapiens
EVQLVQSGAEVKKPGESLRISCKGSGYSFSTYWISWVRQMPGKGLEWMGKIYPGDSYTNYSPSFQGQVTISADKSISTAYLQWSSLKASDTAMYYCARGYGIFDYWGQGTLVTVSS

SEQ ID NO: 6754 - protein, 108 aa, Homo sapiens
SYELTQPPSVSVSPGQTASITCSGDNIGDQYAHWYQQKPGQSPVVVIYQDKNRPSGIPERFSGSNSGNTATLTISGTQAMDEADYYCATYTGFGSLAVFGGGTKLTVL

SEQ ID NO: 6755 - protein, 108 aa, Homo sapiens
SYELTQPPSVSVSPGQTASITCSGDNIGDQYAHWYQQKPGQSPVLVIYQDKNRPSGIPERFSGSNSGNTATLTISGTQAMDEADYYCSTYTFVGFTTVFGGGTKLTVL

SEQ ID NO: 6756 - protein, 120 aa, Artificial Sequence
  source: /note="Description of Artificial Sequence: Synthetic polypeptide"
QVQLVQSGAEVKKPGSSVKVSCKASGGTFSSYAISWVRQAPGQGLEWMGGIIPIFGTANYAQKFQGRVTITADKSTSTAYMELSSLRSEDTAVYYCARSEFRFYADFDYWGQGTTVTVSS

SEQ ID NO: 6757 - protein, 118 aa, Artificial Sequence
  source: /note="Description of Artificial Sequence: Synthetic polypeptide"
EVQLLESGGGLVQPGGSLRLSCAASGFTFSSYAMSWVRQAPGKGLEWVSAISGSGGSTYYADSVKGRFTISRDNSKNTLYLQMNSLRAEDTAVYYCARDDPWPPFDYWGQGTLVTVSS

SEQ ID NO: 6758 - protein, 119 aa, Artificial Sequence
  source: /note="Description of Artificial Sequence: Synthetic polypeptide"
QVQLVQSGAEVKKPGSSVKVSCKASGGTFSSYAISWVRQAPGQGLEWMGGIIPIFGTANYAQKFQGRVTITADKSTSTAYMELSSLRSEDTAVYYCARSTLIYGYFDYWGQGTTVTVSS

SEQ ID NO: 6759 - protein, 120 aa, Artificial Sequence
  source: /note="Description of Artificial Sequence: Synthetic polypeptide"
QVQLVQSGAEVKKPGSSVKVSCKASGGTFSSYAISWVRQAPGQGLEWMGGIIPIFGTANYAQKFQGRVTITADKSTSTAYMELSSLRSEDTAVYYCARSSGAYPGYFDYWGQGTTVTVSS

SEQ ID NO: 6760 - protein, 120 aa, Artificial Sequence
  source: /note="Description of Artificial Sequence: Synthetic polypeptide"
QVQLVQSGAEVKKPGSSVKVSCKASGGTFSSYAISWVRQAPGQGLEWMGGIIPIFGTANYAQKFQGRVTITADKSTSTAYMELSSLRSEDTAVYYCARSYYWESYPFDYWGQGTTVTVSS

SEQ ID NO: 6761 - protein, 116 aa, Artificial Sequence
  source: /note="Description of Artificial Sequence: Synthetic polypeptide"
EVQLLESGGGLVQPGGSLRLSCAASGFTFSSHAMSWVRQAPGKGLEWVSAIWASGEQYYADSVKGRFTISRDNSKNTLYLQMNSLRAEDTAVYYCAKGWLGNFDYWGQGTLVTVSS

SEQ ID NO: 6762 - protein, 117 aa, Artificial Sequence
  source: /note="Description of Artificial Sequence: Synthetic polypeptide"
EVQLLESGGGLVQPGGSLRLSCAASGFTFSSYAMSWVRQAPGKGLEWVSAIIGSGASTYYADSVKGRFTISRDNSKNTLYLQMNSLRAEDTAVYYCAKGWFGGFNYWGQGTLVTVSS

SEQ ID NO: 6763 - protein, 118 aa, Artificial Sequence
  source: /note="Description of Artificial Sequence: Synthetic polypeptide"
QITLKESGPTLVKPTQTLTLTCTFSGFSLSTSGMGVSWIRQPPGKGLEWLAHIYWDDDKRYNPTLKSRLTITKDPSKNQVVLTMTNMDPVDTATYYCARSSYGAMDYWGQGTLVTVSS

SEQ ID NO: 6764 - protein, 118 aa, Artificial Sequence
  source: /note="Description of Artificial Sequence: Synthetic polypeptide"
QVKLQQSGPGILQSSQTLSLTCSFSGFSLSTSGMGVSWIRQPSGKGLEWLAHIYWDDDKRYNPTLKSRLTISKDPSRNQVFLKITSVDTADTATYYCARSSYGAMDYWGQGTSVTVSS

SEQ ID NO: 6765 - protein, 118 aa, Artificial Sequence
  source: /note="Description of Artificial Sequence: Synthetic polypeptide"
QVQLQQPGAELVKPGASVKLSCKASGYTFTSYWIHWVNQRPGQGLEWIGDINPSNGRSKYNEKFKNKATMTADKSSNTAYMQLSSLTSEDSAVYYCAREVLDGAMDYWGQGTSVTVSS

SEQ ID NO: 6766 - protein, 119 aa, Artificial Sequence
  source: /note="Description of Artificial Sequence: Synthetic polypeptide"
QVTLKESGPGILQPSQTLSLTCSFSGFSLSTYGMGVTWIRQPSGKGLEWLAHIYWDDDKRYNPSLKSRLTISKDTSNNQVFLKITSVDTADTATYYCAQTGYSNLFAYWGQGTLVTVSA

SEQ ID NO: 6767 - protein, 119 aa, Artificial Sequence
  source: /note="Description of Artificial Sequence: Synthetic polypeptide"
QVTLKESGPGILQPSQTLSLTCSFSGFSLNTYGMGVSWIRQPSGKGLEWLAHIYWDDDKRYNPSLKSRLTISKDASNNRVFLKITSVDTADTATYYCAQRGYDDYWGYWGQGTLVTISA

SEQ ID NO: 6768 - protein, 120 aa, Artificial Sequence
  source: /note="Description of Artificial Sequence: Synthetic polypeptide"
EVLLQQSGPEVVKPGASVKIPCKASGYTFTDYNMDWVKQSHGKSLEWIGEINPNNGGTFYNQKFKGKATLTVDKSSSTAYMELRSLTSEDTAVYYCAREAITTVGAMDYWGQGTSVTVSS

SEQ ID NO: 6769 - protein, 119 aa, Artificial Sequence
  source: /note="Description of Artificial Sequence: Synthetic polypeptide"
QVTLKESGPGILQPSQTLSLTCSFSGFSLSTYGMGVGWIRQPSGKGLEWLADIWWDDDKYYNPSLKSRLTISKDTSSNEVFLKIAIVDTADTATYYCARRGHYSAMDYWGQGTSVTVSS

SEQ ID NO: 6770 - protein, 121 aa, Artificial Sequence
  source: /note="Description of Artificial Sequence: Synthetic polypeptide"
QVTLKESGPGILQPSQTLSLTCSFSGFSLSTSGMGVSWIRQPSGKGLEWLAHNDWDDDKRYKSSLKSRLTISKDTSRNQVFLKITSVDTADTATYYCARRVGGLEGYFDYWGQGTTLTVSS

SEQ ID NO: 6771 - protein, 121 aa, Artificial Sequence
  source: /note="Description of Artificial Sequence: Synthetic polypeptide"
EVQLVESGGGLVQPGGSLRLSCAASGFTFSSYAMSWVRQAPGRGLEWVSTINNSGGGTYYADSVKGRFTISRDNSKNTLYLHMNSLRAEDTAVYYCAKEGGKYYYYAMDVWGQGTTVTVSS

SEQ ID NO: 6772 - protein, 119 aa, Artificial Sequence
  source: /note="Description of Artificial Sequence: Synthetic polypeptide"
EVQLLESGGGLVQPGGSLRLSCAASGFTFSDYAMNWVRQAPGKGLEWVSGIKSGGSSKYYADSVKGRFTISRDNSKNTLYLQMNSLRAEDTAVYYCAKHVDFYRALDYWGQGTLVTVSS

SEQ ID NO: 6773 - protein, 122 aa, Artificial Sequence
  source: /note="Description of Artificial Sequence: Synthetic polypeptide"
QVQLVQSGAEVKKPGSSVKVSCKASGGTFSSYAISWVRQAPGQGLEWMGGIIPIFGTANYAQKFQGRVTITADESTSTAYMELSSLRSEDTAVYYCARVRYSAWYRDSLDYWGQGTLVTVSS

SEQ ID NO: 6774 - protein, 122 aa, Artificial Sequence
  source: /note="Description of Artificial Sequence: Synthetic polypeptide"
QVQLVQSGAEVKKPGSSVKVSCKASGGTFSSYAISWVRQAPGQGLEWMGGIIPIFGTANYAQKFQGRVTITADESTSTAYMELSSLRSEDTAVYYCARVGHPAWWRDSLDYWGQGTLVTVSS

SEQ ID NO: 6775 - protein, 122 aa, Artificial Sequence
  source: /note="Description of Artificial Sequence: Synthetic polypeptide"
QVQLVQSGAEVKKPGSSVKVSCKASGGTFSSYAISWVRQAPGQGLEWMGGIIPIFGTANYAQKFQGRVTITADESTSTAYMELSSLRSEDTAVYYCARVANAAYFRSGLDYWGQGTLVTVSS

SEQ ID NO: 6776 - protein, 124 aa, Artificial Sequence
  source: /note="Description of Artificial Sequence: Synthetic polypeptide"
QVQLVQSGAEVKKPGSSVKVSCKASGGTFSSYWISWVRQAPGQGLEWMGYIIPISGTARYAQKFQGRVTITADESTSTAYMELSSLRSEDTAVYYCAREPGYSSGLSVDYFDYWGQGTLVTVSS

SEQ ID NO: 6777 - protein, 119 aa, Artificial Sequence
  source: /note="Description of Artificial Sequence: Synthetic polypeptide"
EVQLLESGGGLVQPGGSLRLSCAASGFTFSSYAMSWVRQAPGKGLEWVSAISGSGGSTYYADSVKGRFTISRDNSKNTLYLQMNSLRAEDTAVYYCARGPAYTIVFDYWGQGTLVTVSS

SEQ ID NO: 6778 - protein, 119 aa, Artificial Sequence
  source: /note="Description of Artificial Sequence: Synthetic polypeptide"
EVQLLESGGGLVQPGGSLRLSCAASGFTFSSYAMSWVRQAPGKGLEWVSAISGSGGSTYYADSVKGRFTISRDNSKNTLYLQMNSLRAEDTAVYYCARGPVYSLVFDYWGQGTLVTVSS

SEQ ID NO: 6779 - protein, 124 aa, Artificial Sequence
  source: /note="Description of Artificial Sequence: Synthetic polypeptide"
QVQLVQSGAEVKKPGSSVKVSCKASGGTFSSYAISWVRQAPGQGLEWMGGIIPIFGTANYAQKFQGRVTITADESTSTAYMELSSLRSEDTAVYYCARDGYRRYGIGRYGFDYWGQGTLVTVSS

SEQ ID NO: 6780 - protein, 119 aa, Artificial Sequence
  source: /note="Description of Artificial Sequence: Synthetic polypeptide"
EVQLLESGGGLVQPGGSLRLSCAASGFTFSSYAMSWVRQAPGKGLEWVSAISGSGGSTYYADSVKGRFTISRDNSKNTLYLQMNSLRAEDTAVYYCARGPVYSSVFDYWGQGTLVTVSS

SEQ ID NO: 6781 - protein, 121 aa, Artificial Sequence
  source: /note="Description of Artificial Sequence: Synthetic polypeptide"
EVQLVESGGGLVQPGGSLRLSCAASGFTFSSYAMSWVRQAPGKGLEWVSIINNNVGRTYYADSVKGRFTISRDNSKNTLYLQMNSLRAEDTAVYYCAKEGGDYYYYGMDVWGQGTTVTVSS

SEQ ID NO: 6782 - protein, 121 aa, Artificial Sequence
  source: /note="Description of Artificial Sequence: Synthetic polypeptide"
EVQLVESGGGLVQPGGSLRLSCAASGFTFGSYAMSWVRQAPGKGLEWVSVISDSGGRTYYADSVKGRFTISRDYSKNTLYLQMNSLRAEDTAVYYCAKEGGDYYYYGMDVWGQGTTVTVSS

SEQ ID NO: 6783 - protein, 116 aa, Artificial Sequence
  source: /note="Description of Artificial Sequence: Synthetic polypeptide"
QLQLQESGPGLVKPSEILSLTCTVSGGSISSSSYYWGWIRQPPGKGLEWIGNIYYRGDTYYSPSLKSRVTISVDTSKNQFSLKLNSVTAADTAVYYCAKGFRFDYWGQGTLVTVSS

SEQ ID NO: 6784 - protein, 116 aa, Artificial Sequence
  source: /note="Description of Artificial Sequence: Synthetic polypeptide"
QLQLQESGPGLVKPSETLSLTCTVSGGSISSSSYYWGWIRQPPGKGLEWIGNIYYRGDTYYSPSLKSRVTISVDTSKNQFSLKLSSVTAADTAVYYCARGFRFDYWGQGTLVTVSS

SEQ ID NO: 6785 - protein, 116 aa, Artificial Sequence
  source: /note="Description of Artificial Sequence: Synthetic polypeptide"
QLQLQESGPGLVKPSETLSLTCTVSGGSISSSSYYWGWIRQPPGKGLEWIGNIYYRGDTYYSPSLKSRVTISVDTSKNQFSLKLSSVTAADTAVYYCAKGFRFDYWGQGTLVTVSS

SEQ ID NO: 6786 - protein, 120 aa, Artificial Sequence [sequence omitted]

SEQ ID NO: 6787 - protein, 113 aa, Artificial Sequence
  source: /note="Description of Artificial Sequence: Synthetic polypeptide"
QVQLVESGGGVWQPGRSLRLDCKASGITFSNSGMHWVRQAPGKGLEWVAVIWYDGSKRYYADSVKGRFTISRDNSKNTLFLQMNSLRAEDTAVYYCATNDDYWGQGTLVTVSS

SEQ ID NO: 6788 - protein, 118 aa, Artificial Sequence [sequence omitted]

SEQ ID NO: 6789 - protein, 115 aa, Mus musculus
QVQLKESGPGLVAPSQSLSITCTVSGFSLLSYGVHWVRQPPGKGLEWLGVIWTGGTTNYNSALMSRLSISKDDSKSQVFLKMNSLQTDDTAIYYCARYYYGMDYWGQGTSVTVSS

SEQ ID NO: 6790 - protein, 115 aa, Homo sapiens
QVQLQESGPGLVKPSETLSLTCTVSGFSLLSYGVHWVRQPPGKGLEWLGVIWTGGTTNYNSALMSRLTISKDDSKSTVYLKMNSLKTEDTAIYYCARYYYGMDYWGQGTSVTVSS

SEQ ID NO: 6791 - protein, 115 aa, Homo sapiens
QVQLQESGPGLVKPSETLSLTCTVSGFSLLSYGVHWVRQPPGKGLEWLGVIWTGGTTNYNSALMSRLTISKDDSKNTVYLKMNSLKTEDTAIYYCARYYYGMDYWGQGTLVTVSS

SEQ ID NO: 6792 - protein, 115 aa, Homo sapiens
QVQLQESGPGLVKPSETLSLTCTVSGFSLLSYGVHWVRQPPGKGLEWLGVIWTGGTTNYNSALMSRFTISKDDSKNTVYLKMNSLKTEDTAIYYCARYYYGMDYWGQGTLVTVSS

SEQ ID NO: 6793 - protein, 115 aa, Homo sapiens
QVQLQESGPGLVKPSETLSLTCTVSGFSLLSYGVHWVRQPPGKGLEWLGVIWTGGTTNYNSALMSRFTISKDDSKNTLYLKMNSLKTEDTAIYYCARYYYGMDYWGQGTLVTVSS

SEQ ID NO: 6794 - protein, 223 aa, Artificial Sequence
  source: /note="Description of Artificial Sequence: Synthetic polypeptide"
EVQLLESGGGLVQPGGSLRLSCAASGFTFSSHAMSWVRQAPGKGLEWVSAIWASGEQYYADSVKGRFTISRDNSKNTLYLQMNSLRAEDTAVYYCAKGWLGNFDYWGQGTLVTVSSASVAAPSVFIFPPSDEQLKSGTASVVCLLNNFYPREAKVQWKVDNALQSGNSQESVTEQDSKDSTYSLSSTLTLSKADYEKHKVYACEVTHQGLSSPVTKSFNRGEC

SEQ ID NO: 6795 - protein, 222 aa, Artificial Sequence
  source: /note="Description of Artificial Sequence: Synthetic polypeptide"
EVQLLESGGGLVQPGGSLRLSCAASGFTFSSYAMSWVRQAPGKGLEWVSAISGSGGSTYYADSVKGRFTISRDNSKNTLYLQMNSLRAEDTAVYYCAKGSGFDYWGQGTLVTVSSASVAAPSVFIFPPSDEQLKSGTASVVCLLNNFYPREAKVQWKVDNALQSGNSQESVTEQDSKDSTYSLSSTLTLSKADYEKHKVYACEVTHQGLSSPVTKSFNRGEC

SEQ ID NO: 6796 - protein, 116 aa, Artificial Sequence
  source: /note="Description of Artificial Sequence: Synthetic polypeptide"
QVQLVQSGAEVKKPGSSVKVSCKASGGTFSSYAISWVRQAPGQGLEWMGGIIPIFGTANYAQKFQGRVTITADKSTSTAYMELSSLRSEDTAVYYCARGYYAIDYWGQGTTVTVSS

SEQ ID NO: 6797 - protein, 119 aa, Artificial Sequence
  source: /note="Description of Artificial Sequence: Synthetic polypeptide"
QVTLRESGPALVKPTQTLTLTCTFSGFSLSTSGMGVGWIRQPPGKALEWLAHIWWDDDKYYQPSLKSRLTISKDTSKNQVVLTMTNMDPVDTATYYCARTRRYFPFAYWGQGTLVTVSS

SEQ ID NO: 6798 - protein, 119 aa, Homo sapiens
QVQLVESGGGLVKPGGSLRLSCAASGFTFSDHYISWIRQAPGKGLEWVSYISSSGSTTYYAESVKGRFTISRDNAKNSLYLQMNSLRAEDTAVYYCARTYAYRYDFDLWGQGTLVTVSS

SEQ ID NO: 6799 - protein, 120 aa, Homo sapiens
EVQLVESGGGLVKPGGSLRLSCAASGFTFSSYSMNWVRQAPGKGLEWVSSISSSSSYIYYADSVKGRFTISRDNAKNSLYLQMNSLRAEDTAVYYCARTESVWHLGFDIWGQGTLVTVSS

SEQ ID NO: 6800 - protein, 120 aa, Homo sapiens
QVQLVESGGGLVKPGGSLRLSCAASGFTFSDYYMSWIRQAPGKGLEWVSYISSSGSTIYYADSVKGRFTISRDNAKNSLYLQMNSLRAEDTAVYYCARDGLRYFYGFDYWGQGTLVTVSS

SEQ ID NO: 6801 - protein, 122 aa, Homo sapiens
QVQLVQSGAEVKKPGASVKVSCKASGYTFTSYYMHWVRQAPGQGLEWMGIINPSGGSTSYAQKFQGRVTMTRDTSTSTVYMELSSLRSEDTAVYYCAREGYTPGGSYTFDIWGQGTLVTVSS

SEQ ID NO: 6802 - protein, 118 aa, Homo sapiens
EVQLVQSGAEVKKPGESLKISCKGSGYSFTSYWISWVRQMPGKGLEWMGIIYPGTSYTRYSPSFQGQVTISADKSISTAYLQWSSLKASDTAMYYCARGYHLPYFDYWGQGTLVTVSS

SEQ ID NO: 6803 - protein, 122 aa, Homo sapiens
EVQLVESGGGLVKPGGSLRLSCAASGFTFSNYWISWVRQAPGKGLEWVGRIKSKTYGGTTDYAEPVKGRFTISRDDSKNTLYLQMNSLKTEDTAVYYCARGRYPELGYFDLWGQGTLVTVSS

SEQ ID NO: 6804 - protein, 121 aa, Homo sapiens
EVQLLESGGGLVQPGGSLRLSCAASGFTFSPYPMIWVRQAPGKGLEWVSYISPSGGSTHYADSVKGRFTISRDNSKNTLYLQMNSLRAEDTAVYYCARGGDTYFDYFDYWGQGTLVTVSSA

SEQ ID NO: 6805 - protein, 121 aa, Homo sapiens
EVQLLESGGGLVQPGGSLRLSCAASGFTFSPYPMIWVRQAPGKGLEWVSYISPSGGKTHYADSVKGRFTISRDNSKNTLYLQMNSLRAEDTAVYYCARGGDTYFDYFDYWGQGTLVTVSSA

SEQ ID NO: 6806 - protein, 121 aa, Homo sapiens
EVQLLESGGGLVQPGGSLRLSCAASGFTFSPYPMMWVRQAPGKGLEWVSYISPSGGSTHYADSVKGRFTISRDNSKNTLYLQMNSLRAEDTAVYYCARGGDTYFDYFDYWGQGTLVTVSSA

SEQ ID NO: 6807 - protein, 121 aa, Homo sapiens
EVQLLESGGGLVQPGGSLRLSCAASGFTFSPYPMMWVRQAPGKGLEWVSYISPSGGKTHYADSVKGRFTISRDNSKNTLYLQMNSLRAEDTAVYYCARGGDTYFDYFDYWGQGTLVTVSSA

SEQ ID NO: 6808 - protein, 121 aa, Homo sapiens
EVQLLESGGGLVQPGGSLRLSCAASGFTFSPYPMMWVRQAPGKGLEWVSYISPSGGKTHYADSVKGRFTISRDNSKNTLYLQMNSLRAEDTAVYYCARGGDGYFDYFDYWGQGTLVTVSSA

SEQ ID NO: 6809 - protein, 119 aa, Artificial Sequence
  source: /note="Description of Artificial Sequence: Synthetic polypeptide"
QVQLKQSGPGLVQPSQSLSITCTVSGFSLTNYGVHWVRQSPGKGLEWLGVIWSGGNTDYNTPFTSRLSINKDNSKSQVFFKMNSLQSNDTAIYYCARALTYADYEFAYWGQGTLVTVSA

SEQ ID NO: 6810 - protein, 119 aa, Artificial Sequence
  source: /note="Description of Artificial Sequence: Synthetic polypeptide"
QVQLQESGPGLVKPSETLSLTCTVSGGSISNYGVHWIRQPPGKGLEWIGVIWSGGNTDYNTPFTSRVTISVDTSKSQVSLKLSSVTAADTAVYYCARALTYYDYEFAYWGQGTLVTVSS

SEQ ID NO: 6811 - protein, 122 aa, Artificial Sequence
  source: /note="Description of Artificial Sequence: Synthetic polypeptide"
QVQLVESGGGVVQPGRSLRLSCAASGFTFSSYGMHWVRQAPGKGLEWVAVIWYDGRNKYYTDSVKGRFTISRDNSKNTLYLQMDSLRAEDTAVYYCARERYISSYYGGFDPWGQGALVTVSS

SEQ ID NO: 6812 - protein, 119 aa, Artificial Sequence
  source: /note="Description of Artificial Sequence: Synthetic polypeptide"
EVQLLESGGDLVQPGGSLRLSCAASGFTFSSYAMSWVRQAPGKGLEWVSVISGSGSSTDYADSVKGRFTISRDNSRDTLHLQMNSLRAEDTAVYYCAKTFYYFYGLDVWGQGTTVTVSS

SEQ ID NO: 6813 - protein, 117 aa, Artificial Sequence
  source: /note="Description of Artificial Sequence: Synthetic polypeptide"
QVLLVQSGAEVKKPGATVKVSCKASGSTFTGYYMHWVRQAPGQGLEWMGWINPNNGGTNYAQKFQGRVTMTRDTSISTAYMELSRLRSDDTAVYYCARELRYNWKSWGQGTLVTVSS

SEQ ID NO: 6814 - protein, 122 aa, Artificial Sequence
  source: /note="Description of Artificial Sequence: Synthetic polypeptide"
EVQLVESGGGLVQPGGSLRLSCAASGFTFRSFAMSWVRQAPGKGLELVSDLRTSGGSTYYADSVKGRLTISRDNSKNTLYLQMNSLRAEDTAVYYCAKSHYSTSWFGGFDYWGQGTLVTVSS

SEQ ID NO: 6815 - protein, 122 aa, Artificial Sequence
  source: /note="Description of Artificial Sequence: Synthetic polypeptide"
EVQLVESGGGLVQPGGSLRLSCAASGFTFSSYVMSWVRQAPGKGLEWVSSISGNGGSTNYADSVKGRFTISRDNSKNTLFLEMNSLRAEDTAVYYCAKSLGTTTTFLGFDYWGQGTLVTVSS

SEQ ID NO: 6816 - protein, 121 aa, Artificial Sequence
  source: /note="Description of Artificial Sequence: Synthetic polypeptide"
QVQLQESGPGLVKPSETLSLTCTVSGGSISSYYWSWIRQPPGKGLELIGYIYYSGSTNYNPSLKSRVTISVDTSKNHFSLKLSSVTAADTAVYYCARSQYTSSWYGSFDIWGQGTMVTVSS

SEQ ID NO: 6817 - protein, 122 aa, Artificial Sequence
  source: /note="Description of Artificial Sequence: Synthetic polypeptide"
QVQLVQSGAEVKKPGASVKVSCKASGYTFNSYGISWVRQAPGQGLEWMGWISSHNGNSHYVQKFQGRVSMTTDTSTSTAYMELRSLRSDDTAVYYCARHSYTTSWYGGFDYWGQGTLVTVSS

SEQ ID NO: 6818 - protein, 122 aa, Artificial Sequence
  source: /note="Description of Artificial Sequence: Synthetic polypeptide"
EVQLVESGGGLVQPGGSLRLSCAASGITLSSYGMSWVRQAPGKGLEWVASIFGSGGGPYYADSVKGRFTMSRDNSKNTLYLQMNSLRAEDTAVYYCAKDRYSGSYYGGFDYWGRGTLVTVSS

SEQ ID NO: 6819 - protein, 122 aa, Artificial Sequence
  source: /note="Description of Artificial Sequence: Synthetic polypeptide"
EVQLVESGGGLVQPGGSLRLSCAASGFTFSSYALTWVRQAPGKGLEWVSFISGSGGRPFYADSVKGRFTISRDNSKNMLYLQMNSLRAEDTAIYYCAKSLYTTSWYGGFDSWGQGTLVTVSS

SEQ ID NO: 6820 - protein, 122 aa, Artificial Sequence
  source: /note="Description of Artificial Sequence: Synthetic polypeptide"
QVQLVQSGAEVKKPGASVKVSCKASGYTFTGHYMYWMRQAPGQGLEWMGWINPNSGGTNYAQKFQDRVTMTRDTSISTAYMELSRLRSDDTAVYYCARGRYGSSWYGGFEYWGQGTLVTVSS

SEQ ID NO: 6821 - protein, 122 aa, Artificial Sequence
  source: /note="Description of Artificial Sequence: Synthetic polypeptide"
QVQLVESGGGVVQPGRSLRLSCAASGFTFSSYGLHWVRQSPGKGLEWVALISYDGSNKYYADSVKGRFTISRDNSKNTLYLQMNSLRPEDTAGYFCAKSLYTTSWYGGFDYWGQGTLVTVSS

SEQ ID NO: 6822 - protein, 122 aa, Artificial Sequence
  source: /note="Description of Artificial Sequence: Synthetic polypeptide"
EVQLVESGGGLVQPGGSLRLSCAASGFTFSNYAMTWVRQAPGKGLEWVSTISGSGDNTYYADSVQGRFTISRGHSKNTLYLQMNSLRAEDTAVYYCAKPTYSRSWYGAFDFWGQGTMVTVSS

SEQ ID NO: 6823 - protein, 122 aa, Artificial Sequence
  source: /note="Description of Artificial Sequence: Synthetic polypeptide"
QVQLVQSGAEVKKPGASVKVSCKASGYTFTSYGISWVRQAPGQGLEWMGWIRAYNGYTNYAQKFQGRVTMTTDTSTNTAYMELRTLNSDDTAVYYCARDRYSGSFHGNFDYWGQGTLVTVSS

SEQ ID NO: 6824 - protein, 122 aa, Artificial Sequence
  source: /note="Description of Artificial Sequence: Synthetic polypeptide"
EVQLVESGGGLVQPGGSLRLSCAASGFTFSTYSMHWVRQAPGKGLEYVSTINNNGDTTYYADSVKGRFTISRDNSKNTLYLQLGSLRPEDMAVYYCARQTYTSSWYGGFDSWGQGTLVTVSS

SEQ ID NO: 6825 - protein, 122 aa, Artificial Sequence
  source: /note="Description of Artificial Sequence: Synthetic polypeptide"
EVQLVESGGGLVQPGGSLRLSCAASGFTLSSYAMSWVRQAPGKGLEWVSAISGSGGSTYYADSVKGRFTISRDNSKNSLYLQLNSLRAEDTAVYYCAKTLYTTSWYGGFQHWGQGTLVTVSS

SEQ ID NO: 6826 - protein, 122 aa, Artificial Sequence
  source: /note="Description of Artificial Sequence: Synthetic polypeptide"
EVQLVESGGGLVQPGGSLRLSCAASGFTLRSYFMTWVRQVPGKGLEGVSAISGISGGTYYTDSVKGRFTISRDNSKNTLFLQMNSLRAEDTAVYFCARTVYSSSYYGGFQHWGQGTLVTVSS

SEQ ID NO: 6827 - protein, 122 aa, Artificial Sequence
  source: /note="Description of Artificial Sequence: Synthetic polypeptide"
EVQLVESGGGLVQPGGSLRLSCAASGFTLRSYVMYWVRQGPGKGLEGVSGISGSSGGTYYTDSVKGRFTISRDNSKNTLFLQMNSLRAEDTAVYFCARSVYSTTWYGGFQHWGQGTLVTVSS

SEQ ID NO: 6828 - protein, 122 aa, Artificial Sequence
  source: /note="Description of Artificial Sequence: Synthetic polypeptide"
EVQLVESGGNLEQPGGSLRLSCTASGFTFSRSAMNWVRRAPGKGLEWVSGISGSGGRTYYADSVKGRFTISRDNSKNTLYLQMNSLSAEDTAAYYCAKDSYTTSWYGGMDVWGHGTTVTVSS

SEQ ID NO: 6829 - protein, 122 aa, Artificial Sequence
  source: /note="Description of Artificial Sequence: Synthetic polypeptide"
EVQLVESGGGLVQPGGSLRLSCSASGFTFSSYAMNWVRQAPGKGLEWVTAISGSGGGTYYADSVKGRFTISRDNSKNSLFLQLNSLRAEDTAVYYCAKQTYTSSWYGGFDIWGQGTMVTVSS

SEQ ID NO: 6830 - protein, 118 aa, Artificial Sequence
  source: /note="Description of Artificial Sequence: Synthetic polypeptide"
QVTLKESGPVLVKPTESLTLTCSVSGFSLSNVRMGVSWIRQSPGKALEWLAHIFSNDEKSYTTSLKTRLTISKDTSRSQVVLTMTDMDPGDTATYYCARIRNLAFNYWGQGTLVTVSS

SEQ ID NO: 6831 - protein, 122 aa, Mus musculus
DVQLVESGGGLVQPGGSRKLSCAASGFTFSSFGMHWVRQAPEKGLEWVAYISSDSSAIYYADTVKGRFTISRDNPKNTLFLQMTSLRSEDTAMYYCGRGRENIYYGSRLDYWGQGTTLTVSS

SEQ ID NO: 6832 - protein, 122 aa, Artificial Sequence
  source: /note="Description of Artificial Sequence: Synthetic polypeptide"
EVQLVESGGGLVQPGGSLRLSCAASGFTFSSFGMHWVRQAPGKGLEWVAYISSDSSAIYYADTVKGRFTISRDNAKNSLYLQMNSLRDEDTAVYYCARGRENIYYGSRLDYWGQGTTVTVSS

SEQ ID NO: 6833 - protein, 122 aa, Artificial Sequence
  source: /note="Description of Artificial Sequence: Synthetic polypeptide"
EVQLVESGGGLVQPGGSLRLSCAASGFTFSSFGMHWVRQAPGKGLEWVAYISSDSSAIYYADTVKGRFTISRDNAKNSLYLQMNSLRDEDTAVYYCGRGRENIYYGSRLDYWGQGTTVTVSS

SEQ ID NO: 6834 - protein, 122 aa, Artificial Sequence
  source: /note="Description of Artificial Sequence: Synthetic polypeptide"
EVQLVESGGGLVQPGGSLRLSCAASGFTFSSFGMHWVRQAPGKGLEWVAYISSDSSAIYYADTVKGRFTISRDNAKNSLYLQMNSLRDEDTAMYYCGRGRENIYYGSRLDYWGQGTTVTVSS

SEQ ID NO: 6835 - protein, 122 aa, Artificial Sequence
  source: /note="Description of Artificial Sequence: Synthetic polypeptide"
EVQLVESGGGLVQPGGSLRLSCAASGFTFSSFGMHWVRQAPGKGLEWVAYISSDSSAIYYADTVKGRFTISRDNAKNSLYLQMNSLRSEDTAVYYCARGRENIYYGSRLDYWGQGTTVTVSS

SEQ ID NO: 6836 - protein, 120 aa, Mus musculus
QVQLQQSGAELARPGASVKLSCKASGYTFTSYWMQWVKQRPGQGLEWIGTIYPGDGDTRYTQKFKGKATLTADKSSSTAYMQLSSLASEDSAVYYCARRGIPRLWYFDVWGAGTTVTVSS

SEQ ID NO: 6837 - protein, 120 aa, Artificial Sequence
  source: /note="Description of Artificial Sequence: Synthetic polypeptide"
QVQLVQSGAEVKKPGASVKVSCKASGYTFTSYWMQWVRQAPGQGLEWMGTIYPGDGDTRYTQKFKGRVTITADKSTSTAYMELSSLRSEDTAVYYCARRGIPRLWYFDVWGQGTTVTVSS

SEQ ID NO: 6838 - protein, 120 aa, Artificial Sequence
  source: /note="Description of Artificial Sequence: Synthetic polypeptide"
QVQLVQSGAEVKKPGASVKVSCKASGYTFTSYWMQWVRQAPGQGLEWMGTIYPGGGDTRYTQKFQGRVTITADKSTSTAYMELSSLRSEDTAVYYCARRGIPRLWYFDVWGQGTTVTVSS

SEQ ID NO: 6839 - protein, 117 aa, Mus musculus
EVQQVESGGDLVKPGGSLKLSCAASGFTFSSYGMSWVRQTPDKRLEWVATINSGGSNTYYPDSLKGRFTISRDNAKNTLYLQMRSLKSEDTAMYYCARHDGGAMDYWGQGTSVTVSS

SEQ ID NO: 6840 - protein, 118 aa, Mus musculus
QVQLVESGGGVVQPGRSLRLSCAASGFTFSSYTMHWVRQAPGKGLEWVTFISYDGNNKYYADSVKGRFTISRDNSKNTLYLQMNSLRAEDTAIYYCARTGWLGPFDYWGQGTLVTVSS

SEQ ID NO: 6841 - protein, 125 aa, Mus musculus
QVQLVESGGGVVQPGRSLRLSCAASGFTFSSYGMHWVRQAPGKGLEWVAVIWYDGSNKYYADSVKGRFTISRDNSKNTLYLQMNSLRAEDTAVYYCARDPRGATLYYYYYGMDVWGQGTTVTVSS

SEQ ID NO: 6842 - protein, 112 aa, Artificial Sequence
  source: /note="Description of Artificial Sequence: Synthetic polypeptide"
QITLKESGPTLVKPTQTLTLTCTFSGFSLYTFDMGVGWIRQPPGKGLEWLAHIWWDDDKYYNPALKSRLTISKDTSKNQVVLTMTNMDPVDTATYYCARVRGLHDYYYWFAY

SEQ ID NO: 6843 - protein, 112 aa, Artificial Sequence
  source: /note="Description of Artificial Sequence: Synthetic polypeptide"
QVTLKESGPGILQPSQTLSLTCSFSGFSLYTFDMGVGWIRQPSGKGLEWLAHIWWDDDKYYNPALKSRLTVSKDTSKNQVFLKIPNVDTADSATYYCARVRGLHDYYYWFAY

SEQ ID NO: 6844 - protein, 453 aa, Artificial Sequence
  source: /note="Description of Artificial Sequence: Synthetic polypeptide"
QITLKESGPTLVKPTQTLTLTCTFSGFSLYTFDMGVGWIRQPPGKGLEWLAHIWWDGDKYYNPALKSRLTISKDTSKNQVVLTMTNMDPVDTATYYCARVRGLHRYYYWFAYWGQGTLVTVSSASTKGPSVFPLAPSSKSTSGGTAALGCLVKDYFPEPVTVSWNSGALTSGVHTFPAVLQSSGLYSLSSVVTVPSSSLGTQTYICNVNHKPSNTKVDKKVEPKSCDKTHTCPPCPAPELLGGPSVFLFPPKPKDTLMISRTPEVTCVVVDVSHEDPEVKFNWYVDGVEVHNAKTKPREEQYNSTYRVVSVLTVLHQDWLNGKEYKCKVSNKALPAPIEKTISKAKGQPREPQVYTLPPSRDELTKNQVSLTCLVKGFYPSDIAVEWESNGQPENNYKTTPPVLDSDGSFFLYSKLTVDKSRWQQGNVFSCSVMHEALHNHYTQKSLSLSPGK

SEQ ID NO: 6845 - protein, 122 aa, Artificial Sequence
  source: /note="Description of Artificial Sequence: Synthetic polypeptide"
QVQLQQPGAELVMPGASVKLSCKASGYTFTSYWMHWVKQRPGEGLEWIGEIDPSDSYTNDNQKFKGKATLTVDKSSSTAYMQLSSLTSEDSAVYYCARRLYSNSYYYAMDYWGQGTSVTVSS

SEQ ID NO: 6846 - protein, 120 aa, Artificial Sequence
  source: /note="Description of Artificial Sequence: Synthetic polypeptide"
EVQLQQSGPELVKPGASVKMSCKASGYTFSDYYMHWVKQSHGKSLEWIGYIYPDNGGNGYNQKFKGKATLTVDKSSSTVYMELRSLTSEDSALYYCARGTYYDGSYFDYWGQGTTLTVSS

SEQ ID NO: 6847 - protein, 111 aa, Artificial Sequence
  source: /note="Description of Artificial Sequence: Synthetic polypeptide"
EVQLQQSGPELVKPGASVKISCKASGYTFTDSTMNWVKQSHGKSLEWIGEIDPNNGGTNYNQKFKGKATLTVDKSSSTAYMELRSLTSEDSAVYYCARGVWGQGTTLTVSS

SEQ ID NO: 6848 - protein, 113 aa, Artificial Sequence
  source: /note="Description of Artificial Sequence: Synthetic polypeptide"
EVQLQESGPSLVKPSQTLSLTCSVTGDSITSGYWNWIRKFPGNRLEYMGYISYSGSTYYNPSLKSRISITRDTSKNQYYLHLTSVTTEDTATYYCAQGDGAYWGQGTTLTVSS

SEQ ID NO: 6849 - protein, 111 aa, Artificial Sequence
  source: /note="Description of Artificial Sequence: Synthetic polypeptide"
EVQLQQSGPELVKPGASVKISCKASGYRFTDSTMNWVKQSHGKSLEWIGEIWPNNGGTNYNQKFKGKATLTVDKSSSTAYMELRSLTSEDSAVYYCARGVWGQGTTLTVSS

SEQ ID NO: 6850 - protein, 111 aa, Artificial Sequence
  source: /note="Description of Artificial Sequence: Synthetic polypeptide"
EVQLQQSGPELVKPGASVKISCKASGYRFTDSTMNWVKQSHGKSLEWIGEIFPNNGGTNYNQKFKGKATLTVDKSSSTAYMELRSLTSEDSAVYYCARGVWGQGTTLTVSS

SEQ ID NO: 6851 - protein, 112 aa, Artificial Sequence
  source: /note="Description of Artificial Sequence: Synthetic polypeptide"
EVQLQESGPSLVKPSQTLSLTCSVTPDSITSGYWNWIRKPGNRLEYMGYISYSGSTYYNPSLKSRISITRDTSKNQYYLHLTSVTTEDTATYYCAQGDGAYWGQGTTLTVSS

SEQ ID NO: 6852 - protein, 112 aa, Artificial Sequence
  source: /note="Description of Artificial Sequence: Synthetic polypeptide"
EVQLQESGPSLVKPSQTLSLTCSVTGDSITSGYWRWIRKPGNRLEYMGYISYSGSTYYNPSLKSRISITRDTSKNQYYLHLTSVTTEDTATYYCAQGDGAYWGQGTTLTVSS

SEQ ID NO: 6853 - protein, 112 aa, Artificial Sequence
  source: /note="Description of Artificial Sequence: Synthetic polypeptide"
EVQLQESGPSLVKPSQTLSLTCSVTGDSITSGYFNWIRKPGNRLEYMGYISYSGSTYYNPSLKSRISITRDTSKNQYYLHLTSVTTEDTATYYCAQGDGAYWGQGTTLTVSS

SEQ ID NO: 6854 - protein, 112 aa, Artificial Sequence
  source: /note="Description of Artificial Sequence: Synthetic polypeptide"
EVQLQESGPSLVKPSQTLSLTCSVTGDSITSGYWKWIRKPGNRLEYMGYISYSGSTYYNPSLKSRISITRDTSKNQYYLHLTSVTTEDTATYYCAQGDGAYWGQGTTLTVSS

SEQ ID NO: 6855 - protein, 112 aa, Artificial Sequence
  source: /note="Description of Artificial Sequence: Synthetic polypeptide"
EVQLQESGPSLVKPSQTLSLTCSVTGDSITIGYWNWIRKPGNRLEYMGYISYSGSTYYNPSLKSRISITRDTSKNQYYLHLTSVTTEDTATYYCAQGDGAYWGQGTTLTVSS

SEQ ID NO: 6856 - protein, 112 aa, Artificial Sequence
  source: /note="Description of Artificial Sequence: Synthetic polypeptide"
EVQLQESGPSLVKPSQTLSLTCSVTGDSITSGYWNWIRKPGNRLEYMGFISYSGSTYYNPSLKSRISITRDTSKNQYYLHLTSVTTEDTATYYCAQGDGAYWGQGTTLTVSS

SEQ ID NO: 6857 - protein, 112 aa, Artificial Sequence
  source: /note="Description of Artificial Sequence: Synthetic polypeptide"
EVQLQESGPSLVKPSQTLSLTCSVTGDSITSGYWNWIRKPGNRLEYMGYISYRGSTYYNPSLKSRISITRDTSKNQYYLHLTSVTTEDTATYYCAQGDGAYWGQGTTLTVSS

SEQ ID NO: 6858 - protein, 112 aa, Artificial Sequence
  source: /note="Description of Artificial Sequence: Synthetic polypeptide"
EVQLQESGPSLVKPSQTLSLTCSVTGDSITSGYWNWIRKPGNRLEYMGYISYSGSIYYNPSLKSRISITRDTSKNQYYLHLTSVTTEDTATYYCAQGDGAYWGQGTTLTVSS

SEQ ID NO: 6859 - protein, 112 aa, Artificial Sequence
  source: /note="Description of Artificial Sequence: Synthetic polypeptide"
EVQLQESGPSLVKPSQTLSLTCSVTGDSITSGYWNWIRKPGNRLEYMGYISYSGDTYYNPSLKSRISITRDTSKNQYYLHLTSVTTEDTATYYCAQGDGAYWGQGTTLTVSS

SEQ ID NO: 6860 - protein, 112 aa, Artificial Sequence
  source: /note="Description of Artificial Sequence: Synthetic polypeptide"
EVQLQESGPSLVKPSQTLSLTCSVTGDSITSGYWNWIRKPGNRLEYMGYISYTGSTYYNPSLKSRISITRDTSKNQYYLHLTSVTTEDTATYYCAQGDGAYWGQGTTLTVSS

SEQ ID NO: 6861 - protein, 112 aa, Artificial Sequence
  source: /note="Description of Artificial Sequence: Synthetic polypeptide"
EVQLQESGPSLVKPSQTLSLTCSVTGDSITSGYWNWIRKPGNRLEYMGYISYSGSTYYKPSLKSRISITRDTSKNQYYLHLTSVTTEDTATYYCAQGDGAYWGQGTTLTVSS

SEQ ID NO: 6862 - protein, 112 aa, Artificial Sequence
  source: /note="Description of Artificial Sequence: Synthetic polypeptide"
EVQLQESGPSLVKPSQTLSLTCSVTGDSITSGYWNWIRKPGNRLEYMGYISYSGSTYYNPFLKSRISITRDTSKNQYYLHLTSVTTEDTATYYCAQGDGAYWGQGTTLTVSS

SEQ ID NO: 6863 - protein, 112 aa, Artificial Sequence
  source: /note="Description of Artificial Sequence: Synthetic polypeptide"
EVQLQESGPSLVKPSQTLSLTCSVTGDSITSGYWNWIRKPGNRLEYMGYISYSGSTYFNPSLKSRISITRDTSKNQYYLHLTSVTTEDTATYYCAQGDGAYWGQGTTLTVSS

SEQ ID NO: 6864 - protein, 112 aa, Artificial Sequence
  source: /note="Description of Artificial Sequence: Synthetic polypeptide"
EVQLQESGPSLVKPSQTLSLTCSVTGDSITSGYWNWIRKPGNRLEYMGYISYSGSTYYNPSLKNRISITRDTSKNQYYLHLTSVTTEDTATYYCAQGDGAYWGQGTTLTVSS

SEQ ID NO: 6865 - protein, 112 aa, Artificial Sequence
  source: /note="Description of Artificial Sequence: Synthetic polypeptide"
EVQLQESGPSLVKPSQTLSLTCSVTGDSITSGYWNWIRKPGNRLEYMGYISYSGSTYYNPSLKSRISITRDTSKNQYYLHLTSVTTEDTATYYCAQGDGAYWGQGTTLTVSS

SEQ ID NO: 6866 - protein, 112 aa, Artificial Sequence
  source: /note="Description of Artificial Sequence: Synthetic polypeptide"
EVQLQESGPSLVKPSQTLSLTCSVTGDSITSGYWNWIRKPGNRLEYMGYISYSGSTYYNPSLKSRISITRDTSKNQYYLHLTSVTTEDTATYYCAQGDGDYWGQGTTLTVSS

SEQ ID NO: 6867 - protein, 112 aa, Artificial Sequence
  source: /note="Description of Artificial Sequence: Synthetic polypeptide"
EVQLQESGPSLVKPSQTLSLTCSVTGDSITSGYWNWIRKPGNRLEYMGYISYSGSTYYNPSLKSRISITRDTSKNQYYLHLTSVTTEDTATYYCAQGDTAYWGQGTTLTVSS

SEQ ID NO: 6868 - protein, 112 aa, Artificial Sequence
  source: /note="Description of Artificial Sequence: Synthetic polypeptide"
EVQLQESGPSLVKPSQTLSLTCSVTGDSITSGYWNWIRKPGNRLEYMGYISYSGSTYYNPSLKSRISITRDTSKNQYYLHLTSVTTEDTATYYCAQADGAYWGQGTTLTVSS

SEQ ID NO: 6869 - protein, 112 aa, Artificial Sequence
  source: /note="Description of Artificial Sequence: Synthetic polypeptide"
EVQLQESGPSLVKPSQTLSLTCSVTGDSITSGYWNWIRKPGNRLEYMGYISYSGSTYYNPSLKSRISITRDTSKNQYYLHLTSVTTEDTATYYCAQGWGAYWGQGTTLTVSS

SEQ ID NO: 6870 - protein, 112 aa, Artificial Sequence
  source: /note="Description of Artificial Sequence: Synthetic polypeptide"
EVQLQESGPSLVKPSQTLSLTCSVTGDSITSGYWNWIRKPGNRLEYMGYISYSGSTYYNPSLKSRISITRDTSKNQYYLHLTSVTTEDTATYYCAQEDGAYWGQGTTLTVSS

SEQ ID NO: 6871 - protein, 450 aa, Artificial Sequence
  source: /note="Description of Artificial Sequence: Synthetic polypeptide"
EVQLVESGGGLVQPGGSLRLSCAASGFSFSSGYDMCWVRQAPGKGLEWVACIDTDNDATYYADSVKGRFTISKDSSKNTLYLQMNSLRAEDTAVYYCARTHGDYVAFKLWGQGTLVTVSSASTKGPSVFPLAPSSKSTSGGTAALGCLVKDYFPEPVTVSWNSGALTSGVHTFPAVLQSSGLYSLSSVVTVPSSSLGTQTYICNVNHKPSNTKVDKKVEPKSCDKTHTCPPCPAPELLGGPSVFLFPPKPKDTLMISRTPEVTCVVVDVSHEDPEVKFNWYVDGVEVHNAKTKPREEQYSSTYRVVSVLTVLHQDWLNGKEYKCKVSNKALPAPIEKTISKAKGQPREPQVYTLPPSREEMTKNQVSLTCLVKGFYPSDIAVEWESNGQPENNYKTTPPVLDSDGSFFLYSKLTVDKSRWQQGNVFSCSVMHEALHNHYTQKSLSLSPGK

SEQ ID NO: 6872 - protein, 450 aa, Artificial Sequence
  source: /note="Description of Artificial Sequence: Synthetic polypeptide"
EVQLVESGGGLVQPGGSLRLSCAASGFSFSSGYDMCWVRQAPGKGLEWVACIDTDNDATYYADSVKGRFTISKDSSKNTLYLQMNSLRAEDTAVYYCARTHGDYVAFKLWGQGTLVTVSSASTKGPSVFPLAPSSKSTSGGTAALGCLVKDYFPEPVTVSWNSGALTSGVHTFPAVLQSSGLYSLSSVVTVPSSSLGTQTYICNVNHKPSNTKVDKKVEPKSCDKTHTCPPCPAPELLGGPSVFLFPPKPKDTLMISRTPEVTCVVVDVSHEDPEVKFNWYVDGVEVHNAKTKPREEQYNSTYRVVSVLTVLHQDWLNGKEYKCKVSNKALPAPIEKTISKAKGQPREPQVYTLPPSREEMTKNQVSLTCLVKGFYPSDIAVEWESNGQPENNYKTTPPVLDSDGSFFLYSKLTVDKSRWQQGNVFSCSVMHEALHNHYTQKSLSLSPGK

SEQ ID NO: 6873 - protein, 107 aa, Artificial Sequence
  source: /note="Description of Artificial Sequence: Synthetic polypeptide"
DIVMTQSPDSLAVSLGERATINCKSSESVSNDVAWYQQKPGQPPKLLINYAFHRFTGVPDRFSGSGYGTDFTLTISSLQAEDVAVYYCHQAYSSPYTFGQGTKLEIK

SEQ ID NO: 6874 - protein, 110 aa, Artificial Sequence
  source: /note="Description of Artificial Sequence: Synthetic polypeptide"
DIVLTQSPASLAVSPGQRATITCRASESVDNYGYSFMHWYQQKPGQPPKLLIYRASNLESGVPARFSGSGSGTDFTLTINPVEAEDTANYYCQQSKEYPTFGGGTKVEIK

SEQ ID NO: 6875 - protein, 107 aa, Artificial Sequence
  source: /note="Description of Artificial Sequence: Synthetic polypeptide"
DIVMTQSPDSLAVSLGERATINCKASQSVSNDVAWYQQKPGQPPKLLINYAFHRFTGVPDRFSGSGYGTDFTLTISSLQAEDVAVYYCHQAYSSPYTFGGGTKLEIK

SEQ ID NO: 6876 - protein, 108 aa, Artificial Sequence
  source: /note="Description of Artificial Sequence: Synthetic polypeptide"
SELTQDPAVSVALGQTVRITCSGDSLRSYYASWYQQKPGQAPVLVIYGANNRPSGIPDRFSGSSSGNTASLTITGAQAEDEADYYCNSADSSGNHVVFGGGTKLTVLG

SEQ ID NO: 6877 - protein, 110 aa, Artificial Sequence
  source: /note="Description of Artificial Sequence: Synthetic polypeptide"
DIVLTQSPASLAVSPGQRATITCRASESVDNYGYSFMHWYQQKPGQPPKLLIYRASNLESGVPARFSGSGSRTDFTLTINPVEANDTANYYCQQSKEYPTFGGGTKVEIK

SEQ ID NO: 6878 - protein, 110 aa, Artificial Sequence
  source: /note="Description of Artificial Sequence: Synthetic polypeptide"
DIVLTQSPASLAVSPGQRATITCRASESVDNYGYSFMHWYQQKPGQPPKLLIYRASNLESGVPARFSGSGSRTDFTLTINPVEAEDTANYYCQQSKEYPTFGGGTKVEIK

SEQ ID NO: 6879 - protein, 110 aa, Artificial Sequence
  source: /note="Description of Artificial Sequence: Synthetic polypeptide"
DIVLTQSPASLAVSPGQRATITCRASESVDNYGYSFMHWYQQKPGQPPKLLIYRASNLESGVPARFSGSGSGTDFTLTINPVEANDTANYYCQQSKEYPTFGGGTKVEIK

SEQ ID NO: 6880 - protein, 107 aa, Artificial Sequence
  source: /note="Description of Artificial Sequence: Synthetic polypeptide"
DIQMTQSPSSLSASVGDRVTITCRASSSVSYLHWYQQKPGKAPKPLIYAPSNLASGVPSRFSGSGSGTDFTLTISSLQPEDFATYYCQQWAFNPPTFGQGTKVEIKR

SEQ ID NO: 6881 - protein, 107 aa, Artificial Sequence
  source: /note="Description of Artificial Sequence: Synthetic polypeptide"
QPVLTQPLSVSVALGQTARITCGGNNIGSKNVHWYQQKPGQAPVLVIYRDSNRPSGIPERFSGSNSGNTATLTISRAQAGDEADYYCQVWDSSTAVFGTGTKLTVLQ

SEQ ID NO: 6882 - protein, 111 aa, Mus Musculus
KIVLTQSPASLPVSLGQRATISCRASESVDTSDNSFIHWYQQRPGQSPKLLIYRSSTLESGVPARFSGSGSRTDFTLTIDPVEADDVATYYCQQNYDVPWTFGGGTKLEIK

SEQ ID NO: 6883 - protein, 112 aa, Mus Musculus
DVLMTQTPLSLPVSLGDQASISCRSSQNIVHSDGNTYLEWYLQKPGQSPNLLIYKVSRRFSGVPDRFSGSGSGTDFTLKISRVEAEDLGVYYCFQGSHFPLTFGAGTKLELK

SEQ ID NO: 6884 - protein, 111 aa, Mus Musculus
KIVLTQSPASLAVSLRQRATISCRASESVDRYGNSFIHWYQQKPGQPPKVLIYRASNLESGFPARFSGSGSRTDFTLTIDPVEADDAATYYCQQNNEDPYTFGSGTKLEIK

SEQ ID NO: 6885 - protein, 111 aa, Mus Musculus
DIVLTQSPASLAVSLGQRATISCRASKGVSTSSYSFMHWYQQKPRQPPKLLIKYASYLESGVPARFSGSGSGTDFTLNIHPVEEEDAATYYCHHSREFPWTFGGGTKLEIK

SEQ ID NO: 6886 - protein, 107 aa, Mus Musculus
DIVMTQPHKFMSTSVGDRVRITCKASQDVTTAVAWYQQKPGQSPKLLIYWASTRHTGVPDRFTGSGSGTEFTLTISSVQAEDLALYYCQQHYSIPWTFGGGTKLEIK

SEQ ID NO: 6887 - protein, 107 aa, Mus Musculus
DIVMTQSHKFMSTSVGDRVSITCKASQDVSTAVAWYQQKPGQSPKLLIYSASYRYTGVPDRFTGSGSGTDFTFAISSVQAEDLAVYYCQQHYSHPFTFGSGTKLEIK

SEQ ID NO: 6888 - protein, 113 aa, Mus Musculus
DIVMTQSPSSLTVTAGEKVTMRCKSSQSLLNSGTQKNYLTWYQQKPGQPPKLLIYWASTRESGVPNRFTGSGSGTDFTLTISSVQAEDLSVYYCQSDYTFPLTFGGGTKLELK

SEQ ID NO: 6889 - protein, 111 aa, Artificial Sequence
  source: /note="Description of Artificial Sequence: Synthetic polypeptide"
DIVMTQSPDSLAVSLGERATINCKASESVDTSDNSFIHWYQQKPGQSPKLLIYRSSTLESGVPDRFSGSGSGTDFTLTISSLQAEDVAVYYCQQNYDVPWTFGQGTKVEIK

SEQ ID NO: 6890 - protein, 111 aa, Artificial Sequence
  source: /note="Description of Artificial Sequence: Synthetic polypeptide"
DVVMTQSPLSLPVTLGQPASISCRASESVDTSDNSFIHWYQQRPGQSPRLLIYRSSTLESGVPDRFSGSGSGTDFTLKISRVEAEDVGVYYCQQNYDVPWTFGQGTKVEIK

SEQ ID NO: 6891 - protein, 111 aa, Artificial Sequence
  source: /note="Description of Artificial Sequence: Synthetic polypeptide"
EIVLTQSPATLSLSPGERATLSCRASESVDTSDNSFIHWYQQKPGQSPRLLIYRSSTLESGIPARFSGSGSGTDFTLTISSLEPEDFAVYYCQQNYDVPWTFGQGTKVEIK

SEQ ID NO: 6892 - protein, 114 aa, Artificial Sequence
  source: /note="Description of Artificial Sequence: Synthetic polypeptide"
SYELTQDPAVSVALGQTVRITCSGGGSYDGSSYYGWYQQKPGQAPVTVIYNNNNRPSDIPDRFSGSSSGNTASLTITGAQAEDEADYYCGSYDRPETNSDYVGMFGSGTKVTVL

SEQ ID NO: 6893 - protein, 104 aa, Artificial Sequence
  source: /note="Description of Artificial Sequence: Synthetic polypeptide"
SYELTQDPAVSVALGQTVRITCSGGSSYSYGWFQQKPGQAPVTVIYESNNRPSDIPDRFSGSSSGNTASLTITGAQAEDEADYYCGNADSSSGIFGSGTKVTVL

SEQ ID NO: 6894 - protein, 107 aa, Artificial Sequence
  source: /note="Description of Artificial Sequence: Synthetic polypeptide"
SYELTQDPAVSVALGQTVRITCSGGGSSSYYGWYQQKPGQAPVTVIYDDTNRPSGIPDRFSGSSSGNTASLTITGAQAEDEADYYCGGYEGSSHAGIFGSGTKVTVL

SEQ ID NO: 6895 - protein, 104 aa, Artificial Sequence
  source: /note="Description of Artificial Sequence: Synthetic polypeptide"
SYELTQDPAVSVALGQTVRITCSGGGSAYGWYQQKPGQAPVTVIYYNNQRPSGIPDRFSGSSSGNTASLTITGAQAEDEADYYCGSYDSSAVGIFGSGTKVTVL

SEQ ID NO: 6896 - protein, 104 aa, Artificial Sequence
  source: /note="Description of Artificial Sequence: Synthetic polypeptide"
SYELTQDPAVSVALGQTVRITCSGGGSAYGWYQQKPGQAPVTVIYYNNQRPSDIPDRFSGSSSGNTASLTITGAQAEDEADYYCGSYDSSAVGIFGSGTKVTVL

SEQ ID NO: 6897 - protein, 103 aa, Artificial Sequence
  source: /note="Description of Artificial Sequence: Synthetic polypeptide"
SYELTQDPAVSVALGQTVRITCSGGDGSYGWFQQKPGQAPVTVIYDNDNRPSDIPDRFSGSSSGNTASLTITGAQAEDEADYYCGNADLSGGIFGSGTKVTVL

SEQ ID NO: 6898 - protein, 110 aa, Artificial Sequence
  source: /note="Description of Artificial Sequence: Synthetic polypeptide"
SYELTQDPAVSVALGQTVRITCSGGISDDGSYYYGWFQQKPGQAPVTVIYINDRRPSNIPDRFSGSSSGNTASLTITGAQAEDEADYYCGSYDSSAGVGIFGSGTKVTVL

SEQ ID NO: 6899 - protein, 104 aa, Artificial Sequence
  source: /note="Description of Artificial Sequence: Synthetic polypeptide"
SYELTQDPAVSVALGQTVRITCSGGSSDYYGWFQQKPGQAPVTVIYYNNKRPSDIPDRFSGSSSGNTASLTITGAQAEDEADYYCGNADSSVGVFGSGTKVTVL

SEQ ID NO: 6900 - protein, 104 aa, Artificial Sequence
  source: /note="Description of Artificial Sequence: Synthetic polypeptide"
SYELTQPPSVSVSPGQTARITCSGGSSYSYGWFQQKPGQAPVTVIYESNNRPSDIPERFSGSSSGTTVTLTISGVQAEDEADYYCGNADSSSGIFGSGTKVTVL

SEQ ID NO: 6901 - protein, 111 aa, Mus musculus
DIVLTQSPASLTVSLGQRATISCRASQSVSTSGYSYMHWYQQKPGQPPKLLIKFGSNLESGIPARFSGSGSGTDFTLNIHPVEEEDTATYYCQHSWEIPYTFGGGTKLEIK

SEQ ID NO: 6902 - protein, 106 aa, Mus musculus
EIVLTQSPSSLSASVGDRVTITCSARSSVSYMHWFQQKPGKAPKLWIYRTSNLASGVPSRFSGSGSGTSYCLTINSLQPEDFATYYCQQRSSFPLTFGGGTKLEIK

SEQ ID NO: 6903 - protein, 112 aa, Mus musculus
DVVMTQSPLSLPVTLGQPASISCRSSQSLVHSTGNTYLHWYLQKPGQSPQLLIYRVSNRFSGVPDRFSGSGSGTDFTLKISRVEAEDVGVYYCSQTTHVPWTFGQGTKLEIK

SEQ ID NO: 6904 - protein, 111 aa, Mus musculus
  VARIANT (26)..(26): /replace="Ser"
  VARIANT (58)..(58): /replace="Arg"
  SITE (1)..(111): /note="Variant residues given in the sequence have no preference with respect to those in the annotations for variant positions"
EIVLTQSPATLSLSPGERATLSCRANESVDNYGMSFMNWFQQKPGQPPKLLIHAASNQGSGVPSRFSGSGSGTDFTLTISSLEPEDFAVYFCQQSKEVPYTFGGGTKVEIK

SEQ ID NO: 6905 - protein, 107 aa, Mus musculus
  VARIANT (31)..(31): /replace="Asn"
  VARIANT (50)..(50): /replace="Asp"
  SITE (1)..(107): /note="Variant residues given in the sequence have no preference with respect to those in the annotations for variant positions"
DIQMTQSPSSLSASVGDRVTITCRASENIYSYLAWYQQKPGKAPKLLIYNAKTLAAGVPSRFSGSGSGTDFTLTISSLQPEDFATYYCQHHYAVPWTFGQGTKLEIK

SEQ ID NO: 6906 - protein, 107 aa, Mus musculus
DIQMTQSPSSLSASVGDRVTITCRASENIYNYLAWYQQKPGKAPKLLIYDAKTLAAGVPSRFSGSGSGTDFTLTISSLQPEDFATYYCQHHYAVPWTFGQGTKLEIK

SEQ ID NO: 6907 - protein, 106 aa, Artificial Sequence
  source: /note="Description of Artificial Sequence: Synthetic polypeptide"
DIQMTQSPSSLSASVGDRVTITCRASSSVSYMHWYQQKPGKAPKLLIYATSNLASGVPSRFSGSGSGTDFTLTISSLQPEDFATYYCQQWSSNPLTFGGGTKVEIK

SEQ ID NO: 6908 - protein, 106 aa, Artificial Sequence
  source: /note="Description of Artificial Sequence: Synthetic polypeptide"
DIQMTQSPSSLSASVGDRVTITCRASSSVSYMHWYQQKPGKAPKPWIYATSNLASGVPSRFSGSGSGTDYTLTISSLQPEDFATYYCQQWSSNPLTFGGGTKVEIK

SEQ ID NO: 6909 - protein, 106 aa, Artificial Sequence
  source: /note="Description of Artificial Sequence: Synthetic polypeptide"
DIQMTQSPSSLSASVGDRATITCRASSSVSYMHWYQQKPGKAPKPWAYATSNLASGVPSRFSGSGSGTDYTLTISSLQPEDFATYYCQQWSSNPLTFGGGTKVEIK

SEQ ID NO: 6910 - protein, 106 aa, Artificial Sequence
  source: /note="Description of Artificial Sequence: Synthetic polypeptide"
DIQLTQSPSSLSASVGDRATITCRASSSVSYMHWYQQKPGKAPKPWAYATSNLASGVPSRFSGSGSGTDYTLTISSLQPEDFATYYCQQWSSNPLTFGGGTKVEIK

SEQ ID NO: 6911 - protein, 106 aa, Artificial Sequence
  source: /note="Description of Artificial Sequence: Synthetic polypeptide"
DIQLTQSPSSLSASVGDRATITCRASSSVSYMHWYQQKPGKAPKPWIYASSNLASGVPSRFSGSGSGTDYTLTISSLQPEDFATYYCQQWSSNPLTFGGGTKVEIK

SEQ ID NO: 6912 - protein, 106 aa, Artificial Sequence
  source: /note="Description of Artificial Sequence: Synthetic polypeptide"
DIQLTQSPSSLSASVGDRVTISCRASSSVSYMHWYQQKPGKAPKPWAYATSNLASGVPSRFSGSGSGTDYTLTISSLQPEDFATYYCQQWSSNPLTFGGGTKVEIK

SEQ ID NO: 6913 - protein, 106 aa, Artificial Sequence
  source: /note="Description of Artificial Sequence: Synthetic polypeptide"
DIQLTQSPSSLSASVGDRVTISCRASSSVSYMHWYQQKPGKAPKPWIYASSNLASGVPSRFSGSGSGTDYTLTISSLQPEDFATYYCQQWSSNPLTFGGGTKVEIK

SEQ ID NO: 6914 - protein, 106 aa, Artificial Sequence
  source: /note="Description of Artificial Sequence: Synthetic polypeptide"
DIQMTQSPSSLSASVGDRVTISCRASSSVSYMHWYQQKPGKAPKPWIYASSNLASGVPSRFSGSGSGTDYTLTISSLQPEDFATYYCQQWSSNPLTFGGGTKVEIK

SEQ ID NO: 6915 - protein, 106 aa, Artificial Sequence
  source: /note="Description of Artificial Sequence: Synthetic polypeptide"
DIQMTQSPSSLSASVGDRATITCRASSSVSYMHWYQQKPGKAPKPWIYASSNLASGVPSRFSGSGSGTDYTLTISSLQPEDFATYYCQQWSSNPLTFGGGTKVEIK

SEQ ID NO: 6916 - protein, 106 aa, Artificial Sequence
  source: /note="Description of Artificial Sequence: Synthetic polypeptide"
DIQMTQSPSSLSASVGDRVTISCRASSSVSYMHWYQQKPGKAPKPWAYATSNLASGVPSRFSGSGSGTDYTLTISSLQPEDFATYYCQQWSSNPLTFGGGTKVEIK

SEQ ID NO: 6917 - protein, 106 aa, Artificial Sequence; identical to SEQ ID NO: 6909
  source: /note="Description of Artificial Sequence: Synthetic polypeptide"
  VARIANT (19)..(19): /replace="Val"
  VARIANT (22)..(22): /replace="Ser"
  VARIANT (47)..(47): /replace="Ile"
  VARIANT (50)..(50): /replace="Ser"
  SITE (1)..(106): /note="Variant residues given in the sequence have no preference with respect to those in the annotations for variant positions"

SEQ ID NO: 6918 - protein, 107 aa, Artificial Sequence [sequence omitted]

SEQ ID NO: 6919 - protein, 111 aa, Homo sapiens
NFMLTQPHSVSESPGKTVTISCTRSSGSIASNYVQWYQQRPGSSPTTVIYEDNQRPSGVPDRFSGSIDSSSNSASLTISGLKTEDEADYYCQSYDGSNRWMFGGGTKLTVL

SEQ ID NO: 6920 - protein, 111 aa, Homo sapiens
NFMLTQPHSVSESPGKTVTISCTRSSGSIASNYVQWYQQRPGSSPTTVISEDNQRPSGVPDRFSGSVDSSSNSASLTISGLRTEDEADYYCQSNDSDNVVFGGGTKLTVLG

SEQ ID NO: 6921 - protein, 111 aa, Homo sapiens
NFMLTQPHSVSESPGKTVTISCTRSSGSIVSNYVQWYQQRPGSAPTTVIFDDDQRPSGVPGRFSGSLDSSSNSASLTISGLQTEDEADYYCQSYDSSNVVFGGGTKVTVLG

SEQ ID NO: 6922 - protein, 112 aa, Homo sapiens
NFMLTQPHSVSESPGRTITISCTRSGGSIGSYYVQWYQQRPGTAPTTVIYDDKKRPSGVPDRFSGSIDSSSNSASLTISGLKTEDEADYYCQSYDSNNLVVFGGGTKVTVLG

SEQ ID NO: 6923 - protein, 112 aa, Homo sapiens
NFMLTQPHSVSESPGKTVTISCTRSSGTIASNYVQWYQQRPGSSPTTVIYEDNQRPSGVPDRFSGSIDSSSNSASLTISGLKTEDEADYYCQSYDNSNHWVFGGGTKVTVLG

SEQ ID NO: 6924 - protein, 113 aa, Homo sapiens
NFMLTQPHSLSESPGKTVTISCTGSGGSIATNYVQWYQQRPGSAPTTVIHEDNQRPSGVPDRFSGSIDGSSNSASLTISGLQPEDEADYYCQSYDSDNHHVVFGGGTKLTVLG

SEQ ID NO: 6925 - protein, 113 aa, Homo sapiens
NFMLTQPHSVSESPGKTVTISCTGSSGSIASNYVQWYQQRPGSAPTTVIYEDNQRPSGVPDRFSGSIDSSSNSASLTISGLKTEDEADYYCQSYDSSNQEVVFGGGTKLTVLG

SEQ ID NO: 6926 - protein, 112 aa, Homo sapiens
NFMLTQPHSVSESPGKTVTISCTRSSGSIVSNYVQWYQQRPGSSPTTVIYEDNQRPSGVPDRFSGSIDSSSNSASLTISGLKTEDEADYYCQSYDSNNFWVFGGGTKLTVLG

SEQ ID NO: 6927 - protein, 112 aa, Homo sapiens
NFMLTQPHSVSESPGKTVTISCTRSSGYIASSYVQWYQQRPGSSPTTVIFEDDRRPSGVPDRFSGSIDGSSNSASLTISGLRTEDEADYYCQSYDDTTPWVFGGGTKLTVLG

SEQ ID NO: 6928 - protein, 114 aa, Homo sapiens
NFMLTQPHSVSESPGKTVTISCTRSSGSIASNYVHWYQQRPGSSPTTVIYEDNRRPSGVPARFSGSIDSSSNSASLTISGLETDDEADYYCQSSDTTYHGGVVFGGGTKLTVLG

SEQ ID NO: 6929 - protein, 107 aa, Homo sapiens
NFMLTQPHSVSESPGKTVTISCTRSSGSIASNYVQWYQQRPGSAPTIVIYEDNQRPSGVPHRFSGSIDSSSNSASLTISGLKTEDEADYYCQSYEGFGGGTKLTVLG

SEQ ID NO: 6930 - protein, 111 aa, Homo sapiens
NFMLTQPHAVSESPGKTVTISCTGRNGNIASNYVQWYQQRPDSAPTLIIFEDTQRPSGVPTRLSGSIDTSSNSASLIISSLRTEDEADYYCQSSDSNRVLFGGGTKVTVLG

SEQ ID NO: 6931 - protein, 112 aa, Homo sapiens
NFMLTQPHSVSESPGKTVTISCTRSSGSIASNYVQWYQQRPGSSPTTVIFEDNRRPSGVPDRFSGSIDTSSNSASLTISGLKTEDEADYYCQSFDSTNLVVFGGGTKLTVLG

SEQ ID NO: 6932 - protein, 112 aa, Homo sapiens
NFMLTQPHSVSESPGKTVTISCAGSSGSIASNYVQWYQQRPGSAPTAVIYEDNQRPSGVPDRFSGSIDSSSNSASLTISGLKTEDEADYYCQSYSYNNQVVFGGGTKVTVLG

SEQ ID NO: 6933 - protein, 112 aa, Homo sapiens
NFMLTQPHSVSESPGKTVTISCTRSSGSIVSNYVQWYQQRPGSAPTTVIYEDNRRPSGVPDRFSGSIDSSSNTASLTISGLEAEDEADYYCQSYDGSNRWMFGGGTKLTVLG

SEQ ID NO: 6934 - protein, 127 aa, Artificial Sequence
  source: /note="Description of Artificial Sequence: Synthetic polypeptide"
MKFPSQLLLFLLFRITGIICDIQVTQSSSYLSVSLGDRVTITCKASDHIKNWLAWYQQKPGIAPRLLVSGATSLEAGVPSRFSGSGSGKNFTLSITSLQTEDVATYYCQQYWSTPWTFGGGTTLEIR

SEQ ID NO: 6935 - protein, 107 aa, Artificial Sequence
  source: /note="Description of Artificial Sequence: Synthetic polypeptide"
DIQMTQSPTSLSASLGDRVTITCQASQSISSYLAWYQQKPGQAPKLLIYGASRLQTGVPSRFSGSGSGTSFTLTISGLEAEDAGTYYCQQYDSLPVTFGQGTKVELK

SEQ ID NO: 6936 - protein, 107 aa, Artificial Sequence
  source: /note="Description of Artificial Sequence: Synthetic polypeptide"
DIQMTQSPSSLSASLGDRVTITCQASQSIVSYLAWYQQKPGQAPKLLIYGASRLQTGVPSRFSGSGSGTSFTLTISGLEAEDAGTYYCQQYASAPVTFGQGTGVELK

SEQ ID NO: 6937 - protein, 107 aa, Artificial Sequence
  source: /note="Description of Artificial Sequence: Synthetic polypeptide"
DIQMTQSPSSLSASLGDRVTITCQASQSISSYLAWYQQKPGQAPKLLIYGTSRLKTGVPSRFSGSGSGTSFTLTISGLEAEDAGTYYCQQYYSAPVTFGQGTKVELK

SEQ ID NO: 6938 - protein, 107 aa, Artificial Sequence
  source: /note="Description of Artificial Sequence: Synthetic polypeptide"
DIQMTQSPSSLSPSLGDRVTITCQASQTISSFLAWYHQKPGQPPKLLIYRASIPQTGVPSRFSGSGSGTSFTLTIGGLEAEDAGTYYCQQYVSAPPTFGQGTKVELK

SEQ ID NO: 6939 - protein, 107 aa, Artificial Sequence
  source: /note="Description of Artificial Sequence: Synthetic polypeptide"
DIQMTQSPSSLSASLGDRVTITCQASQSISSYLAWYQQKPGQAPNILIYGASRLKTGVPSRFSGSGSGTSFTLTISGLEAEDAGTYYCQQYASVPVTFGQGTKVELK

SEQ ID NO: 6940 - protein, 107 aa, Artificial Sequence
  source: /note="Description of Artificial Sequence: Synthetic polypeptide"
DIQVTQSSSYLSVSLGDRVTITCKASDHIKNWLAWYQQKPGIAPRLLVSGATSLEAGVPSRFSGSGSGKNFTLSITSLQTEDVATYYCQQYWSTPWTFGGGTTLEIR

SEQ ID NO: 6941 - protein, 112 aa, Artificial Sequence
  source: /note="Description of Artificial Sequence: Synthetic polypeptide"
DIVMTQSPDSLAVSLGERATINCKSSQSLFNVRSRKNYLAWYQQKPGQPPKLLISWASTRESGVPDRFSGSGSGTDFTLTISSLQAEDVAVYYCKQSYDLFTFGSGTKLEIK

SEQ ID NO: 6942 - protein, 111 aa, Artificial Sequence
  source: /note="Description of Artificial Sequence: Synthetic polypeptide"
DIVMTQSPDSLAVSLGERATINCKASQSVDYDGDSYMNWYQQKPGQPPKLLIYAASNLESGVPDRFSGSGSGTDFTLTISSLQAEDVAVYYCQQSNEDPYTFGQGTKLEIK

SEQ ID NO: 6943 - protein, 111 aa, Artificial Sequence
  source: /note="Description of Artificial Sequence: Synthetic polypeptide"
DIVMTQSPASLAVSLGQRATISCKASQSVDYDGDSYMNWYQQKPGQPPKLLIYAASNLESGIPARFSGSGSGTDFTLNIHPVEEEDAATYYCQQSNEDPYTFGGGTKLEIK

SEQ ID NO: 6944 - protein, 107 aa, Artificial Sequence
  source: /note="Description of Artificial Sequence: Synthetic polypeptide"
DIQMTQSPSSLSASLGDTITITCHASQNINVWLSWYQQKPGNIPKLLIYKASNLHTGVPSRFSGSGSGTGFTLTISSLQPEDIATYYCQQGQSYPYTFGGGTKLEIK

SEQ ID NO: 6945 - protein, 107 aa, Artificial Sequence
  source: /note="Description of Artificial Sequence: Synthetic polypeptide"
DIQMTQSPSSLSASLGDRVTITCQASQSISSYLAWYQQKPGQAPKLLIYGASRLQTGVPSRFSGSGSGTSFTLTISGLEAEDAGTYYCQQYDSLPVTFGQGTKVELK

SEQ ID NO: 6946 - protein, 107 aa, Artificial Sequence
  source: /note="Description of Artificial Sequence: Synthetic polypeptide"
DIQMTQSPSSLSASVGDRVTITCQASQSISSYLAWYQQKPGQAPKILIYGASRLKTGVPSRFSGSGSGTSFTLTISSLEPEDAATYYCQQYASVPVTFGQGTKVEIK

SEQ ID NO: 6947 - protein, 214 aa, Artificial Sequence
  source: /note="Description of Artificial Sequence: Synthetic polypeptide"
DIQMTQSPSSLSASVGDRVTITCQASQSISSYLAWYQQKPGQAPKILIYGASRLKTGVPSRFSGSGSGTSFTLTISSLEPEDAATYYCQQYASVPVTFGQGTKVEIKRTVAAPSVFIFPPSDEQLKSGTASVVCLLNNFYPREAKVQWKVDNALQSGNSQESVTEQDSKDSTYSLSSTLTLSKADYEKHKVYACEVTHQGLSSPVTKSFNRGEC

SEQ ID NO: 6948 - protein, 107 aa, Artificial Sequence
  source: /note="Description of Artificial Sequence: Synthetic polypeptide"
DIQMTQSPSSLSASVGDRVTITCQASQSISSYLAWYQQKPGQAPKILIYGASRLKTGVPSRFSGSGSGTDFTLTISSLQAEDFATYYCQQYASVPVTFGQGTKVEIK

SEQ ID NO: 6949 - protein, 107 aa, Artificial Sequence
  source: /note="Description of Artificial Sequence: Synthetic polypeptide"
DIQMTQSPSSLSASLGDRVTITCQASQSISSYLAWYQQKPGQAPKLLIYGASRLKTGVPSRFSGSGSGTDFTLTISSLQPEDAATYYCQQYASVPVTFGQGTKVEIK

SEQ ID NO: 6950 - protein, 106 aa, Artificial Sequence
  source: /note="Description of Artificial Sequence: Synthetic polypeptide"
DIQMTQSPSSLSASVGDRVTITCQASQSISSYLAWYQQKPGKAPNLLIYGASRLKTEVPSRFSGSGSGTDFTLISGLEPEDAGTYYCQQYASVPVTFGQGTKVEIK

SEQ ID NO: 6951 - protein, 107 aa, Artificial Sequence
  source: /note="Description of Artificial Sequence: Synthetic polypeptide"
DIQMTQSPSSLSASLGDRVTITCQASQSISSYLAWYQQKPGQAPNILIYGASRLKTGVPSRFSGSGSGTDFTLTISGLEAEDFATYYCQQYASVPVTFGQGTKVEIK

SEQ ID NO: 6952 - protein, 113 aa, Artificial Sequence
  source: /note="Description of Artificial Sequence: Synthetic polypeptide"
DIVMTQSPLSLPVSPGEPATINCKSSQSLFNSGNQKNYLAWYLQKPGQPPKLLIYGASTRESGVPDRFSGSGSGTDFTLTISSLQAEDVAVYYCQNDHTYPYTFGQGTKLEIK

SEQ ID NO: 6953 - protein, 107 aa, Artificial Sequence
  source: /note="Description of Artificial Sequence: Synthetic polypeptide"
DIQMTQSPSSVSASVGDRVTITCRASQGISSWLAWYQQKPGKAPKLLIYGASSLESGVPSRFSGSGSGTDFTLTISSLQPEDFASYYCQQANSFPYTFGQGTKLEIK

SEQ ID NO: 6954 - protein, 106 aa, Artificial Sequence
  source: /note="Description of Artificial Sequence: Synthetic polypeptide"
DIQLTQSPSFLSASVGDRVTITCRASSGVNYLYWYQQKPGKAPKLWIYFTSTLAPGVPSRFSGSGSGNEYTLTISSLQPEDFATYYCQQFTSSPYTFGGGTKLEIK

SEQ ID NO: 6955 - protein, 106 aa, Artificial Sequence
  source: /note="Description of Artificial Sequence: Synthetic polypeptide"
DIQLTQSPSFLSASVGDRVTITCRASSGVNYLYWYQQKPGKAPKLWIYFTSTLAPGVPSRFSGSGSGNEYTLTISSLQPEDFATYYCQQFTSSPYTFGQGTKLEIK

SEQ ID NO: 6956 - protein, 106 aa, Artificial Sequence
  source: /note="Description of Artificial Sequence: Synthetic polypeptide"
DIQLTQSPSFLSASVGDRVTITCRASSGVNYLYWYQQKPGKAPKLWIYFTSTLASGVPSRFSGSGSGNEYTLTISSLQPEDFATYYCQQFTSSPYTFGGGTKLEIK

SEQ ID NO: 6957 - protein, 106 aa, Artificial Sequence
  source: /note="Description of Artificial Sequence: Synthetic polypeptide"
DIQLTQSPSFLSASVGDRVTITCRASSGVNYLYWYQQKPGKAPKLWIYFTSTLASGVPSRFSGSGSGNEYTLTISSLQPEDFATYYCQQFTSSPYTFGQGTKLEIK

SEQ ID NO: 6958 - protein, 106 aa, Artificial Sequence
  source: /note="Description of Artificial Sequence: Synthetic polypeptide"
DIQLTQSPSFLSASVGDRVTITCRASSGVIYLYWYQQKPGKAPKLWIYFTSTLASGVPSRFSGSGSGNEYTLTISSLQPEDFATYYCQQFTSSPYTFGQGTKLEIK

SEQ ID NO: 6959 - protein, 106 aa, Artificial Sequence
  source: /note="Description of Artificial Sequence: Synthetic polypeptide"
DIQLTQSPSFLSASVGDRVTITCRASSGVKYLYWYQQKPGKAPKLWIYFTSTLASGVPSRFSGSGSGNEYTLTISSLQPEDFATYYCQQFTSSPYTFGQGTKLEIK

SEQ ID NO: 6960 - protein, 106 aa, Artificial Sequence
  source: /note="Description of Artificial Sequence: Synthetic polypeptide"
DIQLTQSPSFLSASVGDRVTITCRASSGVRYLYWYQQKPGKAPKLWIYFTSTLASGVPSRFSGSGSGNEYTLTISSLQPEDFATYYCQQFTSSPYTFGQGTKLEIK

SEQ ID NO: 6961 - protein, 106 aa, Artificial Sequence
  source: /note="Description of Artificial Sequence: Synthetic polypeptide"
DIQLTQSPSFLSASVGDRVTITCRASSGVRYLYWYQQKPGKAPKLWIYFTSTLASGVPSRFSGSGSGNEYTLTISSLQPEDFATYYCQQFTRSPYTFGQGTKLEIK

SEQ ID NO: 6962 - protein, 106 aa, Artificial Sequence
  source: /note="Description of Artificial Sequence: Synthetic polypeptide"
DIQLTQSPSFLSASVGDRVTITCRASSGVSYLYWYQQKPGKAPKLWIYFTSTLASGVPSRFSGSGSGNEYTLTISSLQPEDFATYYCQQFTSSPYTFGQGTKLEIK

SEQ ID NO: 6963 - protein, 106 aa, Artificial Sequence
  source: /note="Description of Artificial Sequence: Synthetic polypeptide"
DIQLTQSPSFLSASVGDRVTITCRASSGVWYLYWYQQKPGKAPKLWIYFTSTLASGVPSRFSGSGSGNEYTLTISSLQPEDFATYYCQQFTSSPYTFGQGTKLEIK

SEQ ID NO: 6964 - protein, 106 aa, Artificial Sequence
  source: /note="Description of Artificial Sequence: Synthetic polypeptide"
DIQLTQSPSFLSASVGDRVTITCRASSGVYYLYWYQQKPGKAPKLWIYFTSTLASGVPSRFSGSGSGNEYTLTISSLQPEDFATYYCQQFTSSPYTFGQGTKLEIK

SEQ ID NO: 6965 - protein, 106 aa, Artificial Sequence
  source: /note="Description of Artificial Sequence: Synthetic polypeptide"
DIQLTQSPSFLSASVGDRVTITCRASSGVNYLYWYQQKPGKAPKLWIYFTSTLASGVPSRFSGSGSGNEYTLTISSLQPEDFATYYCQQFTRSPYTFGQGTKLEIK

SEQ ID NO: 6966 - protein, 106 aa, Artificial Sequence
  source: /note="Description of Artificial Sequence: Synthetic polypeptide"
DIQLTQSPSFLSASVGDRVTITCRASSGVNYLYWYQQKPGKAPKLWIYFTSTLASGVPSRFSGSGSGNEYTLTISSLQPEDFATYYCQQFTSKPYTFGQGTKLEIK

SEQ ID NO: 6967 - protein, 106 aa, Artificial Sequence
  source: /note="Description of Artificial Sequence: Synthetic polypeptide"
DIQLTQSPSFLSASVGDRVTITCRASSGVNYLYWYQQKPGKAPKLWIYFTSTLASGVPSRFSGSGSGNEYTLTISSLQPEDFATYYCQQFKSSPYTFGQGTKLEIK

SEQ ID NO: 6968 - protein, 106 aa, Artificial Sequence
  source: /note="Description of Artificial Sequence: Synthetic polypeptide"
DIQLTQSPSFLSASVGDRVTITCRASSGVNYLYWYQQKPGKAPKLWIYFTSTLASGVPSRFSGSGSGNEYTLTISSLQPEDFATYYCQQFRSSPYTFGQGTKLEIK

SEQ ID NO: 6969 - protein, 106 aa, Artificial Sequence
  source: /note="Description of Artificial Sequence: Synthetic polypeptide"
DIQLTQSPSFLSASVGDRVTITCRASSGVNYLYWYQQKPGKAPKLWIYFTSTLASGVPSRFSGSGSGNEYTLTISSLQPEDFATYYCQQFYSSPYTFGQGTKLEIK

SEQ ID NO: 6970 - protein, 142 aa, Artificial Sequence
  source: /note="Description of Artificial Sequence: Synthetic polypeptide"
MRVQIQFLGLLLLWTSVVQCDVQMTQSPSYLATSPGESVSISCKASKNIDTYLAWYQEKPGKTNKLLIYSGSTLQSGTPSRFSGSGSGTDFTLTIRNLESEDFAVYYCQQHNEYPLTFGSGTKLEIKRADAAPTVSIFPPSS

SEQ ID NO: 6971 - protein, 158 aa, Artificial Sequence
  source: /note="Description of Artificial Sequence: Synthetic polypeptide"
MESQTQVLMSLLLWISGTCGDIVMTQSPSSLAVSAGETVSIHCKSSQSLLYSGTQKNYLAWFQQKPGQSPKLLIFWASTRQSGVPDRFIGRGSGTDFTLTISGVQAEDLAIYYCQQYYDTLTDTFGAGTKLELKRADAAPTVSIFPPSTEQLATGGAS

SEQ ID NO: 6972 - protein, 111 aa, Artificial Sequence
  source: /note="Description of Artificial Sequence: Synthetic polypeptide"
DIVLTQSPASLAVSLGQRATISCRASKSVSTSGYSYMYWYQQKPGQPPKLLIYLASNLESGVPARFSGSGSGTDFTLNIHPVEEEDAATYYCQHSRELPFTFGSGTKLEIK

SEQ ID NO: 6973 - protein, 112 aa, Artificial Sequence
  source: /note="Description of Artificial Sequence: Synthetic polypeptide"
DIVMSQSPSSLAVSAGEKVTMSCKSSQSLLNSSTRKNFLAWYQQKPGQSPKLLIYWASTRESGVPDRFTGSGSGTDFTLTISSVQAEDLAVYYCKQSYNRYTFGGGTKLEIK

SEQ ID NO: 6974 - protein, 107 aa, Artificial Sequence
  source: /note="Description of Artificial Sequence: Synthetic polypeptide"
DIVMTQSPATLSVTPGDRVSLSCRASQSISDYLHWYQQKSHESPRLLIKYASQSISGIPSRFSGSGSGSDFTLSINSVEPEDVGVYYCQNGHNFPRTFGGGTKLEIK

SEQ ID NO: 6975 - protein, 112 aa, Artificial Sequence
  source: /note="Description of Artificial Sequence: Synthetic polypeptide"
DIVMSQSPSSLAVSAGEKVTMNCKSSRSLLNSRIRKNYLAWYQQKPGQSPKLLIYWASTRESGVPDRFTGSGSGTDFTLTISSVQAEDLAVYYCKQSYNLLTFGAGTKLELK

SEQ ID NO: 6976 - protein, 106 aa, Artificial Sequence
  source: /note="Description of Artificial Sequence: Synthetic polypeptide"
DIRMTQSPSLLSASVGDRVTLNCKASQNIYNSLAWYQQKLGEGPKVLIFNANSLQTGIPSRFSGSGSGTDFTLTISSLQPEDFATYFCQQFYSGYTFGAGTKLELK

SEQ ID NO: 6977 - protein, 106 aa, Artificial Sequence
  source: /note="Description of Artificial Sequence: Synthetic polypeptide"
DIQVTQSPSLLSASVGDRVTLNCKASQNIYNSLAWYQQKLGEGPKVLIFNANSLQTGIPSRFSGSGSGTDFTLTISSLQPEDFATYFCQQFYSGYTFGAGTKLELK

SEQ ID NO: 6978 - protein, 106 aa, Artificial Sequence
  source: /note="Description of Artificial Sequence: Synthetic polypeptide"
DIVLTQSPSLLSASVGDRVTLNCKASQNIYNSLAWYQQKLGEGPKVLIFNANSLQTGIPSRFSGSGSGTDFTLTISSLQPEDFATYFCQQFYSGYTFGAGTKLELK

SEQ ID NO: 6979 - protein, 106 aa, Artificial Sequence
  source: /note="Description of Artificial Sequence: Synthetic polypeptide"
DIRVTQSPSLLSASVGDRVTLNCKGSQNIYKSLAWFRLKRGEAPKLLIYDANSLQTGIPSRFSGSGSGTDFTLTITSLQPEDVATYFCQQYYSGYTFGAGTKLELK

SEQ ID NO: 6980 - protein, 106 aa, Artificial Sequence
  source: /note="Description of Artificial Sequence: Synthetic polypeptide"
DIQVTQSPSLLSASVGDRVTLNCKGSQNIYKSLAWFRLKRGEAPKLLIYDANSLQTGIPSRFSGSGSGTDFTLTITSLQPEDVATYFCQQYYSGYTFGAGTKLELK

SEQ ID NO: 6981 - protein, 112 aa, Artificial Sequence
  source: /note="Description of Artificial Sequence: Synthetic polypeptide"
DIVMTQSPDSLAVSLGERATINCKSSRSLLNSRIRKNYLAWYQQKPGQPPKLLIYWASTRESGVPDRFSGSGSGTDFTLTISSLQAEDVAVYYCKQSYNLLTFGQGTKVEIK

SEQ ID NO: 6982 - protein, 112 aa, Artificial Sequence
  source: /note="Description of Artificial Sequence: Synthetic polypeptide"
DIVMTQSPDSLAVSLGERATINCKSSRSLLNSRIRKNYLAWYQQKPGQPPKLLIYWASTRESGVPDRFTGSGSGTDFTLTISSLQAEDVAVYYCKQSYNLLTFGQGTKVEIK

SEQ ID NO: 6983 - protein, 113 aa, Artificial Sequence
  source: /note="Description of Artificial Sequence: Synthetic polypeptide"
DIVMTQSPDSLAVSLGERATINCKSSQSILYSSDNKNYLAWYQQKPGQPPKLLIYWASTRESGVPDRFSGSGSGTDFTLTISSLQAEDVAVYYCQQYYNLPWTFGQGTKVEIK

SEQ ID NO: 6984 - protein, 106 aa, Artificial Sequence
  source: /note="Description of Artificial Sequence: Synthetic polypeptide"
DIQMTQSPSSLSASVGDRVTITCKGSQNIYKSLAWFQQKPGKVPKLLIYDANSLQTGIPSRFSGSGSGTDFTLTISSLQPEDVATYYCQQYYSGYTFGGGTKVEIK

SEQ ID NO: 6985 - protein, 106 aa, Artificial Sequence
  source: /note="Description of Artificial Sequence: Synthetic polypeptide"
DIQMTQSPSSLSASVGDRVTITCKGSQNIYKSLAWFQLKPGKVPKLLIYDANSLQTGIPSRFSGSGSGTDFTLTISSLQPEDVATYYCQQYYSGYTFGGGTKVEIK

SEQ ID NO: 6986 - protein, 106 aa, Artificial Sequence
  source: /note="Description of Artificial Sequence: Synthetic polypeptide"
DIQMTQSPSSLSASVGDRVTINCKGSQNIYKSLAWFQQKPGKVPKLLIYDANSLQTGIPSRFSGSGSGTDFTLTISSLQPEDVATYYCQQYYSGYTFGGGTKVEIK

SEQ ID NO: 6987 - protein, 107 aa, Artificial Sequence
  source: /note="Description of Artificial Sequence: Synthetic polypeptide"
DIQMTQSPSSLSASVGDRVTITCRASQGISNYLAWYQQKPGKVPKLLIYAASTLQSGVPSRFSGSGSGTDFTLTISSLQPEDVATYYCQKYNSAPPLFGGGTKVEIK

SEQ ID NO: 6988 - protein, 106 aa, Artificial Sequence
  source: /note="Description of Artificial Sequence: Synthetic polypeptide"
DIRMTQSPSLLSASVGDRVTLNCKASQNIYNSLAWYQQKLGEGPKVLIPNANSLQTGIPSRFSGSGSGTDFTLTISSLQPEDFATYFCQQFYSGYTFGAGTKLELK

SEQ ID NO: 6989 - protein, 106 aa, Artificial Sequence
  source: /note="Description of Artificial Sequence: Synthetic polypeptide"
DIQMTQSPSSLSASVGDRVTITCKASQNIYNSLAWYQQKPGKAPKVLIFNANSLQTGIPSRFSGSGSGTDFTLTISSLQPEDFATYYCQQFYSGYTFGQGTKLEIK

SEQ ID NO: 6990 - protein, 106 aa, Artificial Sequence
  source: /note="Description of Artificial Sequence: Synthetic polypeptide"
DIQMTQSPSSLSASVGDRVTITCKASQNIYNSLAWYQQKPGKAPKVLIFNANSLQTGVPSRFSGSGSGTDFTLTISSLQPEDFATYYCQQFYSGYTFGQGTKLEIK

SEQ ID NO: 6991 - protein, 106 aa, Artificial Sequence
  source: /note="Description of Artificial Sequence: Synthetic polypeptide"
DIQMTQSPSSLSASVGDRVTINCKASQNIYNSLAWYQQKPGKAPKVLIFNANSLQTGIPSRFSGSGSGTDFTLTISSLQPEDFATYYCQQFYSGYTFGQGTKLEIK

SEQ ID NO: 6992 - protein, 107 aa, Artificial Sequence
  source: /note="Description of Artificial Sequence: Synthetic polypeptide"
DIQMTQSPSSLSASVGDRVTITCRASQSISSYLNWYQQKPGKAPKLLIYAASSLQSGVPSRFSGSGSGTDFTLTISSLQPEDFATYYCQQSYSTPRSFGQGTKLEIK

SEQ ID NO: 6993 - protein, 113 aa, Artificial Sequence
  source: /note="Description of Artificial Sequence: Synthetic polypeptide"
DIVMTQSPSSLAVSLGERVTINCKSSRSLLNSRIRKNYLAWYQQKPGQSPKLLIYWASTRESGVPDRFSGSGSGTDFTLTISSLQAEDVAVYYCKQSYNLLTFGQGTKVEIKR

SEQ ID NO: 6994 - protein, 113 aa, Artificial Sequence
  source: /note="Description of Artificial Sequence: Synthetic polypeptide"
DIVMSQSPSSLAVSAGEKVTMSCKSSQSLLNSRTRKNYLAWYQQKPGQSPKLLIYWASTRESGVPDRFTGSGSGTDFTLTISSVQAEDLAVYYCKQSYNLYTFGGGTKLEIKR

SEQ ID NO: 6995 - protein, 114 aa, Artificial Sequence
  source: /note="Description of Artificial Sequence: Synthetic polypeptide"
DIVMTQSPDSLAVSLGERATINCKSSQSAIYRSNNKNYLAWYQQKPGQPPKLLIYWASTRESGVPDRFSGSGSGTDFTLTISSVQAEDVAVYYCQQYSRIPLTFGGGTKVEIKR

SEQ ID NO: 6996 - protein, 112 aa, Artificial Sequence
  source: /note="Description of Artificial Sequence: Synthetic polypeptide"
DIVMTQSPDSLPVSLGERATINCKSSLTVLSTANHKNHLAWYQQKPGQPPKLLIYWASLRASGVPDRFTGSGSGTDFTLTISALQAEDVAVYYCQQFYSTPTFGQGTRLEIK

SEQ ID NO: 6997 - protein, 106 aa, Homo sapiens
DIQMTQSPSSLSASVGDRVTITCQASQDISDYLNWYQQKPGKAPKLLIYDESNLETGVPSRFSGSGSGTDFTFTISSLQPEDIGTYYCQQYDNLLTFGPGTKVDIK

SEQ ID NO: 6998 - protein, 113 aa, Homo sapiens
DIVMTQTPLSLPVTPGEPASISCRSSQSLLDSDDGNTYLDWFLQKPGQSPQLLIYTLSYRASGVPDRFSGSGSGTDFTLKISRVEADDVGVYYCMQRIEFPFTFGQGTKLEIK

SEQ ID NO: 6999 - protein, 113 aa, Homo sapiens
DIVMTQSPDSLAVSLGERATINCKSSQSVLYSSNKKNYLTWYQQKVGQPPKLLIYWASTRESGVPDRFSGSGSGTDFTLTISSLQAEDVAVYYCQQYYSTPFTFGGGTKVEIK

SEQ ID NO: 7000 - protein, 107 aa, Homo sapiens
EIVLTQSPGTLSLSPGERATLSCRASQSVSSSYLAWYQQKPGQAPRLLIYGASSRATGIPDRFSGSGSGTDFTLTISRLEPEDFAVYYCQQYGSSLTFGGGTKVEIK

SEQ ID NO: 7001 - protein, 112 aa, Homo sapiens
DIVMTQSPLSLPVTPGEPASISCRSSQSLLHSNGYNYLEWYLQKPGQSPQLLIYLGSNRASGVPDRFSGSGSGTDFTLKISRVEAEDVGVYYCMQALQTPLTFGGGTKVEIK

SEQ ID NO: 7002 - protein, 107 aa, Homo sapiens
DIQMTQSPSSVSASVGDRVTITCRASPGISSWLAWYQQKPEKAPKLLIYAASSLQSGVPSRFSGSGSGTDFTLTISSLQPEDFATYYCQQAYSFPYTFGQGTKLEIK

SEQ ID NO: 7003 - protein, 113 aa, Homo sapiens
DIVMTQSPDSLAVSLGERATINCKSSQSVLYSSNNKNYLAWYQQKPGQPPKLLIFWASTRDSGVPDRFSGSGSGTDFTLTISSLQAEDVAVYYCQQYYSTPLTFGGGTKVEIK

SEQ ID NO: 7004 - protein, 106 aa, Homo sapiens
DIQMTQSPSTLSASVGDRVTITCRASQSISSWLAWYQQKPGKAPKLLIYMASSLESGVPSRFSGSGSGTEFTLTISSLQPDDFATYYCQQYNSYWTFGQGTKVEIK

SEQ ID NO: 7005 - protein, 107 aa, Homo sapiens
DIQMTQSPSSLSASVGDRVTITCQASQDISDYLNWYQQKPGKAPKLLIYDASNLETGVPSRFSGSGSGTDFTFTISSLQPEDIATYYCQQYDNLPPTFGGGTKVEIK

SEQ ID NO: 7006 - protein, 107 aa, Homo sapiens
AIRMTQSPSSFSASTGDRVTITCRASQGISSYLAWYQQKPGKAPKLLIYAASTLQSGVPSRFSGSGSGTDFTLTISCLQSEDFATYYCQQYYSYPFTFGPGTKVDIK

SEQ ID NO: 7007 - protein, 112 aa, Homo sapiens
DIVMTQSPLSLPVTPGEPASISCRSSQSLLYSNGYNYLDWYLQKPGQSPQLLIYLGSNRASGVPDRFSGSGSGTDFTLKISRVEAEDVGVYYCMQALQTPLTFGGGTKVEIK

SEQ ID NO: 7008 - protein, 106 aa, Homo sapiens
DIQMTQSPSTLSASVGDRVTITCRASQSISSWLAWYQRKPGKAPKLLIYKASTLESGVPSRFSGSGSGTEFTLTISSLQPDDFATYYCQQFNSYWTFGQGTKVEIK

SEQ ID NO: 7009 - protein, 106 aa, Homo sapiens
DIQMTQSPSTLSASVGDRVTITCRASQSISSWLAWYQQKPGKAPKLLIYKASSLESGVPSRFSGSGSGTEFTLTISSLQPDDFATYYCQQYNSYWTFGQGTKVEIK

SEQ ID NO: 7010 - protein, 113 aa, Homo sapiens
DIVMTQTPLSLPVTPGEPASISCRSSQSLLDSDDGNTYLDWYLQKPGQSPQLLIYTLSYRASGVPDRFSGSGSGTDFTLKISRVEAEDVGVYYCMQRIEFPSTFGQGTRLEIK

SEQ ID NO: 7011 - protein, 106 aa, Homo sapiens
DIQMTQSPSTLSASVGDRVTITCRASQSISDWLAWYLQKPGKAPKLLIYKASSLESGVPSRFSGSGSGTAFTLTISSLQPDDFATYYCQQYNSHWTFGQGTKVEIK

SEQ ID NO: 7012 - protein, 108 aa, Homo sapiens
EIVLTQSPGTLSLSPGERATLSCRASQSVSSTYLAWYQQRPGQAPRLLIYGASSRATGIPDRFSGSGSGTDFTLTISRLEPEDFAVYYCQQYGSSPYTFGQGTKLEIK

SEQ ID NO: 7013 - protein, 107 aa, Homo sapiens
DIQMTQSPSSLSASVGDRVTITCQASQDISNYLNWYQQKPGKAPKLLIYDASNLETGVPSRFSGSGSGTDFTFTISSLQPEDIATYYCQQYDNLPLTFGGGTKVEIK

SEQ ID NO: 7014 - protein, 108 aa, Homo sapiens
EIVLTQSPGTLSLSPGERATLSCRASQSVSSSYLAWYQQKPGQAPRLLIYGASSRATGIPDRFSGSGSGTDFTLTISRLEPEDFAVYYCQQYGSSPYTFGQGTKLEIK

SEQ ID NO: 7015 - protein, 113 aa, Homo sapiens
DIVMTQSPDSLAVSLGEGATINCKSSQSVLYSSNNKNYLAWYQQKPGQPPKLLIYWASTRESGVPDRFSGSGSGTDFTLTISSLQAEDEAVYYCQQYYYTPYTFGQGTKLEIK

SEQ ID NO: 7016 - protein, 113 aa, Homo sapiens
DIVMTQSPDSLAVSLGERATINCKSSQSVLYSSNNKNYLSWYQQKPGQPPKLLIYWASTRESGVPDRFSGSGSGTDFTLTISSLQAEDVAVYYCQQYYSTPLTFGGGTKVEIK

SEQ ID NO: 7017 - protein, 108 aa, Homo sapiens
EIVLTQSPGTLSLSPGERATLSCRASQSVSSSYLAWYQQKPGQAPRLLIYGASSRATGIPDRFSGSGSGTDFTLTISRLEPEDFAVYYCQQYGSSLFTFGPGTKVDIK

SEQ ID NO: 7018 - protein, 113 aa, Homo sapiens
DIVMTQSPDSLAVSLGERATINCKSSQSVLYSSNNKNYLAWYQQKPGQPPKVLIYWASIRESGVSDRFSGSGSGTDFTLTISSLQAEDVAVYYCQQYYSTPYTFGQGTKLEIK

SEQ ID NO: 7019 - protein, 113 aa, Homo sapiens
DIVMTQSPDSLAVSLGERATINCKSSQTVLYSSDNKNYLAWYQQKPGQPPKLLIYWASTRESGVPDRFSGSGSGTDFTLTISSLQAEDVAVYYCQQYYSTPRTFGQGTKVEIK

SEQ ID NO: 7020 - protein, 108 aa, Homo sapiens
EIVLTQSPGTLSLSPGERATLSCRASQSISSSYLAWYQQKPGQAPRLLIYGASSRATGIPDRFSGSGSGTDFTLTISRLEPEDFAVYYCQQYGSSPYTFGQGTKLEIK

SEQ ID NO: 7021 - protein, 106 aa, Homo sapiens
DIQMTQSPSTLSASVGDRVTITCRASQSISSWLAWYQQKPGKAPKLLIYKASSLESGVPSRFSGSGSGTEFTLTVSSLQPDDFATYYCQQYNSYWTFGQGTKVEIK

SEQ ID NO: 7022 - protein, 107 aa, Homo sapiens
DIQLTQSPSFLSASVGDRVTITCRASQGISSYLAWYQQKPGKAPKLLIYAASTLQSGVPSRFSGSGSGTEFTLTISSLQPEDFATYYCQQLNTYPRTFGQGTKVEIK

SEQ ID NO: 7023 - protein, 107 aa, Homo sapiens
DIQMTQSPSSLSASVGDRVTITCRASQGFSNYLAWYQQKPGKVPKLLIYAASTLQSGVPSRFSGSGSGTDFTLTISSLQPEDVATYYCQKYNSAPLTFGGGTKVEIK

SEQ ID NO: 7024 - protein, 112 aa, Homo sapiens
DIVMTQSPLSLPVTPGEPASISCRSSQSLLHSNGYNYLDWYLQKPGQSPQLLIYLDSNRASGVPDRFSGSGSGTDFTLRISRVEAEDVGVYYCMQTLQTPYTFGQGTKLEIK

SEQ ID NO: 7025 - protein, 112 aa, Homo sapiens
DIVMTQSPLSLPVTPGEPASISCRSSQSLLHSNGYNYLDWYLQKSGQSPQLLIYLGSNRASGVPDRFSGSGSGTDFTLKISRVEAEDVGVYYCMQALQTPLTFGGGTKVEIK

SEQ ID NO: 7026 - protein, 113 aa, Homo sapiens
DIVMTQSPDSLAVSLGERATINCKSSQSVLYSSNNKNYLTWYQQKPGQPPKLLIYWASTRESGVPDRFSGSGSGTDFTLTISSLQAEDVAVYYCQQYYSTPPTFGQGTKVEIK

SEQ ID NO: 7027 - protein, 107 aa, Homo sapiens
DIQMTQSPSSLSASVGDRVTITCQASQDISNYLNWYQQKPGKAPKLLIYDASNLETGVPSRFSGSGSGTDFTFTISSLQPEDIATYYCQQYDNLPITFGQGTRLEIK

SEQ ID NO: 7028 - protein, 113 aa, Homo sapiens
DIVMTQSPLSLPVTPGEPASISCRSSQSLLHSNGYNYLDWYLQKPGQSPQLLIYLGSNRASGVPDRFSGSGSGTDFTLKISRVEAEDVGVYYCMQALQTPPYTFGQGTKLEIK

SEQ ID NO: 7029 - protein, 113 aa, Homo sapiens
DIVMTQSPDSLAVSLGERATINCKSSQSVLYSSNNKNYLAWYQQKPGQPPKLLIYWASTRESGVPDRFSGSGSGTDFTLTISSLQAEDVAVYYCQQYYRTMYTFGQGTKLEIK

SEQ ID NO: 7030 - protein, 112 aa, Homo sapiens
DIVMTQSPLSLPVTPGEPASISCRSSQSLLHSNGYNYLDWSLQKPGQSPQLLIYLGSNRASGVPDRFSGSGSGTDFTLKISRVEAEDVGVYYCMQTLQIPYTFGQGTKLEIK

SEQ ID NO: 7031 - protein, 113 aa, Homo sapiens
DIVMTQTPLSLPVTPGEPASISCRSSQSLLDSDDGNTYLDWYLQKPGQSPQLLIYTLSYRASGVPDRFSGSGSGTDFTLKISRVEAEDVGVYYCMQRIEFPLTFGGGTKVEIK

SEQ ID NO: 7032 - protein, 113 aa, Homo sapiens
DIVMTQTPLSLPVTPGEPASISCRSSQSLLDSDDGNTYLDWYLQKPGQSPQLLIYTLSYRASGVPDRFSGSGSGTDFTLKISRVEAEDVGVYYCMQRIEFPITFGQGTRLEIK

SEQ ID NO: 7033 - protein, 113 aa, Homo sapiens
DIVMTQSPDSLAVSLGERATINCKSSQSVLYSSNNKNYLAWYQQKPGQPPKLLIYWASTRESGVPDRFSGSGSGTDFTLTISSLQAEDVAVYYCQQYYSSPWTFGQGTKELWL

SEQ ID NO: 7034 - protein, 107 aa, Homo sapiens
DIQMTQSPSSVSASVGDRVTITCRASQGISSWLAWYQQKPGKAPKLLIYAASSLQSGVPSRFSGSGSGTDFTLTISSLQPEDFATYYCQQANTFPFTVGPGTKVDIK

SEQ ID NO: 7035 - protein, 112 aa, Homo sapiens
DIVMTQSPLSLPVTPGEPASISCRSSQSLLHSNGYNYLDWYLQKPGQSPQLLIYLGSNRASGVPDRFSGSGSGTDFTLKISRVEAEDVGVYYCLQALQTPLTFGGGTKVEIK

SEQ ID NO: 7036 - protein, 113 aa, Homo sapiens
DIVMTQTPLSLPVTPGEPASISCRSSQSLLDSDDGNTYLDWYLQKPGQSPQLLIYTLSYRASGVPDRFSGSGSGTDFTLKISRVEAEDVGVYYCMQRIEFPYTFGQGTKLEIK

SEQ ID NO: 7037 - protein, 112 aa, Homo sapiens
DIVMTQSPLSLPVTPGEPASISCRSSQSLLHSNGYNYLDWYLQKPGQSPQLLIYLASNRASGVPDRFSGSGSGTDFTLKISRVEAEDVGVYYCMQALQTPLILGGGTKVEIK

SEQ ID NO: 7038 - protein, 108 aa, Homo sapiens
EIVLTQSPGTLSLPPGERATLSCRASQNVSSTYLAWYHQKPGQAPRLLIYGASSRATGIPDRFSGSGSGTDFTLTISRLEPEDFAVYYCQQYGSSPRTFGQGTKVEIK

SEQ ID NO: 7039 - protein, 108 aa, Homo sapiens
EIVLTQSPGTLSLSPGERATLSCRASQSVSSSYLAWYQQKPGQAPRLLIYGASSRATGIPDRFSGSGSGTDFTLTISRLEPEDFAVYYCQQYGNSPLTFGGGTKVEIK

SEQ ID NO: 7040 - protein, 112 aa, Homo sapiens
DIVMTQSPISLPVTPGEPASISCRSSQSLLYSNGYNYLDWYLQKPGQSPQLLIYLGSNRASGVPDRFSGSGSGTDFTLKISRVEAEDVGVYYCMQALQTPWTFGQGTKVEIK

SEQ ID NO: 7041 - protein, 110 aa, Homo sapiens
QSVLTQPPSASGTPGQRVTISCSGSSSNIGSNTVNWYQQLPGTAPKLLIYSNNQRPSGVPDRFSGSKSGTSASLAISGLQSEDEADYYCAAWDDSLNGPVFGGGTKLTVL

SEQ ID NO: 7042 - protein, 110 aa, Homo sapiens
QSVLTQPPSASGTPGQRVTISCSGSSSNIGSNTVNWYQQLPGTAPKLLIYSNNQRPSGVPDRFSGSKSGTSASLAISGLQSEDEADYDCAAWDDSLNGPVFGGGTKLTVL

SEQ ID NO: 7043 - protein, 110 aa, Homo sapiens
QSVLTQPPSASGTPGQRVTISCSGSSSNIGSNTVNWYQQLPGTAPKLLIYSNNQRPSGVPGRFSGSKSGTSASLAISGLQSDDEADYYCAAWDDSLNGPVFGGGTKLTVL

SEQ ID NO: 7044 - protein, 110 aa, Homo sapiens
QSVLTQPPSASGTPGQRVTISCSGSSSNIGSNSVNWFQQLPGTAPKLLIYSNNQRPSGVPDRFSGSKSGTSASLAISGLQSEDEADYYCAAWDDSLNGPVFGGGTKLTVL

SEQ ID NO: 7045 - protein, 110 aa, Homo sapiens
QSVLTQPPSASGTPGQRVTISCSGSSSNIGSNAVNWYQQLPGTAPKLLIYSNNQRPSGVPDRFSGSKSGTSASLAISGLQSEDEADYYCAAWDDSLNGPVFGGGTKLTVL

SEQ ID NO: 7046 - protein, 110 aa, Homo sapiens
QSVLTQPPSASGTPGQRVTISCSGSSSNIGSNTVNWYQQFPGTAPKLLIYSNNQRPSGVPDRFSGSKSGTSASLAISGLQSEDEADYYCAAWDDSLNGVVFGGGTKLTVL

SEQ ID NO: 7047 - protein, 110 aa, Homo sapiens
QSVLTQPPSASGTPGQRVTISCSGSSSNIGNNAVNWYQQLPGTAPKLLIYSNNQRPSGVPDRFSGSKSGTSASLAISGLQSEDEADYYCAAWDDSLNGPVFGGGTKLTVL

SEQ ID NO: 7048 - protein, 110 aa, Homo sapiens
QSVLTQPPSASGTPGQRVTISCSGSSSNIGSNTVNWYQQLPGTAPNLLIYSNNQRPSGVPDRFSGSKSGTSASLAISGLQSEDEADYFCAAWDDSLNGVVFGGGTKLTVL

SEQ ID NO: 7049 - protein, 110 aa, Homo sapiens
QSVLTQPPSASGTPGQRVTISCSGSSSNIGSNTVNWYQQLPGTAPKLLIYSNNQRPSGVPDRFSGSKSGTSASLAISGLQSEDEADYYCAAWDDSLNGPVFGGGTNLTVL

SEQ ID NO: 7050 - protein, 110 aa, Homo sapiens
QSVLTQPPSASGTPGQRVTISCSGGSSNIGSNTVNWYQQLPGTAPKLLIYSNNQRPSGVPDRFSGSKSGTSASLAISGLQSEDEADYYCAAWDDSLNGPVFGGGTKLTVL

SEQ ID NO: 7051 - protein, 110 aa, Homo sapiens
QSVLTQSPSASGTPGQRVTISCSGSSSNIGSNTVNWYQQLPGTAPKLLIYSNNQRPSGVPDRFSGSKSGTSASLAISGLQSEDEADYYCAAWDDSLNGYVFGTGTKVTVL

SEQ ID NO: 7052 - protein, 110 aa, Homo sapiens
QSVLTQPPSASGTPGQRVTLSCSGSSSNIGSNTVNWYQQLPGTAPKLLIYSNNQRPSGVPDRFSGSKSGTSASLAISGLLSEDEADYYCAAWHDSLNGVVFGGGTKLTVL

SEQ ID NO: 7053 - protein, 109 aa, Homo sapiens
QSVLTQPPSASGTPGQRVTISCSGSSSNIGSNTVNWYQQFPGTAPKLLIYSNNQRPSGVPDRFSGSKSGTSASLAISGLQSEDEADYYCAAWDDSLNGVFGGGTKLTVL

SEQ ID NO: 7054 - protein, 110 aa, Homo sapiens
QSVLTQPPSASGTPGQRVTISCSGSSSNIGSNTVNWFQQLPGTAPKLLIYSNNQRPSGVPDRFSGSKSGTSASLAISGLQSEDEADYYCAAWDDSLNGVVFGGGTKLTVL

SEQ ID NO: 7055 - protein, 110 aa, Homo sapiens
QSVLTQPPSASGTPGQRVTISCSGSSSNIGSNTVNWYQQLPGTAPKLLIYSNNQRPSGVPDRFSGSKSGTSASLAISGLQSEDEADYYCAAWDDSLNGVVFGGGTKLTVL

SEQ ID NO: 7056 - protein, 111 aa, Homo sapiens
QSALTQPASVSGSPGQSITISCTGTSSDVGSYNLVSWYQQHPGKAPKLMIYEGSKRPSGVSNRFSGSKSGNTASLTISGLQAEDEADYYCCSYAGSSTFVVFGGGTKLTVL

SEQ ID NO: 7057 - protein, 110 aa, Homo sapiens
QSVLTQPPSASGTPGQRVTISCSGSSSNIGSNTVNWYQQVPGTAPKLLIYSNNQRPSGVPDRFSGSKSGTSASLAISGLQSEDEADYYCAAWDDSLNGPVFGGGTKLTVL

SEQ ID NO: 7058 - protein, 110 aa, Homo sapiens
QSVLTQPPSASGTPGQRVTISCSGSSSNIGSNTVNWYQQLPGTAPKLLIYSNNQRPSGVPDRFSGSKSGTSASLAISGLQSEDEADYYCAAWDDSLNGYVFGTGTKVTVL

SEQ ID NO: 7059 - protein, 110 aa, Homo sapiens
QSVLTQPPSASGTPGQRVTISCSGSSSNIGSNTVNWYQQLPGTAPKLLIYSNNQRPSGVPDRFSGSKSGTSASLAISGLQSEDEADYFCAAWHDSLNGRVFGGGTKLTVL

SEQ ID NO: 7060 - protein, 110 aa, Homo sapiens
QSVLTQPPSASGTPGQRVTISCSGSSSNIGSNTVNWYQQLPGTAPKLLIYSNNQRPSGVPDRFSGSKSGTSASLAISGLQSEDEADYSCAAWDDSLNGPVFGGGTKLTVL

SEQ ID NO: 7061 - protein, 110 aa, Homo sapiens
QSVLTQPPSASGTPGQRVTISCSGSSSNIGSNSVNWYQQLPGTAPKLLIYSNNQRPSGVPDRFSGSKSGTSASLAISGLQSEDEADYFCAAWDDSLNGPVFGGGTKLTVL

SEQ ID NO: 7062 - protein, 110 aa, Homo sapiens
QSVLTQPPSASGTPGQRVTISCSGSSSNIGSNYVYWYQQLPGTAPKLLIYSNNQRPSGVPDRFSGSKSGTSASLAISGLRSEDEADYYCAAWDDSLSGLVFGGGTKLTVL

SEQ ID NO: 7063 - protein, 110 aa, Homo sapiens
QSVLTQPPSASGTPGQRVTISCSGSSSNIGSNAVNWYQQLPGTAPKLLIYSNNQRPSGVPDRFSGSKSGTSASLAISGLQSEDEADYYCAAWDDSLSGVVFGGGTKLTVL

SEQ ID NO: 7064 - protein, 110 aa, Homo sapiens
QSVLTQPPSASGTPGQRVTISCSGSSSNIGSNTVNWYQLLPGTAPKLLIYSNNQRPSGVPDRFSGSQSGTSASLAISGLQSEDEADYYCAAWDDSLNGPVFGGGTKLTVL

SEQ ID NO: 7065 - protein, 110 aa, Homo sapiens
QSVLTQPPSASGTPGQRVTISCSGSSSNIGSNYVYWYQQLPGTAPKLLISSNNQRPSGVPDRFSGSKSGTSASLAISGLRSEDEADYYCAAWDDSLSGVVFGGGTKLTVL

SEQ ID NO: 7066 - protein, 110 aa, Homo sapiens
QSVLTQPPSASGTPGQRFTISCSGSSSNIGSNTVNWYQQLPGTAPKLLIYSNNQRPSGVPDRFSGSKSGTSASLASSGLQSEDEADYYCAAWDDRLNGPVFGGGTKLTVL

SEQ ID NO: 7067 - protein, 110 aa, Homo sapiens
QSVLTQPPSASGTPGQRVTISCSGSSSNIGSNTVNWYQQFPGTAPKLLIYSNNQRPSGVPDRFSGSKSGTSASLAISGLQSEDEADYYCAAWDDSLNGPVFGGGTKLTVL

SEQ ID NO: 7068 - protein, 110 aa, Homo sapiens
QSVLTQPPSASGTPGQRVTISCSGSSFNIGGNTVNWYQQLPGTAPKLLIYSNNQRPSGVPDRFSGSKSGTSASLAISGLQSEDEADYYCAAWDDSLNGPVFGGGTKLTVL

SEQ ID NO: 7069 - protein, 110 aa, Homo sapiens
QSVLTQPPSASGTPGQRVTISCSGSSSNIGSNTVTWYQQLPGTAPKLLIYSNNQRPSGVPDRFSGSKSGTSASLAISGLQSEDEADYYCAAWDDSLSGPVFGGGTKLTVL

SEQ ID NO: 7070 - protein, 109 aa, Homo sapiens
SSELTQDPAVSVALGQTVRITCQGDSLRSYYASWYQQKPGQAPILVIYGKNNRPSGIPDRFSGSSSGNTASLTITGAQAEDEADYYCNSQDNSGNHLVVFGRGTKLTVL

SEQ ID NO: 7071 - protein, 110 aa, Homo sapiens
QSVLTQPPSASGTPGQRVTISCSGSNSNIGSNTVNWYQQLPGTAPRLLIYSNNQRPSGVPDRFSGSKSGTSASLAISGLQSEDEADSYCAAWYDSLNGPVFGGGTKLTVL

SEQ ID NO: 7072 - protein, 110 aa, Homo sapiens
QSVLTQPPSASGTPGQRVTISCSGSSSNIGSNTVNWYQHLPGTAPKLLIYSNNQRPSGVPDRFSGSKSGTSASLAISGLQSEDEADYFCAAWDDSLNGPVFGGGTRVTVL

SEQ ID NO: 7073 - protein, 110 aa, Homo sapiens
QSVLTQPPSASGTPGQRVTISCSGSSSNIGSNTVNWYQQLPGTAPKLLIYSNNQRPSGVPDRFSGSKSGTSGSLAISGLKSEDEADYYCAAWDDSLNGVVFGGGTKLTVL

SEQ ID NO: 7074 - protein, 110 aa, Homo sapiens
QSVLTQPPSASGTPGQRVTISCSGSSSNIGSNYVYWYQQLPGTAPKLLIYSNNQRPSGVPDRFSGSKSGTSASLAISGLRSEDEADYYCAAWDDSLSGVVFGGGTKLTVL

SEQ ID NO: 7075 - protein, 110 aa, Homo sapiens
QSVLTQPPSVSGTPGQRVTISCSGSSSNIGSNTVNWYQQLPGTAPKLLIYSNNQRPSGVPDRFSGSKSGTSASLAISGLQSEDEADYDCAAWDDSLNGPVFGGGTKLTVL

SEQ ID NO: 7076 - protein, 110 aa, Homo sapiens
QSVLTQPPSASGTPGQRVTISCSGSSSNIGSNTVNWYQQLPGTAPKLLIYSNNQRPSGVPDRFSGSKSGTSASLAISGLQSEDEADYYCAAWDDSLNGWVFGGGTKLTVL

SEQ ID NO: 7077 - protein, 108 aa, Homo sapiens
SYELTQPHSVSVATAQMARITCGGNNIGSKAVHWYQQKPGQDPVLVIYSDSNRPSGIPERFSGSNPGNTATLTISRIEAGDEADYYCQVWDSSSDHRVFGGGTKLTVL

SEQ ID NO: 7078 - protein, 110 aa, Homo sapiens
QSVLTQPPSASGTPGQRVTISCSGSSSNIGSNTVNWYQQLPGTAPKLLIYSNNQRPSGVPDRFSGSKSGTSASLAISGLQSEDEADYYCAPWDDSLNGVVFGGGTKLTVL

SEQ ID NO: 7079 - protein, 110 aa, Homo sapiens
QSVLTQPPSASGTPGQRVTISCSGSSSNIGSNTVNWYQQVPGTAPKLLIYSNNQRPSGVPDRFSGSKSGTSASLAISGLQSEDEADYYCAAWDDSLNSWVFGGGTMLTVL

SEQ ID NO: 7080 - protein, 110 aa, Homo sapiens
QSVLTQPPSASGTPGQRVTISCSGSSSNIGSNTVNWYQQLPGTAPKLLIYSNNQRPSGVPDRFSGSKSGTSASLAISGLQSEDEADYYCAARDDSLNGVVFGGGTKLTVL

SEQ ID NO: 7081 - protein, 110 aa, Homo sapiens
QSVLTQPPSASGTPGQRVTISCSGTSSNIGSNTVHWYQQLPGTAPKLLIYSNNQRPSGVPDRFSGSKSGTSASLAISGLQSEDEADYYCAAWDDSLNGPVFGGGTKLTVL

SEQ ID NO: 7082 - protein, 110 aa, Homo sapiens
QSVLTQPPSASGTPGQRVTISCSGSSSNIGSNTVNWYQRVPGTAPKLLIYSNDQRPSGVPDRFSGSKSGTSASLAISGLQSEDEADYYCAAWDDSLNGVVFGGGTKLTVL

SEQ ID NO: 7083 - protein, 112 aa, Artificial Sequence
  source: /note="Description of Artificial Sequence: Synthetic polypeptide"
ELQMTQSPSSLSASVGDRVTITCRSSQSLLHTYGSPYLNWYLQKPGQSPKLLIYKVSNRFSGVPSRFSGSGSGTDFTLTISSLQPEDFAVYFCSQGTHLPYTFGGGTKVEIK

SEQ ID NO: 7084 - protein, 332 aa, Artificial Sequence
  source: /note="Description of Artificial Sequence: Synthetic polypeptide"
DIQMTQSPSSLSASVGDRVTITCRASQDVNTAVAWYQQKPGKAPKLLIYSASFLYSGVPSRFSGSRSGTDFTLTISSLQPEDFATYYCQQHYTTPPTFGQGTKVEIKASTKGPELQMTQSPSSLSASVGDRVTITCRSSQSLLHTYGSPYLNWYLQKPGQSPKLLIYKVSNRFSGVPSRFSGSGSGTDFTLTISSLQPEDFAVYFCSQGTHLPYTFGGGTKVEIKRTVAAPSVFIFPPSDEQLKSGTASVVCLLNNFYPREAKVQWKVDNALQSGNSQESVTEQDSKDSTYSLSSTLTLSKADYEKHKVYACEVTHQGLSSPVTKSFNRGEC

SEQ ID NO: 7085 - protein, 338 aa, Artificial Sequence
  source: /note="Description of Artificial Sequence: Synthetic polypeptide"
DIQMTQSPSSLSASVGDRVTITCRASQDVNTAVAWYQQKPGKAPKLLIYSASFLYSGVPSRFSGSRSGTDFTLTISSLQPEDFATYYCQQHYTTPPTFGQGTKVEIKTVAAPSVFIFPPELQMTQSPSSLSASVGDRVTITCRSSQSLLHTYGSPYLNWYLQKPGQSPKLLIYKVSNRFSGVPSRFSGSGSGTDFTLTISSLQPEDFAVYFCSQGTHLPYTFGGGTKVEIKRTVAAPSVFIFPPSDEQLKSGTASVVCLLNNFYPREAKVQWKVDNALQSGNSQESVTEQDSKDSTYSLSSTLTLSKADYEKHKVYACEVTHQGLSSPVTKSFNRGEC

SEQ ID NO: 7086 - protein, 337 aa, Artificial Sequence
  source: /note="Description of Artificial Sequence: Synthetic polypeptide"
DIVLTQSPLSLAVSLGQPAIISCKASQSVSFAGTSLMHWYHQKPGQQPRLLIYRASNLEAGVPDRFSGSGSKTDFTLNISPVEAEDAATYYCQQSREYPYTFGGGTKLEIKRASTKGPELQMTQSPSSLSASVGDRVTITCRSSQSLLHTYGSPYLNWYLQKPGQSPKLLIYKVSNRFSGVPSRFSGSGSGTDFTLTISSLQPEDFAVYFCSQGTHLPYTFGGGTKVEIKRTVAAPSVFIFPPSDEQLKSGTASVVCLLNNFYPREAKVQWKVDNALQSGNSQESVTEQDSKDSTYSLSSTLTLSKADYEKHKVYACEVTHQGLSSPVTKSFNRGEC

SEQ ID NO: 7087 - protein, 343 aa, Artificial Sequence
  source: /note="Description of Artificial Sequence: Synthetic polypeptide"
DIVLTQSPLSLAVSLGQPAIISCKASQSVSFAGTSLMHWYHQKPGQQPRLLIYRASNLEAGVPDRFSGSGSKTDFTLNISPVEAEDAATYYCQQSREYPYTFGGGTKLEIKRTVAAPSVFIFPPELQMTQSPSSLSASVGDRVTITCRSSQSLLHTYGSPYLNWYLQKPGQSPKLLIYKVSNRFSGVPSRFSGSGSGTDFTLTISSLQPEDFAVYFCSQGTHLPYTFGGGTKVEIKRTVAAPSVFIFPPSDEQLKSGTASVVCLLNNFYPREAKVQWKVDNALQSGNSQESVTEQDSKDSTYSLSSTLTLSKADYEKHKVYACEVTHQGLSSPVTKSFNRGEC

SEQ ID NO: 7088 - protein, 335 aa, Artificial Sequence
  source: /note="Description of Artificial Sequence: Synthetic polypeptide"
DIQLTQSPSSLSASVGDRVTITCSVSSSISSNNLHWYQQKPGKAPKPWIYGTSNLASGVPSRFSGSGSGTDYTFTISSLQPEDIATYYCQQWSSYPYMYTFGQGTKVEIKASTKGPELQMTQSPSSLSASVGDRVTITCRSSQSLLHTYGSPYLNWYLQKPGQSPKLLIYKVSNRFSGVPSRFSGSGSGTDFTLTISSLQPEDFAVYFCSQGTHLPYTFGGGTKVEIKRTVAAPSVFIFPPSDEQLKSGTASVVCLLNNFYPREAKVQWKVDNALQSGNSQESVTEQDSKDSTYSLSSTLTLSKADYEKHKVYACEVTHQGLSSPVTKSFNRGEC

SEQ ID NO: 7089 - protein, 341 aa, Artificial Sequence
  source: /note="Description of Artificial Sequence: Synthetic polypeptide"
DIQLTQSPSSLSASVGDRVTITCSVSSSISSNNLHWYQQKPGKAPKPWIYGTSNLASGVPSRFSGSGSGTDYTFTISSLQPEDIATYYCQQWSSYPYMYTFGQGTKVEIKTVAAPSVFIFPPELQMTQSPSSLSASVGDRVTITCRSSQSLLHTYGSPYLNWYLQKPGQSPKLLIYKVSNRFSGVPSRFSGSGSGTDFTLTISSLQPEDFAVYFCSQGTHLPYTFGGGTKVEIKRTVAAPSVFIFPPSDEQLKSGTASVVCLLNNFYPREAKVQWKVDNALQSGNSQESVTEQDSKDSTYSLSSTLTLSKADYEKHKVYACEVTHQGLSSPVTKSFNRGEC

SEQ ID NO: 7090 - protein, 332 aa, Artificial Sequence
  source: /note="Description of Artificial Sequence: Synthetic polypeptide"
DIQMTQSTSSLSASLGDRVTISCSASQGINNYLNWYQQKPDGTVELLIYYTSTLQSGVPSRFSGSGSGTDYSLTISNLEPEDIGTYYCQQYSKLPRTFGGGTKLEIKASTKGPELQMTQSPSSLSASVGDRVTITCRSSQSLLHTYGSPYLNWYLQKPGQSPKLLIYKVSNRFSGVPSRFSGSGSGTDFTLTISSLQPEDFAVYFCSQGTHLPYTFGGGTKVEIKRTVAAPSVFIFPPSDEQLKSGTASVVCLLNNFYPREAKVQWKVDNALQSGNSQESVTEQDSKDSTYSLSSTLTLSKADYEKHKVYACEVTHQGLSSPVTKSFNRGEC

SEQ ID NO: 7091 - protein, 338 aa, Artificial Sequence
  source: /note="Description of Artificial Sequence: Synthetic polypeptide"
DIQMTQSTSSLSASLGDRVTISCSASQGINNYLNWYQQKPDGTVELLIYYTSTLQSGVPSRFSGSGSGTDYSLTISNLEPEDIGTYYCQQYSKLPRTFGGGTKLEIKTVAAPSVFIFPPELQMTQSPSSLSASVGDRVTITCRSSQSLLHTYGSPYLNWYLQKPGQSPKLLIYKVSNRFSGVPSRFSGSGSGTDFTLTISSLQPEDFAVYFCSQGTHLPYTFGGGTKVEIKRTVAAPSVFIFPPSDEQLKSGTASVVCLLNNFYPREAKVQWKVDNALQSGNSQESVTEQDSKDSTYSLSSTLTLSKADYEKHKVYACEVTHQGLSSPVTKSFNRGEC

SEQ ID NO: 7092 - protein, 337 aa, Artificial Sequence
  source: /note="Description of Artificial Sequence: Synthetic polypeptide"
DIQLTQSPSSLSASVGDRVTITCKASQSVDYEGDSFLNWYQQKPGKAPKLLIYAASNLESGVPSRFSGSGSGTDFTLTISSLQPEDFATYYCQQSNEDPLTFGQGTKVEIKRASTKGPELQMTQSPSSLSASVGDRVTITCRSSQSLLHTYGSPYLNWYLQKPGQSPKLLIYKVSNRFSGVPSRFSGSGSGTDFTLTISSLQPEDFAVYFCSQGTHLPYTFGGGTKVEIKRTVAAPSVFIFPPSDEQLKSGTASVVCLLNNFYPREAKVQWKVDNALQSGNSQESVTEQDSKDSTYSLSSTLTLSKADYEKHKVYACEVTHQGLSSPVTKSFNRGEC

SEQ ID NO: 7093 - protein, 343 aa, Artificial Sequence
  source: /note="Description of Artificial Sequence: Synthetic polypeptide"
DIQLTQSPSSLSASVGDRVTITCKASQSVDYEGDSFLNWYQQKPGKAPKLLIYAASNLESGVPSRFSGSGSGTDFTLTISSLQPEDFATYYCQQSNEDPLTFGQGTKVEIKRTVAAPSVFIFPPELQMTQSPSSLSASVGDRVTITCRSSQSLLHTYGSPYLNWYLQKPGQSPKLLIYKVSNRFSGVPSRFSGSGSGTDFTLTISSLQPEDFAVYFCSQGTHLPYTFGGGTKVEIKRTVAAPSVFIFPPSDEQLKSGTASVVCLLNNFYPREAKVQWKVDNALQSGNSQESVTEQDSKDSTYSLSSTLTLSKADYEKHKVYACEVTHQGLSSPVTKSFNRGEC

SEQ ID NO: 7094 - protein, 112 aa, Artificial Sequence
  source: /note="Description of Artificial Sequence: Synthetic polypeptide"
DIVLTQSPLSLAVSLGQPAIISCKASQSVSFAGTSLMHWYHQKPGQQPRLLIYRASNLEAGVPDRFSGSGSKTDFTLNISPVEAEDAATYYCQQSREYPYTFGGGTKLEIKR

SEQ ID NO: 7095 - protein, 112 aa, Artificial Sequence
  source: /note="Description of Artificial Sequence: Synthetic polypeptide"
DIVLTQSPLSLAVSLGQPAIISCKASQSVSFAGTSLMHWYHQKPGQQPRLLIYRASNLEAGVPDRFSGSGSKTDFTLTISPVEAEDAATYYCQQSREYPYTFGGGTKLEIKR

SEQ ID NO: 7096 - protein, 107 aa, Artificial Sequence
  source: /note="Description of Artificial Sequence: Synthetic polypeptide"
NIVMTQSPKSMSMSVGERVTLTCKASENVVTYVSWYQQKPEQSPKLLIYGASNRYTGVPDRFTGSGSATDFTLTISSVQAEDLADYHCGQGYSDPYTFGGGTKLEIK

SEQ ID NO: 7097 - protein, 112 aa, Artificial Sequence
  source: /note="Description of Artificial Sequence: Synthetic polypeptide"
DVVMTQTPLTLSVTIGQPASISCKSSQSLLDSDGETYLNWLLKRPGQSPKRLIYLVSKLDSGVPDRFTGSGSGTDFTLKISRVEAEDLGVYYCWQGTHFPQTFGGGTKLEIK

SEQ ID NO: 7098 - protein, 107 aa, Artificial Sequence
  source: /note="Description of Artificial Sequence: Synthetic polypeptide"
DIQMNQSPSSLSASLGDTITITCHASQNINVWLSWYQQKPGNIPKLLIYKASNLHTGVPSRFSGSGSGTGFTLTISSLQPEDIATYYCQQGQSYPWTFGGGTKLEIK

SEQ ID NO: 7099 - protein, 135 aa, Artificial Sequence
  source: /note="Description of Artificial Sequence: Synthetic polypeptide"
LLVTSLLLCELPHPAFLLIPDTELVLTQTPSSVSAAVGGTVTINCQSSPSLYKNNYLSWYQQKPGQPPKLLIYSASTLASGVPSRFKGSGSGTEYTLTISGVQCDDAATYYCLGGYSLSSDSPRAFGGGTEVVVK

SEQ ID NO: 7100 - protein, 134 aa, Artificial Sequence
  source: /note="Description of Artificial Sequence: Synthetic polypeptide"
LLVTSLLLCELPHPAFLLIPDTELVMTQTPSPVSAAVGGTVTINCQASQSISSSYLSWYQQKPGQPPKLLIYKASTRPSGVSSRFKGSGSGTQFTLTISGVQCADAATYYCLYGYYIDSGADNSFGGGTEVVVK

SEQ ID NO: 7101 - protein, 108 aa, Artificial Sequence
  source: /note="Description of Artificial Sequence: Synthetic polypeptide"
DIQMTQSPSSLSASVGDRVTITCRASQTISRYLNWYQQKPGKAPKLLIYAASSLQSGVSSRFSGSGSGTEFTLTISSLQPEDFATYFCQQTYSPPITFGQGTRLEIKR

SEQ ID NO: 7102 - protein, 112 aa, Artificial Sequence
  source: /note="Description of Artificial Sequence: Synthetic polypeptide"
NFMLTQPHSVSGSPGKTVTLSCTCSGGNIADAYVQWYQQRPGSAPRIVIYEDKQRPSGVPDRFSGSIDSSSNSASLTISGLRTEDEADYYCQSYDTNNFWVFGGGTKLTVLG

SEQ ID NO: 7103 - protein, 112 aa, Artificial Sequence
  source: /note="Description of Artificial Sequence: Synthetic polypeptide"
NFMLTQPHSVSESPGRTVSISCTRGSGSIADDYVQWYQQRPGGSPTIVIYEDNQRPSGVPDRFSGSIDTSSNSASLTISGLTTEDEAVYYCQSYDYRDHWVFGGGTQLTVLG

SEQ ID NO: 7104 - protein, 108 aa, Artificial Sequence
  source: /note="Description of Artificial Sequence: Synthetic polypeptide"
DIQMTQSPSSLSASVGDRVTITCQASQDIYTYLNWYQQKPGKAPMLVIHDTSNLETGAPSRFSGGGSGTDFSFTISSLQPEDFATYYCQQYDALPFTFGQGTKLEIKR

SEQ ID NO: 7105 - protein, 108 aa, Artificial Sequence
  source: /note="Description of Artificial Sequence: Synthetic polypeptide"
DIQMTQSPSSLSASVGDRVTIACRASQTISRYLNWYQQKPGKAPKLLIYAASSLQSGVSSRFSGSGSGTEFTLTISSLQPEDFATYFCQQTYSPPITFGQGTRLEIKR

SEQ ID NO: 7106 - protein, 118 aa, Artificial Sequence
  source: /note="Description of Artificial Sequence: Synthetic polypeptide"
DIQLTQSPSSLSASVGDRVTITCQASQDIDNYLNWFQQKPGKPPKLLISDASSLETGVPSRFSGSGSGTDFTFTISSLQPEDIATYYCQQYDNFPITFGQGTKLEIKRGQAGQGPDKT

SEQ ID NO: 7107 - protein, 108 aa, Artificial Sequence
  source: /note="Description of Artificial Sequence: Synthetic polypeptide"
EIVLTQSPSSLSASVGDRVTITCQASQDISNYLNWYQQKPGKAPKLLIYDASNLETGVPSRFIGGGSGTDFTLTISSLQPEDFATYYCQQHDSLPLSFGGGTKLEIKR

SEQ ID NO: 7108 - protein, 108 aa, Artificial Sequence
  source: /note="Description of Artificial Sequence: Synthetic polypeptide"
DIQMTQSPSFLSASVGDRVTITCRASQGISSYLAWYQQKPGKAPKLLIYDASNLETGVPSRFSGSGSGTDFTFTISSLQPEDIATYYCQQYDNLPLTFGGGTKLDIKR

SEQ ID NO: 7109 - protein, 108 aa, Artificial Sequence
  source: /note="Description of Artificial Sequence: Synthetic polypeptide"
EIVLTQSPSSLSASVGDRVTIACRASQTISRYLNWYQQKPGKAPKLLIYAASSLQSGVSSRFSGSGSGTEFTLTISSLQPEDFATYFCQQTYSPPITFGQGTRLEIKR

SEQ ID NO: 7110 - protein, 108 aa, Artificial Sequence
  source: /note="Description of Artificial Sequence: Synthetic polypeptide"
DIQLTQSPSSLSASVGDRVTITCQASQDISNYLNWYQQKPGKAPKLLIYDASNLEIGVPSRFSGSGSGTDFTFTISSLQPEDIATYYCQQHDNLPLSFGGGTKLDIKR

SEQ ID NO: 7111 - protein, 111 aa, Artificial Sequence
  source: /note="Description of Artificial Sequence: Synthetic polypeptide"
QSVLIQPPSASGSPGQSVTISCTGISSDVGAYDYVSWYQQHPGKVPKLMIYEVSKRPSGVPDRFSGSKSGDTASLTVSGLQAEDEADYYCSSHAGSNNFYVFGTGTKLTVL

SEQ ID NO: 7112 - protein, 110 aa, Artificial Sequence
  source: /note="Description of Artificial Sequence: Synthetic polypeptide"
NFMLTQPPSVSESPGKTVTISCTRSSGNIASFYVQWFQQRPGSSPTTVIYEDDQRPSGVPDRFSGSIDRSSNSASLTISGLTTDDEADYYCQSYDTNNVIFGGGTKLTVL

SEQ ID NO: 7113 - protein, 110 aa, Artificial Sequence
  source: /note="Description of Artificial Sequence: Synthetic polypeptide"
NFMLTQPPSVSESPGKTVTISCTRSSGNIASFYVQWFQQRPGSSPTTVIYDDDQRPSGVPDRFSGSIDRSSNSASLTISGLTTDDEADYYCQSYDTNNVIFGGGTKLTVL

SEQ ID NO: 7114 - protein, 110 aa, Artificial Sequence
  source: /note="Description of Artificial Sequence: Synthetic polypeptide"
NFMLTQPPSVSESPGKTVTISCTRSSGNIASFYVQWFQQRPGSSPTTVIYEDDQRPSGVPDRFSGSIDRSSNSASLTISGLTTDDEADYYCQSYDTNKVIFGGGTKLTVL

SEQ ID NO: 7115 - protein, 110 aa, Artificial Sequence
  source: /note="Description of Artificial Sequence: Synthetic polypeptide"
NFMLTQPPSVSESPGKTVTISCTRSSGNIASFYVQWFQQRPGSSPTTVIYEDDQRPSGVPDRFSGSIDRSSNSASLTISGLTTDDEADYYCQSYDINKVIFGGGTKLTVL

SEQ ID NO: 7116 - protein, 110 aa, Artificial Sequence
  source: /note="Description of Artificial Sequence: Synthetic polypeptide"
DPAMTQTPSSTSAAVGGTVTINCQSSQSVYNANHLSWFQQKPGQPPKRLIYYISTPDSGVPPRFSGSGSGTQFTLTISGVQCDDAATYYCAALNSDEVFTFGGGTEVVVK

SEQ ID NO: 7117 - protein, 113 aa, Artificial Sequence
  source: /note="Description of Artificial Sequence: Synthetic polypeptide"
DIVMTQTPSSVEAAVGGTVTIKCQASQSIRTSLVWYQQKPGQPPKLLIYKASDLPSGVPSRFKGSGSGTQFTLTISDLECADAATYYCQSYDFRDTINNGHSFGGGTEVVVKG

SEQ ID NO: 7118 - protein, 239 aa, Artificial Sequence
  source: /note="Description of Artificial Sequence: Synthetic polypeptide"
MDTRAPTQLLGLLLLWLPGARCADIVMTQTPSSVEAAVGGTVTIKCQASQSIRTSLVWYQQKPGQPPKLLIYKASDLPSGVPSRFKGSGSGTQFTLTISDLECADAATYYCQSYDFRDTINNGHSFGGGTEVVVKGDPVAPTVLIFPPAADQVATGTVTIVCVANKYFPDVTVTWEVDGTTQTTGIENSKTPQNSADCTYNLSSTLTLTSTQYNSHKEYTCKVTQGTTSVVQSFNRGDC

SEQ ID NO: 7119 - protein, 110 aa, Artificial Sequence
  source: /note="Description of Artificial Sequence: Synthetic polypeptide"
QVLTQTASSVSAAVGGTVTINCQSSQSVYKNNDLSWYQQKPRQPPKLLIYQASKLASGVPSRFKGSGSGTQFTLTIGDLECDDGATYYCAGGYTASIYAFGGGTEVVVKG

SEQ ID NO: 7120 - protein, 236 aa, Artificial Sequence
  source: /note="Description of Artificial Sequence: Synthetic polypeptide"
MDTRAPTQLLGLLLLWLPGATFAQVLTQTASSVSAAVGGTVTINCQSSQSVYKNNDLSWYQQKPRQPPKLLIYQASKLASGVPSRFKGSGSGTQFTLTIGDLECDDGATYYCAGGYTASIYAFGGGTEVVVKGDPVAPTVLIFPPAADQVATGTVTIVCVANKYFPDVTVTWEVDGTTQTTGIENSKTPQNSADCTYNLSSTLTLTSTQYNSHKEYTCKVTQGTTSVVQSFNRGDC

SEQ ID NO: 7121 - protein, 111 aa, Artificial Sequence
  source: /note="Description of Artificial Sequence: Synthetic polypeptide"
DIQMTQSPSSLSASVGDRVTITCQSSQSVYKNNDLSWYQQKPGKAPKLLIYQASKLASGVPSRFSGSGSGTDFTLTISSLQPEDFATYYCAGGYTASIYAFGQGTKVEIKR

SEQ ID NO: 7122 - protein, 113 aa, Artificial Sequence
  source: /note="Description of Artificial Sequence: Synthetic polypeptide"
DIQMTQSPSSLSASVGDRVTITCKASQSIRTSLVWYQQKPGKAPKLLIYKASDLPSGVPSRFSGSGSGTDFTLTISSLQPEDFATYYCQSYDFRDTINNGHSFGQGTKVEIKR

SEQ ID NO: 7123 - protein, 113 aa, Mus Musculus
DIVMTQSPSSLATSVGQRVTMSCKSSQNLLYSTDQKNYLAWFQQKPGQSPKLLLYFASIRESGVPDRFIGSGSGTDFTLTISSVQAEDLADYFCQQHYNTPPTFGGGTRLEIK

SEQ ID NO: 7124 - protein, 133 aa, Mus Musculus
MESQTQVLMFLLLWVSGACADIVMTQSPSSLATSVGQRVTMSCKSSQNLLYSTDQKNYLAWFQQKPGQSPKLLLYFASIRESGVPDRFIGSGSGTDFTLTISSVQAEDLADYFCQQHYNTPPTFGGGTRLEIK

SEQ ID NO: 7125 - protein, 125 aa, Artificial Sequence
  source: /note="Description of Artificial Sequence: Synthetic polypeptide"
QVQLQESGPGLVKPSGTLSLTCAVSGVSIRSINWWNWVRQPPGKGLEWIGEIYHSGSTNYNPSLKSRVTISVDKSKNQFSLKLNSVTAADTAVYYCARDGGIAVTDYYYYGLDVWGQGTTVTVSS

SEQ ID NO: 7126 - protein, 126 aa, Artificial Sequence
  source: /note="Description of Artificial Sequence: Synthetic polypeptide"
MEAPAQLLFLLLLWLPDTTGEIVLTQSPATLSLSPGERATLSCRASESVSSNLAWYQQKPGQAPRLLIYGAFNRATGIPARFSGSGSGTDFTLTISSLEPEDFAVYYCQQRSDWFTFGGGTKVEIK

SEQ ID NO: 7127 - protein, 106 aa, Artificial Sequence
  source: /note="Description of Artificial Sequence: Synthetic polypeptide"
EIVLTQSPATLSLSPGERATLSCRASESVSSNLAWYQQKPGQAPRLLIYGAFNRATGIPARFSGSGSGTDFTLTISSLEPEDFAVYYCQQRSDWFTFGGGTKVEIK

SEQ ID NO: 7128 - protein, 112 aa, Artificial Sequence
  source: /note="Description of Artificial Sequence: Synthetic polypeptide"
DIVMTQSPLSLPVTPGEPASISCRSSQSIVYSNGNTYLGWYLQKPGQSPQLLIYKVSNRFSGVPDRFSGSGSGTDFTLKISRVEAEDVGVYYCFQGSHVPYTFGQGTKLEIK

SEQ ID NO: 7129 - protein, 107 aa, Artificial Sequence
  source: /note="Description of Artificial Sequence: Synthetic polypeptide"
DIVMTQSPATLSVTPGDRVSLSCRASQTISDYLHWYQQKSHESPRLLIKFASQSISGIPSRFSGSGSGSDFTLSINSVEPEDVGVYYCQNGHGFPRTFGGGTKLEIK

SEQ ID NO: 7130 - protein, 111 aa, Artificial Sequence
  source: /note="Description of Artificial Sequence: Synthetic polypeptide"
DIVMTQSPDSLAVSLGERATISCRASESVDNYGISFMKWFQQKPGQPPKLLIYAASNQGSGVPDRFSGSGSGTDFTLTISSLQAEDVAVYYCQQSKEVPWTFGGGTKVEIK

SEQ ID NO: 7131 - protein, 107 aa, Homo sapiens
DIQLTQSPSFLSASVGDRVTITCRASQGISSYLAWYQQKPGKAPRVLIYGATTLQSGVPSRFSGSESGTEFTLTISSLQPEDLATYYCQKLNSHPCSFGQGTKVEIK

SEQ ID NO: 7132 - protein, 107 aa, Homo sapiens
DIQLTQSPSFLSASVGDRVTITCRASQGISSYLAWYQQKPGKAPRVLIYGATTLQSGVPSRFSGSESGTEFTLTISSLQPEDLATYYCQKLNSHPSSFGQGTKVEIK

SEQ ID NO: 7133 - protein, 107 aa, Homo sapiens
DIQLTQSPSFLSASVGDRVTITCRASQGISSYLAWYQQKPGKAPRVLIYGATTLQSGVPSRFSGSESGTEFTLTISSLQPEDLATYYCQKLNSHPYSFGQGTKVEIK

SEQ ID NO: 7134 - protein, 107 aa, Homo sapiens
DIQLTQSPTFLSASVGDRVTITCRASQVISSSLAWYQQNPGKAPKLLIYAASTLQSGVPSRFSGSGSGTEFTLTISSLQPEDFVTYYCQHLHGYPYNFGQGTKVEIK

SEQ ID NO: 7135 - protein, 107 aa, Rattus norvegicus
NIVMTQSPKSMSISVGDRVTMNCKASQSVGKNIAWYQQKPGQSPKLLIYYASNRYTGVPDRFTGGGSGTDFTLTINTVQAEDAAFFYCQHIYNSPYPFGTGTKLEIK

SEQ ID NO: 7136 - protein, 107 aa, Artificial Sequence
  source: /note="Description of Artificial Sequence: Synthetic polypeptide"
DIQMTQSPSSLSASVGDRVTITCKASQSVGKNIAWYQQKPGKSPKLLIYYASNRYTGVPSRFSGSGSGTDFTFTISSLQPEDIATYYCQHIYNSPYPFGQGTKVEIK

SEQ ID NO: 7137 - protein, 107 aa, Artificial Sequence
  source: /note="Description of Artificial Sequence: Synthetic polypeptide"
DIQMTQSPSSLSASVGDRVTITCKASQSVGKNIAWYQQKPGKAPKLLIYYASNRYTGVPSRFSGSGSGTDFTFTISSLQPEDIATYYCQHIYNSPYPFGQGTKVEIK

SEQ ID NO: 7138 - protein, 107 aa, Rattus norvegicus
NIVMTQSPKSMSISIGDRVTMNCKASQSVGKNIAWYQQKTGQSPQLLIYYASNRYTGVPDRFTGGGSGTDFTLTINSVQAEDAAFFYCQHIYNSPYPFGTGTKLEIK

SEQ ID NO: 7139 - protein, 107 aa, Artificial Sequence
  source: /note="Description of Artificial Sequence: Synthetic polypeptide"
EIVMTQSPATLSVSPGERATLSCKASQSVGKNIAWYQQKPGQSPRLLIYYASNRYTGVPARFSGSGSGTEFTLTISSLQSEDFAVYYCQHIYNSPYPFGQGTKVEIK

SEQ ID NO: 7140 - protein, 107 aa, Artificial Sequence
  source: /note="Description of Artificial Sequence: Synthetic polypeptide"
EIVMTQSPATLSVSPGERATLSCKASQSVGKNIAWYQQKPGQAPRLLIYYASNRYTGVPARFSGSGSGTEFTLTISSLQSEDFAVYYCQHIYNSPYPFGQGTKVEIK

SEQ ID NO: 7141 - protein, 107 aa, Artificial Sequence
  source: /note="Description of Artificial Sequence: Synthetic polypeptide"
EIVMTQSPATLSVSPGERATLSCKASQSVGKNIAWYQQKPGQSPRLLIYYASNRYTGIPARFSGSGSGTEFTLTISSLQSEDFAVYYCQHIYNSPYPFGQGTKVEIK

SEQ ID NO: 7142 - protein, 107 aa, Artificial Sequence
  source: /note="Description of Artificial Sequence: Synthetic polypeptide"
EIVMTQSPATLSVSPGERATLSCKASQSVGKNIAWYQQKPGQAPRLLIYYASNRYTGIPARFSGSGSGTEFTLTISSLQSEDFAVYYCQHIYNSPYPFGQGTKVEIK

SEQ ID NO: 7143 - protein, 106 aa, Rattus norvegicus
NIHLTQSPSLLSASVGDRVTLSCKGSQNVNKYLVWYQQKLGEAPKLLIYNTDNLQSGIPSRFSGSGSGTDYTLTISSLQPEDAATYFCYQYNNGFTFGSGTKLEIK

SEQ ID NO: 7144 - protein, 106 aa, Artificial Sequence
  source: /note="Description of Artificial Sequence: Synthetic polypeptide"
DIQLTQSPSFLSASVGDRVTITCKGSQNVNKYLVWYQQKPGKAPKLLIYNTDNLQSGIPSRFSGSGSGTEYTLTISSLQPEDFATYFCYQYNNGFTFGQGTKVEIK

SEQ ID NO: 7145 - protein, 106 aa, Artificial Sequence
  source: /note="Description of Artificial Sequence: Synthetic polypeptide"
DIQLTQSPSFLSASVGDRVTITCKGSQNVNKYLVWYQQKPGKAPKLLIYNTDNLQSGVPSRFSGSGSGTEYTLTISSLQPEDFATYFCYQYNNGFTFGQGTKVEIK

SEQ ID NO: 7146 - protein, 106 aa, Artificial Sequence
  source: /note="Description of Artificial Sequence: Synthetic polypeptide"
DIQLTQSPSFLSASVGDRVTITCKGSQNVNKYLVWYQQKPGKAPKLLIYNTDNLQSGIPSRFSGSGSGTEFTLTISSLQPEDFATYFCYQYNNGFTFGQGTKVEIK

SEQ ID NO: 7147 - protein, 106 aa, Artificial Sequence
  source: /note="Description of Artificial Sequence: Synthetic polypeptide"
DIQLTQSPSFLSASVGDRVTITCKGSQNVNKYLVWYQQKPGKAPKLLIYNTDNLQSGIPSRFSGSGSGTEYTLTISSLQPEDFATYYCYQYNNGFTFGQGTKVEIK

SEQ ID NO: 7148 - protein, 106 aa, Artificial Sequence
  source: /note="Description of Artificial Sequence: Synthetic polypeptide"
DIQLTQSPSFLSASVGDRVTITCKGSQNVNKYLVWYQQKPGKAPKLLIYNTDNLQSGVPSRFSGSGSGTEFTLTISSLQPEDFATYYCYQYNNGFTFGQGTKVEIK

SEQ ID NO: 7149 - protein, 106 aa, Artificial Sequence
  source: /note="Description of Artificial Sequence: Synthetic polypeptide"
DIQLTQSPSFLSASVGDRVTITCKGSQNVNKYLVWYQQKPGKAPKLLIYNTDNLQSGVPSRFSGSGSGTEYTLTISSLQPEDFATYYCYQYNNGFTFGQGTKVEIK

SEQ ID NO: 7150 - protein, 106 aa, Rattus norvegicus
NIHLTQSPSLLSASVGDRVTLSCKGSQNVNKYLVWYQQKLGEAPKLLIYSTDNLQSGIPSRFSGSGSGTDYTLTISSLQPEDAATYFCYQYNNGFTFGSGTKLEIK

SEQ ID NO: 7151 - protein, 106 aa, Artificial Sequence
  source: /note="Description of Artificial Sequence: Synthetic polypeptide"
DIQLTQSPSFLSASVGDRVTITCKGSQNVNKYLVWYQQKPGKAPKLLIYSTDNLQSGIPSRFSGSGSGTEYTLTISSLQPEDFATYFCYQYNNGFTFGQGTKVEIK

SEQ ID NO: 7152 - protein, 106 aa, Artificial Sequence
  source: /note="Description of Artificial Sequence: Synthetic polypeptide"
DIQLTQSPSFLSASVGDRVTITCKGSQNVNKYLVWYQQKPGKAPKLLIYSTDNLQSGVPSRFSGSGSGTEYTLTISSLQPEDFATYFCYQYNNGFTFGQGTKVEIK

SEQ ID NO: 7153 - protein, 106 aa, Artificial Sequence
  source: /note="Description of Artificial Sequence: Synthetic polypeptide"
DIQLTQSPSFLSASVGDRVTITCKGSQNVNKYLVWYQQKPGKAPKLLIYSTDNLQSGIPSRFSGSGSGTEFTLTISSLQPEDFATYFCYQYNNGFTFGQGTKVEIK

SEQ ID NO: 7154 - protein, 106 aa, Artificial Sequence
  source: /note="Description of Artificial Sequence: Synthetic polypeptide"
DIQLTQSPSFLSASVGDRVTITCKGSQNVNKYLVWYQQKPGKAPKLLIYSTDNLQSGIPSRFSGSGSGTEYTLTISSLQPEDFATYYCYQYNNGFTFGQGTKVEIK

SEQ ID NO: 7155 - protein, 106 aa, Artificial Sequence
  source: /note="Description of Artificial Sequence: Synthetic polypeptide"
DIQLTQSPSFLSASVGDRVTITCKGSQNVNKYLVWYQQKPGKAPKLLIYSTDNLQSGVPSRFSGSGSGTEFTLTISSLQPEDFATYYCYQYNNGFTFGQGTKVEIK

SEQ ID NO: 7156 - protein, 106 aa, Artificial Sequence
  source: /note="Description of Artificial Sequence: Synthetic polypeptide"
DIQLTQSPSFLSASVGDRVTITCKGSQNVNKYLVWYQQKPGKAPKLLIYSTDNLQSGVPSRFSGSGSGTEYTLTISSLQPEDFATYYCYQYNNGFTFGQGTKVEIK

SEQ ID NO: 7157 - protein, 107 aa, Artificial Sequence
  source: /note="Description of Artificial Sequence: Synthetic polypeptide"
DIQMTQSPSSLSASVGDRVTITCRASQDISNYLNWYQQKPGKAPKLLIYYTSRLRSGVPSRFSGSGSGTDFTLTISSLQPEDFATYYCQQGHTLPPTFGQGTKVEIK

SEQ ID NO: 7158 - protein, 107 aa, Artificial Sequence
  source: /note="Description of Artificial Sequence: Synthetic polypeptide"
DIQMTQSPSSLSASVGDRVTITCRASQDISNYLNWYQQKPGKTVKLLIYYTSRLRSGVPSRFSGSGSGTDFTLTISSLQPEDFATYYCQQGHTLPPTFGQGTKVEIK

SEQ ID NO: 7159 - protein, 107 aa, Artificial Sequence
  source: /note="Description of Artificial Sequence: Synthetic polypeptide"
DIQMTQSPSSLSASVGDRVTITCRASQDISNYLNWYQQKPGKTVKLLIYYTSRLRSGVPSRFSGSGSGKDYTLTISSLQPEDFATYFCQQGHTLPPTFGQGTKVEIK

SEQ ID NO: 7160 - protein, 107 aa, Artificial Sequence
  source: /note="Description of Artificial Sequence: Synthetic polypeptide"
DIQMTQSPSSLSASVGDRVTITCRASQDISNYLNWYQQKPGKAPKLLIYYTSRLRSGVPSRFSGSGSGTDFTLTISSLQPEDFATYYCQQGHTLPATFGQGTKVEIK

SEQ ID NO: 7161 - protein, 107 aa, Artificial Sequence
  source: /note="Description of Artificial Sequence: Synthetic polypeptide"
DIQMTQSPSSLSASVGDRVTITCRASQDISNYLNWYQQKPGKAPKLLIYYTSRLRSGVPSRFSGSGSGTDFTLTISSLQPEDFATYYCQQGHTAPPTFGQGTKVEIK

SEQ ID NO: 7162 - protein, 107 aa, Artificial Sequence
  source: /note="Description of Artificial Sequence: Synthetic polypeptide"
DIQMTQSPSSLSASVGDRVTITCRASQDISNYLNWYQQKPGKAPKLLIYYTSRLRSGVPSRFSGSGSGTDFTLTISSLQPEDFATYYCQQGATLPPTFGQGTKVEIK

SEQ ID NO: 7163 - protein, 107 aa, Artificial Sequence
  source: /note="Description of Artificial Sequence: Synthetic polypeptide"
DIQMTQSPSSLSASVGDRVTITCRASQDISNYLNWYQQKPGKAPKLLIYYTSRLRSGVPSRFSGSGSGTDFTLTISSLQPEDFATYYCQQGHALPPTFGQGTKVEIK

SEQ ID NO: 7164 - protein, 107 aa, Artificial Sequence
  source: /note="Description of Artificial Sequence: Synthetic polypeptide"
DIQMTQSPSSLSASVGDRVTITCRASQDISNYLNWYQQKPGKAPKLLIYYTSRLRSGVPSRFSGSGSGTDFTLTISSLQPEDFATYYCQQAHTLPPTFGQGTKVEIK

SEQ ID NO: 7165 - protein, 107 aa, Artificial Sequence
  source: /note="Description of Artificial Sequence: Synthetic polypeptide"
DIQMTQSPSSLSASVGDRVTITCRASQDISNYLNWYQQKPGKAPKLLIYYTSRLRSGVPSRFSGSGSGTDFTLTISSLQPEDFATYYCQQGHTLAPTFGQGTKVEIK

SEQ ID NO: 7166 - protein, 108 aa, Artificial Sequence
  source: /note="Description of Artificial Sequence: Synthetic polypeptide"
DIQMTQSPSSLSASVGDRVTITCRASQSISSYLNWYQQKPGKAPKLLIYAASSLQSGVPSRFSGSGSGTDFTLTISSLQPEDFATYYCQQSYSTPPITFGQGTRLEIK

SEQ ID NO: 7167 - protein, 112 aa, Artificial Sequence
  source: /note="Description of Artificial Sequence: Synthetic polypeptide"
DVLLTQSPLSLPVSLGDQASISCRSSQSLVHSNGNTYLHWYLQKPGQSPKLLIYKVSNRFSGVPDRFSGSGSGTDFTLKISRVEAEDLGVYFCSQSTHVPPWTFGGGTKLEI

SEQ ID NO: 7168 - protein, 106 aa, Artificial Sequence
  source: /note="Description of Artificial Sequence: Synthetic polypeptide"
DVLMTQTPSSLSASLGDRVTISCSASQGISNFLNWYQQKPDGTVKLLIYYTSTLHSGVPSRFIGSGSGTDYSLTISNLEPEDIATYYCQQYSKLPWTFGGGTKLEI

SEQ ID NO: 7169 - protein, 111 aa, Homo sapiens
DIVLTQPPSVSGAPGQRVTISCSGSSSNIGSNSVSWYQQLPGTAPKLLIYDNSKRPSGVPDRFSGSKSGTSASLAITGLQSEDEADYYCQSRDTYGYYWVFGGGTKLTVLG

SEQ ID NO: 7170 - protein, 109 aa, Artificial Sequence
  source: /note="Description of Artificial Sequence: Synthetic polypeptide"
QAVVTQEPSLTVSPGGTVTLTCGSSTGAVTTSNYANWVQEKPGQAFRGLIGGTNKRAPGTPARFSGSLLGGKAALTLSGAQPEDEAEYYCALWYSNLWVFGGGTKLTVL

SEQ ID NO: 7171 - protein, 112 aa, Artificial Sequence
  source: /note="Description of Artificial Sequence: Synthetic polypeptide"
DIVMTQTPLSLSVTPGQPASISCKSSQSLENPNGNTYLNWYLQKPGQSPQLLIYRVSKRFSGVPDRFSGSGSGTDFTLKISRVEAEDVGVYYCLQLTHVPYTFGQGTKLEIK

SEQ ID NO: 7172 - protein, 219 aa, Artificial Sequence
  source: /note="Description of Artificial Sequence: Synthetic polypeptide"
DAVMTQTPLSLPVSLGDQASISCRSSQSLENSNGNTYLNWYLQKPGQSPQLLIYRVSKRFSGVLDRFSGSGSGTDFTLKISRVEAEDLGVYFCLQLTHVPYTFGGGTKLEIKRTVAAPSVFIFPPSDRKLKSGTASVVCLLNNFYPREAKVQWKVDNALQSGNSQESVTEQDSKDSTYSLSSTLTLSKADYEKHKVYACEVTHQGLSSPVTKSFNRGEC

SEQ ID NO: 7173 - protein, 214 aa, Artificial Sequence
  source: /note="Description of Artificial Sequence: Synthetic polypeptide"
QAVVTQEPSLTVSPGGTVTLTCGSSTGAVTTSNYANWVQEKPGQAFRGLIGGTNKRAPGTPARFSGSLLGGKAALTLSGAQPEDEAEYYCALWYSNLWVFGGGTKLTVLSSASTKGPSVFPLAPSSKSTSGGTAALGCLVKDYFPEPVTVSWNSGALTSGVHTFPAVLQSSGLYSLSSVVTVPSSSLGTQTYICNVNHKPSNTKVDKKVEPKSC

SEQ ID NO: 7174 - protein, 219 aa, Artificial Sequence
  source: /note="Description of Artificial Sequence: Synthetic polypeptide"
DAVMTQTPLSLPVSLGDQASISCRSSQSLENSNGNTYLNWYLQKPGQSPQLLIYRVSKRFSGVLDRFSGSGSGTDFTLKISRVEAEDLGVYFCLQLTHVPYTFGGGTKLEIKRTVAAPSVFIFPPSDEQLKSGTASVVCLLNNFYPREAKVQWKVDNALQSGNSQESVTEQDSKDSTYSLSSTLTLSKADYEKHKVYACEVTHQGLSSPVTKSFNRGEC

SEQ ID NO: 7175 - protein, 219 aa, Artificial Sequence
  source: /note="Description of Artificial Sequence: Synthetic polypeptide"
DIVMTQTPLSLSVTPGQPASISCKSSQSLENPNGNTYLNWYLQKPGQSPQLLIYRVSKRFSGVPDRFSGSGSGTDFTLKISRVEAEDVGVYYCLQLTHVPYTFGQGTKLEIKRTVAAPSVFIFPPSDRKLKSGTASVVCLLNNFYPREAKVQWKVDNALQSGNSQESVTEQDSKDSTYSLSSTLTLSKADYEKHKVYACEVTHQGLSSPVTKSFNRGEC

SEQ ID NO: 7176 - protein, 112 aa, Artificial Sequence
  source: /note="Description of Artificial Sequence: Synthetic polypeptide"
DAVMTQTPLSLPVSLGDQASISCRSSQSLENSNGNTYLNWYLQKPGQSPQLLIYRISNRFSGVPDRFNGSGSGTDFTLKISRVEAEDLGVYFCLQVTHVPWTFGGGTKLEIK

SEQ ID NO: 7177 - protein, 108 aa, Artificial Sequence
  source: /note="Description of Artificial Sequence: Synthetic polypeptide"
EIVLTQSPGTLSLSPGERATLSCRASQSVSSSYLAWYQQKPGQAPRLLIYGASSRATGIPDRFSGSGSGTDFTLTISRLEPEDFAVYYCQQYGSSPLTFGQGTKVEIK

SEQ ID NO: 7178 - protein, 109 aa, Artificial Sequence
  source: /note="Description of Artificial Sequence: Synthetic polypeptide"
QAVVTQEPSLTVSPGGTVTLTCRSSTGAVTTSNYANWVQEKPGQAFRGLIGGTNKRAPGTPARFSGSLLGGKAALTLSGAQPEDEAEYYCALWYSNLWVFGGGTKLTVL

SEQ ID NO: 7179 - protein, 219 aa, Artificial Sequence
  source: /note="Description of Artificial Sequence: Synthetic polypeptide"
DAVMTQTPLSLPVSLGDQASISCRSSQSLENSNGNTYLNWYLQKPGQSPQLLIYRISNRFSGVPDRFNGSGSGTDFTLKISRVEAEDLGVYFCLQVTHVPWTFGGGTKLEIKRTVAAPSVFIFPPSDEQLKSGTASVVCLLNNFYPREAKVQWKVDNALQSGNSQESVTEQDSKDSTYSLSSTLTLSKADYEKHKVYACEVTHQGLSSPVTKSFNRGEC

SEQ ID NO: 7180 - protein, 442 aa, Artificial Sequence
  source: /note="Description of Artificial Sequence: Synthetic polypeptide"
DAVMTQTPLSLPVSLGDQASISCRSSQSLENSNGNTYLNWYLQKPGQSPQLLIYRVSKRFSGVLDRFSGSGSGTDFTLKISRVEAEDLGVYFCLQLTHVPYTFGGGTKLEIKSSASTKGPSVFPLAPSSKSTSGGTAALGCLVKDYFPEPVTVSWNSGALTSGVHTFPAVLQSSGLYSLSSVVTVPSSSLGTQTYICNVNHKPSNTKVDKKVEPKSCDKTHTCPPCPAPEAAGGPSVFLFPPKPKDTLMISRTPEVTCVVVDVSHEDPEVKFNWYVDGVEVHNAKTKPREEQYNSTYRVVSVLTVLHQDWLNGKEYKCKVSNKALGAPIEKTISKAKGQPREPQVCTLPPSRDELTKNQVSLSCAVKGFYPSDIAVEWESNGQPENNYKTTPPVLDSDGSFFLVSKLTVDKSRWQQGNVFSCSVMHEALHNHYTQKSLSLSP

SEQ ID NO: 7181 - protein, 681 aa, Artificial Sequence
  source: /note="Description of Artificial Sequence: Synthetic polypeptide"
DAVMTQTPLSLPVSLGDQASISCRSSQSLENSNGNTYLNWYLQKPGQSPQLLIYRVSKRFSGVLDRFSGSGSGTDFTLKISRVEAEDLGVYFCLQLTHVPYTFGGGTKLEIKSSASTKGPSVFPLAPSSKSTSGGTAALGCLVKDYFPEPVTVSWNSGALTSGVHTFPAVLQSSGLYSLSSVVTVPSSSLGTQTYICNVNHKPSNTKVDKKVEPKSCDGGGGSGGGGSEVQLLESGGGLVQPGGSLRLSCAASGFTFSTYAMNWVRQAPGKGLEWVSRIRSKYNNYATYYADSVKGRFTISRDDSKNTLYLQMNSLRAEDTAVYYCVRHGNFGNSYVSWFAYWGQGTLVTVSSASTKGPSVFPLAPSSKSTSGGTAALGCLVEDYFPEPVTVSWNSGALTSGVHTFPAVLQSSGLYSLSSVVTVPSSSLGTQTYICNVNHKPSNTKVDEKVEPKSCDKTHTCPPCPAPEAAGGPSVFLFPPKPKDTLMISRTPEVTCVVVDVSHEDPEVKFNWYVDGVEVHNAKTKPREEQYNSTYRVVSVLTVLHQDWLNGKEYKCKVSNKALGAPIEKTISKAKGQPREPQVYTLPPCRDELTKNQVSLWCLVKGFYPSDIAVEWESNGQPENNYKTTPPVLDSDGSFFLYSKLTVDKSRWQQGNVFSCSVMHEALHNHYTQKSLSLSP

SEQ ID NO: 7182 - protein, 112 aa, Artificial Sequence
  source: /note="Description of Artificial Sequence: Synthetic polypeptide"
DIVMTQTPLSLSVTPGQPASISCKSSQSLETSTGTTYLNWYLQKPGQSPQLLIYRVSKRFSGVPDRFSGSGSGTDFTLKISRVEAEDVGVYYCLQLLEDPYTFGQGTKLEIK

SEQ ID NO: 7183 - protein, 112 aa, Artificial Sequence
  source: /note="Description of Artificial Sequence: Synthetic polypeptide"
DIVMTQTPLSLSVTPGQPASISCKSSQSLESSTGNTYLNWYLQKPGQSPQLLIYRVSKRFSGVPDRFSGSGSGTDFTLKISRVEAEDVGVYYCLQLIDYPVTFGQGTKLEIK

SEQ ID NO: 7184 - protein, 112 aa, Artificial Sequence
  source: /note="Description of Artificial Sequence: Synthetic polypeptide"
DIVMTQTPLSLSVTPGQPASISCKSSQSLETSTGNTYLNWYLQKPGQSPQLLIYRVSKRFSGVPDRFSGSGSGTDFTLKISRVEAEDVGVYYCLQATHIPYTFGQGTKLEIK

SEQ ID NO: 7185 - protein, 112 aa, Artificial Sequence
  source: /note="Description of Artificial Sequence: Synthetic polypeptide"
  MOD_RES (107)..(107): Any amino acid
DIVMTQTPLSLSVTPGQPASISCKSSQSLETSTGNTYLNWYLQKPGQSPQLLIYRVSKRFSGVPDRFSGSGSGTDFTLKISRVEAEDVGVYYCLQLTHVPYTFGQGXKLEIK

SEQ ID NO: 7186 - protein, 112 aa, Artificial Sequence
  source: /note="Description of Artificial Sequence: Synthetic polypeptide"
DIVMTQTPLSLSVTPGQPASISCKSSQSLETSTGNTYLNWYLQKPGQSPQLLIYRVSKRFSGVPDRFSGSGSGTDFTLKISRVEAEDVGVYYCLQPGHYPGTFGQGTKLEIK

SEQ ID NO: 7187 - protein, 112 aa, Artificial Sequence
  source: /note="Description of Artificial Sequence: Synthetic polypeptide"
DIVMTQTPLSLSVTPGQPASISCKSSQSLETSTGNTYLNWYLQKPGQSPQLLIYRVSKRFSGVPDRFSGSGSGTDFTLKISRVEAEDVGVYYCLQLDSYPNTFGQGTKLEIK

SEQ ID NO: 7188 - protein, 112 aa, Artificial Sequence
  source: /note="Description of Artificial Sequence: Synthetic polypeptide"
DIVMTQTPLSLSVTPGQPASISCKSSQSLETSTGNTYLNWYLQKPGQSPQLLIYRVSKRFSGVPDRFSGSGSGTDFTLKISRVEAEDVGVYYCLQLTHEPYTFGQGTKLEIK

SEQ ID NO: 7189 - protein, 219 aa, Artificial Sequence
  source: /note="Description of Artificial Sequence: Synthetic polypeptide"
DIVMTQTPLSLSVTPGQPASISCKSSQSLETSTGTTYLNWYLQKPGQSPQLLIYRVSKRFSGVPDRFSGSGSGTDFTLKISRVEAEDVGVYYCLQLLEDPYTFGQGTKLEIKRTVAAPSVFIFPPSDRKLKSGTASVVCLLNNFYPREAKVQWKVDNALQSGNSQESVTEQDSKDSTYSLSSTLTLSKADYEKHKVYACEVTHQGLSSPVTKSFNRGEC

SEQ ID NO: 7190 - protein, 112 aa, Artificial Sequence
  source: /note="Description of Artificial Sequence: Synthetic polypeptide"
DIVMTQTPLSLSVTPGQPASISCKSSQSLENSNGNTYLNWYLQKPGQSPQLLIYRVSKRFSGVPDRFSGSGSGTDFTLKISRVEAEDVGVYYCLQLTHVPYTFGQGTKLEIK

SEQ ID NO: 7191 - protein, 215 aa, Artificial Sequence
  source: /note="Description of Artificial Sequence: Synthetic polypeptide"
QAVVTQEPSLTVSPGGTVTLTCGSSTGAVTTSNYANWVQEKPGQAFRGLIGGTNKRAPGTPARFSGSLLGGKAALTLSGAQPEDEAEYYCALWYSNLWVFGGGTKLTVLGQPKAAPSVTLFPPSSKKLQANKATLVCLISDFYPGAVTVAWKADSSPVKAGVETTTPSKQSNNKYAASSYLSLTPEQWKSHRSYSCQVTHEGSTVEKTVAPTECS

SEQ ID NO: 7192 - protein, 111 aa, Artificial Sequence
  source: /note="Description of Artificial Sequence: Synthetic polypeptide"
DIQMTQSPSSLSASVGDRVTITCRASESVDNYGISFMNWFQQKPGKAPKLLIYAASNQGSGVPSRFSGSGSGTDFTLTISSLQPDDFATYYCQQSKEVPWTFGQGTKVEIK

SEQ ID NO: 7193 - protein, 111 aa, Artificial Sequence [sequence omitted]

SEQ ID NO: 7194 - protein, 218 aa, Artificial Sequence
  source: /note="Description of Artificial Sequence: Synthetic polypeptide"
DIQMTQSPSSLSASVGDRVTITCRASESVDNYGISFMNWFQQKPGKAPKLLIYAASNQGSGVPSRFSGSGSGTDFTLTISSLQPDDFATYYCQQSKEVPWTFGQGTKVEIKRTVAAPSVFIFPPSDRKLKSGTASVVCLLNNFYPREAKVQWKVDNALQSGNSQESVTEQDSKDSTYSLSSTLTLSKADYEKHKVYACEVTHQGLSSPVTKSFNRGEC

SEQ ID NO: 7195 - protein, 218 aa, Artificial Sequence
  source: /note="Description of Artificial Sequence: Synthetic polypeptide"
DIQLTQSPSTLSASVGDRVTITCRASESLDNYGIRFLTWFQQKPGKAPKLLMYAASNQGSGVPSRFSGSGSGTEFTLTISSLQPDDFATYYCQQTKEVPWSFGQGTKVEVKRTVAAPSVFIFPPSDRKLKSGTASVVCLLNNFYPREAKVQWKVDNALQSGNSQESVTEQDSKDSTYSLSSTLTLSKADYEKHKVYACEVTHQGLSSPVTKSFNRGEC

SEQ ID NO: 7196 - protein, 218 aa, Artificial Sequence
  source: /note="Description of Artificial Sequence: Synthetic polypeptide"
DIQMTQSPSSLSASVGDRVTITCRASESVDNYGISFMNWFQQKPGKAPKLLIYAASNQGSGVPSRFSGSGSGTDFTLTISSLQPDDFATYYCQQSKEVPWTFGQGTKVEIKRTVAAPSVFIFPPSDEQLKSGTASVVCLLNNFYPREAKVQWKVDNALQSGNSQESVTEQDSKDSTYSLSSTLTLSKADYEKHKVYACEVTHQGLSSPVTKSFNRGEC

SEQ ID NO: 7197 - protein, 113 aa, Artificial Sequence
  source: /note="Description of Artificial Sequence: Synthetic polypeptide"
DVVMTQTPLSLPVTPGEPASISCRSSQSLVHRNGNTYLHWYLQKPGQSPKLLIHKVSNRFSGVPDRFSGSGSGTDFTLKISRVEAEDLGVYFCSQSTHVPPLTFGAGTKLELK

SEQ ID NO: 7198 - protein, 220 aa, Artificial Sequence
  source: /note="Description of Artificial Sequence: Synthetic polypeptide"
DVVMTQTPLSLPVTPGEPASISCRSSQSLVHRNGNTYLHWYLQKPGQSPKLLIHKVSNRFSGVPDRFSGSGSGTDFTLKISRVEAEDLGVYFCSQSTHVPPLTFGAGTKLELKRTVAAPSVFIFPPSDRKLKSGTASVVCLLNNFYPREAKVQWKVDNALQSGNSQESVTEQDSKDSTYSLSSTLTLSKADYEKHKVYACEVTHQGLSSPVTKSFNRGEC

SEQ ID NO: 7199 - protein, 113 aa, Artificial Sequence
  source: /note="Description of Artificial Sequence: Synthetic polypeptide"
DIQMTQSPSSLSASVGDRVTITCKSSQSLLYRSNQKNYLAWYQQKPGKAPKLLIYWASTRESGVPSRFSGSGSGTDFTLTISSLQPEDFATYYCQQYYNYPRTFGQGTKVEIK

SEQ ID NO: 7200 - protein, 220 aa, Artificial Sequence
  source: /note="Description of Artificial Sequence: Synthetic polypeptide"
DIQMTQSPSSLSASVGDRVTITCKSSQSLLYRSNQKNYLAWYQQKPGKAPKLLIYWASTRESGVPSRFSGSGSGTDFTLTISSLQPEDFATYYCQQYYNYPRTFGQGTKVEIKRTVAAPSVFIFPPSDRKLKSGTASVVCLLNNFYPREAKVQWKVDNALQSGNSQESVTEQDSKDSTYSLSSTLTLSKADYEKHKVYACEVTHQGLSSPVTKSFNRGEC

SEQ ID NO: 7201 - protein, 220 aa, Artificial Sequence
  source: /note="Description of Artificial Sequence: Synthetic polypeptide"
DIQMTQSPSSLSASVGDRVTITCKSSQSLLYRSNQKNYLAWYQQKPGKAPKLLIYWASTRESGVPSRFSGSGSGTDFTLTISSLQPEDFATYYCQQYYNYPRTFGQGTKVEIKRTVAAPSVFIFPPSDEQLKSGTASVVCLLNNFYPREAKVQWKVDNALQSGNSQESVTEQDSKDSTYSLSSTLTLSKADYEKHKVYACEVTHQGLSSPVTKSFNRGEC

SEQ ID NO: 7202 - protein, 111 aa, Artificial Sequence
  source: /note="Description of Artificial Sequence: Synthetic polypeptide"
EIVLTQSPATLSLSPGERATLSCRAGESVDIFGVGFLHWYQQKPGQAPRLLIYRASNRATGIPARFSGSGSGTDFTLTISSLEPEDFAVYYCQQTNEDPYTFGQGTKLEIK

SEQ ID NO: 7203 - protein, 108 aa, Artificial Sequence
  source: /note="Description of Artificial Sequence: Synthetic polypeptide"
DIQMTQSPSSLSASVGDRVTITCKASAAVGTYVAWYQQKPGKAPKLLIYSASYRKRGVPSRFSGSGSGTDFTLTISSLQPEDFATYYCHQYYTYPLFTFGQGTKLEIK

SEQ ID NO: 7204 - protein, 218 aa, Artificial Sequence
  source: /note="Description of Artificial Sequence: Synthetic polypeptide"
DIVLTQSPASLAVSLGQRATMSCRAGESVDIFGVGFLHWYQQKPGQPPKLLIYRASNLESGIPVRFSGTGSRTDFTLIIDPVEADDVATYYCQQTNEDPYTFGGGTKLEIKRTVAAPSVFIFPPSDRKLKSGTASVVCLLNNFYPREAKVQWKVDNALQSGNSQESVTEQDSKDSTYSLSSTLTLSKADYEKHKVYACEVTHQGLSSPVTKSFNRGEC

SEQ ID NO: 7205 - protein, 218 aa, Artificial Sequence
  source: /note="Description of Artificial Sequence: Synthetic polypeptide"
EIVLTQSPATLSLSPGERATLSCRAGESVDIFGVGFLHWYQQKPGQAPRLLIYRASNRATGIPARFSGSGSGTDFTLTISSLEPEDFAVYYCQQTNEDPYTFGQGTKLEIKRTVAAPSVFIFPPSDRKLKSGTASVVCLLNNFYPREAKVQWKVDNALQSGNSQESVTEQDSKDSTYSLSSTLTLSKADYEKHKVYACEVTHQGLSSPVTKSFNRGEC

SEQ ID NO: 7206 - protein, 215 aa, Artificial Sequence
  source: /note="Description of Artificial Sequence: Synthetic polypeptide"
DIQMTQSPSSLSASVGDRVTITCKASAAVGTYVAWYQQKPGKAPKLLIYSASYRKRGVPSRFSGSGSGTDFTLTISSLQPEDFATYYCHQYYTYPLFTFGQGTKLEIKRTVAAPSVFIFPPSDEQLKSGTASVVCLLNNFYPREAKVQWKVDNALQSGNSQESVTEQDSKDSTYSLSSTLTLSKADYEKHKVYACEVTHQGLSSPVTKSFNRGEC

SEQ ID NO: 7207 - protein, 218 aa, Artificial Sequence
  source: /note="Description of Artificial Sequence: Synthetic polypeptide"
EIVLTQSPATLSLSPGERATLSCRAGESVDIFGVGFLHWYQQKPGQAPRLLIYRASNRATGIPARFSGSGSGTDFTLTISSLEPEDFAVYYCQQTNEDPYTFGQGTKLEIKRTVAAPSVFIFPPSDEQLKSGTASVVCLLNNFYPREAKVQWKVDNALQSGNSQESVTEQDSKDSTYSLSSTLTLSKADYEKHKVYACEVTHQGLSSPVTKSFNRGEC

SEQ ID NO: 7208 - protein, 106 aa, Artificial Sequence
  source: /note="Description of Artificial Sequence: Synthetic polypeptide"
DIQMTQSPSSLSASVGDRVTITCSASSSVSYMHWYQQKSGKAPKLLIYDTSKLASGVPSRFSGSGSGTDFTLTISSLQPEDFATYYCQQWSKHPLTFGQGTKLEIK

SEQ ID NO: 7209 - protein, 213 aa, Artificial Sequence
  source: /note="Description of Artificial Sequence: Synthetic polypeptide"
DIQMTQSPSSLSASVGDRVTITCSASSSVSYMHWYQQKSGKAPKLLIYDTSKLASGVPSRFSGSGSGTDFTLTISSLQPEDFATYYCQQWSKHPLTFGQGTKLEIKRTVAAPSVFIFPPSDRKLKSGTASVVCLLNNFYPREAKVQWKVDNALQSGNSQESVTEQDSKDSTYSLSSTLTLSKADYEKHKVYACEVTHQGLSSPVTKSFNRGEC

SEQ ID NO: 7210 - protein, 108 aa, Artificial Sequence
  source: /note="Description of Artificial Sequence: Synthetic polypeptide"
DIQMTQSPSSLSASVGDRVTITCRASQDISNYLNWYQQKPGKAPKLLIYYTSRLHSGVPSRFSGSGSGTDFTLTISSLQPEDFATYYCQQGNTLPYTFGQGTKVEIKR

SEQ ID NO: 7211 - protein, 113 aa, Artificial Sequence
  source: /note="Description of Artificial Sequence: Synthetic polypeptide"
DIQMTQSPSSLSASVGDRVTITCKSSQSVLYSSNQKNYLAWFQQKPGKAPKLLIYWASTRESGVPSRFSGSGSGTDFTLTISSLQPEDFATYFCHQYLSSYTFGQGTKVEIKR

SEQ ID NO: 7212 - protein, 214 aa, Artificial Sequence
  source: /note="Description of Artificial Sequence: Synthetic polypeptide"
DIQMTQSPSSLSASVGDRVTITCRASQDISNYLNWYQQKPGKAPKLLIYYTSRLHSGVPSRFSGSGSGTDFTLTISSLQPEDFATYYCQQGNTLPYTFGQGTKVEIKRTVAAPSVFIFPPSDRKLKSGTASVVCLLNNFYPREAKVQWKVDNALQSGNSQESVTEQDSKDSTYSLSSTLTLSKADYEKHKVYACEVTHQGLSSPVTKSFNRGEC

SEQ ID NO: 7213 - protein, 213 aa, Artificial Sequence
  source: /note="Description of Artificial Sequence: Synthetic polypeptide"
DIQMTQSPSSLSASVGDRVTITCSASSSVSYMHWYQQKSGKAPKLLIYDTSKLASGVPSRFSGSGSGTDFTLTISSLQPEDFATYYCQQWSKHPLTFGQGTKLEIKRTVAAPSVFIFPPSDEQLKSGTASVVCLLNNFYPREAKVQWKVDNALQSGNSQESVTEQDSKDSTYSLSSTLTLSKADYEKHKVYACEVTHQGLSSPVTKSFNRGEC

SEQ ID NO: 7214 - protein, 214 aa, Artificial Sequence
  source: /note="Description of Artificial Sequence: Synthetic polypeptide"
DIQMTQSPSSLSASVGDRVTITCRASQDISNYLNWYQQKPGKAPKLLIYYTSRLHSGVPSRFSGSGSGTDFTLTISSLQPEDFATYYCQQGNTLPYTFGQGTKVEIKRTVAAPSVFIFPPSDEQLKSGTASVVCLLNNFYPREAKVQWKVDNALQSGNSQESVTEQDSKDSTYSLSSTLTLSKADYEKHKVYACEVTHQGLSSPVTKSFNRGEC

SEQ ID NO: 7215 - protein, 106 aa, Artificial Sequence
  source: /note="Description of Artificial Sequence: Synthetic polypeptide"
EIVLTQSPATLSLSPGERATLSCSASSSINYIYWYQQKPGQAPRLLIYLTSNLASGVPARFSGSGSGTDFTLTISSLEPEDFAVYYCLQWSSNPLTFGGGTKVEIK

SEQ ID NO: 7216 - protein, 213 aa, Artificial Sequence
  source: /note="Description of Artificial Sequence: Synthetic polypeptide"
EIVLTQSPATLSLSPGERATLSCSASSSINYIYWYQQKPGQAPRLLIYLTSNLASGVPARFSGSGSGTDFTLTISSLEPEDFAVYYCLQWSSNPLTFGGGTKVEIKRTVAAPSVFIFPPSDRKLKSGTASVVCLLNNFYPREAKVQWKVDNALQSGNSQESVTEQDSKDSTYSLSSTLTLSKADYEKHKVYACEVTHQGLSSPVTKSFNRGEC

SEQ ID NO: 7217 - protein, 108 aa, Artificial Sequence
  source: /note="Description of Artificial Sequence: Synthetic polypeptide"
DIQMTQSPSTLSASVGDRVTITCRASQSISSWLAWYQQKPGKAPKLLIYDASSLESGVPSRFSGSGSGTEFTLTISSLQPDDFATYYCQQYLTYSRFTFGQGTKVEIK

SEQ ID NO: 7218 - protein, 107 aa, Artificial Sequence
  source: /note="Description of Artificial Sequence: Synthetic polypeptide"
DIQMTQSPSTLSASVGDRVTITCRASQSISSWLAWYQQKPGKAPKLLIYDASSLESGVPSRFSGSGSGTEFTLTISSLQPDDFATYYCQQYSSQPYTFGQGTKVEIK

SEQ ID NO: 7219 - protein, 108 aa, Artificial Sequence
  source: /note="Description of Artificial Sequence: Synthetic polypeptide"
DIQMTQSPSTLSASVGDRVTITCRASQSISSWLAWYQQKPGKAPKLLIYDASSLESGVPSRFSGSGSGTEFTLTISSLQPDDFATYYCQQYISYSMLTFGQGTKVEIK

SEQ ID NO: 7220 - protein, 107 aa, Artificial Sequence
  source: /note="Description of Artificial Sequence: Synthetic polypeptide"
DIQMTQSPSTLSASVGDRVTITCRASQSISSWLAWYQQKPGKAPKLLIYDASSLESGVPSRFSGSGSGTEFTLTISSLQPDDFATYYCQQYQAFSLTFGQGTKVEIK

SEQ ID NO: 7221 - protein, 106 aa, Artificial Sequence
  source: /note="Description of Artificial Sequence: Synthetic polypeptide"
SSELTQDPAVSVALGQTVRITCQGDSLRSYYASWYQQKPGQAPVLVIYGKNNRPSGIPDRFSGSSSGNTASLTITGAQAEDEADYYCNSRVMPHNRVFGGGTKLTV

SEQ ID NO: 7222 - protein, 107 aa, Homo sapiens
DIELTQPPSVSVAPGQTARISCSGDNLGDYYASWYQQKPGQAPVLVIYDDSNRPSGIPERFSGSNSGNTATLTISGTQAEDEADYYCQTWDGTLHFVFGGGTKLTVL

SEQ ID NO: 7223 - protein, 107 aa, Homo sapiens
DIELTQPPSVSVAPGQTARISCSGDNIGSKYVSWYQQKPGQAPVLVIYSDSERPSGIPERFSGSNSGNTATLTISGTQAEDEADYYCQSWDGSISRVFGGGTKLTVL

SEQ ID NO: 7224 - protein, 108 aa, Homo sapiens
DIELTQPPSVSVAPGQTARISCSGDNIGDQYAHWYQQKPGQAPVVVIYQDKNRPSGIPERFSGSNSGNTATLTISGTQAEDEADYYCATYTGFGSLAVFGGGTKLTVL

SEQ ID NO: 7225 - protein, 108 aa, Homo sapiens
SYELTQPPSVSVSPGQTASITCSGDNIGDQYAHWYQQKPGQSPVLVIYQDKNRPSGIPERFSGSNSGNTATLTISGTQAMDEADYYCATYTGFGSLAVFGGGTKLTVL

SEQ ID NO: 7226 - protein, 108 aa, Homo sapiens
DIELTQPPSVSVAPGQTARISCSGDNIGDQYAHWYQQKPGQAPVVVIYQDKNRPSGIPERFSGSNSGNTATLTISGTQAEDEADYYCSTYTFVGFTTVFGGGTKLTVL

SEQ ID NO: 7227 - protein, 108 aa, Homo sapiens
SYELTQPPSVSVSPGQTASITCSGDNIGDQYAHWYQQKPGQSPVVVIYQDKNRPSGIPERFSGSNSGNTATLTISGTQAMDEADYYCSTYTFVGFTTVFGGGTKLTVL

SEQ ID NO: 7228 - protein, 107 aa, Artificial Sequence
  source: /note="Description of Artificial Sequence: Synthetic polypeptide"
DIQMTQSPSTLSASVGDRVTITCRASQSISSWLAWYQQKPGKAPKLLIYDASSLESGVPSRFSGSGSGTEFTLTISSLQPDDFATYYCQQYHSYPQTFGQGTKVEIK

SEQ ID NO: 7229 - protein, 106 aa, Artificial Sequence
  source: /note="Description of Artificial Sequence: Synthetic polypeptide"
SSELTQDPAVSVALGQTVRITCQGDSLRSYYASWYQQKPGQAPVLVIYGKNNRPSGIPDRFSGSSSGNTASLTITGAQAEDEADYYCNSLDRRGMWVFGGGTKLTV

SEQ ID NO: 7230 - protein, 107 aa, Artificial Sequence
  source: /note="Description of Artificial Sequence: Synthetic polypeptide"
DIQMTQSPSTLSASVGDRVTITCRASQSISSWLAWYQQKPGKAPKLLIYDASSLESGVPSRFSGSGSGTEFTLTISSLQPDDFATYYCQQLNSYPQTFGQGTKVEIK

SEQ ID NO: 7231 - protein, 107 aa, Artificial Sequence
  source: /note="Description of Artificial Sequence: Synthetic polypeptide"
DIQMTQSPSTLSASVGDRVTITCRASQSISSWLAWYQQKPGKAPKLLIYDASSLESGVPSRFSGSGSGTEFTLTISSLQPDDFATYYCQQVNSYPQTFGQGTKVEIK

SEQ ID NO: 7232 - protein, 106 aa, Artificial Sequence
  source: /note="Description of Artificial Sequence: Synthetic polypeptide"
DIQMTQSPSTLSASVGDRVTITCRASQSISSWLAWYQQKPGKAPKLLIYDASSLESGVPSRFSGSGSGTEFTLTISSLQPDDFATYYCQQQHSYYTFGQGTKVEIK

SEQ ID NO: 7233 - protein, 108 aa, Artificial Sequence
  source: /note="Description of Artificial Sequence: Synthetic polypeptide"
EIVLTQSPGTLSLSPGERATLSCRASQSVSRSYLAWYQQKPGQAPRLLIIGASTRATGIPDRFSGSGSGTDFTLTISRLEPEDFAVYYCQQGQVIPPTFGQGTKVEIK

SEQ ID NO: 7234 - protein, 108 aa, Artificial Sequence
  source: /note="Description of Artificial Sequence: Synthetic polypeptide"
EIVLTQSPGTLSLSPGERATLSCRASQSVTSSYLAWYQQKPGQAPRLLINVGSRRATGIPDRFSGSGSGTDFTLTISRLEPEDFAVYYCQQGIMLPPTFGQGTKVEIK

SEQ ID NO: 7235 - protein, 108 aa, Artificial Sequence
  source: /note="Description of Artificial Sequence: Synthetic polypeptide"
DIVLTQSPSFLSASVGDRVTITCKASQNVGTNVAWFQQKPGKSPKALIYSASYRYSGVPDRFTGSGSGTEFTLTISSLQPEDFAAYFCQQYNNFPYTFGGGTKLEIKR

SEQ ID NO: 7236 - protein, 111 aa, Artificial Sequence
  source: /note="Description of Artificial Sequence: Synthetic polypeptide"
DIVLTQSPKFMSTSVGDRVSVTCKASQNVGTNVAWFLQKPGQSPKALIYSASYRYSGVPDRFTGSGSGTDFTLTISNVQSEDLAEYFCQQYNNFPYTFGGGTKLEIKRTVA

SEQ ID NO: 7237 - protein, 107 aa, Artificial Sequence
  source: /note="Description of Artificial Sequence: Synthetic polypeptide"
DIQMTQSPSSLSASVGDRVTITCRTSENLHNYLAWYQQKPGKSPKLLIYDAKTLADGVPSRFSGSGSGTDYTLTISSLQPEDFATYYCQHFWSDPYTFGQGTKLEIK

SEQ ID NO: 7238 - protein, 111 aa, Artificial Sequence
  source: /note="Description of Artificial Sequence: Synthetic polypeptide"
DIVLTQSPASLAVSLGQRATISCRASESVDNYGISFMNWFQQKPGQPPKLLIYAASNQGSGVPARFSGSGSGTDFSLNIHPMEEDDTAMYFCQQSKEVPWTFGGGSKLEIK

SEQ ID NO: 7239 - protein, 107 aa, Artificial Sequence
  source: /note="Description of Artificial Sequence: Synthetic polypeptide"
DIVMTQSQKFMSTSVGDRVSVTCKASQNVGTNVAWYQQKLGQSPKTLIYSASYRYSGVPDRFTGSGSGTDFTLTISNVQSEDLAEYFCQQYNSYPYTFGGGTKLEIK

SEQ ID NO: 7240 - protein, 107 aa, Artificial Sequence
  source: /note="Description of Artificial Sequence: Synthetic polypeptide"
DIVMTQSQKFMSTSVGDRVSVTCKASQNVGTNVAWFQQKPGQSPKALIYSASYRYSGVPDRFTGSGSGTDFILTISNVQSEDLAEYFCQQYNNYPLTFGAGTKLELK

SEQ ID NO: 7241 - protein, 107 aa, Artificial Sequence
  source: /note="Description of Artificial Sequence: Synthetic polypeptide"
DIQMTQSPASLSASVGETVTITCRASGNIHNYLAWYQQKQGKSPQLLVYNAKTLADGVPSRFSGSGSGTQYSLKINSLQPEDFGSYYCQHFWSSPYTFGGGTKLEIK

SEQ ID NO: 7242 - protein, 107 aa, Artificial Sequence
  source: /note="Description of Artificial Sequence: Synthetic polypeptide"
DIVMTQSQKFMSTSVGDRVSVTCKASQNVGTNVAWYQQKPGQSPKALIYSPSYRYSGVPDRFTGSGSGTDFTLTISNVQSEDLAEYFCQQYNSYPHTFGGGTKLEMK

SEQ ID NO: 7243 - protein, 118 aa, Artificial Sequence
  source: /note="Description of Artificial Sequence: Synthetic polypeptide"
  MOD_RES (112)..(118): Any amino acid
DIVLTQSPASLAVSLGQRATISCRASQSVSTSRFSYMHWFQQKPGQAPKLLIKYASNLESGVPARFSGSGSGTDFTLNIHPVEGEDTATYYCQHSWEIPYTFGGGTKLEIKXXXXXXX

SEQ ID NO: 7244 - protein, 106 aa, Artificial Sequence
  source: /note="Description of Artificial Sequence: Synthetic polypeptide"
SYELTQPPSVSVSPGQTASITCSGDKLGDKYACWYQQKPGQSPVLVIYQDSRRPSGIPERFSGSNSGNTATLTISGTQAMDEADYYCQAWASSTVVFGGGTKLTVL

SEQ ID NO: 7245 - protein, 108 aa, Artificial Sequence
  source: /note="Description of Artificial Sequence: Synthetic polypeptide"
EIVLTQSPGTLSLSPGERATLSCRASQSVKNSSLAWYQQKPGQAPRLLIYTASSRATGIPDRFSGSGSGTDFTLTISRLEPEDFAVYYCQQSSAPPWTFGQGTKVEIK

SEQ ID NO: 7246 - protein, 113 aa, Artificial Sequence
  source: /note="Description of Artificial Sequence: Synthetic polypeptide"
DIVMTQSPDSLAVSLGERATINCKSSQSVLYSSNNKNYLAWYQQKPGQPPKLLIYWASTRESGVPDRFSGSGSGTDFTLTISSLQAEDVAVYYCQQYYSTPLTFGQGTKVEIK

SEQ ID NO: 7247 - protein, 106 aa, Artificial Sequence
  source: /note="Description of Artificial Sequence: Synthetic polypeptide"
SYELTQPPSVSVSPGQTASITCSGDKLGDKYVCWYQQKPGQSPVVVIYQDSKRPSGIPERFSGSNSGNTATLTISGTQAMDEAYYYCQAWVSSTVVFGGGTKLTVL

SEQ ID NO: 7248 - protein, 106 aa, Artificial Sequence
  source: /note="Description of Artificial Sequence: Synthetic polypeptide"
SYELTQPPSVSVSPGQTASIICSGDKLGDKYVCWYQQKPGQSPVVVIYHDNKRPSGIPERFSGSNSGNTATLTISGTQAMDEADYYCQVWDSSTVVFGGGTKLTVL

SEQ ID NO: 7249 - protein, 110 aa, Artificial Sequence
  source: /note="Description of Artificial Sequence: Synthetic polypeptide"
QSALTQPPSASGSPGQSVTISCTGTSSDVGGYNYVSWYQQHPGKAPKLMIYEVSKRPSGVPDRFSGSKSGNTASLTVSGLQAEDEADYYCSSYAGSNNLVFGGGTKLTVL

SEQ ID NO: 7250 - protein, 106 aa, Artificial Sequence
  source: /note="Description of Artificial Sequence: Synthetic polypeptide"
SYELTQPPSVSVSPGQTASITCSGDKLGDKYVCWYQQKPGQSPVLVIYQDSKRPSGIPERFSGSNSGNTATLTISGTQAMDEADYYCQAWVSSTVVFGGGTKLTVL

SEQ ID NO: 7251 - protein, 106 aa, Artificial Sequence
  source: /note="Description of Artificial Sequence: Synthetic polypeptide"
SYELTQPPSVSVSPGQTASITCSGDKLGDKYVSWYQQKPGQSPVLVIYQDSKRPSGIPERFSGSNSGNTATLTISGTQAMDEADYYCQAWVSSTVVFGGGTKLTVL

SEQ ID NO: 7252 - protein, 106 aa, Artificial Sequence
  source: /note="Description of Artificial Sequence: Synthetic polypeptide"
SYELTQPPSVSVSPGQTASITCSGDKLGDKYVSWYQQKPGQSPVVVIYQDSKRPSGIPERFSGSNSGNTATLTISGTQAMDEAYYYCQAWVSSTVVFGGGTKLTVL

SEQ ID NO: 7253 - protein, 111 aa, Artificial Sequence [sequence omitted]

SEQ ID NO: 7254 - protein, 107 aa, Artificial Sequence [sequence omitted]

SEQ ID NO: 7255 - protein, 107 aa, Mus musculus
DIVMTQSHKFMSTSVGDRVSITCKASQDVRNTVAWYQQKTGQSPKLLIYSSSYRNTGVPDRFTGSGSGTDFTFTISSVQAEDLAVYFCQQHYITPYTFGGGTKLEIK

SEQ ID NO: 7256 - protein, 107 aa, Homo sapiens
DIVMTQSPSFLSASVGDRVTITCKASQDVRNTVAWYQQKTGKAPKLLIYSSSYRNTGVPDRFTGSGSGTDFTLTISSLQAEDVAVYFCQQHYITPYTFGGGTKVEIK

SEQ ID NO: 7257 - protein, 107 aa, Homo sapiens
DIVMTQSPSSLSASVGDRVTITCKASQDVRNTVAWYQQKPGKAPKLLIYSSSYRNTGVPDRFTGSGSGTDFTLTISSLQAEDVAVYFCQQHYITPYTFGGGTKVEIK

SEQ ID NO: 7258 - protein, 107 aa, Homo sapiens
DIQMTQSPSSLSASVGDRVTITCKASQDVRNTVAWYQQKPGKAPKLLIYSSSYRNTGVPDRFSGSGSGTDFTLTISSLQAEDVAVYFCQQHYITPYTFGGGTKVEIK

SEQ ID NO: 7259 - protein, 107 aa, Homo sapiens
DIQMTQSPSSLSASVGDRVTITCKASQDVRNTVAWYQQKPGKAPKLLIYSSSYRNTGVPDRFSGSGSGTDFTLTISSLQAEDVAVYYCQQHYITPYTFGGGTKVEIK

SEQ ID NO: 7260 - protein, 214 aa, Artificial Sequence
  source: /note="Description of Artificial Sequence: Synthetic polypeptide"
DIQMTQSPSTLSASVGDRVTITCRASQSISSWLAWYQQKPGKAPKLLIYDASSLESGVPSRFSGSGSGTEFTLTISSLQPDDFATYYCQQYSSQPYTFGQGTKVEIKRTVAAPSVFIFPPSDRKLKSGTASVVCLLNNFYPREAKVQWKVDNALQSGNSQESVTEQDSKDSTYSLSSTLTLSKADYEKHKVYACEVTHQGLSSPVTKSFNRGEC

SEQ ID NO: 7261 - protein, 107 aa, Artificial Sequence
  source: /note="Description of Artificial Sequence: Synthetic polypeptide"
SSELTQDPAVSVALGQTVRITCQGDSLRSYYASWYQQKPGQAPVLVIYGKNNRPSGIPDRFSGSSSGNTASLTITGAQAEDEADYYCNSPQTSGSAVFGGGTKLTVL

SEQ ID NO: 7262 - protein, 107 aa, Artificial Sequence
  source: /note="Description of Artificial Sequence: Synthetic polypeptide"
EIVMTQSPATLSVSPGERATLSCKASQNVGTNVAWYQQKPGQAPRLLIYSASYRYSGIPARFSGSGSGTEFTLTISSLQSEDFAVYYCQQYNTDPLTFGGGTKVEIK

SEQ ID NO: 7263 - protein, 113 aa, Homo sapiens
QSVLTQPPSVSGAPGQRVTISCTGSSSNIGAGYDVHWYQQLPGTAPKLLIYGNSNRPSGVPDRFSGSKSGTSASLAITGLQAEDEADYYCQTWVHSYSTPVFGGGTKLTVLGQ

SEQ ID NO: 7264 - protein, 109 aa, Homo sapiens
DIQMTQSPSSVSASVGDRVTITCRASQGISSWLAWYQQKPGKAPKLLIYAASSLQSGVPSRFSGSGSGTDFTLTISSLQPEDFATYYCQQNHKYPITFGQGTKVEIKRT

SEQ ID NO: 7265 - protein, 113 aa, Homo sapiens
QSVLTQPPSVSAAPGQKVTISCSGSSSNIGNNYVSWYQQLPGTAPKLLIYDNNKRPSGIPDRFSGSKSGTSATLGITGLQTEDEADYYCQAWVHYSLVHWVFGGGTKLTVLGQ

SEQ ID NO: 7266 - protein, 113 aa, Homo sapiens
QSVLTQPPSVSAAPGQKVTISCSGSSSNIGNNYVSWYQQLPGTAPKLLIYDNNKRPSGIPDRFSGSKSGTSATLGITGLQTEDEADYYCGSWDGFVSSYSVFGGGTKLTVLGQ

SEQ ID NO: 7267 - protein, 112 aa, Homo sapiens
QSVLTQPPSVSGAPGQRVTISCTGSSSNIGAGYDVHWYQQLPGTAPKLLIYGNSNRPSGVPDRFSGSKSGTSASLAITGLQAEDEADYYCQAYASPTRVVFGGGTKLTVLGQ

SEQ ID NO: 7268 - protein, 113 aa, Homo sapiens
QSVLTQPPSVSAAPGQKVTISCSGSSSNIGNNYVSWYQQLPGTAPKLLIYDNNKRPSGIPDRFSGSKSGTSATLGITGLQTEDEADYYCGAWDSYLSVSFVFGGGTKLTVLGQ

SEQ ID NO: 7269 - protein, 108 aa, Homo sapiens
DIQMTQSPSSLSASVGDRVTITCRASQSISGYLNWYQQKPGKAPKLLIYQASSLQSGVPSRFSGSGSGTDFTLTISSLQPEDFATYYCQQSYTSPFITFGQGTKVEIK

SEQ ID NO: 7270 - protein, 108 aa, Homo sapiens
DIQMTQSPATLSASVGDRVTITCRASQSISGYLNWYQQKPGKAPKLLIYQASSLQSGVPSRFSGSGSGTDFTLTISSLQPEDFATYYCQQSYTSPFITFGPGTKVEIK

SEQ ID NO: 7271 - protein, 108 aa, Homo sapiens
DIQMTQSPSSLSASVGDRVTITCRASQSISSYLNWYQQKPGKAPKLLIYQASSLQSGVPSRFSGSGSGTDFTLTISSLQPEDFATYYCQQSYTSPFITFGQGTKVEIK

SEQ ID NO: 7272 - protein, 108 aa, Homo sapiens
DIQMTQSPATLSASVGDRVTITCRASQSISSYLNWYQQKPGKAPKLLIYQASSLQSGVPSRFSGSGSGTDFTLTISSLQPEDFATYYCQQSYTSPFITFGPGTKVEIK

SEQ ID NO: 7273 - protein, 108 aa, Homo sapiens
DIQMTQSPSSLSASVGDRVTITCRASQSISSYLNWYQQKPGKAPKLLIYAASSLQSGVPSRFSGSGSGTDFTLTISSLQPEDFATYYCQQSYSTPGITFGQGTKVEIK

SEQ ID NO: 7274 - protein, 108 aa, Homo sapiens
DIQMTQSPATLSASVGDRVTITCRASQSISSYLNWYQQKPGKAPKLLIYAASSLQSGVPSRFSGSGSGTDFTLTISSLQPEDFATYYCQQSYSSPGITFGPGTKVEIK

SEQ ID NO: 7275 - protein, 110 aa, Homo sapiens
AQDIQMTQSPATLSASVGDRVTITCRASQSISSYLNWYQQKPGKAPKLLIYAASSLQSGVPSRFSGSGSGTDFTLTISSLQPEDFATYYCQQSYSSPGITFGPGTKVEIK

SEQ ID NO: 7276 - protein, 110 aa, Homo sapiens
AQDIQMTQSPATLSASVGDRVTITCRASQSISGYLNWYQQKPGKAPKLLIYNASSLQSGVPSRFSGSGSGTDFTLTISSLQPEDFATYYCQQSYTSPFITFGPGTKVEIK

SEQ ID NO: 7277 - protein, 110 aa, Homo sapiens
AQDIQMTQSPATLSASVGDRVTITCRASQSISSYLNWYQQKPGKAPKLLIYNASSLQSGVPSRFSGSGSGTDFTLTISSLQPEDFATYYCQQSYTSPGITFGPGTKVEIK

SEQ ID NO: 7278 - protein, 110 aa, Homo sapiens
AQDIQMTQSPATLSASVGDRVTITCRASQSISGYLNWYQQKPGKAPKLLIYNASSLQSGVPSRFSGSGSGTDFTLTISSLQPEDFATYYCQQSYTSPGITFGPGTKVEIK

SEQ ID NO: 7279 - protein, 110 aa, Homo sapiens
AQDIQMTQSPATLSASVGDRVTITCRASQSISSYLNWYQQKPGKAPKLLIYNASSLQSGVPSRFSGSGSGTDFTLTISSLQPEDFATYYCQQSYTSPFITFGPGTKVEIK

SEQ ID NO: 7280 - protein, 107 aa, Artificial Sequence
  source: /note="Description of Artificial Sequence: Synthetic polypeptide"
DILLTQSPVILSVSPGERVSFSCRASQSIGTNIHWYQQRTNGSPRLLIKYASESISGIPSRFSGSGSGTDFTLSINSVESEDIADYYCQQNNNWPTTFGAGTKLELK

SEQ ID NO: 7281 - protein, 107 aa, Artificial Sequence
  source: /note="Description of Artificial Sequence: Synthetic polypeptide"
EIVLTQSPATLSVSPGERATLSCRASQSIGTNIHWYQQKPGQAPRLLIYYASESISGIPARFSGSGSGTEFTLTISSLQSEDFAVYYCQQNNNWPTTFGQGTKLEIK

SEQ ID NO: 7282 - protein, 107 aa, Artificial Sequence
  source: /note="Description of Artificial Sequence: Synthetic polypeptide"
DIQMTQSPSSVSASVGDRVTITCRASQGISSWLAWYQQKPGKAPKVLIYAASSLQSGVPSRFSGSGSGTDFTLTISSLQPEDFATYYCQQANSFPFTFGPGTKLDIK

SEQ ID NO: 7283 - protein, 107 aa, Artificial Sequence
  source: /note="Description of Artificial Sequence: Synthetic polypeptide"
DIQMTQSPSSLSASLRDRVTITCRASQGISNYLAWYQQKPGKVPKVLIYAASTLQSGVPSRFSGSGSGTVFTLTISSLQTEDVATYYCQKYSSAPFTFGPGTKVDIK

SEQ ID NO: 7284 - protein, 108 aa, Artificial Sequence
  source: /note="Description of Artificial Sequence: Synthetic polypeptide"
EIVLTQSPGTLSLSPGERVTLSCRASQSVGRPYLAWYQQIPGQAPRLLIYGASSRATDIPDRFSGNGSGTDFTLTISRLEPEDFAVYYCQQYDNSPYTFGQGTRLEIK

SEQ ID NO: 7285 - protein, 107 aa, Artificial Sequence
  source: /note="Description of Artificial Sequence: Synthetic polypeptide"
DIQMTQSPSSVSASVGDRVTITCRASQGFSSWLAWYQQKPGKAPKLLIYAASSLQSGVPSRFSGSGSGTDFTLTITNLQPEDFATYYCQQANSFPLTFGGGTKVEIK

SEQ ID NO: 7286 - protein, 107 aa, Artificial Sequence
  source: /note="Description of Artificial Sequence: Synthetic polypeptide"
DIQMTQSPSSVSASVGDRVTITCRASQGISSWLAWYQQKPGKAPKLLIYAASSLQSGVPSRFSGSGSGTYFTLTISSLQPEDFATYYCQQANSFPLTFGGGTKVEIK

SEQ ID NO: 7287 - protein, 107 aa, Artificial Sequence
  source: /note="Description of Artificial Sequence: Synthetic polypeptide"
DIQMTQSPSSVSASVGDRVTITCRASQGISTWLAWFQQKPGKAPKLLIYAASTLQGGVPSRFSGSGSGPEFTLTISSLQPEDFATYYCQQANSFPWTFGQGTKVEIK

SEQ ID NO: 7288 - protein, 107 aa, Artificial Sequence
  source: /note="Description of Artificial Sequence: Synthetic polypeptide"
DIQMTQSPSSVSASVGDRVTITCRASQGFSSWLAWYQQKPGKAPQLLIYAASSLQSGVPSRFSGSGSGSDFTLTISSLQPEDFATYYCQQANSFPLTFGGGTKVEIK

SEQ ID NO: 7289 - protein, 107 aa, Artificial Sequence
  source: /note="Description of Artificial Sequence: Synthetic polypeptide"
DIQMTQSPSSVSASVGDRVTITCRASQGITSWLAWYQQKPGKAPTLLIYAASSLQTGVPSRFSGSGSGTDFTLTISSLQPEHFATYYCQQANSFPPTFGGGTKVEIK

SEQ ID NO: 7290 - protein, 107 aa, Artificial Sequence
  source: /note="Description of Artificial Sequence: Synthetic polypeptide"
DIQMTQSPSSVSASVGDRVTITCRASQGVVSWLAWYQQKPGKAPKLLIYAASSLQSGVPSRFSGSGSGTDFTLTISSLQPEDFATYYCQQSNSFPFTLGPGTKVDIK

SEQ ID NO: 7291 - protein, 107 aa, Artificial Sequence
  source: /note="Description of Artificial Sequence: Synthetic polypeptide"
DIQMTQSPSSVSASVGDRVTITCRASQGITSWLAWYQQKPGKAPNLLIYAAASLQSGVPSRFSGSGSGTDFTLTISSLQPEDFTTYYCQQAYSLPLTFGGGTKVEIK

SEQ ID NO: 7292 - protein, 107 aa, Artificial Sequence
  source: /note="Description of Artificial Sequence: Synthetic polypeptide"
DIQMTQSPSSVSASVGDRVTITCRASQGIRSWLAWYQQKPGKAPNLLIYAASSLQSGVPSRFSGSGSGTDFTLTISSLQPEDFATYYCQQANSFPPTFGPGTKVDIK

SEQ ID NO: 7293 - protein, 107 aa, Artificial Sequence
  source: /note="Description of Artificial Sequence: Synthetic polypeptide"
DIQMTQSPSSVSASVGDRVTITCRASQGISSWLAWYQQKPGKAPQLLIYAASRLQSGVPSRFWGSGSGTDFTLTISSLQPEDFATYYCQQANNFPFTFGPGTKVDIK

SEQ ID NO: 7294 - protein, 107 aa, Artificial Sequence
  source: /note="Description of Artificial Sequence: Synthetic polypeptide"
DIQMTQSPSSVSASVGDRVTITCRASQGIFSWLAWYQQKPGKAPKVLIYAASNLESGVPSRFSGSGSGTDFTLTISSLQPEDFATYYCQQANSLPLTFGGGTKVEIK

SEQ ID NO: 7295 - protein, 107 aa, Artificial Sequence
  source: /note="Description of Artificial Sequence: Synthetic polypeptide"
DIQMTQSPSSVSASVGDRVTITCRASQGITSWLAWYQQKPGKAPKLLIYAASNLQSGVPSRFSGSGSGTDFTLTITSLQPEDFATYYCQQANSLPFTFGPGTKVDIK

SEQ ID NO: 7296 - protein, 107 aa, Artificial Sequence
  source: /note="Description of Artificial Sequence: Synthetic polypeptide"
DIQMTQSPSSVSASIGDRVTITCRASQGISSWLAWYQQKPGKVPKLLIYAASSLQSGFPSRFSGSGSGTDFTLTISSLQPEDFATYYCQQTHSFPWTVGQGTKVEIK

SEQ ID NO: 7297 - protein, 107 aa, Artificial Sequence
  source: /note="Description of Artificial Sequence: Synthetic polypeptide"
DIQMTQSPSSVSVSVGDRVTITCRASQGISSWLAWYQQKPGKAPKLLIYVASSLQSGVPSRFSGSGSGTDFTLTISSLQPEDFATYYCQQTNSFPLTFGGGTKVEIK

SEQ ID NO: 7298 - protein, 107 aa, Artificial Sequence
  source: /note="Description of Artificial Sequence: Synthetic polypeptide"
DIQMTQSPSSVSVSVGDRVTITCRASQVISSWLAWYQLKPGKAPKLLIYAASSLQSGVPSRFSGSGSGTDFTLTISGLQPEDFAVYYCQQTNSFPLTFGGGTKVEIK

SEQ ID NO: 7299 - protein, 107 aa, Artificial Sequence
  source: /note="Description of Artificial Sequence: Synthetic polypeptide"
DIQMTQSPSSVSASVGDRVTITCRASQGIFSWLAWYQQKPGKAPKLLIYAASSLQSGVPSRFSGSGSGTDFTLTISSLQPEDFAIYYCQQANSVPITFGQGTRLEIK

SEQ ID NO: 7300 - protein, 107 aa, Artificial Sequence
  source: /note="Description of Artificial Sequence: Synthetic polypeptide"
DIQMTQSPSSVSASVGDRVTITCRASQGFSSWLAWYQQIPGKAPKLLIYAASRLQSGVPSRFRGSGSGTDFTLTISSLQPEDFATYYCQQANSFPLTFGGGTKVEIK

SEQ ID NO: 7301 - protein, 112 aa, Artificial Sequence
  source: /note="Description of Artificial Sequence: Synthetic polypeptide"
DFVMTQSPDSLAVSLGERATINCKSSQSVLHRSSNKNYLAWYQQKPGQPPNLLIYWASTRESGVPDRFSGSGSGTDFTLTISSLQAEDVAVYYCQQYYGTLFTFGPGTKVDI

SEQ ID NO: 7302 - protein, 107 aa, Mus musculus
DIAMTQSQKFMSTSVGDRVSVTCKASQNVDTNVAWYQQKPGQSPKALIYSASYRYSGVPDRFTGSGSGTDFTLTINNVQSEDLAEYFCQQYNNYPFTFGSGTKLEIK

SEQ ID NO: 7303 - protein, 107 aa, Artificial Sequence
  source: /note="Description of Artificial Sequence: Synthetic polypeptide"
DIQLTQSPSFLSASVGDRVTITCKASQNVDTNVAWYQQKPGKAPKLLIYSASYRYSGVPSRFSGSGSGTDFTLTISSLQPEDFATYYCQQYNNYPFTFGQGTKLEIK

SEQ ID NO: 7304 - protein, 107 aa, Artificial Sequence
  source: /note="Description of Artificial Sequence: Synthetic polypeptide"
DIQLTQSPSFLSASVGDRVTITCKASQNVDTNVAWYQQKPGKAPKALIYSASYRYSGVPSRFSGSGSGTDFTLTISSLQPEDFATYYCQQYNNYPFTFGQGTKLEIK

SEQ ID NO: 7305 - protein, 107 aa, Artificial Sequence
  source: /note="Description of Artificial Sequence: Synthetic polypeptide"
DIQLTQSPSFLSASVGDRVSVTCKASQNVDTNVAWYQQKPGKAPKLLIYSASYRYSGVPSRFSGSGSGTDFTLTISSLQPEDFATYYCQQYNNYPFTFGQGTKLEIK

SEQ ID NO: 7306 - protein, 107 aa, Artificial Sequence
  source: /note="Description of Artificial Sequence: Synthetic polypeptide"
DIQLTQSPSFLSASVGDRVTITCKASQNVDTNVAWYQQKPGQAPKLLIYSASYRYSGVPSRFSGSGSGTDFTLTISSLQPEDFATYYCQQYNNYPFTFGQGTKLEIK

SEQ ID NO: 7307 - protein, 107 aa, Artificial Sequence
  source: /note="Description of Artificial Sequence: Synthetic polypeptide"
DIQLTQSPSFLSASVGDRVTITCKASQNVDTNVAWYQQKPGQAPKALIYSASYRYSGVPSRFSGSGSGTDFTLTISSLQPEDFATYYCQQYNNYPFTFGQGTKLEIK

SEQ ID NO: 7308 - protein, 107 aa, Artificial Sequence
  source: /note="Description of Artificial Sequence: Synthetic polypeptide"
DIQLTQSPSFLSASVGDRVTITCKASQNVDTNVAWYQQKPGKAPKLLIYSASYRYSGVPSRFSGSGSGTDFTLTISSLQPEDFAEYYCQQYNNYPFTFGQGTKLEIK

SEQ ID NO: 7309 - protein, 107 aa, Mus musculus
DIQMTQTTSSLSASLGDRVTISCRASQDISNYLNWYQQKPDGTVKLLIYYTSRLHSGVPSRFSGSGSGTDYSLTIDNLEQEDIATYFCQQGNTLPPTFGGGTKLEIK

SEQ ID NO: 7310 - protein, 107 aa, Artificial Sequence
  source: /note="Description of Artificial Sequence: Synthetic polypeptide"
DIQMTQSPSSLSASVGDRVTITCRASQDISNYLNWYQQKPGKAPKLLIYYTSRLHSGVPSRFSGSGSGTDFTLTISSLQPEDIATYYCQQGNTLPPTFGGGTKLEIK

SEQ ID NO: 7311 - protein, 107 aa, Artificial Sequence
  source: /note="Description of Artificial Sequence: Synthetic polypeptide"
DIQMTQSPSSLSASVGDRVTITCRASQSISSYLNWYQQKPGKAPKLLIYYTSRLQSGVPSRFSGSGSGTDFTLTISSLQPEDIATYYCQQGNTLPPTFGGGTKLEIK

SEQ ID NO: 7312 - protein, 108 aa, Mus musculus
DIQMTQSPASLSVSVGETVTITCRASESIYSYLAWYQQKQGKSPQLLVYNTKTLPEGVPSRFSGSGSGTQFSLKINSLQPEDFGRYYCQHHYGTPPWTFGGGTNLEIK

SEQ ID NO: 7313 - protein, 108 aa, Mus musculus
EIVLTQSPGTLSLSPGERATLSCRASQSVGSSYLAWYQQKPGQAPRLLIYGAFSRATGIPDRFSGSGSGTDFTLTISRLEPEDFAVYYCQQYGSSPWTFGQGTKVEIK

SEQ ID NO: 7314 - protein, 107 aa, Mus musculus
DIQMTQSPSSLSASVGDRVTITCRASQSINSYLDWYQQKPGKAPKLLIYAASSLQSGVPSRFSGSGSGTDFTLTISSLQPEDFATYYCQQYYSTPFTFGPGTKVEIK

SEQ ID NO: 7315 - protein, 96 aa, Artificial Sequence
  source: /note="Description of Artificial Sequence: Synthetic polypeptide"
EIVLTQSPATLSLSPGERATLSCRASSSVSYMHWYQQKPGKSPKPWIYATSNLASGVPSRFSGSGSGTDFTFTISSLQPEDIATYYCQQWSRNPFT

SEQ ID NO: 7316 - protein, 96 aa, Artificial Sequence
  source: /note="Description of Artificial Sequence: Synthetic polypeptide"
QIVLSQSPTILSASPGEKVTMTCRASSSVSYMHWYQQKPGSSPKPWIYATSNLASGVPARFSGSGSGTSYSLTISRVEAEDAATYFCQQWSRNPFT

SEQ ID NO: 7317 - protein, 213 aa, Artificial Sequence
  source: /note="Description of Artificial Sequence: Synthetic polypeptide"
EIVLTQSPATLSLSPGERATLSCRASSSVSYMHWYQQKPGKSPKPWIYATSNKASGVPSRFSGSGSGTDFTFTISSLQPEDIATYYCQQWSRRPFTFGQGTKVEIKRTVAAPSVFIFPPSDEQLKSGTASVVCLLNNFYPREAKVQWKVDNALQSGNSQESVTEQDSKDSTYSLSSTLTLSKADYEKHKVYACEVTHQGLSSPVTKSFNRGEC

SEQ ID NO: 7318 - protein, 106 aa, Artificial Sequence
  source: /note="Description of Artificial Sequence: Synthetic polypeptide"
DIQMTQSPSSLSASLGGKVTITCKASQDIKKYIAWYQHKPGKGPRLLIHYTSTLQPGIPSRFSGSGSGRDYSFSISNLEPVDIATYYCLQYDNLLTFGAGTKLELK

SEQ ID NO: 7319 - protein, 107 aa, Artificial Sequence
  source: /note="Description of Artificial Sequence: Synthetic polypeptide"
DIVMTQSHKFMSTLVGDRVSITCKASQDVSTTVAWYQQKPGQSPKLLIYSASYRYTGVPDRFTGSGSGTDFTFTISSVQAEDLAVYYCQQHYSIPRTFGGGTKLEIK

SEQ ID NO: 7320 - protein, 106 aa, Artificial Sequence
  source: /note="Description of Artificial Sequence: Synthetic polypeptide"
DIVMTQSQKFMSITLGERVSITCKPSQNVGSAVTWWQQKPGQSPKLLIYSASNRYTGVPDRFTGSGSGTDFTLTISNVQSEDLADYFCQQYSSYPYTFGGTKLEIK

SEQ ID NO: 7321 - protein, 112 aa, Artificial Sequence
  source: /note="Description of Artificial Sequence: Synthetic polypeptide"
DVVMTQTPLSLPVSLGDQASISCRSRQSLVHSNGNTYLHWYLQKPGQSPKLLIYKVSNRFSGVPDRFSGSGSGTEFTLEISRVEAEDLGVYFCSQSTHVPPTFGGGTKLEIK

SEQ ID NO: 7322 - protein, 107 aa, Artificial Sequence
  source: /note="Description of Artificial Sequence: Synthetic polypeptide"
DIVMTQSQKFMSITLGERVSITCKPSQKVGSRVTWWQQKPGQSPKLLIYSAINRYTGVPDRFTGSGSGTDFTLTISNVQSEDLADYFCQQYSSYPYTFGGGTKLEIK

SEQ ID NO: 7323 - protein, 107 aa, Artificial Sequence
  source: /note="Description of Artificial Sequence: Synthetic polypeptide"
DIVMTQSQKFMSITLGERVSITCKPSQRVGSRVTWWQQKPGQSPKLLIYSTINRYTGVPDRFTGSGSGTDFTLTISNVQSEDLADYFCQQYSSYPYTFGGGTKLEIK

SEQ ID NO: 7324 - protein, 107 aa, Artificial Sequence
  source: /note="Description of Artificial Sequence: Synthetic polypeptide"
DIVMTQSQKFMSITLGERVSITCKPSQKVGSAVTWWQQKPGQSPKLLIYSTNNRYTGVPDRFTGSGSGTDFTLTISNVQSEDLADYFCQQYSSYPYTFGGGTKLEIK

SEQ ID NO: 7325 - protein, 107 aa, Artificial Sequence
  source: /note="Description of Artificial Sequence: Synthetic polypeptide"
DIVMTQSQKFMSITLGERVSITCKPSQNVGSAVTWWQQKPGQSPKLLIYSASNRYTGVPDRFTGSGSGTDFTLTISNVQSEDLADYFCQQYSSYPYTFGGGTKLEIK

SEQ ID NO: 7326 - protein, 107 aa, Artificial Sequence
  source: /note="Description of Artificial Sequence: Synthetic polypeptide"
DIVMTQSQKFMSITLGERVSITCKPSQKVGSAVTWWQQKPGQSPKLLIYSTIRRYTGVPDRFTGSGSGTDFTLTISNVQSEDLADYFCQQYSSYPYTFGGGTKLEIK

SEQ ID NO: 7327 - protein, 107 aa, Artificial Sequence
  source: /note="Description of Artificial Sequence: Synthetic polypeptide"
DIVMTQSQKFMSITLGERVSITCKPSQKVGSRVTWWQQKPGQSPKLLIYSANNRYTGVPDRFTGSGSGTDFTLTISNVQSEDLADYFCQQYSSYPYTFGGGTKLEIK

SEQ ID NO: 7328 - protein, 107 aa, Artificial Sequence
  source: /note="Description of Artificial Sequence: Synthetic polypeptide"
DIVMTQSQKFMSITLGERVSITCKPSQKVGSRVTWWQQKPGQSPKLLIYSTNNRYTGVPDRFTGSGSGTDFTLTISNVQSEDLADYFCQQYSSYPYTFGGGTKLEIK

SEQ ID NO: 7329 - protein, 107 aa, Artificial Sequence
  source: /note="Description of Artificial Sequence: Synthetic polypeptide"
DIVMTQSQKFMSITLGERVSITCKPSQKVGSAVTWWQQKPGQSPKLLIYSANRRYTGVPDRFTGSGSGTDFTLTISNVQSEDLADYFCQQYSSYPYTFGGGTKLEIK

SEQ ID NO: 7330 - protein, 112 aa, Artificial Sequence
  source: /note="Description of Artificial Sequence: Synthetic polypeptide"
DVVMTQTPLSLPVSLGDQASISCRSRQMLVHSNGNTYLHWYLQKPGQSPKLLIYKVSNRFSGVPDRFSGSGSGTEFTLEISRVEAEDLGVYFCSQSTHVPPTFGGGTKLEIK

SEQ ID NO: 7331 - protein, 112 aa, Artificial Sequence
  source: /note="Description of Artificial Sequence: Synthetic polypeptide"
DVVMTQTPLSLPVSLGDQASISCRSRQSLLHSNGNTYLHWYLQKPGQSPKLLIYKVSNRFSGVPDRFSGSGSGTEFTLEISRVEAEDLGVYFCSQSTHVPPTFGGGTKLEIK

SEQ ID NO: 7332 - protein, 112 aa, Artificial Sequence
  source: /note="Description of Artificial Sequence: Synthetic polypeptide"
DVVMTQTPLSLPVSLGDQASISCHSRQSLVHSNGNTYLHWYLQKPGQSPKLLIYKVSNRFSGVPDRFSGSGSGTEFTLEISRVEAEDLGVYFCSQSTHVPPTFGGGTKLEIK

SEQ ID NO: 7333 - protein, 112 aa, Artificial Sequence
  source: /note="Description of Artificial Sequence: Synthetic polypeptide"
DVVMTQTPLSLPVSLGDQASISCRSGQSLVHSNGNTYLHWYLQKPGQSPKLLIYKVSNRFSGVPDRFSGSGSGTEFTLEISRVEAEDLGVYFCSQSTHVPPTFGGGTKLEIK

SEQ ID NO: 7334 - protein, 112 aa, Artificial Sequence
  source: /note="Description of Artificial Sequence: Synthetic polypeptide"
DVVMTQTPLSLPVSLGDQASISCRSNQSLVHSNGNTYLHWYLQKPGQSPKLLIYKVSNRFSGVPDRFSGSGSGTEFTLEISRVEAEDLGVYFCSQSTHVPPTFGGGTKLEIK

SEQ ID NO: 7335 - protein, 109 aa, Artificial Sequence
  source: /note="Description of Artificial Sequence: Synthetic polypeptide"
DVVMTQTPLSLPVSLGDQASIRSRQSVHSNGNSYLHWYLQKPGQSPKLLIYKVSNRFSGVPDRFSGSGSGTEFTLEISRVEAEDLGVYFCSQSTHVPPTFGGGTKLEIK

SEQ ID NO: 7336 - protein, 112 aa, Artificial Sequence
  source: /note="Description of Artificial Sequence: Synthetic polypeptide"
DVVMTQTPLSLPVSLGDQASISCRSRQSLVHINGNTYLHWYLQKPGQSPKLLIYKVSNRFSGVPDRFSGSGSGTEFTLEISRVEAEDLGVYFCSQSTHVPPTFGGGTKLEIK

SEQ ID NO: 7337 - protein, 112 aa, Artificial Sequence
  source: /note="Description of Artificial Sequence: Synthetic polypeptide"
DVVMTQTPLSLPVSLGDQASISCRSRQSLVHSNGNTYWHWYLQKPGQSPKLLIYKVSNRFSGVPDRFSGSGSGTEFTLEISRVEAEDLGVYFCSQSTHVPPTFGGGTKLEIK

SEQ ID NO: 7338 - protein, 112 aa, Artificial Sequence
  source: /note="Description of Artificial Sequence: Synthetic polypeptide"
DVVMTQTPLSLPVSLGDQASISCRSRQSLVHSVGNTYLHWYLQKPGQSPKLLIYKVSNRFSGVPDRFSGSGSGTEFTLEISRVEAEDLGVYFCSQSTHVPPTFGGGTKLEIK

SEQ ID NO: 7339 - protein, 112 aa, Artificial Sequence
  source: /note="Description of Artificial Sequence: Synthetic polypeptide"
DVVMTQTPLSLPVSLGDQASISCRSRQSLVHSNGNTYLHWYLQKPGQSPKLLIYNVSNRFSGVPDRFSGSGSGTEFTLEISRVEAEDLGVYFCSQSTHVPPTFGGGTKLEIK

SEQ ID NO: 7340 - protein, 112 aa, Artificial Sequence
  source: /note="Description of Artificial Sequence: Synthetic polypeptide"
DVVMTQTPLSLPVSLGDQASISCRSRQSLVHSNGNTYLHWYLQKPGQSPKLLIYKVSRRFSGVPDRFSGSGSGTEFTLEISRVEAEDLGVYFCSQSTHVPPTFGGGTKLEIK

SEQ ID NO: 7341 - protein, 112 aa, Artificial Sequence
  source: /note="Description of Artificial Sequence: Synthetic polypeptide"
DVVMTQTPLSLPVSLGDQASISCRSRQSLVHSNGNTYLHWYLQKPGQSPKLLIYKVSNRRSGVPDRFSGSGSGTEFTLEISRVEAEDLGVYFCSQSTHVPPTFGGGTKLEIK

SEQ ID NO: 7342 - protein, 112 aa, Artificial Sequence
  source: /note="Description of Artificial Sequence: Synthetic polypeptide"
DVVMTQTPLSLPVSLGDQASISCRSRQSLVHSNGNTYLHWYLQKPGQSPKLLIYKVSNLFSGVPDRFSGSGSGTEFTLEISRVEAEDLGVYFCSQSTHVPPTFGGGTKLEIK

SEQ ID NO: 7343 - protein, 112 aa, Artificial Sequence
  source: /note="Description of Artificial Sequence: Synthetic polypeptide"
DVVMTQTPLSLPVSLGDQASISCRSRQSLVHSNGNTYLHWYLQKPGQSPKLLIYKVSNRFSGVPDRFSGSGSGTEFTLEISRVEAEDLGVYFCSQSTHVSPTFGGGTKLEIK

SEQ ID NO: 7344 - protein, 112 aa, Artificial Sequence
  source: /note="Description of Artificial Sequence: Synthetic polypeptide"
DVVMTQTPLSLPVSLGDQASISCRSRQSLVHSNGNTYLHWYLQKPGQSPKLLIYKVSNRFSGVPDRFSGSGSGTEFTLEISRVEAEDLGVYFCSQSTHVPPRFGGGTKLEIK

SEQ ID NO: 7345 - protein, 112 aa, Artificial Sequence
  source: /note="Description of Artificial Sequence: Synthetic polypeptide"
DVVMTQTPLSLPVSLGDQASISCRSRQSLVHSNGNTYLHWYLQKPGQSPKLLIYKVSNRFSGVPDRFSGSGSGTEFTLEISRVEAEDLGVYFCSQSTHGPPTFGGGTKLEIK

SEQ ID NO: 7346 - protein, 112 aa, Artificial Sequence
  source: /note="Description of Artificial Sequence: Synthetic polypeptide"
DVVMTQTPLSLPVSLGDQASISCRSRQSLVHSNGNTYLHWYLQKPGQSPKLLIYKVSNRFSGVPDRFSGSGSGTEFTLEISRVEAEDLGVYFCSPSTHVPPTFGGGTKLEIK

SEQ ID NO: 7347 - protein, 7 aa, Mus musculus
AASNLES

SEQ ID NO: 7348 - protein, 7 aa, Artificial Sequence
  source: /note="Description of Artificial Sequence: Synthetic peptide"
AASTLES

SEQ ID NO: 7349 - protein, 12 aa, Mus musculus
GFSLSTSGMGVG

SEQ ID NO: 7350 - protein, 16 aa, Artificial Sequence
  source: /note="Description of Artificial Sequence: Synthetic peptide"
HIDWDDDKYYSPSLKS

SEQ ID NO: 7351 - protein, 12 aa, Artificial Sequence
  source: /note="Description of Artificial Sequence: Synthetic peptide"
HIDWDDDKYYST

SEQ ID NO: 7352 - protein, 12 aa, Mus musculus
HIWWDDDKYYNP

SEQ ID NO: 7353 - protein, 14 aa, Artificial Sequence
  source: /note="Description of Artificial Sequence: Synthetic peptide"
IRSSVYAHYYGMDV

SEQ ID NO: 7354 - protein, 14 aa, Artificial Sequence
  source: /note="Description of Artificial Sequence: Synthetic peptide"
IRSSVYAHYYGMDY

SEQ ID NO: 7355 - protein, 15 aa, Mus musculus
KASQSVDYDGDSYLN

SEQ ID NO: 7356 - protein, 15 aa, Artificial Sequence
  source: /note="Description of Artificial Sequence: Synthetic peptide"
KASQSVLYSGDNYLN

SEQ ID NO: 7357 - protein, 13 aa, Mus musculus
KRSSVVAHYYAMD

SEQ ID NO: 7358 - protein, 15 aa, Artificial Sequence
  source: /note="Description of Artificial Sequence: Synthetic peptide"
KSSQSVLYSGDNYLN

SEQ ID NO: 7359 - protein, 7 aa, Mus musculus
QQSNGDP

SEQ ID NO: 7360 - protein, 9 aa, Artificial Sequence
  source: /note="Description of Artificial Sequence: Synthetic peptide"
QQYNGDPWT

SEQ ID NO: 7361 - protein, 7 aa, Artificial Sequence
  source: /note="Description of Artificial Sequence: Synthetic peptide"
TSGMGVG

SEQ ID NO: 7362 - protein, 17 aa, Mus musculus
DINPNNGGTSYNQKFKG

SEQ ID NO: 7363 - protein, 17 aa, Mus musculus
DINPNNGGTTYNQKFKG

SEQ ID NO: 7364 - protein, 5 aa, Mus musculus
DYYMA

SEQ ID NO: 7365 - protein, 5 aa, Mus musculus
DYYMN

SEQ ID NO: 7366 - protein, 17 aa, Mus musculus
EINPSNGRTNYNEKFKS

SEQ ID NO: 7367 - protein, 17 aa, Artificial Sequence
  source: /note="Description of Artificial Sequence: Synthetic peptide"
EISPFGGRTNYNEKFKS

SEQ ID NO: 7368 - protein, 8 aa, Mus musculus
EKFAAMDY

SEQ ID NO: 7369 - protein, 9 aa, Mus musculus
ERPLYAMDY

SEQ ID NO: 7370 - protein, 9 aa, Artificial Sequence
  source: /note="Description of Artificial Sequence: Synthetic peptide"
ERPLYASDL

SEQ ID NO: 7371 - protein, 7 aa, Mus musculus
GFTFSDY

SEQ ID NO: 7372 - protein, 10 aa, Artificial Sequence
  source: /note="Description of Artificial Sequence: Synthetic peptide"
GFTFSDYYMA

SEQ ID NO: 7373 - protein, 14 aa, Mus musculus
GGIYYRYDRNYFDY

SEQ ID NO: 7374 - protein, 7 aa, Mus musculus
GYTFTDY

SEQ ID NO: 7375 - protein, 10 aa, Artificial Sequence
  source: /note="Description of Artificial Sequence: Synthetic peptide"
GYTFTDYYMN

SEQ ID NO: 7376 - protein, 7 aa, Mus musculus
GYTFTSY

SEQ ID NO: 7377 - protein, 10 aa, Artificial Sequence
  source: /note="Description of Artificial Sequence: Synthetic peptide"
GYTFTSYWMH

SEQ ID NO: 7378 - protein, 10 aa, Artificial Sequence
  source: /note="Description of Artificial Sequence: Synthetic peptide"
GYTFTSYYMH

SEQ ID NO: 7379 - protein, 11 aa, Mus musculus
KASQDVSNALA

SEQ ID NO: 7380 - protein, 11 aa, Mus musculus
KASQDVSTAVA

SEQ ID NO: 7381 - protein, 16 aa, Mus musculus
NINYDGSNTSYLDSLK

SEQ ID NO: 7382 - protein, 6 aa, Mus musculus
NPNNGG

SEQ ID NO: 7383 - protein, 6 aa, Mus musculus
NPSNGR

SEQ ID NO: 7384 - protein, 6 aa, Mus musculus
NYDGSN

SEQ ID NO: 7385 - protein, 9 aa, Mus musculus
QQFYSYPYT

SEQ ID NO: 7386 - protein, 9 aa, Mus musculus
QQHYSTPWT

SEQ ID NO: 7387 - protein, 9 aa, Artificial Sequence
  source: /note="Description of Artificial Sequence: Synthetic peptide"
QQRYSLWRT

SEQ ID NO: 7388 - protein, 9 aa, Mus musculus
QQRYSTPRT

SEQ ID NO: 7389 - protein, 9 aa, Artificial Sequence
  source: /note="Description of Artificial Sequence: Synthetic peptide"
QQYSKLPFT

SEQ ID NO: 7390 - protein, 11 aa, Artificial Sequence
  source: /note="Description of Artificial Sequence: Synthetic peptide"
RASQGISSALA

SEQ ID NO: 7391 - protein, 11 aa, Mus musculus
SASQGISNYLN

SEQ ID NO: 7392 - protein, 6 aa, Artificial Sequence
  source: /note="Description of Artificial Sequence: Synthetic peptide"
SPFGGR

SEQ ID NO: 7393 - protein, 5 aa, Mus musculus
SYWMH

SEQ ID NO: 7394 - protein, 5 aa, Artificial Sequence
  source: /note="Description of Artificial Sequence: Synthetic peptide"
SYYMH

SEQ ID NO: 7395 - protein, 6 aa, Mus musculus
WLLFAY

SEQ ID NO: 7396 - protein, 7 aa, Mus musculus
YTSSLHS

SEQ ID NO: 7397 - protein, 214 aa, Artificial Sequence
  source: /note="Description of Artificial Sequence: Synthetic polypeptide"
  SITE (26)..(37): /note="complementarity determining region"
  SITE (107)..(117): /note="complementarity determining region"
DIQLTQSPSSLSASVGDRVTITCSASQDISNYLNWYQQKPGKAPKVLIYFTSSLHSGVPSRFSGSGSGTDFTLTISSLQPEDFATYYCQQYSTVPWTFGQGTKVEIKRTVAAPSVFIFPPSDEQLKSGTASVVCLLNNFYPREAKVQWKVDNALQSGNSQESVTEQDSKDSTYSLSSTLTLSKADYEKHKVYACEVTHQGLSSPVTKSFNRGEC

SEQ ID NO: 7398 - protein, 513 aa, Artificial Sequence
  source: /note="Description of Artificial Sequence: Synthetic polypeptide"
  SITE (1)..(20): /note="leader"
  SITE (21)..(252): /note="aVEGF Heavy Chain"
  SITE (280)..(299): /note="leader"
  SITE (300)..(513): /note="aVEGF Light Chain"
MYRMQLLLLIALSLALVTNSEVQLVESGGGLVQPGGSLRLSCAASGYDFTHYGMNWVRQAPGKGLEWVGWINTYTGEPTYAADFKRRFTFSLDTSKSTAYLQMNSLRAEDTAVYYCAKYPYYYGTSHWYFDVWGQGTLVTVSSASTKGPSVFPLAPSSKSTSGGTAALGCLVKDYFPEPVTVSWNSGALTSGVHTFPAVLQSSGLYSLSSVVTVPSSSLGTQTYICNVNHKPSNTKVDKKVEPKSCDKTHLRKRRAPVKQTLNFDLLKLAGDVESNPGPMYRMQLLLLIALSLALVTNSDIQLTQSPSSLSASVGDRVTITCSASQDISNYLNWYQQKPGKAPKVLIYFTSSLHSGVPSRFSGSGSGTDFTLTISSLQPEDFATYYCQQYSTVPWTFGQGTKVEIKRTVAAPSVFIFPPSDEQLKSGTASVVCLLNNFYPREAKVQWKVDNALQSGNSQESVTEQDSKDSTYSLSSTLTLSKADYEKHKVYACEVTHQGLSSPVTKSFNRGEC

SEQ ID NO: 7399 - DNA, 372 bp, Artificial Sequence
  source: /note="Description of Artificial Sequence: Synthetic polynucleotide"
gaagtgaccctgcgcgaaagcggcccggcgctggtgaaaccgacccagaccctgaccctgacctgcacctttagcggctttagcctgagcaccagcggcatgggcgtgggctggattcgccagccgccgggcaaagcgctggaatggctggcgcatattgattgggatgatgataaatattatagcccgagcctgaaaagccgcctgaccattagcaaagataccagcaaaaaccaggtggtgctgaccatgaccaacatggatccggtggataccgcgacctattattgcgcgcgcattcgcagcagcgtgtatgcgcattattatggcatggattattggggccagggcaccaccgtgaccgtgagcagc

SEQ ID NO: 7400 - DNA, 372 bp, Artificial Sequence
  source: /note="Description of Artificial Sequence: Synthetic polynucleotide"
gaagtgaccctgcgcgaaagcggcccggcgctggtgaaaccgacccagaccctgaccctgacctgcacctttagcggctttagcctgagcaccagcggcatgtgcgtgggctggattcgccagccgccgggcaaagcgctggaatggctggcgcatattgattgggatgatgataaatattatagcaccagcctgaaaagccgcctgaccattagcaaagataccagcaaaaaccaggtggtgctgaccatgaccaacatggatccggtggataccgcgacctattattgcgcgcgcattcgcagcagcgtgtatgcgcattattatggcatggatgtgtggggccagggcaccaccgtgaccgtgagcagc

SEQ ID NO: 7401 - DNA, 1332 bp, Artificial Sequence
  source: /note="Description of Artificial Sequence: Synthetic polynucleotide"
caagttcaactcgttcaatctggagcagaagtaaaaaaacctggcgcctctgttaaagtaagttgtaaagcatccggttacacattcacatcatattacatgcattgggtaagacaagcccctggacaaggactcgaatggatgggtgaaatctctccttttggcggccgaacaaactataatgaaaaatttaaatcccgcgtaactatgacccgagacacatccacatctactgtttatatggaactttcctcactgcgttctgaagacactgctgtttattactgtgcacgcgaaagacctctctacgcttccgatctctggggccaaggaacaacggtcaccgtctcctcagcctccaccaagggcccatctgtcttcccactggccccatgctcccgcagcacctccgagagcacagccgccctgggctgcctggtcaaggactacttcccagaacctgtgaccgtgtcctggaactctggcgctctgaccagcggcgtgcacaccttcccagctgtcctgcagtcctcaggtctctactccctcagcagcgtggtgaccgtgccatccagcaacttcggcacccagacctacacctgcaacgtagatcacaagccaagcaacaccaaggtagataagaccgtggagagaaagtgttgtgtggagtgtccaccttgtccagcccctccagtggccggaccatccgtgttcctgttccctccaaagccaaaggacaccctgatgatctccagaaccccagaggtgacctgtgtggtggtggacgtgtcccacgaggacccagaggtgcagttcaactggtatgtggacggagtggaggtgcacaacgccaagaccaagccaagagaggagcagttcaactccaccttcagagtggtgagcgtgctgaccgtggtgcaccaggactggctgaacggaaaggagtataagtgtaaggtgtccaacaagggactgccatccagcatcgagaagaccatctccaagaccaagggacagccaagagagccacaggtgtataccctgcccccatccagagaggagatgaccaagaaccaggtgtccctgacctgtctggtgaagggattctatccatccgacatcgccgtggagtgggagtccaacggacagccagagaacaactataagaccacccctccaatgctggactccgacggatccttcttcctgtattccaagctgaccgtggacaagtccagatggcagcagggaaacgtgttctcttgttccgtgatgcacgaggccctgcacaaccactatacccagaagagcctgtccctgtctccaggaaag

SEQ ID NO: 7402 - protein, 221 aa, Artificial Sequence
  source: /note="Description of Artificial Sequence: Synthetic polypeptide"
EVQLVQSGAEVKKPGASVKVSCKASGYTFTTYTIHWVRQAPGQGLEWIGYINPSSDYTRYNPKFKDRVTLTTDKSTSTAYMELRSLRSDDTAVYYCQTGTRDYWGQGTTVTVSSASTKGPSVFPLAPSSKSTSGGTAALGCLVKDYFPEPVTVSWNSGALTSGVHTFPAVLQSSGLYSLSSVVTVPSSSLGTQTYICNVNHKPSNTKVDKKVEPKSCAAGS

SEQ ID NO: 7403 - protein, 221 aa, Artificial Sequence
  source: /note="Description of Artificial Sequence: Synthetic polypeptide"
EVQLVQSGAEVKKPGASVKVSCKASGYTFTTYTIHWVRQAPGQGLEWMGYINPGSGYTRYNPKFKGRVTMTRDKSTSTAYMELRSLRSDDTAVYYCQTGTRDYWGQGTTVTVSSASTKGPSVFPLAPSSKSTSGGTAALGCLVKDYFPEPVTVSWNSGALTSGVHTFPAVLQSSGLYSLSSVVTVPSSSLGTQTYICNVNHKPSNTKVDKKVEPKSCAAGS

SEQ ID NO: 7404 - protein, 221 aa, Artificial Sequence
  source: /note="Description of Artificial Sequence: Synthetic polypeptide"
EVQLVQSGAEVKKPGASVKVSCKASGYTFTTYTIHWVRQAPGQGLEWMGYINPSSGYTRYNPKFKGRVTMTRDKSTSTAYMELRSLRSDDTAVYYCQTGTRDYWGQGTTVTVSSASTKGPSVFPLAPSSKSTSGGTAALGCLVKDYFPEPVTVSWNSGALTSGVHTFPAVLQSSGLYSLSSVVTVPSSSLGTQTYICNVNHKPSNTKVDKKVEPKSCAAGS

SEQ ID NO: 7405 - protein, 453 aa, Artificial Sequence
  source: /note="Description of Artificial Sequence: Synthetic polypeptide"
EVTLRESGPALVKPTQTLTLTCTFSGFSLSTSGMCVGWIRQPPGKALEWLAHIDWDDDKYYSTSLKSRLTISKDTSKNQVVLTMTNMDPVDTATYYCARIRSSVYAHYYGMDVWGQGTTVTVSSASTKGPSVFPLAPSSKSTSGGTAALGCLVKDYFPEPVTVSWNSGALTSGVHTFPAVLQSSGLYSLSSVVTVPSSSLGTQTYICNVNHKPSNTKVDKKVEPKSCDKTHTCPPCPAPELLGGPSVFLFPPKPKDTLMISRTPEVTCVVVDVSHEDPEVKFNWYVDGVEVHNAKTKPREEQYNSTYRVVSVLTVLHQDWLNGKEYKCKVSNKALPAPIEKTISKAKGQPREPQVYTLPPSRDELTKNQVSLTCLVKGFYPSDIAVEWESNGQPENNYKTTPPVLDSDGSFFLYSKLTVDKSRWQQGNVFSCSVMHEALHNHYTQKSLSLSPG

SEQ ID NO: 7406 - protein, 453 aa, Artificial Sequence
  source: /note="Description of Artificial Sequence: Synthetic polypeptide"
EVTLRESGPALVKPTQTLTLTCTFSGFSLSTSGMGVGWIRQPPGKALEWLAHIDWDDDKYYSPSLKSRLTISKDTSKNQVVLTMTNMDPVDTATYYCARIRSSVYAHYYGMDYWGQGTTVTVSSASTKGPSVFPLAPSSKSTSGGTAALGCLVKDYFPEPVTVSWNSGALTSGVHTFPAVLQSSGLYSLSSVVTVPSSSLGTQTYICNVNHKPSNTKVDKKVEPKSCDKTHTCPPCPAPELLGGPSVFLFPPKPKDTLMISRTPEVTCVVVDVSHEDPEVKFNWYVDGVEVHNAKTKPREEQYNSTYRVVSVLTVLHQDWLNGKEYKCKVSNKALPAPIEKTISKAKGQPREPQVYTLPPSRDELTKNQVSLTCLVKGFYPSDIAVEWESNGQPENNYKTTPPVLDSDGSFFLYSKLTVDKSRWQQGNVFSCSVMHEALHNHYTQKSLSLSPG

SEQ ID NO: 7407 - protein, 453 aa, Artificial Sequence
  source: /note="Description of Artificial Sequence: Synthetic polypeptide"
EVTLRESGPALVKPTQTLTLTCTFSGFSLSTSGMGVSWIRQPPGKALEWLAHIDWDDDKYYSTSLKSRLTISKDTSKNQVVLTMTNMDPVDTATYYCARIRSSVYAHYYGMDYWGQGTTVTVSSASTKGPSVFPLAPSSKSTSGGTAALGCLVKDYFPEPVTVSWNSGALTSGVHTFPAVLQSSGLYSLSSVVTVPSSSLGTQTYICNVNHKPSNTKVDKKVEPKSCDKTHTCPPCPAPELLGGPSVFLFPPKPKDTLMISRTPEVTCVVVDVSHEDPEVKFNWYVDGVEVHNAKTKPREEQYNSTYRVVSVLTVLHQDWLNGKEYKCKVSNKALPAPIEKTISKAKGQPREPQVYTLPPSRDELTKNQVSLTCLVKGFYPSDIAVEWESNGQPENNYKTTPPVLDSDGSFFLYSKLTVDKSRWQQGNVFSCSVMHEALHNHYTQKSLSLSPG

SEQ ID NO: 7408 - protein, 453 aa, Artificial Sequence
  source: /note="Description of Artificial Sequence: Synthetic polypeptide"
EVTLRESGPALVKPTQTLTLTCTFSGFSLSTSGMGVSWIRQPPGKALEWLAHIDWDDDKYYSTSLKSRLTISKDTSKNQVVLTMTNMDPVDTATYYCARIRSSVYYYYYGMDVWGQGTTVTVSSASTKGPSVFPLAPSSKSTSGGTAALGCLVKDYFPEPVTVSWNSGALTSGVHTFPAVLQSSGLYSLSSVVTVPSSSLGTQTYICNVNHKPSNTKVDKKVEPKSCDKTHTCPPCPAPELLGGPSVFLFPPKPKDTLMISRTPEVTCVVVDVSHEDPEVKFNWYVDGVEVHNAKTKPREEQYNSTYRVVSVLTVLHQDWLNGKEYKCKVSNKALPAPIEKTISKAKGQPREPQVYTLPPSRDELTKNQVSLTCLVKGFYPSDIAVEWESNGQPENNYKTTPPVLDSDGSFFLYSKLTVDKSRWQQGNVFSCSVMHEALHNHYTQKSLSLSPG

SEQ ID NO: 7409 - protein, 448 aa, Artificial Sequence
  source: /note="Description of Artificial Sequence: Synthetic polypeptide"
EVQLLESGGGLVQPGGSLRLSCAASGFTFSQYGMDWVRQAPGKGLEWVSGIGPSGGSTVYADSVKGRFTISRDNSKNTLYLQMNSLRAEDTAVYYCTRGGPYYYYGMDVWGQGTTVTVSSASTKGPSVFPLAPSSKSTSGGTAALGCLVKDYFPEPVTVSWNSGALTSGVHTFPAVLQSSGLYSLSSVVTVPSSSLGTQTYICNVNHKPSNTKVDKKVEPKSCDKTHTCPPCPAPELLGGPSVFLFPPKPKDTLMISRTPEVTCVVVDVSHEDPEVKFNWYVDGVEVHNAKTKPREEQYNSTYRVVSVLTVLHQDWLNGKEYKCKVSNKALPAPIEKTISKAKGQPREPQVYTLPPSRDELTKNQVSLTCLVKGFYPSDIAVEWESNGQPENNYKTTPPVLDSDGSFFLYSKLTVDKSRWQQGNVFSCSVMHEALHNHYTQKSLSLSP

SEQ ID NO: 7410 - protein, 444 aa, Artificial Sequence
  source: /note="Description of Artificial Sequence: Synthetic polypeptide"
QVQLVQSGAEVKKPGASVKVSCKASGYTFTSYYMHWVRQAPGQGLEWMGEISPFGGRTNYNEKFKSRVTMTRDTSTSTVYMELSSLRSEDTAVYYCARERPLYASDLWGQGTTVTVSSASTKGPSVFPLAPCSRSTSESTAALGCLVKDYFPEPVTVSWNSGALTSGVHTFPAVLQSSGLYSLSSVVTVPSSNFGTQTYTCNVDHKPSNTKVDKTVERKCCVECPPCPAPPVAGPSVFLFPPKPKDTLMISRTPEVTCVVVDVSHEDPEVQFNWYVDGVEVHNAKTKPREEQFNSTFRVVSVLTVVHQDWLNGKEYKCKVSNKGLPSSIEKTISKTKGQPREPQVYTLPPSREEMTKNQVSLTCLVKGFYPSDIAVEWESNGQPENNYKTTPPMLDSDGSFFLYSKLTVDKSRWQQGNVFSCSVMHEALHNHYTQKSLSLSPGK

SEQ ID NO: 7411 - protein, 231 aa, Artificial Sequence
  source: /note="Description of Artificial Sequence: Synthetic polypeptide"
  SITE (28)..(39): /note="complementarity determining region"
  SITE (54)..(83): /note="complementarity determining region"
EVQLVESGGGLVQPGGSLRLSCAASGYDFTHYGMNWVRQAPGKGLEWVGWINTYTGEPTYAADFKRRFTFSLDTSKSTAYLQMNSLRAEDTAVYYCAKYPYYYGTSHWYFDVWGQGTLVTVSSASTKGPSVFPLAPSSKSTSGGTAALGCLVKDYFPEPVTVSWNSGALTSGVHTFPAVLQSSGLYSLSSVVTVPSSSLGTQTYICNVNHKPSNTKVDKKVEPKSCDKTHL

SEQ ID NO: 7412 - DNA, 333 bp, Artificial Sequence
  source: /note="Description of Artificial Sequence: Synthetic polynucleotide"
gatattgtgatgacccagagcccggatagcctggcggtgagcctgggcgaacgcgcgaccattagctgcaaaagcagccagagcgtgctgtatagcggcgataactatctgaactggtatcagcagaaaccgggccagccgccgaaactgctgatttatgcggcgagcaccctggaaagcggcattccggatcgctttagcggcagcggcagcggcaccgattttaccctgaccattagcagcctgcaggcggaagatgtggcggtgtattattgccagcagtataacggcgatccgtggacctttggcggcggcaccaaagtggaaattaaa

SEQ ID NO: 7413 - DNA, 333 bp, Artificial Sequence
  source: /note="Description of Artificial Sequence: Synthetic polynucleotide"
gatattgtgatgacccagagcccggatagcctggcggtgagcctgggcgaacgcgcgaccattagctgcaaagcgagccagagcgtgctgtatagcggcgataactatctgaactggtatcagcagaaaccgggccagccgccgaaactgctgatttatgcggcgagcaccctggaaagcggcattccggatcgctttagcggcagcggcagcggcaccgattttaccctgaccattagcagcctgcaggcggaagatgtggcggtgtattattgccagcagtataacggcgatccgtggacctttggcggcggcaccaaagtggaaattaaa

SEQ ID NO: 7414 - DNA, 642 bp, Artificial Sequence
  source: /note="Description of Artificial Sequence: Synthetic polynucleotide"
gatatacaaatgacacaatctccatcctctctttccgcatcagtcggcgaccgcgtaaccatcacatgtagagcttctcaaggcatctcctccgccctcgcatggtaccaacaaaaaccaggtaaagccccaaaactcctcatatactcagcttcatacagatacaccggcgtaccctcaagattctcaggttcaggctctggaacagactttactttcaccatttcatcactccaacccgaagacatagctacatattactgccaacaaagatacagcctctggagaacatttggccaaggaacaaaactcgagatcaaacgtacggtggctgcaccatctgtcttcatcttcccgccatctgatgagcagttgaaatctggaactgcctctgttgtgtgcctgctgaataacttctatcccagagaggccaaagtacagtggaaggtggataacgccctccaatcgggtaactcccaggagagtgtcacagagcaggacagcaaggacagcacctacagcctcagcagcaccctgacgctgagcaaagcagactacgagaaacacaaagtctacgcctgcgaagtcacccatcagggcctgagctcgcccgtcacaaagagcttcaacaggggagagtgt

SEQ ID NO: 7415 - protein, 213 aa, Artificial Sequence
  source: /note="Description of Artificial Sequence: Synthetic polypeptide"
DIQLTQSPSFLSASVGDRVTITCRASSSVSYIYWFQQKPGKAPKLLIYATSTLQSGVPSRFSGSGSGTEYTLTISSLQPEDFATYYCHQRNSFPYTFGQGTKLEIKRTVAAPSVFIFPPSDEQLKSGTASVVCLLNNFYPREAKVQWKVDNALQSGNSQESVTEQDSKDSTYSLSSTLTLSKADYEKHKLYACEVTHQGLSSPVTKSFNRGEC

SEQ ID NO: 7416 - protein, 106 aa, Artificial Sequence
  source: /note="Description of Artificial Sequence: Synthetic polypeptide"
DIQLTQSPSFLSASVGDRVTITCSAASSVSYIYWFQQKPGKAPKLLIYSTSTLPSGVPSRFSGSGSGTEYTLTISSLQPEDFATYYCHQRNSFPFTFGQGTKLEIK

SEQ ID NO: 7417 - protein, 213 aa, Artificial Sequence
  source: /note="Description of Artificial Sequence: Synthetic polypeptide"
DIQLTQSPSFLSASVGDRVTITCSAASSVSYIYWFQQKPGKAPKLLIYSTSTLPSGVPSRFSGSGSGTEYTLTISSLQPEDFATYYCHQRNSFPFTFGQGTKLEIKRTVAAPSVFIFPPSDEQLKSGTASVVCLLNNFYPREAKVQWKVDNALQSGNSQESVTEQDSKDSTYSLSSTLTLSKADYEKHKVYACEVTHQGLSSPVTKSFNRGEC

SEQ ID NO: 7418 - protein, 106 aa, Artificial Sequence
  source: /note="Description of Artificial Sequence: Synthetic polypeptide"
DIQLTQSPSFLSASVGDRVTITCSAASSVSYIYWYQQKPGKAPKLLIYSTSTLPSGVPSRFSGSGSGTEFTLTISSLQPEDFATYYCHQRNSFPFTFGQGTKLEIK

SEQ ID NO: 7419 - protein, 106 aa, Artificial Sequence
  source: /note="Description of Artificial Sequence: Synthetic polypeptide"
DIQLTQSPSFLSASVGDRVTITCSAASSVSYIYWYQQKPGKAPKLLIYSTSTLPSGVPSRFSGSGSGTEYTLTISSLQPEDFATYYCHQRNSFPFTFGQGTKLEIK

SEQ ID NO: 7420 - protein, 218 aa, Artificial Sequence
  source: /note="Description of Artificial Sequence: Synthetic polypeptide"
DIVMTQSPDSLAVSLGERATISCKASQSVLYSGDNYLNWYQQKPGQPPKLLIYAASTLESGIPDRFSGSGSGTDFTLTISSLQAEDVAVYYCQQYNGDPWTFGGGTKVEIKRTVAAPSVFIFPPSDEQLKSGTASVVCLLNNFYPREAKVQWKVDNALQSGNSQESVTEQDSKDSTYSLSSTLTLSKADYEKHKVYACEVTHQGLSSPVTKSFNRGEC

SEQ ID NO: 7421 - protein, 218 aa, Artificial Sequence
  source: /note="Description of Artificial Sequence: Synthetic polypeptide"
DIVMTQSPDSLAVSLGERATISCKASQSVLYSGDNYLNWYQQKPGQPPKLLIYAASTLESGIPDRFSGSGSGTDFTLTISSLQAEDVAVYYCQQYNGTPWTFGGGTKVEIKRTVAAPSVFIFPPSDEQLKSGTASVVCLLNNFYPREAKVQWKVDNALQSGNSQESVTEQDSKDSTYSLSSTLTLSKADYEKHKVYACEVTHQGLSSPVTKSFNRGEC

SEQ ID NO: 7422 - protein, 111 aa, Artificial Sequence
  source: /note="Description of Artificial Sequence: Synthetic polypeptide"
DIVMTQSPDSLAVSLGERATISCKSSQSVLYSGDNYLNWYQQKPGQPPKLLIYAASTLESGIPDRFSGSGSGTDFTLTISSLQAEDVAVYYCQQYNGDPWTFGGGTKVEIK

SEQ ID NO: 7423 - protein, 218 aa, Artificial Sequence
  source: /note="Description of Artificial Sequence: Synthetic polypeptide"
DIVMTQSPDSLAVSLGERATISCKSSQSVLYSGDNYLNWYQQKPGQPPKLLIYAASTLESGIPDRFSGSGSGTDFTLTISSLQAEDVAVYYCQQYNGDPWTFGGGTKVEIKRTVAAPSVFIFPPSDEQLKSGTASVVCLLNNFYPREAKVQWKVDNALQSGNSQESVTEQDSKDSTYSLSSTLTLSKADYEKHKVYACEVTHQGLSSPVTKSFNRGEC

SEQ ID NO: 7424 - protein, 218 aa, Artificial Sequence
  source: /note="Description of Artificial Sequence: Synthetic polypeptide"
DIVMTQSPDSLAVSLGERATISCKSSQSVLYSSNNYLNWYQQKPGQPPKLLIYAASTLESGIPDRFSGSGSGTDFTLTISSLQAEDVAVYYCQQYYSTPWTFGGGTKVEIKRTVAAPSVFIFPPSDEQLKSGTASVVCLLNNFYPREAKVQWKVDNALQSGNSQESVTEQDSKDSTYSLSSTLTLSKADYEKHKVYACEVTHQGLSSPVTKSFNRGEC

SEQ ID NO: 7425 - protein, 214 aa, Artificial Sequence
  source: /note="Description of Artificial Sequence: Synthetic polypeptide"
DIQMTQSPSSLSASVGDRVTITCQASQDISNYLNWYQQKPGKAPKLLIYDASNLETGVPSRFSGSGSGTDFTFTISSLQPEDIATYYCQQADSFPVTFGGGTKVEIKRTVAAPSVFIFPPSDEQLKSGTASVVCLLNNFYPREAKVQWKVDNALQSGNSQESVTEQDSKDSTYSLSSTLTLSKADYEKHKVYACEVTHQGLSSPVTKSFNRGEC

SEQ ID NO: 7426 - protein, 214 aa, Artificial Sequence
  source: /note="Description of Artificial Sequence: Synthetic polypeptide"
DIQMTQSPSSLSASVGDRVTITCRASQGISSALAWYQQKPGKAPKLLIYSASYRYTGVPSRFSGSGSGTDFTFTISSLQPEDIATYYCQQRYSLWRTFGQGTKLEIKRTVAAPSVFIFPPSDEQLKSGTASVVCLLNNFYPREAKVQWKVDNALQSGNSQESVTEQDSKDSTYSLSSTLTLSKADYEKHKVYACEVTHQGLSSPVTKSFNRGEC

SEQ ID NO: 7427 - protein, 1715 aa, Artificial Sequence
  source: /note="Description of Artificial Sequence: Synthetic polypeptide"
ATRRYYLGAVELSWDYMQSDLGELPVDARFPPRVPKSFPFNTSVVYKKTLFVEFTDHLFNIAKPRPPWMGLLGPTIQAEVYDTVVITLKNMASHPVSLHAVGVSYWKASEGAEYDDQTSQREKEDDKVFPGGSHTYVWQVLKENGPMASDPLCLTYSYLSHVDLVKDLNSGLIGALLVCREGSLAKEKTQTLHKFILLFAVFDEGKSWHSETKNSLMQDRDAASARAWPKMHTVNGYVNRSLPGLIGCHRKSVYWHVIGMGTTPEVHSIFLEGHTFLVRNHRQASLEISPITFLTAQTLLMDLGQFLLFCHISSHQHDGMEAYVKVDSCPEEPQLRMKNNEEAEDYDDDLTDSEMDVVRFDDDNSPSFIQIRSVAKKHPKTWVHYIAAEEEDWDYAPLVLAPDDRSYKSQYLNNGPQRIGRKYKKVRFMAYTDETFKTREAIQHESGILGPLLYGEVGDTLLIIFKNQASRPYNIYPHGITDVRPLYSRRLPKGVKHLKDFPILPGEIFKYKWTVTVEDGPTKSDPRCLTRYYSSFVNMERDLASGLIGPLLICYKESVDQRGNQIMSDKRNVILFSVFDENRSWYLTENIQRFLPNPAGVQLEDPEFQASNIMHSINGYVFDSLQLSVCLHEVAYWYILSIGAQTDFLSVFFSGYTFKHKMVYEDTLTLFPFSGETVFMSMENPGLWILGCHNSDFRNRGMTALLKVSSCDKNTGDYYEDSYEDISAYLLSKNNAIEPRSFSQNGGGGSTGGTGGSSGGGTGSGGGGTGGSGGTDIQLTQSPSFLSASVGDRVTITCRASSSVSYIYWFQQKPGKAPKLLIYATSTLQSGVPSRFSGSGSGTEYTLTISSLQPEDFATYYCHQRNSFPYTFGQGTKLEIKGGGGSGGGGSGGGGSGGGGSEVQLVQSGAEVKKPGASVKVSCKASGYTFTTYTIHWVRQAPGQGLEWMGYINPSSGYTRYNPKFKGRVTMTRDKSTSTAYMELRSLRSDDTAVYYCQTGTRDYWGQGTTVTVSSGGGGSQNPPVLKRHQREITRTTLQSDQEEIDYDDTISVEMKKEDFDIFDEDENQSPRSFQKKTRHYFIAAVERLWDYGMSSSPHVLRNRAQSGSVPQFKKVVFQEFTDGSFTQPLYRGELNEHLGLLGPYIRAEVEDNIMVTFRNQASRPYSFYSSLISYEEDQRQGAEPRKNFVKPNETKTYFWKVQHHMAPTKDEFDCKAWAYFSDVDLEKDVHSGLIGPLLVCHTNTLNPAHGRQVTVQEFALFFTIFDETKSWYFTENMERNCRAPCNIQMEDPTFKENYRFHAINGYIMDTLPGLVMAQDQRIRWYLLSMGSNENIHSIHFSGHVFTVRKKEEYKMALYNLYPGVFETVEMLPSKAGIWRVECLIGEHLHAGMSTLFLVYSNKCQTPLGMASGHIRDFQITASGQYGQWAPKLARLHYSGSINAWSTKEPFSWIKVDLLAPMIIHGIKTQGARQKFSSLYISQFIIMYSLDGKKWQTYRGNSTGTLMVFFGNVDSSGIKHNIFNPPIIARYIRLHPTHYSIRSTLRMELMGCDLNSCSMPLGMESKAISDAQITASSYFTNMFATWSPSKARLHLQGRSNAWRPQVNNPKEWLQVDFQKTMKVTGVTTQGVKSLLTSMYVKEFLISSSQDGHQWTLFFQNGKVKVFQGNQDSFTPVVNSLDPPLLTRYLRIHPQSWVHQIALRMEVLGCEAQDLY

SEQ ID NO: 7428 - protein, 1680 aa, Artificial Sequence
  source: /note="Description of Artificial Sequence: Synthetic polypeptide"
ATRRYYLGAVELSWDYMQSDLGELPVDARFPPRVPKSFPFNTSVVYKKTLFVEFTDHLFNIAKPRPPWMGLLGPTIQAEVYDTVVITLKNMASHPVSLHAVGVSYWKASEGAEYDDQTSQREKEDDKVFPGGSHTYVWQVLKENGPMASDPLCLTYSYLSHVDLVKDLNSGLIGALLVCREGSLAKEKTQTLHKFILLFAVFDEGKSWHSETKNSLMQDRDAASARAWPKMHTVNGYVNRSLPGLIGCHRKSVYWHVIGMGTTPEVHSIFLEGHTFLVRNHRQASLEISPITFLTAQTLLMDLGQFLLFCHISSHQHDGMEAYVKVDSCPEEPQLRMKNNEEAEDYDDDLTDSEMDVVRFDDDNSPSFIQIRSVAKKHPKTWVHYIAAEEEDWDYAPLVLAPDDRSYKSQYLNNGPQRIGRKYKKVRFMAYTDETFKTREAIQHESGILGPLLYGEVGDTLLIIFKNQASRPYNIYPHGITDVRPLYSRRLPKGVKHLKDFPILPGEIFKYKWTVTVEDGPTKSDPRCLTRYYSSFVNMERDLASGLIGPLLICYKESVDQRGNQIMSDKRNVILFSVFDENRSWYLTENIQRFLPNPAGVQLEDPEFQASNIMHSINGYVFDSLQLSVCLHEVAYWYILSIGAQTDFLSVFFSGYTFKHKMVYEDTLTLFPFSGETVFMSMENPGLWILGCHNSDFRNRGMTALLKVSSCDKNTGDYYEDSYEDISAYLLSKNNAIEPRSFSQNGGGGSTGGTGGSSGGGTGSGGGGTGGSGGTDIQLTQSPSFLSASVGDRVTITCRASSSVSYIYWFQQKPGKAPKLLIYATSTLQSGVPSRFSGSGSGTEYTLTISSLQPEDFATYYCHQRNSFPYTFGQGTKLEIKGGGGSGGGGSGGGGSGGGGSEVQLVQSGAEVKKPGASVKVSCKASGYTFTTYTIHWVRQAPGQGLEWMGYINPSSGYTRYNPKFKGRVTMTRDKSTSTAYMELRSLRSDDTAVYYCQTGTRDYWGQGTTVTVSSGGGGSGGGGSGGGGSDENQSPRSFQKKTRHYFIAAVERLWDYGMSSSPHVLRNRAQSGSVPQFKKVVFQEFTDGSFTQPLYRGELNEHLGLLGPYIRAEVEDNIMVTFRNQASRPYSFYSSLISYEEDQRQGAEPRKNFVKPNETKTYFWKVQHHMAPTKDEFDCKAWAYFSDVDLEKDVHSGLIGPLLVCHTNTLNPAHGRQVTVQEFALFFTIFDETKSWYFTENMERNCRAPCNIQMEDPTFKENYRFHAINGYIMDTLPGLVMAQDQRIRWYLLSMGSNENIHSIHFSGHVFTVRKKEEYKMALYNLYPGVFETVEMLPSKAGIWRVECLIGEHLHAGMSTLFLVYSNKCQTPLGMASGHIRDFQITASGQYGQWAPKLARLHYSGSINAWSTKEPFSWIKVDLLAPMIIHGIKTQGARQKFSSLYISQFIIMYSLDGKKWQTYRGNSTGTLMVFFGNVDSSGIKHNIFNPPIIARYIRLHPTHYSIRSTLRMELMGCDLNSCSMPLGMESKAISDAQITASSYFTNMFATWSPSKARLHLQGRSNAWRPQVNNPKEWLQVDFQKTMKVTGVTTQGVKSLLTSMYVKEFLISSSQDGHQWTLFFQNGKVKVFQGNQDSFTPVVNSLDPPLLTRYLRIHPQSWVHQIALRMEVLGCEAQDLY

SEQ ID NO: 7429 - protein, 1684 aa, Artificial Sequence
  source: /note="Description of Artificial Sequence: Synthetic polypeptide"
ATRRYYLGAVELSWDYMQSDLGELPVDARFPPRVPKSFPFNTSVVYKKTLFVEFTDHLFNIAKPRPPWMGLLGPTIQAEVYDTVVITLKNMASHPVSLHAVGVSYWKASEGAEYDDQTSQREKEDDKVFPGGSHTYVWQVLKENGPMASDPLCLTYSYLSHVDLVKDLNSGLIGALLVCREGSLAKEKTQTLHKFILLFAVFDEGKSWHSETKNSLMQDRDAASARAWPKMHTVNGYVNRSLPGLIGCHRKSVYWHVIGMGTTPEVHSIFLEGHTFLVRNHRQASLEISPITFLTAQTLLMDLGQFLLFCHISSHQHDGMEAYVKVDSCPEEPQLRMKNNEEAEDYDDDLTDSEMDVVRFDDDNSPSFIQIRSVAKKHPKTWVHYIAAEEEDWDYAPLVLAPDDRSYKSQYLNNGPQRIGRKYKKVRFMAYTDETFKTREAIQHESGILGPLLYGEVGDTLLIIFKNQASRPYNIYPHGITDVRPLYSRRLPKGVKHLKDFPILPGEIFKYKWTVTVEDGPTKSDPRCLTRYYSSFVNMERDLASGLIGPLLICYKESVDQRGNQIMSDKRNVILFSVFDENRSWYLTENIQRFLPNPAGVQLEDPEFQASNIMHSINGYVFDSLQLSVCLHEVAYWYILSIGAQTDFLSVFFSGYTFKHKMVYEDTLTLFPFSGETVFMSMENPGLWILGCHNSDFRNRGMTALLKVSSCDKNTGDYYEDSYEDISAYLLSKNNAIEPRSFSQNGGGGSTGGTGGSSGGGTGSGGGGTGGSGGTDIQLTQSPSFLSASVGDRVTITCRASSSVRYIYWFQQKPGKAPKLLIYATSFRQSGVPSRFSGSGSGTEYTLTISSLQPEDFATYYCHQRNSFPYTFGQGTKLEIKGGGGSGGGGSGGGGSGGGGSEVQLVQSGAEVKKPGASVKVSCKASGYTFTTYAIHWVRQAPGQGLEWMGYINPSSGYTRYNPKFKGRVTMTRDKSTSTAYMELRSLRSDDTAVYYCWTGTRDYWGQGTTVTVSSGGGGSQNPPVLKRHQREITDENQSPRSFQKKTRHYFIAAVERLWDYGMSSSPHVLRNRAQSGSVPQFKKVVFQEFTDGSFTQPLYRGELNEHLGLLGPYIRAEVEDNIMVTFRNQASRPYSFYSSLISYEEDQRQGAEPRKNFVKPNETKTYFWKVQHHMAPTKDEFDCKAWAYFSDVDLEKDVHSGLIGPLLVCHTNTLNPAHGRQVTVQEFALFFTIFDETKSWYFTENMERNCRAPCNIQMEDPTFKENYRFHAINGYIMDTLPGLVMAQDQRIRWYLLSMGSNENIHSIHFSGHVFTVRKKEEYKMALYNLYPGVFETVEMLPSKAGIWRVECLIGEHLHAGMSTLFLVYSNKCQTPLGMASGHIRDFQITASGQYGQWAPKLARLHYSGSINAWSTKEPFSWIKVDLLAPMIIHGIKTQGARQKFSSLYISQFIIMYSLDGKKWQTYRGNSTGTLMVFFGNVDSSGIKHNIFNPPIIARYIRLHPTHYSIRSTLRMELMGCDLNSCSMPLGMESKAISDAQITASSYFTNMFATWSPSKARLHLQGRSNAWRPQVNNPKEWLQVDFQKTMKVTGVTTQGVKSLLTSMYVKEFLISSSQDGHQWTLFFQNGKVKVFQGNQDSFTPVVNSLDPPLLTRYLRIHPQSWVHQIALRMEVLGCEAQDLY

SEQ ID NO: 7430 - protein, 1684 aa, Artificial Sequence
  source: /note="Description of Artificial Sequence: Synthetic polypeptide"
ATRRYYLGAVELSWDYMQSDLGELPVDARFPPRVPKSFPFNTSVVYKKTLFVEFTDHLFNIAKPRPPWMGLLGPTIQAEVYDTVVITLKNMASHPVSLHAVGVSYWKASEGAEYDDQTSQREKEDDKVFPGGSHTYVWQVLKENGPMASDPLCLTYSYLSHVDLVKDLNSGLIGALLVCREGSLAKEKTQTLHKFILLFAVFDEGKSWHSETKNSLMQDRDAASARAWPKMHTVNGYVNRSLPGLIGCHRKSVYWHVIGMGTTPEVHSIFLEGHTFLVRNHRQASLEISPITFLTAQTLLMDLGQFLLFCHISSHQHDGMEAYVKVDSCPEEPQLRMKNNEEAEDYDDDLTDSEMDVVRFDDDNSPSFIQIRSVAKKHPKTWVHYIAAEEEDWDYAPLVLAPDDRSYKSQYLNNGPQRIGRKYKKVRFMAYTDETFKTREAIQHESGILGPLLYGEVGDTLLIIFKNQASRPYNIYPHGITDVRPLYSRRLPKGVKHLKDFPILPGEIFKYKWTVTVEDGPTKSDPRCLTRYYSSFVNMERDLASGLIGPLLICYKESVDQRGNQIMSDKRNVILFSVFDENRSWYLTENIQRFLPNPAGVQLEDPEFQASNIMHSINGYVFDSLQLSVCLHEVAYWYILSIGAQTDFLSVFFSGYTFKHKMVYEDTLTLFPFSGETVFMSMENPGLWILGCHNSDFRNRGMTALLKVSSCDKNTGDYYEDSYEDISAYLLSKNNAIEPRSFSQNGGGGSTGGTGGSSGGGTGSGGGGTGGSGGTDIQLTQSPSFLSASVGDRVTITCRASSSVRYIYWFQQKPGKAPKLLIYATSFLQSGVPSRFSGSGSGTEYTLTISSLQPEDFATYYCHQRNSFPYTFGQGTKLEIKGGGGSGGGGSGGGGSGGGGSEVQLVQSGAEVKKPGASVKVSCKASGYTFTTYAIHWVRQAPGQGLEWMGYINPSSGYTRYNPKFKHRVTMTRDKSTSTAYMELRSLRSDDTAVYYCWTGTRDYWGQGTTVTVSSGGGGSQNPPVLKRHQREITDENQSPRSFQKKTRHYFIAAVERLWDYGMSSSPHVLRNRAQSGSVPQFKKVVFQEFTDGSFTQPLYRGELNEHLGLLGPYIRAEVEDNIMVTFRNQASRPYSFYSSLISYEEDQRQGAEPRKNFVKPNETKTYFWKVQHHMAPTKDEFDCKAWAYFSDVDLEKDVHSGLIGPLLVCHTNTLNPAHGRQVTVQEFALFFTIFDETKSWYFTENMERNCRAPCNIQMEDPTFKENYRFHAINGYIMDTLPGLVMAQDQRIRWYLLSMGSNENIHSIHFSGHVFTVRKKEEYKMALYNLYPGVFETVEMLPSKAGIWRVECLIGEHLHAGMSTLFLVYSNKCQTPLGMASGHIRDFQITASGQYGQWAPKLARLHYSGSINAWSTKEPFSWIKVDLLAPMIIHGIKTQGARQKFSSLYISQFIIMYSLDGKKWQTYRGNSTGTLMVFFGNVDSSGIKHNIFNPPIIARYIRLHPTHYSIRSTLRMELMGCDLNSCSMPLGMESKAISDAQITASSYFTNMFATWSPSKARLHLQGRSNAWRPQVNNPKEWLQVDFQKTMKVTGVTTQGVKSLLTSMYVKEFLISSSQDGHQWTLFFQNGKVKVFQGNQDSFTPVVNSLDPPLLTRYLRIHPQSWVHQIALRMEVLGCEAQDLY

SEQ ID NO: 7431 - protein, 1684 aa, Artificial Sequence
  source: /note="Description of Artificial Sequence: Synthetic polypeptide"
ATRRYYLGAVELSWDYMQSDLGELPVDARFPPRVPKSFPFNTSVVYKKTLFVEFTDHLFNIAKPRPPWMGLLGPTIQAEVYDTVVITLKNMASHPVSLHAVGVSYWKASEGAEYDDQTSQREKEDDKVFPGGSHTYVWQVLKENGPMASDPLCLTYSYLSHVDLVKDLNSGLIGALLVCREGSLAKEKTQTLHKFILLFAVFDEGKSWHSETKNSLMQDRDAASARAWPKMHTVNGYVNRSLPGLIGCHRKSVYWHVIGMGTTPEVHSIFLEGHTFLVRNHRQASLEISPITFLTAQTLLMDLGQFLLFCHISSHQHDGMEAYVKVDSCPEEPQLRMKNNEEAEDYDDDLTDSEMDVVRFDDDNSPSFIQIRSVAKKHPKTWVHYIAAEEEDWDYAPLVLAPDDRSYKSQYLNNGPQRIGRKYKKVRFMAYTDETFKTREAIQHESGILGPLLYGEVGDTLLIIFKNQASRPYNIYPHGITDVRPLYSRRLPKGVKHLKDFPILPGEIFKYKWTVTVEDGPTKSDPRCLTRYYSSFVNMERDLASGLIGPLLICYKESVDQRGNQIMSDKRNVILFSVFDENRSWYLTENIQRFLPNPAGVQLEDPEFQASNIMHSINGYVFDSLQLSVCLHEVAYWYILSIGAQTDFLSVFFSGYTFKHKMVYEDTLTLFPFSGETVFMSMENPGLWILGCHNSDFRNRGMTALLKVSSCDKNTGDYYEDSYEDISAYLLSKNNAIEPRSFSQNGGGGSTGGTGGSSGGGTGSGGGGTGGSGGTDIQLTQSPSFLSASVGDRVTITCRASSSVSYIYWFQQKPGKAPKLLIYATSTLQSGVPSRFSGSGSGTEYTLTISSLQPEDFATYYCHQRNSFPYTFGQGTKLEIKGGGGSGGGGSGGGGSGGGGSEVQLVQSGAEVKKPGASVKVSCKASGYTFTRYTIHWVRQAPGQGLEWMGYINPSSGYTRYNPKFKGRVTMTRDKSTSTAYMELRSLRSDDTAVYYCWTGTRDYWGQGTTVTVSSGGGGSQNPPVLKRHQREITDENQSPRSFQKKTRHYFIAAVERLWDYGMSSSPHVLRNRAQSGSVPQFKKVVFQEFTDGSFTQPLYRGELNEHLGLLGPYIRAEVEDNIMVTFRNQASRPYSFYSSLISYEEDQRQGAEPRKNFVKPNETKTYFWKVQHHMAPTKDEFDCKAWAYFSDVDLEKDVHSGLIGPLLVCHTNTLNPAHGRQVTVQEFALFFTIFDETKSWYFTENMERNCRAPCNIQMEDPTFKENYRFHAINGYIMDTLPGLVMAQDQRIRWYLLSMGSNENIHSIHFSGHVFTVRKKEEYKMALYNLYPGVFETVEMLPSKAGIWRVECLIGEHLHAGMSTLFLVYSNKCQTPLGMASGHIRDFQITASGQYGQWAPKLARLHYSGSINAWSTKEPFSWIKVDLLAPMIIHGIKTQGARQKFSSLYISQFIIMYSLDGKKWQTYRGNSTGTLMVFFGNVDSSGIKHNIFNPPIIARYIRLHPTHYSIRSTLRMELMGCDLNSCSMPLGMESKAISDAQITASSYFTNMFATWSPSKARLHLQGRSNAWRPQVNNPKEWLQVDFQKTMKVTGVTTQGVKSLLTSMYVKEFLISSSQDGHQWTLFFQNGKVKVFQGNQDSFTPVVNSLDPPLLTRYLRIHPQSWVHQIALRMEVLGCEAQDLY

SEQ ID NO: 7432 - protein, 1715 aa, Artificial Sequence
  source: /note="Description of Artificial Sequence: Synthetic polypeptide"
ATRRYYLGAVELSWDYMQSDLGELPVDARFPPRVPKSFPFNTSVVYKKTLFVEFTDHLFNIAKPRPPWMGLLGPTIQAEVYDTVVITLKNMASHPVSLHAVGVSYWKASEGAEYDDQTSQREKEDDKVFPGGSHTYVWQVLKENGPMASDPLCLTYSYLSHVDLVKDLNSGLIGALLVCREGSLAKEKTQTLHKFILLFAVFDEGKSWHSETKNSLMQDRDAASARAWPKMHTVNGYVNRSLPGLIGCHRKSVYWHVIGMGTTPEVHSIFLEGHTFLVRNHRQASLEISPITFLTAQTLLMDLGQFLLFCHISSHQHDGMEAYVKVDSCPEEPQLRMKNNEEAEDYDDDLTDSEMDVVRFDDDNSPSFIQIRSVAKKHPKTWVHYIAAEEEDWDYAPLVLAPDDRSYKSQYLNNGPQRIGRKYKKVRFMAYTDETFKTREAIQHESGILGPLLYGEVGDTLLIIFKNQASRPYNIYPHGITDVRPLYSRRLPKGVKHLKDFPILPGEIFKYKWTVTVEDGPTKSDPRCLTRYYSSFVNMERDLASGLIGPLLICYKESVDQRGNQIMSDKRNVILFSVFDENRSWYLTENIQRFLPNPAGVQLEDPEFQASNIMHSINGYVFDSLQLSVCLHEVAYWYILSIGAQTDFLSVFFSGYTFKHKMVYEDTLTLFPFSGETVFMSMENPGLWILGCHNSDFRNRGMTALLKVSSCDKNTGDYYEDSYEDISAYLLSKNNAIEPRSFSQNGGGGSTGGTGGSSGGGTGSGGGGTGGSGGTDIQLTQSPSFLSASVGDRVTITCRASSSVRYIYWFQQKPGKAPKLLIYATSFRQSGVPSRFSGSGSGTEYTLTISSLQPEDFATYYCHQRNSFPYTFGQGTKLEIKGGGGSGGGGSGGGGSGGGGSEVQLVQSGAEVKKPGASVKVSCKASGYTFTTYAIHWVRQAPGQGLEWMGYINPSSGYTRYNPKFKGRVTMTRDKSTSTAYMELRSLRSDDTAVYYCWTGTRDYWGQGTTVTVSSGGGGSQNPPVLKRHQREITRTTLQSDQEEIDYDDTISVEMKKEDFDIYDEDENQSPRSFQKKTRHYFIAAVERLWDYGMSSSPHVLRNRAQSGSVPQFKKVVFQEFTDGSFTQPLYRGELNEHLGLLGPYIRAEVEDNIMVTFRNQASRPYSFYSSLISYEEDQRQGAEPRKNFVKPNETKTYFWKVQHHMAPTKDEFDCKAWAYFSDVDLEKDVHSGLIGPLLVCHTNTLNPAHGRQVTVQEFALFFTIFDETKSWYFTENMERNCRAPCNIQMEDPTFKENYRFHAINGYIMDTLPGLVMAQDQRIRWYLLSMGSNENIHSIHFSGHVFTVRKKEEYKMALYNLYPGVFETVEMLPSKAGIWRVECLIGEHLHAGMSTLFLVYSNKCQTPLGMASGHIRDFQITASGQYGQWAPKLARLHYSGSINAWSTKEPFSWIKVDLLAPMIIHGIKTQGARQKFSSLYISQFIIMYSLDGKKWQTYRGNSTGTLMVFFGNVDSSGIKHNIFNPPIIARYIRLHPTHYSIRSTLRMELMGCDLNSCSMPLGMESKAISDAQITASSYFTNMFATWSPSKARLHLQGRSNAWRPQVNNPKEWLQVDFQKTMKVTGVTTQGVKSLLTSMYVKEFLISSSQDGHQWTLFFQNGKVKVFQGNQDSFTPVVNSLDPPLLTRYLRIHPQSWVHQIALRMEVLGCEAQDLY

SEQ ID NO: 7433 - protein, 1704 aa, Artificial Sequence
  source: /note="Description of Artificial Sequence: Synthetic polypeptide"
ATRRYYLGAVELSWDYMQSDLGELPVDARFPPRVPKSFPFNTSVVYKKTLFVEFTDHLFNIAKPRPPWMGLLGPTIQAEVYDTVVITLKNMASHPVSLHAVGVSYWKASEGAEYDDQTSQREKEDDKVFPGGSHTYVWQVLKENGPMASDPLCLTYSYLSHVDLVKDLNSGLIGALLVCREGSLAKEKTQTLHKFILLFAVFDEGKSWHSETKNSLMQDRDAASARAWPKMHTVNGYVNRSLPGLIGCHRKSVYWHVIGMGTTPEVHSIFLEGHTFLVRNHRQASLEISPITFLTAQTLLMDLGQFLLFCHISSHQHDGMEAYVKVDSCPEEPQLRMKNNEEAEDYDDDLTDSEMDVVRFDDDNSPSFIQIRSVAKKHPKTWVHYIAAEEEDWDYAPLVLAPDDRSYKSQYLNNGPQRIGRKYKKVRFMAYTDETFKTREAIQHESGILGPLLYGEVGDTLLIIFKNQASRPYNIYPHGITDVRPLYSRRLPKGVKHLKDFPILPGEIFKYKWTVTVEDGPTKSDPRCLTRYYSSFVNMERDLASGLIGPLLICYKESVDQRGNQIMSDKRNVILFSVFDENRSWYLTENIQRFLPNPAGVQLEDPEFQASNIMHSINGYVFDSLQLSVCLHEVAYWYILSIGAQTDFLSVFFSGYTFKHKMVYEDTLTLFPFSGETVFMSMENPGLWILGCHNSDFRNRGMTALLKVSSCDKNTGDYYEDSYEDISAYLLSKNNAIEPRSFSQNPPVLKRHQREITRTTLQSDQEEIDYDDTISVEMKKEDFDIYDEDENQSPRSFQKKTRHYFIAAVERLWDYGMSSSPHVLRNRAQSGSVPQFKKVVFQEFTDGSFTQPLYRGELNEHLGLLGPYIRAEVEDNIMVTFRNQASRPYSFYSSLISYEEDQRQGAEPRKNFVKPNETKTYFWKVQHHMAPTKDEFDCKAWAYFSDVDLEKDVHSGLIGPLLVCHTNTLNPAHGRQVTVQEFALFFTIFDETKSWYFTENMERNCRAPCNIQMEDPTFKENYRFHAINGYIMDTLPGLVMAQDQRIRWYLLSMGSNENIHSIHFSGHVFTVRKKEEYKMALYNLYPGVFETVEMLPSKAGIWRVECLIGEHLHAGMSTLFLVYSNKCQTPLGMASGHIRDFQITASGQYGQWAPKLARLHYSGSINAWSTKEPFSWIKVDLLAPMIIHGIKTQGARQKFSSLYISQFIIMYSLDGKKWQTYRGNSTGTLMVFFGNVDSSGIKHNIFNPPIIARYIRLHPTHYSIRSTLRMELMGCDLNSCSMPLGMESKAISDAQITASSYFTNMFATWSPSKARLHLQGRSNAWRPQVNNPKEWLQVDFQKTMKVTGVTTQGVKSLLTSMYVKEFLISSSQDGHQWTLFFQNGKVKVFQGNQDSFTPVVNSLDPPLLTRYLRIHPQSWVHQIALRMEVLGCEAQDLYGGGSGGGGSGLVPRGSGGGSGGGGSGDIQLTQSPSFLSASVGDRVTITCRASSSVRYIYWFQQKPGKAPKLLIYATSFRQSGVPSRFSGSGSGTEYTLTISSLQPEDFATYYCHQRNSFPYTFGQGTKLEIKGGGGSGGGGSGGGGSGGGGSEVQLVQSGAEVKKPGASVKVSCKASGYTFTTYAIHWVRQAPGQGLEWMGYINPSSGYTRYNPKFKGRVTMTRDKSTSTAYMELRSLRSDDTAVYYCWTGTRDYWGQGTTVTVSS

SEQ ID NO: 7434 - protein, 1661 aa, Artificial Sequence
  source: /note="Description of Artificial Sequence: Synthetic polypeptide"
ATRRYYLGAVELSWDYMQSDLGELPVDARFPPRVPKSFPFNTSVVYKKTLFVEFTDHLFNIAKPRPPWMGLLGPTIQAEVYDTVVITLKNMASHPVSLHAVGVSYWKASEGAEYDDQTSQREKEDDKVFPGGSHTYVWQVLKENGPMASDPLCLTYSYLSHVDLVKDLNSGLIGALLVCREGSLAKEKTQTLHKFILLFAVFDEGKSWHSETKNSLMQDRDAASARAWPKMHTVNGYVNRSLPGLIGCHRKSVYWHVIGMGTTPEVHSIFLEGHTFLVRNHRQASLEISPITFLTAQTLLMDLGQFLLFCHISSHQHDGMEAYVKVDSCPEEPQLRMKNNEEAEDYDDDLTDSEMDVVRFDDDNSPSFIQIRSVAKKHPKTWVHYIAAEEEDWDYAPLVLAPDDRSYKSQYLNNGPQRIGRKYKKVRFMAYTDETFKTREAIQHESGILGPLLYGEVGDTLLIIFKNQASRPYNIYPHGITDVRPLYSRRLPKGVKHLKDFPILPGEIFKYKWTVTVEDGPTKSDPRCLTRYYSSFVNMERDLASGLIGPLLICYKESVDQRGNQIMSDKRNVILFSVFDENRSWYLTENIQRFLPNPAGVQLEDPEFQASNIMHSINGYVFDSLQLSVCLHEVAYWYILSIGAQTDFLSVFFSGYTFKHKMVYEDTLTLFPFSGETVFMSMENPGLWILGCHNSDFRNRGMTALLKVSSCDKNTGDYYEDSYEDISAYLLSKNNAIEPRSFSQNDENQSPRSFQKKTRHYFIAAVERLWDYGMSSSPHVLRNRAQSGSVPQFKKVVFQEFTDGSFTQPLYRGELNEHLGLLGPYIRAEVEDNIMVTFRNQASRPYSFYSSLISYEEDQRQGAEPRKNFVKPNETKTYFWKVQHHMAPTKDEFDCKAWAYFSDVDLEKDVHSGLIGPLLVCHTNTLNPAHGRQVTVQEFALFFTIFDETKSWYFTENMERNCRAPCNIQMEDPTFKENYRFHAINGYIMDTLPGLVMAQDQRIRWYLLSMGSNENIHSIHFSGHVFTVRKKEEYKMALYNLYPGVFETVEMLPSKAGIWRVECLIGEHLHAGMSTLFLVYSNKCQTPLGMASGHIRDFQITASGQYGQWAPKLARLHYSGSINAWSTKEPFSWIKVDLLAPMIIHGIKTQGARQKFSSLYISQFIIMYSLDGKKWQTYRGNSTGTLMVFFGNVDSSGIKHNIFNPPIIARYIRLHPTHYSIRSTLRMELMGCDLNSCSMPLGMESKAISDAQITASSYFTNMFATWSPSKARLHLQGRSNAWRPQVNNPKEWLQVDFQKTMKVTGVTTQGVKSLLTSMYVKEFLISSSQDGHQWTLFFQNGKVKVFQGNQDSFTPVVNSLDPPLLTRYLRIHPQSWVHQIALRMEVLGCEAQDLYGGGSGGGGSGLVPRGSGGGSGGGGSGDIQLTQSPSFLSASVGDRVTITCRASSSVRYIYWFQQKPGKAPKLLIYATSFRQSGVPSRFSGSGSGTEYTLTISSLQPEDFATYYCHQRNSFPYTFGQGTKLEIKGGGGSGGGGSGGGGSGGGGSEVQLVQSGAEVKKPGASVKVSCKASGYTFTTYAIHWVRQAPGQGLEWMGYINPSSGYTRYNPKFKGRVTMTRDKSTSTAYMELRSLRSDDTAVYYCWTGTRDYWGQGTTVTVSS

SEQ ID NO: 7435 - protein, 1673 aa, Artificial Sequence
  source: /note="Description of Artificial Sequence: Synthetic polypeptide"
ATRRYYLGAVELSWDYMQSDLGELPVDARFPPRVPKSFPFNTSVVYKKTLFVEFTDHLFNIAKPRPPWMGLLGPTIQAEVYDTVVITLKNMASHPVSLHAVGVSYWKASEGAEYDDQTSQREKEDDKVFPGGSHTYVWQVLKENGPMASDPLCLTYSYLSHVDLVKDLNSGLIGALLVCREGSLAKEKTQTLHKFILLFAVFDEGKSWHSETKNSLMQDRDAASARAWPKMHTVNGYVNRSLPGLIGCHRKSVYWHVIGMGTTPEVHSIFLEGHTFLVRNHRQASLEISPITFLTAQTLLMDLGQFLLFCHISSHQHDGMEAYVKVDSCPEEPQLRMKNNEEAEDYDDDLTDSEMDVVRFDDDNSPSFIQIRSVAKKHPKTWVHYIAAEEEDWDYAPLVLAPDDRSYKSQYLNNGPQRIGRKYKKVRFMAYTDETFKTREAIQHESGILGPLLYGEVGDTLLIIFKNQASRPYNIYPHGITDVRPLYSRRLPKGVKHLKDFPILPGEIFKYKWTVTVEDGPTKSDPRCLTRYYSSFVNMERDLASGLIGPLLICYKESVDQRGNQIMSDKRNVILFSVFDENRSWYLTENIQRFLPNPAGVQLEDPEFQASNIMHSINGYVFDSLQLSVCLHEVAYWYILSIGAQTDFLSVFFSGYTFKHKMVYEDTLTLFPFSGETVFMSMENPGLWILGCHNSDFRNRGMTALLKVSSCDKNTGDYYEDSYEDISAYLLSKNNAIEPRSFSQNPPVLKRHQREITDENQSPRSFQKKTRHYFIAAVERLWDYGMSSSPHVLRNRAQSGSVPQFKKVVFQEFTDGSFTQPLYRGELNEHLGLLGPYIRAEVEDNIMVTFRNQASRPYSFYSSLISYEEDQRQGAEPRKNFVKPNETKTYFWKVQHHMAPTKDEFDCKAWAYFSDVDLEKDVHSGLIGPLLVCHTNTLNPAHGRQVTVQEFALFFTIFDETKSWYFTENMERNCRAPCNIQMEDPTFKENYRFHAINGYIMDTLPGLVMAQDQRIRWYLLSMGSNENIHSIHFSGHVFTVRKKEEYKMALYNLYPGVFETVEMLPSKAGIWRVECLIGEHLHAGMSTLFLVYSNKCQTPLGMASGHIRDFQITASGQYGQWAPKLARLHYSGSINAWSTKEPFSWIKVDLLAPMIIHGIKTQGARQKFSSLYISQFIIMYSLDGKKWQTYRGNSTGTLMVFFGNVDSSGIKHNIFNPPIIARYIRLHPTHYSIRSTLRMELMGCDLNSCSMPLGMESKAISDAQITASSYFTNMFATWSPSKARLHLQGRSNAWRPQVNNPKEWLQVDFQKTMKVTGVTTQGVKSLLTSMYVKEFLISSSQDGHQWTLFFQNGKVKVFQGNQDSFTPVVNSLDPPLLTRYLRIHPQSWVHQIALRMEVLGCEAQDLYGGGSGGGGSGLVPRGSGGGSGGGGSGDIQLTQSPSFLSASVGDRVTITCRASSSVRYIYWFQQKPGKAPKLLIYATSFRQSGVPSRFSGSGSGTEYTLTISSLQPEDFATYYCHQRNSFPYTFGQGTKLEIKGGGGSGGGGSGGGGSGGGGSEVQLVQSGAEVKKPGASVKVSCKASGYTFTTYAIHWVRQAPGQGLEWMGYINPSSGYTRYNPKFKGRVTMTRDKSTSTAYMELRSLRSDDTAVYYCWTGTRDYWGQGTTVTVSS

SEQ ID NO: 7436 - protein, 1669 aa, Artificial Sequence
  source: /note="Description of Artificial Sequence: Synthetic polypeptide"
ATRRYYLGAVELSWDYMQSDLGELPVDARFPPRVPKSFPFNTSVVYKKTLFVEFTDHLFNIAKPRPPWMGLLGPTIQAEVYDTVVITLKNMASHPVSLHAVGVSYWKASEGAEYDDQTSQREKEDDKVFPGGSHTYVWQVLKENGPMASDPLCLTYSYLSHVDLVKDLNSGLIGALLVCREGSLAKEKTQTLHKFILLFAVFDEGKSWHSETKNSLMQDRDAASARAWPKMHTVNGYVNRSLPGLIGCHRKSVYWHVIGMGTTPEVHSIFLEGHTFLVRNHRQASLEISPITFLTAQTLLMDLGQFLLFCHISSHQHDGMEAYVKVDSCPEEPQLRMKNNEEAEDYDDDLTDSEMDVVRFDDDNSPSFIQIRSVAKKHPKTWVHYIAAEEEDWDYAPLVLAPDDRSYKSQYLNNGPQRIGRKYKKVRFMAYTDETFKTREAIQHESGILGPLLYGEVGDTLLIIFKNQASRPYNIYPHGITDVRPLYSRRLPKGVKHLKDFPILPGEIFKYKWTVTVEDGPTKSDPRCLTRYYSSFVNMERDLASGLIGPLLICYKESVDQRGNQIMSDKRNVILFSVFDENRSWYLTENIQRFLPNPAGVQLEDPEFQASNIMHSINGYVFDSLQLSVCLHEVAYWYILSIGAQTDFLSVFFSGYTFKHKMVYEDTLTLFPFSGETVFMSMENPGLWILGCHNSDFRNRGMTALLKVSSCDKNTGDYYEDSYEDISAYLLSKNNAIEPRSFSQNGGGGSTGGTGGSSGGGTGSGGGGTGGSGGTDIQLTQSPSFLSASVGDRVTITCRASSSVRYIYWFQQKPGKAPKLLIYATSFRQSGVPSRFSGSGSGTEYTLTISSLQPEDFATYYCHQRNSFPYTFGQGTKLEIKGGGGSGGGGSGGGGSGGGGSEVQLVQSGAEVKKPGASVKVSCKASGYTFTTYAIHWVRQAPGQGLEWMGYINPSSGYTRYNPKFKGRVTMTRDKSTSTAYMELRSLRSDDTAVYYCWTGTRDYWGQGTTVTVSSGGGGDENQSPRSFQKKTRHYFIAAVERLWDYGMSSSPHVLRNRAQSGSVPQFKKVVFQEFTDGSFTQPLYRGELNEHLGLLGPYIRAEVEDNIMVTFRNQASRPYSFYSSLISYEEDQRQGAEPRKNFVKPNETKTYFWKVQHHMAPTKDEFDCKAWAYFSDVDLEKDVHSGLIGPLLVCHTNTLNPAHGRQVTVQEFALFFTIFDETKSWYFTENMERNCRAPCNIQMEDPTFKENYRFHAINGYIMDTLPGLVMAQDQRIRWYLLSMGSNENIHSIHFSGHVFTVRKKEEYKMALYNLYPGVFETVEMLPSKAGIWRVECLIGEHLHAGMSTLFLVYSNKCQTPLGMASGHIRDFQITASGQYGQWAPKLARLHYSGSINAWSTKEPFSWIKVDLLAPMIIHGIKTQGARQKFSSLYISQFIIMYSLDGKKWQTYRGNSTGTLMVFFGNVDSSGIKHNIFNPPIIARYIRLHPTHYSIRSTLRMELMGCDLNSCSMPLGMESKAISDAQITASSYFTNMFATWSPSKARLHLQGRSNAWRPQVNNPKEWLQVDFQKTMKVTGVTTQGVKSLLTSMYVKEFLISSSQDGHQWTLFFQNGKVKVFQGNQDSFTPVVNSLDPPLLTRYLRIHPQSWVHQIALRMEVLGCEAQDLY

SEQ ID NO: 7437 - protein, 1935 aa, Artificial Sequence
  source: /note="Description of Artificial Sequence: Synthetic polypeptide"
ATRRYYLGAVELSWDYMQSDLGELPVDARFPPRVPKSFPFNTSVVYKKTLFVEFTDHLFNIAKPRPPWMGLLGPTIQAEVYDTVVITLKNMASHPVSLHAVGVSYWKASEGAEYDDQTSQREKEDDKVFPGGSHTYVWQVLKENGPMASDPLCLTYSYLSHVDLVKDLNSGLIGALLVCREGSLAKEKTQTLHKFILLFAVFDEGKSWHSETKNSLMQDRDAASARAWPKMHTVNGYVNRSLPGLIGCHRKSVYWHVIGMGTTPEVHSIFLEGHTFLVRNHRQASLEISPITFLTAQTLLMDLGQFLLFCHISSHQHDGMEAYVKVDSCPEEPQLRMKNNEEAEDYDDDLTDSEMDVVRFDDDNSPSFIQIRSVAKKHPKTWVHYIAAEEEDWDYAPLVLAPDDRSYKSQYLNNGPQRIGRKYKKVRFMAYTDETFKTREAIQHESGILGPLLYGEVGDTLLIIFKNQASRPYNIYPHGITDVRPLYSRRLPKGVKHLKDFPILPGEIFKYKWTVTVEDGPTKSDPRCLTRYYSSFVNMERDLASGLIGPLLICYKESVDQRGNQIMSDKRNVILFSVFDENRSWYLTENIQRFLPNPAGVQLEDPEFQASNIMHSINGYVFDSLQLSVCLHEVAYWYILSIGAQTDFLSVFFSGYTFKHKMVYEDTLTLFPFSGETVFMSMENPGLWILGCHNSDFRNRGMTALLKVSSCDKNTGDYYEDSYEDISAYLLSKNNAIEPRSFSQNGGGGSTGGTGGSSGGGTGSGGGGTGGSGGTDIQLTQSPSFLSASVGDRVTITCRASSSVRYIYWFQQKPGKAPKLLIYATSFRQSGVPSRFSGSGSGTEYTLTISSLQPEDFATYYCHQRNSFPYTFGQGTKLEIKGGGGSGGGGSGGGGSGGGGSEVQLVQSGAEVKKPGASVKVSCKASGYTFTTYAIHWVRQAPGQGLEWMGYINPSSGYTRYNPKFKGRVTMTRDKSTSTAYMELRSLRSDDTAVYYCWTGTRDYWGQGTTVTVSSGGGGDENQSPRSFQKKTRHYFIAAVERLWDYGMSSSPHVLRNRAQSGSVPQFKKVVFQEFTDGSFTQPLYRGELNEHLGLLGPYIRAEVEDNIMVTFRNQASRPYSFYSSLISYEEDQRQGAEPRKNFVKPNETKTYFWKVQHHMAPTKDEFDCKAWAYFSDVDLEKDVHSGLIGPLLVCHTNTLNPAHGRQVTVQEFALFFTIFDETKSWYFTENMERNCRAPCNIQMEDPTFKENYRFHAINGYIMDTLPGLVMAQDQRIRWYLLSMGSNENIHSIHFSGHVFTVRKKEEYKMALYNLYPGVFETVEMLPSKAGIWRVECLIGEHLHAGMSTLFLVYSNKCQTPLGMASGHIRDFQITASGQYGQWAPKLARLHYSGSINAWSTKEPFSWIKVDLLAPMIIHGIKTQGARQKFSSLYISQFIIMYSLDGKKWQTYRGNSTGTLMVFFGNVDSSGIKHNIFNPPIIARYIRLHPTHYSIRSTLRMELMGCDLNSCSMPLGMESKAISDAQITASSYFTNMFATWSPSKARLHLQGRSNAWRPQVNNPKEWLQVDFQKTMKVTGVTTQGVKSLLTSMYVKEFLISSSQDGHQWTLFFQNGKVKVFQGNQDSFTPVVNSLDPPLLTRYLRIHPQSWVHQIALRMEVLGCEAQDLYGGGSGGGGSGLVPRGSGGGSGGGGSGDIQLTQSPSFLSASVGDRVTITCRASSSVRYIYWFQQKPGKAPKLLIYATSFRQSGVPSRFSGSGSGTEYTLTISSLQPEDFATYYCHQRNSFPYTFGQGTKLEIKGGGGSGGGGSGGGGSGGGGSEVQLVQSGAEVKKPGASVKVSCKASGYTFTTYAIHWVRQAPGQGLEWMGYINPSSGYTRYNPKFKGRVTMTRDKSTSTAYMELRSLRSDDTAVYYCWTGTRDYWGQGTTVTVSS

SEQ ID NO: 7438 - protein, 1913 aa, Artificial Sequence
  source: /note="Description of Artificial Sequence: Synthetic polypeptide"
ATRRYYLGAVELSWDYMQSDLGELPVDARFPPRVPKSFPFNTSVVYKKTLFVEFTDHLFNIAKPRPPWMGLLGPTIQAEVYDTVVITLKNMASHPVSLHAVGVSYWKASEGAEYDDQTSQREKEDDKVFPGGSHTYVWQVLKENGPMASDPLCLTYSYLSHVDLVKDLNSGLIGALLVCREGSLAKEKTQTLHKFILLFAVFDEGKSWHSETKNSLMQDRDAASARAWPKMHTVNGYVNRSLPGLIGCHRKSVYWHVIGMGTTPEVHSIFLEGHTFLVRNHRQASLEISPITFLTAQTLLMDLGQFLLFCHISSHQHDGMEAYVKVDSCPEEPQLRMKNNEEAEDYDDDLTDSEMDVVRFDDDNSPSFIQIRSVAKKHPKTWVHYIAAEEEDWDYAPLVLAPDDRSYKSQYLNNGPQRIGRKYKKVRFMAYTDETFKTREAIQHESGILGPLLYGEVGDTLLIIFKNQASRPYNIYPHGITDVRPLYSRRLPKGVKHLKDFPILPGEIFKYKWTVTVEDGPTKSDPRCLTRYYSSFVNMERDLASGLIGPLLICYKESVDQRGNQIMSDKRNVILFSVFDENRSWYLTENIQRFLPNPAGVQLEDPEFQASNIMHSINGYVFDSLQLSVCLHEVAYWYILSIGAQTDFLSVFFSGYTFKHKMVYEDTLTLFPFSGETVFMSMENPGLWILGCHNSDFRNRGMTALLKVSSCDKNTGDYYEDSYEDISAYLLSKNNAIEPRSFSQNGGGGSTGGTGGSSGGGTGSGGGGTGGSGGTDIQLTQSPSFLSASVGDRVTITCRASSSVRYIYWFQQKPGKAPKLLIYATSFRQSGVPSRFSGSGSGTEYTLTISSLQPEDFATYYCHQRNSFPYTFGQGTKLEIKGGGGSGGGGSGGGGSGGGGSEVQLVQSGAEVKKPGASVKVSCKASGYTFTTYAIHWVRQAPGQGLEWMGYINPSSGYTRYNPKFKGRVTMTRDKSTSTAYMELRSLRSDDTAVYYCWTGTRDYWGQGTTVTVSSGGGGDIQLTQSPSFLSASVGDRVTITCRASSSVRYIYWFQQKPGKAPKLLIYATSFRQSGVPSRFSGSGSGTEYTLTISSLQPEDFATYYCHQRNSFPYTFGQGTKLEIKGGGGSGGGGSGGGGSGGGGSEVQLVQSGAEVKKPGASVKVSCKASGYTFTTYAIHWVRQAPGQGLEWMGYINPSSGYTRYNPKFKGRVTMTRDKSTSTAYMELRSLRSDDTAVYYCWTGTRDYWGQGTTVTVSSGGGGDENQSPRSFQKKTRHYFIAAVERLWDYGMSSSPHVLRNRAQSGSVPQFKKVVFQEFTDGSFTQPLYRGELNEHLGLLGPYIRAEVEDNIMVTFRNQASRPYSFYSSLISYEEDQRQGAEPRKNFVKPNETKTYFWKVQHHMAPTKDEFDCKAWAYFSDVDLEKDVHSGLIGPLLVCHTNTLNPAHGRQVTVQEFALFFTIFDETKSWYFTENMERNCRAPCNIQMEDPTFKENYRFHAINGYIMDTLPGLVMAQDQRIRWYLLSMGSNENIHSIHFSGHVFTVRKKEEYKMALYNLYPGVFETVEMLPSKAGIWRVECLIGEHLHAGMSTLFLVYSNKCQTPLGMASGHIRDFQITASGQYGQWAPKLARLHYSGSINAWSTKEPFSWIKVDLLAPMIIHGIKTQGARQKFSSLYISQFIIMYSLDGKKWQTYRGNSTGTLMVFFGNVDSSGIKHNIFNPPIIARYIRLHPTHYSIRSTLRMELMGCDLNSCSMPLGMESKAISDAQITASSYFTNMFATWSPSKARLHLQGRSNAWRPQVNNPKEWLQVDFQKTMKVTGVTTQGVKSLLTSMYVKEFLISSSQDGHQWTLFFQNGKVKVFQGNQDSFTPVVNSLDPPLLTRYLRIHPQSWVHQIALRMEVLGCEAQDLY

SEQ ID NO: 7439 - protein, 1704 aa, Artificial Sequence
  source: /note="Description of Artificial Sequence: Synthetic polypeptide"
DIQLTQSPSFLSASVGDRVTITCRASSSVRYIYWFQQKPGKAPKLLIYATSFRQSGVPSRFSGSGSGTEYTLTISSLQPEDFATYYCHQRNSFPYTFGQGTKLEIKGGGGSGGGGSGGGGSGGGGSEVQLVQSGAEVKKPGASVKVSCKASGYTFTTYAIHWVRQAPGQGLEWMGYINPSSGYTRYNPKFKGRVTMTRDKSTSTAYMELRSLRSDDTAVYYCWTGTRDYWGQGTTVTVSSGGGSGGGGSGLVPRGSGGGSGGGGSGATRRYYLGAVELSWDYMQSDLGELPVDARFPPRVPKSFPFNTSVVYKKTLFVEFTDHLFNIAKPRPPWMGLLGPTIQAEVYDTVVITLKNMASHPVSLHAVGVSYWKASEGAEYDDQTSQREKEDDKVFPGGSHTYVWQVLKENGPMASDPLCLTYSYLSHVDLVKDLNSGLIGALLVCREGSLAKEKTQTLHKFILLFAVFDEGKSWHSETKNSLMQDRDAASARAWPKMHTVNGYVNRSLPGLIGCHRKSVYWHVIGMGTTPEVHSIFLEGHTFLVRNHRQASLEISPITFLTAQTLLMDLGQFLLFCHISSHQHDGMEAYVKVDSCPEEPQLRMKNNEEAEDYDDDLTDSEMDVVRFDDDNSPSFIQIRSVAKKHPKTWVHYIAAEEEDWDYAPLVLAPDDRSYKSQYLNNGPQRIGRKYKKVRFMAYTDETFKTREAIQHESGILGPLLYGEVGDTLLIIFKNQASRPYNIYPHGITDVRPLYSRRLPKGVKHLKDFPILPGEIFKYKWTVTVEDGPTKSDPRCLTRYYSSFVNMERDLASGLIGPLLICYKESVDQRGNQIMSDKRNVILFSVFDENRSWYLTENIQRFLPNPAGVQLEDPEFQASNIMHSINGYVFDSLQLSVCLHEVAYWYILSIGAQTDFLSVFFSGYTFKHKMVYEDTLTLFPFSGETVFMSMENPGLWILGCHNSDFRNRGMTALLKVSSCDKNTGDYYEDSYEDISAYLLSKNNAIEPRSFSQNPPVLKRHQREITRTTLQSDQEEIDYDDTISVEMKKEDFDIYDEDENQSPRSFQKKTRHYFIAAVERLWDYGMSSSPHVLRNRAQSGSVPQFKKVVFQEFTDGSFTQPLYRGELNEHLGLLGPYIRAEVEDNIMVTFRNQASRPYSFYSSLISYEEDQRQGAEPRKNFVKPNETKTYFWKVQHHMAPTKDEFDCKAWAYFSDVDLEKDVHSGLIGPLLVCHTNTLNPAHGRQVTVQEFALFFTIFDETKSWYFTENMERNCRAPCNIQMEDPTFKENYRFHAINGYIMDTLPGLVMAQDQRIRWYLLSMGSNENIHSIHFSGHVFTVRKKEEYKMALYNLYPGVFETVEMLPSKAGIWRVECLIGEHLHAGMSTLFLVYSNKCQTPLGMASGHIRDFQITASGQYGQWAPKLARLHYSGSINAWSTKEPFSWIKVDLLAPMIIHGIKTQGARQKFSSLYISQFIIMYSLDGKKWQTYRGNSTGTLMVFFGNVDSSGIKHNIFNPPIIARYIRLHPTHYSIRSTLRMELMGCDLNSCSMPLGMESKAISDAQITASSYFTNMFATWSPSKARLHLQGRSNAWRPQVNNPKEWLQVDFQKTMKVTGVTTQGVKSLLTSMYVKEFLISSSQDGHQWTLFFQNGKVKVFQGNQDSFTPVVNSLDPPLLTRYLRIHPQSWVHQIALRMEVLGCEAQDLY

SEQ ID NO: 7440 - protein, 1661 aa, Artificial Sequence
  source: /note="Description of Artificial Sequence: Synthetic polypeptide"
DIQLTQSPSFLSASVGDRVTITCRASSSVRYIYWFQQKPGKAPKLLIYATSFRQSGVPSRFSGSGSGTEYTLTISSLQPEDFATYYCHQRNSFPYTFGQGTKLEIKGGGGSGGGGSGGGGSGGGGSEVQLVQSGAEVKKPGASVKVSCKASGYTFTTYAIHWVRQAPGQGLEWMGYINPSSGYTRYNPKFKGRVTMTRDKSTSTAYMELRSLRSDDTAVYYCWTGTRDYWGQGTTVTVSSGGGSGGGGSGLVPRGSGGGSGGGGSGATRRYYLGAVELSWDYMQSDLGELPVDARFPPRVPKSFPFNTSVVYKKTLFVEFTDHLFNIAKPRPPWMGLLGPTIQAEVYDTVVITLKNMASHPVSLHAVGVSYWKASEGAEYDDQTSQREKEDDKVFPGGSHTYVWQVLKENGPMASDPLCLTYSYLSHVDLVKDLNSGLIGALLVCREGSLAKEKTQTLHKFILLFAVFDEGKSWHSETKNSLMQDRDAASARAWPKMHTVNGYVNRSLPGLIGCHRKSVYWHVIGMGTTPEVHSIFLEGHTFLVRNHRQASLEISPITFLTAQTLLMDLGQFLLFCHISSHQHDGMEAYVKVDSCPEEPQLRMKNNEEAEDYDDDLTDSEMDVVRFDDDNSPSFIQIRSVAKKHPKTWVHYIAAEEEDWDYAPLVLAPDDRSYKSQYLNNGPQRIGRKYKKVRFMAYTDETFKTREAIQHESGILGPLLYGEVGDTLLIIFKNQASRPYNIYPHGITDVRPLYSRRLPKGVKHLKDFPILPGEIFKYKWTVTVEDGPTKSDPRCLTRYYSSFVNMERDLASGLIGPLLICYKESVDQRGNQIMSDKRNVILFSVFDENRSWYLTENIQRFLPNPAGVQLEDPEFQASNIMHSINGYVFDSLQLSVCLHEVAYWYILSIGAQTDFLSVFFSGYTFKHKMVYEDTLTLFPFSGETVFMSMENPGLWILGCHNSDFRNRGMTALLKVSSCDKNTGDYYEDSYEDISAYLLSKNNAIEPRSFSQNDENQSPRSFQKKTRHYFIAAVERLWDYGMSSSPHVLRNRAQSGSVPQFKKVVFQEFTDGSFTQPLYRGELNEHLGLLGPYIRAEVEDNIMVTFRNQASRPYSFYSSLISYEEDQRQGAEPRKNFVKPNETKTYFWKVQHHMAPTKDEFDCKAWAYFSDVDLEKDVHSGLIGPLLVCHTNTLNPAHGRQVTVQEFALFFTIFDETKSWYFTENMERNCRAPCNIQMEDPTFKENYRFHAINGYIMDTLPGLVMAQDQRIRWYLLSMGSNENIHSIHFSGHVFTVRKKEEYKMALYNLYPGVFETVEMLPSKAGIWRVECLIGEHLHAGMSTLFLVYSNKCQTPLGMASGHIRDFQITASGQYGQWAPKLARLHYSGSINAWSTKEPFSWIKVDLLAPMIIHGIKTQGARQKFSSLYISQFIIMYSLDGKKWQTYRGNSTGTLMVFFGNVDSSGIKHNIFNPPIIARYIRLHPTHYSIRSTLRMELMGCDLNSCSMPLGMESKAISDAQITASSYKTNMFATWSPSKARLHLQGRSNAWRPQVNNPKEWLQVDFQKTMKVTGVTTQGVKSLLTSMYVKEFLISSSQDGHQWTLFFQNGKVKVFQGNQDSFTPVVNSLDPPLLTRYLRIHPQSWVHQIALRMEVLGCEAQDLY

SEQ ID NO: 7441 - protein, 1661 aa, Artificial Sequence
  source: /note="Description of Artificial Sequence: Synthetic polypeptide"
DIQLTQSPSFLSASVGDRVTITCRASSSVRYIYWFQQKPGKAPKLLIYATSFRQSGVPSRFSGSGSGTEYTLTISSLQPEDFATYYCHQRNSFPYTFGQGTKLEIKGGGGSGGGGSGGGGSGGGGSEVQLVQSGAEVKKPGASVKVSCKASGYTFTTYAIHWVRQAPGQGLEWMGYINPSSGYTRYNPKFKGRVTMTRDKSTSTAYMELRSLRSDDTAVYYCWTGTRDYWGQGTTVTVSSGGGSGGGGSGLVPRGSGGGSGGGGSGATRRYYLGAVELSWDYMQSDLGELPVDARFPPRVPKSFPFNTSVVYKKTLFVEFTDHLFNIAKPRPPWMGLLGPTIQAEVYDTVVITLKNMASHPVSLHAVGVSYWKASEGAEYDDQTSQREKEDDKVFPGGSHTYVWQVLKENGPMASDPLCLTYSYLSHVDLVKDLNSGLIGALLVCREGSLAKEKTQTLHKFILLFAVFDEGKSWHSETKNSLMQDRDAASARAWPKMHTVNGYVNRSLPGLIGCHRKSVYWHVIGMGTTPEVHSIFLEGHTFLVRNHRQASLEISPITFLTAQTLLMDLGQFLLFCHISSHQHDGMEAYVKVDSCPEEPQLRMKNNEEAEDYDDDLTDSEMDVVRFDDDNSPSFIQIRSVAKKHPKTWVHYIAAEEEDWDYAPLVLAPDDRSYKSQYLNNGPQRIGRKYKKVRFMAYTDETFKTREAIQHESGILGPLLYGEVGDTLLIIFKNQASRPYNIYPHGITDVRPLYSRRLPKGVKHLKDFPILPGEIFKYKWTVTVEDGPTKSDPRCLTRYYSSFVNMERDLASGLIGPLLICYKESVDQRGNQIMSDKRNVILFSVFDENRSWYLTENIQRFLPNPAGVQLEDPEFQASNIMHSINGYVFDSLQLSVCLHEVAYWYILSIGAQTDFLSVFFSGYTFKHKMVYEDTLTLFPFSGETVFMSMENPGLWILGCHNSDFRNRGMTALLKVSSCDKNTGDYYEDSYEDISAYLLSKNNAIEPRSFSQNDENQSPRSFQKKTRHYFIAAVERLWDYGMSSSPHVLRNRAQSGSVPQFKKVVFQEFTDGSFTQPLYRGELNEHLGLLGPYIRAEVEDNIMVTFRNQASRPYSFYSSLISYEEDQRQGAEPRKNFVKPNETKTYFWKVQHHMAPTKDEFDCKAWAYFSDVDLEKDVHSGLIGPLLVCHTNTLNPAHGRQVTVQEFALFFTIFDETKSWYFTENMERNCRAPCNIQMEDPTFKENYRFHAINGYIMDTLPGLVMAQDQRIRWYLLSMGSNENIHSIHFSGHVFTVRKKEEYKMALYNLYPGVFETVEMLPSKAGIWRVECLIGEHLHAGMSTLFLVYSNKCQTPLGMASGHIRDFQITASGQYGQWAPKLARLHYSGSINAWSTKEPFSWIKVDLLAPMIIHGIKTQGARQKFSSLYISQFIIMYSLDGKKWQTYRGNSTGTLMVFFGNVDSSGIKHNIFNPPIIARYIRLHPTHYSIRSTLRMELMGCDLNSCSMPLGMESKAISDAQITASSYFTNMFATWSPSKARLHLQGRSNAWRPQVNNPKEWLQVDFQKTMKVTGVTTQGVKSLLTSMYVKEFLISSSQDGHQWTLFFQNGKVKVFQGNQDSFTPVVNSLDPPLLTRYLRIHPQSWVHQIALRMEVLGCEAQDLY

SEQ ID NO: 7442 - protein, 1927 aa, Artificial Sequence
  source: /note="Description of Artificial Sequence: Synthetic polypeptide"
DIQLTQSPSFLSASVGDRVTITCRASSSVRYIYWFQQKPGKAPKLLIYATSFRQSGVPSRFSGSGSGTEYTLTISSLQPEDFATYYCHQRNSFPYTFGQGTKLEIKGGGGSGGGGSGGGGSGGGGSEVQLVQSGAEVKKPGASVKVSCKASGYTFTTYAIHWVRQAPGQGLEWMGYINPSSGYTRYNPKFKGRVTMTRDKSTSTAYMELRSLRSDDTAVYYCWTGTRDYWGQGTTVTVSSGGGSGGGGSGLVPRGSGGGSGGGGSGATRRYYLGAVELSWDYMQSDLGELPVDARFPPRVPKSFPFNTSVVYKKTLFVEFTDHLFNIAKPRPPWMGLLGPTIQAEVYDTVVITLKNMASHPVSLHAVGVSYWKASEGAEYDDQTSQREKEDDKVFPGGSHTYVWQVLKENGPMASDPLCLTYSYLSHVDLVKDLNSGLIGALLVCREGSLAKEKTQTLHKFILLFAVFDEGKSWHSETKNSLMQDRDAASARAWPKMHTVNGYVNRSLPGLIGCHRKSVYWHVIGMGTTPEVHSIFLEGHTFLVRNHRQASLEISPITFLTAQTLLMDLGQFLLFCHISSHQHDGMEAYVKVDSCPEEPQLRMKNNEEAEDYDDDLTDSEMDVVRFDDDNSPSFIQIRSVAKKHPKTWVHYIAAEEEDWDYAPLVLAPDDRSYKSQYLNNGPQRIGRKYKKVRFMAYTDETFKTREAIQHESGILGPLLYGEVGDTLLIIFKNQASRPYNIYPHGITDVRPLYSRRLPKGVKHLKDFPILPGEIFKYKWTVTVEDGPTKSDPRCLTRYYSSFVNMERDLASGLIGPLLICYKESVDQRGNQIMSDKRNVILFSVFDENRSWYLTENIQRFLPNPAGVQLEDPEFQASNIMHSINGYVFDSLQLSVCLHEVAYWYILSIGAQTDFLSVFFSGYTFKHKMVYEDTLTLFPFSGETVFMSMENPGLWILGCHNSDFRNRGMTALLKVSSCDKNTGDYYEDSYEDISAYLLSKNNAIEPRSFSQNDENQSPRSFQKKTRHYFIAAVERLWDYGMSSSPHVLRNRAQSGSVPQFKKVVFQEFTDGSFTQPLYRGELNEHLGLLGPYIRAEVEDNIMVTFRNQASRPYSFYSSLISYEEDQRQGAEPRKNFVKPNETKTYFWKVQHHMAPTKDEFDCKAWAYFSDVDLEKDVHSGLIGPLLVCHTNTLNPAHGRQVTVQEFALFFTIFDETKSWYFTENMERNCRAPCNIQMEDPTFKENYRFHAINGYIMDTLPGLVMAQDQRIRWYLLSMGSNENIHSIHFSGHVFTVRKKEEYKMALYNLYPGVFETVEMLPSKAGIWRVECLIGEHLHAGMSTLFLVYSNKCQTPLGMASGHIRDFQITASGQYGQWAPKLARLHYSGSINAWSTKEPFSWIKVDLLAPMIIHGIKTQGARQKFSSLYISQFIIMYSLDGKKWQTYRGNSTGTLMVFFGNVDSSGIKHNIFNPPIIARYIRLHPTHYSIRSTLRMELMGCDLNSCSMPLGMESKAISDAQITASSYFTNMFATWSPSKARLHLQGRSNAWRPQVNNPKEWLQVDFQKTMKVTGVTTQGVKSLLTSMYVKEFLISSSQDGHQWTLFFQNGKVKVFQGNQDSFTPVVNSLDPPLLTRYLRIHPQSWVHQIALRMEVLGCEAQDLYGGGSGGGGSGLVPRGSGGGSGGGGSGDIQLTQSPSFLSASVGDRVTITCRASSSVRYIYWFQQKPGKAPKLLIYATSFRQSGVPSRFSGSGSGTEYTLTISSLQPEDFATYYCHQRNSFPYTFGQGTKLEIKGGGGSGGGGSGGGGSGGGGSEVQLVQSGAEVKKPGASVKVSCKASGYTFTTYAIHWVRQAPGQGLEWMGYINPSSGYTRYNPKFKGRVTMTRDKSTSTAYMELRSLRSDDTAVYYCWTGTRDYWGQGTTVTVSS

SEQ ID NO: 7443 - protein, 1935 aa, Artificial Sequence
  source: /note="Description of Artificial Sequence: Synthetic polypeptide"
DIQLTQSPSFLSASVGDRVTITCRASSSVRYIYWFQQKPGKAPKLLIYATSFRQSGVPSRFSGSGSGTEYTLTISSLQPEDFATYYCHQRNSFPYTFGQGTKLEIKGGGGSGGGGSGGGGSGGGGSEVQLVQSGAEVKKPGASVKVSCKASGYTFTTYAIHWVRQAPGQGLEWMGYINPSSGYTRYNPKFKGRVTMTRDKSTSTAYMELRSLRSDDTAVYYCWTGTRDYWGQGTTVTVSSGGGSGGGGSGLVPRGSGGGSGGGGSGATRRYYLGAVELSWDYMQSDLGELPVDARFPPRVPKSFPFNTSVVYKKTLFVEFTDHLFNIAKPRPPWMGLLGPTIQAEVYDTVVITLKNMASHPVSLHAVGVSYWKASEGAEYDDQTSQREKEDDKVFPGGSHTYVWQVLKENGPMASDPLCLTYSYLSHVDLVKDLNSGLIGALLVCREGSLAKEKTQTLHKFILLFAVFDEGKSWHSETKNSLMQDRDAASARAWPKMHTVNGYVNRSLPGLIGCHRKSVYWHVIGMGTTPEVHSIFLEGHTFLVRNHRQASLEISPITFLTAQTLLMDLGQFLLFCHISSHQHDGMEAYVKVDSCPEEPQLRMKNNEEAEDYDDDLTDSEMDVVRFDDDNSPSFIQIRSVAKKHPKTWVHYIAAEEEDWDYAPLVLAPDDRSYKSQYLNNGPQRIGRKYKKVRFMAYTDETFKTREAIQHESGILGPLLYGEVGDTLLIIFKNQASRPYNIYPHGITDVRPLYSRRLPKGVKHLKDFPILPGEIFKYKWTVTVEDGPTKSDPRCLTRYYSSFVNMERDLASGLIGPLLICYKESVDQRGNQIMSDKRNVILFSVFDENRSWYLTENIQRFLPNPAGVQLEDPEFQASNIMHSINGYVFDSLQLSVCLHEVAYWYILSIGAQTDFLSVFFSGYTFKHKMVYEDTLTLFPFSGETVFMSMENPGLWILGCHNSDFRNRGMTALLKVSSCDKNTGDYYEDSYEDISAYLLSKNNAIEPRSFSQNGGGGSTGGTGGSSGGGTGSGGGGTGGSGGTDIQLTQSPSFLSASVGDRVTITCRASSSVRYIYWFQQKPGKAPKLLIYATSFRQSGVPSRFSGSGSGTEYTLTISSLQPEDFATYYCHQRNSFPYTFGQGTKLEIKGGGGSGGGGSGGGGSGGGGSEVQLVQSGAEVKKPGASVKVSCKASGYTFTTYAIHWVRQAPGQGLEWMGYINPSSGYTRYNPKFKGRVTMTRDKSTSTAYMELRSLRSDDTAVYYCWTGTRDYWGQGTTVTVSSGGGGDENQSPRSFQKKTRHYFIAAVERLWDYGMSSSPHVLRNRAQSGSVPQFKKVVFQEFTDGSFTQPLYRGELNEHLGLLGPYIRAEVEDNIMVTFRNQASRPYSFYSSLISYEEDQRQGAEPRKNFVKPNETKTYFWKVQHHMAPTKDEFDCKAWAYFSDVDLEKDVHSGLIGPLLVCHTNTLNPAHGRQVTVQEFALFFTIFDETKSWYFTENMERNCRAPCNIQMEDPTFKENYRFHAINGYIMDTLPGLVMAQDQRIRWYLLSMGSNENIHSIHFSGHVFTVRKKEEYKMALYNLYPGVFETVEMLPSKAGIWRVECLIGEHLHAGMSTLFLVYSNKCQTPLGMASGHIRDFQITASGQYGQWAPKLARLHYSGSINAWSTKEPFSWIKVDLLAPMIIHGIKTQGARQKFSSLYISQFIIMYSLDGKKWQTYRGNSTGTLMVFFGNVDSSGIKHNIFNPPIIARYIRLHPTHYSIRSTLRMELMGCDLNSCSMPLGMESKAISDAQITASSYFTNMFATWSPSKARLHLQGRSNAWRPQVNNPKEWLQVDFQKTMKVTGVTTQGVKSLLTSMYVKEFLISSSQDGHQWTLFFQNGKVKVFQGNQDSFTPVVNSLDPPLLTRYLRIHPQSWVHQIALRMEVLGCEAQDLY

SEQ ID NO: 7444 - protein, 1681 aa, Artificial Sequence
  source: /note="Description of Artificial Sequence: Synthetic polypeptide"
DIQLTQSPSFLSASVGDRVTITCRASSSVRYIYWFQQKPGKAPKLLIYATSFRQSGVPSRFSGSGSGTEYTLTISSLQPEDFATYYCHQRNSFPYTFGQGTKLEIKGGGGSGGGGSGGGGSGGGGSEVQLVQSGAEVKKPGASVKVSCKASGYTFTTYAIHWVRQAPGQGLEWMGYINPSSGYTRYNPKFKGRVTMTRDKSTSTAYMELRSLRSDDTAVYYCWTGTRDYWGQGTTVTVSSGGGSGGGGSGLVPRGSGGGSGGGGSGATRRYYLGAVELSWDYMQSDLGELPVDARFPPRVPKSFPFNTSVVYKKTLFVEFTDHLFNIAKPRPPWMGLLGPTIQAEVYDTVVITLKNMASHPVSLHAVGVSYWKASEGAEYDDQTSQREKEDDKVFPGGSHTYVWQVLKENGPMASDPLCLTYSYLSHVDLVKDLNSGLIGALLVCREGSLAKEKTQTLHKFILLFAVFDEGKSWHSETKNSLMQDRDAASARAWPKMHTVNGYVNRSLPGLIGCHRKSVYWHVIGMGTTPEVHSIFLEGHTFLVRNHRQASLEISPITFLTAQTLLMDLGQFLLFCHISSHQHDGMEAYVKVDSCPEEPQLRMKNNEEAEDYDDDLTDSEMDVVRFDDDNSPSFIQIRSVAKKHPKTWVHYIAAEEEDWDYAPLVLAPDDRSYKSQYLNNGPQRIGRKYKKVRFMAYTDETFKTREAIQHESGILGPLLYGEVGDTLLIIFKNQASRPYNIYPHGITDVRPLYSRRLPKGVKHLKDFPILPGEIFKYKWTVTVEDGPTKSDPRCLTRYYSSFVNMERDLASGLIGPLLICYKESVDQRGNQIMSDKRNVILFSVFDENRSWYLTENIQRFLPNPAGVQLEDPEFQASNIMHSINGYVFDSLQLSVCLHEVAYWYILSIGAQTDFLSVFFSGYTFKHKMVYEDTLTLFPFSGETVFMSMENPGLWILGCHNSDFRNRGMTALLKVSSCDKNTGDYYEDSYEDISAYLLSKNNAIEPRSFSQNGGGGGSGGSGGSGGSGGGGGDENQSPRSFQKKTRHYFIAAVERLWDYGMSSSPHVLRNRAQSGSVPQFKKVVFQEFTDGSFTQPLYRGELNEHLGLLGPYIRAEVEDNIMVTFRNQASRPYSFYSSLISYEEDQRQGAEPRKNFVKPNETKTYFWKVQHHMAPTKDEFDCKAWAYFSDVDLEKDVHSGLIGPLLVCHTNTLNPAHGRQVTVQEFALFFTIFDETKSWYFTENMERNCRAPCNIQMEDPTFKENYRFHAINGYIMDTLPGLVMAQDQRIRWYLLSMGSNENIHSIHFSGHVFTVRKKEEYKMALYNLYPGVFETVEMLPSKAGIWRVECLIGEHLHAGMSTLFLVYSNKCQTPLGMASGHIRDFQITASGQYGQWAPKLARLHYSGSINAWSTKEPFSWIKVDLLAPMIIHGIKTQGARQKFSSLYISQFIIMYSLDGKKWQTYRGNSTGTLMVFFGNVDSSGIKHNIFNPPIIARYIRLHPTHYSIRSTLRMELMGCDLNSCSMPLGMESKAISDAQITASSYFTNMFATWSPSKARLHLQGRSNAWRPQVNNPKEWLQVDFQKTMKVTGVTTQGVKSLLTSMYVKEFLISSSQDGHQWTLFFQNGKVKVFQGNQDSFTPVVNSLDPPLLTRYLRIHPQSWVHQIALRMEVLGCEAQDLY

SEQ ID NO: 7445 - protein, 1661 aa, Artificial Sequence
  source: /note="Description of Artificial Sequence: Synthetic polypeptide"
DIQLTQSPSFLSASVGDRVTITCRASSSVRYIYWFQQKPGKAPKLLIYATSFRQSGVPSRFSGSGSGTEYTLTISSLQPEDFATYYCHQRNSFPYTFGQGTKLEIKGGGGSGGGGSGGGGSGGGGSEVQLVQSGAEVKKPGASVKVSCKASGYTFTTYAIHWVRQAPGQGLEWMGYINPSSGYTRYNPKFKGRVTMTRDKSTSTAYMELRSLRSDDTAVYYCWTGTRDYWGQGTTVTVSSGGGSGGGGSGLVPRGSGGGSGGGGSGATRRYYLGAVELSWDYMQSDLGELPVDARFPPRVPKSFPFNTSVVYKKTLFVEFTDHLFNIAKPRPPWMGLLGPTIQAEVYDTVVITLKNMASHPVSLHAVGVSYWKASEGAEYDDQTSQREKEDDKVFPGGSHTYVWQVLKENGPMASDPLCLTYSYLSHVDLVKDLNSGLIGALLVCREGSLAKEKTQTLHKFILLFAVFDEGKSWHSETKNSLMQDRDAASARAWPKMHTVNGYVNRSLPGLIGCHRKSVYWHVIGMGTTPEVHSIFLEGHTFLVRNHRQASLEISPITFLTAQTLLMDLGQFLLFCHISSHQHDGMEAYVKVDSCPEEPQLRMKNNEEAEDYDDDLTDSEMDVVRFDDDNSPSFIQIRSVAKKHPKTWVHYIAAEEEDWDYAPLVLAPDDRSYKSQYLNNGPQRIGRKYKKVRFMAYTDETFKTREAIQHESGILGPLLYGEVGDTLLIIFKNQASRPYNIYPHGITDVRPLYSRRLPKGVKHLKDFPILPGEIFKYKWTVTVEDGPTKSDPRCLTRYYSSFVNMERDLASGLIGPLLICYKESVDQRGNQIMSDKRNVILFSVFDENRSWYLTENIQRFLPNPAGVQLEDPEFQASNIMHSINGYVFDSLQLSVCLHEVAYWYILSIGAQTDFLSVFFSGYTFKHKMVYEDTLTLFPFSGETVFMSMENPGLWILGCHNSDFRNRGMTALLKVSSCDKNTGDYYEDSYEDISAYLLSKNNAIEPGGGGGGDENQSPRSFQKKTRHYFIAAVERLWDYGMSSSPHVLRNRAQSGSVPQFKKVVFQEFTDGSFTQPLYRGELNEHLGLLGPYIRAEVEDNIMVTFRNQASRPYSFYSSLISYEEDQRQGAEPRKNFVKPNETKTYFWKVQHHMAPTKDEFDCKAWAYFSDVDLEKDVHSGLIGPLLVCHTNTLNPAHGRQVTVQEFALFFTIFDETKSWYFTENMERNCRAPCNIQMEDPTFKENYRFHAINGYIMDTLPGLVMAQDQRIRWYLLSMGSNENIHSIHFSGHVFTVRKKEEYKMALYNLYPGVFETVEMLPSKAGIWRVECLIGEHLHAGMSTLFLVYSNKCQTPLGMASGHIRDFQITASGQYGQWAPKLARLHYSGSINAWSTKEPFSWIKVDLLAPMIIHGIKTQGARQKFSSLYISQFIIMYSLDGKKWQTYRGNSTGTLMVFFGNVDSSGIKHNIFNPPIIARYIRLHPTHYSIRSTLRMELMGCDLNSCSMPLGMESKAISDAQITASSYFTNMFATWSPSKARLHLQGRSNAWRPQVNNPKEWLQVDFQKTMKVTGVTTQGVKSLLTSMYVKEFLISSSQDGHQWTLFFQNGKVKVFQGNQDSFTPVVNSLDPPLLTRYLRIHPQSWVHQIALRMEVLGCEAQDLY

SEQ ID NO: 7446 - protein, 1673 aa, Artificial Sequence
  source: /note="Description of Artificial Sequence: Synthetic polypeptide"
DIQLTQSPSFLSASVGDRVTITCRASSSVRYIYWFQQKPGKAPKLLIYATSFRQSGVPSRFSGSGSGTEYTLTISSLQPEDFATYYCHQRNSFPYTFGQGTKLEIKGGGGSGGGGSGGGGSGGGGSEVQLVQSGAEVKKPGASVKVSCKASGYTFTTYAIHWVRQAPGQGLEWMGYINPSSGYTRYNPKFKGRVTMTRDKSTSTAYMELRSLRSDDTAVYYCWTGTRDYWGQGTTVTVSSGGGSGGGGSGLVPRGSGGGSGGGGSGATRRYYLGAVELSWDYMQSDLGELPVDARFPPRVPKSFPFNTSVVYKKTLFVEFTDHLFNIAKPRPPWMGLLGPTIQAEVYDTVVITLKNMASHPVSLHAVGVSYWKASEGAEYDDQTSQREKEDDKVFPGGSHTYVWQVLKENGPMASDPLCLTYSYLSHVDLVKDLNSGLIGALLVCREGSLAKEKTQTLHKFILLFAVFDEGKSWHSETKNSLMQDRDAASARAWPKMHTVNGYVNRSLPGLIGCHRKSVYWHVIGMGTTPEVHSIFLEGHTFLVRNHRQASLEISPITFLTAQTLLMDLGQFLLFCHISSHQHDGMEAYVKVDSCPEEPQLRMKNNEEAEDYDDDLTDSEMDVVRFDDDNSPSFIQIRSVAKKHPKTWVHYIAAEEEDWDYAPLVLAPDDRSYKSQYLNNGPQRIGRKYKKVRFMAYTDETFKTREAIQHESGILGPLLYGEVGDTLLIIFKNQASRPYNIYPHGITDVRPLYSRRLPKGVKHLKDFPILPGEIFKYKWTVTVEDGPTKSDPRCLTRYYSSFVNMERDLASGLIGPLLICYKESVDQRGNQIMSDKRNVILFSVFDENRSWYLTENIQRFLPNPAGVQLEDPEFQASNIMHSINGYVFDSLQLSVCLHEVAYWYILSIGAQTDFLSVFFSGYTFKHKMVYEDTLTLFPFSGETVFMSMENPGLWILGCHNSDFRNRGMTALLKVSSCDKNTGDYYEDSYEDISAYLLSKNNAIEPRSFSQNPPVLKRHQREITDENQSPRSFQKKTRHYFIAAVERLWDYGMSSSPHVLRNRAQSGSVPQFKKVVFQEFTDGSFTQPLYRGELNEHLGLLGPYIRAEVEDNIMVTFRNQASRPYSFYSSLISYEEDQRQGAEPRKNFVKPNETKTYFWKVQHHMAPTKDEFDCKAWAYFSDVDLEKDVHSGLIGPLLVCHTNTLNPAHGRQVTVQEFALFFTIFDETKSWYFTENMERNCRAPCNIQMEDPTFKENYRFHAINGYIMDTLPGLVMAQDQRIRWYLLSMGSNENIHSIHFSGHVFTVRKKEEYKMALYNLYPGVFETVEMLPSKAGIWRVECLIGEHLHAGMSTLFLVYSNKCQTPLGMASGHIRDFQITASGQYGQWAPKLARLHYSGSINAWSTKEPFSWIKVDLLAPMIIHGIKTQGARQKFSSLYISQFIIMYSLDGKKWQTYRGNSTGTLMVFFGNVDSSGIKHNIFNPPIIARYIRLHPTHYSIRSTLRMELMGCDLNSCSMPLGMESKAISDAQITASSYFTNMFATWSPSKARLHLQGRSNAWRPQVNNPKEWLQVDFQKTMKVTGVTTQGVKSLLTSMYVKEFLISSSQDGHQWTLFFQNGKVKVFQGNQDSFTPVVNSLDPPLLTRYLRIHPQSWVHQIALRMEVLGCEAQDLY

SEQ ID NO: 7447 - protein, 490 aa, Artificial Sequence
  source: /note="Description of Artificial Sequence: Synthetic polypeptide"
MEWSWVFLFFLSVTTGVHSQVQLKESGPGLVAPSQSLSITCTVSGFSLTRFGISWVRQPPGKGLEWMGVIWGDGSTDYHSALISRLSITKDNSKSQVFFRLNSLQSDDSATYYCARSFGMDYWGQGTSVTVSSGGGGSGGGGSGGGGSNIMMTQSPSSLAVSAGEKVTMSCKSSQSILNSSNQKNYLAWYQQKPGQSPKLLIYWASTRESGVPDRFTGSGSGTDFTLTISSVQAEDLAVYYCHQYFSSRTFGGGTKLEIKGGGGAGGGGCKPCICTVPEVSSVFIFPPKPKDVLTITLTPKVTCVVVDISKDDPEVQFSWFVDDVEVHTAQTQPREEQFNSTFRSVSELPIMHQDWLNGKEFKCRVNSAAFPAPIEKTISKTKGRPKAPQVYTIPPPKEQMAKDKVSLTCMITDFFPEDITVEWQWNGQPAENYKNTQPIMDTDGSYFVYSKLNVQKSNWEAGNTFTCSVLHEGLHNHHTEKSLSHSPGK

SEQ ID NO: 7448 - protein, 484 aa, Artificial Sequence
  source: /note="Description of Artificial Sequence: Synthetic polypeptide"
MEWSWVFLFFLSVTTGVHSQVQLLQSGAELARPGASVRISCKASGYTFTRYAMHWVKQRPGQGLEWIGYINPGTFSTNYNQKFKDRATLTADKSSSTAYMQLNSLTSEDSAVYYCQTGTRDYWGQGTTLTVSSGGGGSGGGGSGGGGSQIVLTQSPPIMSASPGEKVTITCSAASSVSYIYWFQQKPGTSPKLWIYSTSSLPSGVPTRFSGSGSGTSYSLTISRMEAEDAATYYCHQRSSYPFTFGSGTKLEIRGGGGAGGGGCKPCICTVPEVSSVFIFPPKPKDVLTITLTPKVTCVVVDISKDDPEVQFSWFVDDVEVHTAQTQPREEQFNSTFRSVSELPIMHQDWLNGKEFKCRVNSAAFPAPIEKTISKTKGRPKAPQVYTIPPPKEQMAKDKVSLTCMITDFFPEDITVEWQWNGQPAENYKNTQPIMDTDGSYFVYSKLNVQKSNWEAGNTFTCSVLHEGLHNHHTEKSLSHSPGK

SEQ ID NO: 7449 - protein, 484 aa, Artificial Sequence
  source: /note="Description of Artificial Sequence: Synthetic polypeptide"
MEWSWVFLFFLSVTTGVHSQVQLQQSGAELARPGASVKMSCKASGYTFTRYSMHWVKQRPGQGLEWIGYINPGTYSTNYNQKFKDRATLTADKSSSTAYMQLNSLTSEDSAVYYCQTGTRDYWGQGTTLTVSSGGGGSGGGGSGGGGSQIVLTQSPPIMSASPGEKVTITCSAASSVSYIYWFQQKPGTSPKLWIYSTSSLPSGVPTRFSGSGSGTSYSLTISRMEAEDAATYYCHQRSSYPFTFGSGTKLEIRGGGGAGGGGCKPCICTVPEVSSVFIFPPKPKDVLTITLTPKVTCVVVDISKDDPEVQFSWFVDDVEVHTAQTQPREEQFNSTFRSVSELPIMHQDWLNGKEFKCRVNSAAFPAPIEKTISKTKGRPKAPQVYTIPPPKEQMAKDKVSLTCMITDFFPEDITVEWQWNGQPAENYKNTQPIMDTDGSYFVYSKLNVQKSNWEAGNTFTCSVLHEGLHNHHTEKSLSHSPGK

SEQ ID NO: 7450 - protein, 484 aa, Artificial Sequence
  source: /note="Description of Artificial Sequence: Synthetic polypeptide"
MEWSWVFLFFLSVTTGVHSQVQLQQSGAELARPGASVKMSCKASGYTFTRYSMHWVKQRPGQGLEWIGYINPGTYYTNYNQKFKDRATLTADKSSSTAYMQLNSLTSEDSAVYYCQTGTRDYWGQGTTLTVSSGGGGSGGGGSGGGGSQIVLTQSPPIMSASPGEKVTITCSAASSVSYIYWFQQKPGTSPKLWIYSTSSLPSGVPTRFSGSGSGTSYSLTISRMEAEDAATYYCHQRSSYPFTFGSGTKLEIRGGGGAGGGGCKPCICTVPEVSSVFIFPPKPKDVLTITLTPKVTCVVVDISKDDPEVQFSWFVDDVEVHTAQTQPREEQFNSTFRSVSELPIMHQDWLNGKEFKCRVNSAAFPAPIEKTISKTKGRPKAPQVYTIPPPKEQMAKDKVSLTCMITDFFPEDITVEWQWNGQPAENYKNTQPIMDTDGSYFVYSKLNVQKSNWEAGNTFTCSVLHEGLHNHHTEKSLSHSPGK

SEQ ID NO: 7451 - protein, 491 aa, Artificial Sequence
  source: /note="Description of Artificial Sequence: Synthetic polypeptide"
MEWSWVFLFFLSVTTGVHSQVQLQQSGAELARPGASVKMSCKASGYTFTSYSIHWIKQRPGQSLEWIGYINPNSDYANYNQKFKDKATLTTDKSSTTAYMQLSSLTTDDSAVYYCQTGTRDYWGQGTTLTVSSGGGGSGGGGSGGGGSDIVMTQSPSSLSVSAGEKVTMSCKSSQSLLNSGNQKNYLAWYQQKPGQPPKLLIYGASTRESGVPDRFTGSGSGTDFTLTISSVQAEDLAVYYCQNDHSYPYTFGGGTKLEIKGGGGAGGGGCKPCICTVPEVSSVFIFPPKPKDVLTITLTPKVTCVVVDISKDDPEVQFSWFVDDVEVHTAQTQPREEQFNSTFRSVSELPIMHQDWLNGKEFKCRVNSAAFPAPIEKTISKTKGRPKAPQVYTIPPPKEQMAKDKVSLTCMITDFFPEDITVEWQWNGQPAENYKNTQPIMDTDGSYFVYSKLNVQKSNWEAGNTFTCSVLHEGLHNHHTEKSLSHSPGK

SEQ ID NO: 7452 - protein, 484 aa, Artificial Sequence
  source: /note="Description of Artificial Sequence: Synthetic polypeptide"
MEWSWVFLFFLSVTTGVHSQVQLQQSGAELARPGASVKMSCKASGYTFTSYSIHWIKQRPGQSLEWIGYINPNSDYANYNQKFKDKATLTTDKSSTTAYMQLSSLTTDDSAVYYCQTGTRDYWGQGTTLTVSSGGGGSGGGGSGGGGSHIVLTQSPAIMSASPGEKVTIICSARSSVSYMYWFQQKPGTSPKLWIYATSSLPSGVPARFSGSGSGTSYSLTISRMEAEDAATYYCHQRSSYPYTFGSGTKLEIKGGGGAGGGGCKPCICTVPEVSSVFIFPPKPKDVLTITLTPKVTCVVVDISKDDPEVQFSWFVDDVEVHTAQTQPREEQFNSTFRSVSELPIMHQDWLNGKEFKCRVNSAAFPAPIEKTISKTKGRPKAPQVYTIPPPKEQMAKDKVSLTCMITDFFPEDITVEWQWNGQPAENYKNTQPIMDTDGSYFVYSKLNVQKSNWEAGNTFTCSVLHEGLHNHHTEKSLSHSPGK

SEQ ID NO: 7453 - protein, 484 aa, Artificial Sequence
  source: /note="Description of Artificial Sequence: Synthetic polypeptide"
MEWSWVFLFFLSVTTGVHSRVQLQQSGAELARPGASVKMSCKASGYTFTNYAMHWVKQRPGQGLEWIGYINPKSDNTNYNQKFKDKATLTTDKSSATAYMQLSSLTSDDSAVYYCQTGTRDYWGQGTTLTVSSGGGGSGGGGSGGGGSHIVLTQSPAIMSASPGEKVTIFCSASSSITYVYWFQQKPGTSPKLWIYSTSSLPSGVPARFSGSGSGTSYSLTISRMEAEDAATYYCHQRNSYPFTFGSGTKLEIKGGGGAGGGGCKPCICTVPEVSSVFIFPPKPKDVLTITLTPKVTCVVVDISKDDPEVQFSWFVDDVEVHTAQTQPREEQFNSTFRSVSELPIMHQDWLNGKEFKCRVNSAAFPAPIEKTISKTKGRPKAPQVYTIPPPKEQMAKDKVSLTCMITDFFPEDITVEWQWNGQPAENYKNTQPIMDTDGSYFVYSKLNVQKSNWEAGNTFTCSVLHEGLHNHHTEKSLSHSPGK

SEQ ID NO: 7454 - protein, 489 aa, Artificial Sequence
  source: /note="Description of Artificial Sequence: Synthetic polypeptide"
MEWSWVFLFFLSVTTGVHSRVQLQQSGAELARPGASVKMSCKASGYTFTTYTIHWVKQKTGQGLEWIGYINPSSDYTRYNPKFKDKATLTTDKSSSTAYMKLNSLASDDSAVYYCQTGTRDYWGQGTTLTVSSGGGGSGGGGSGGGGSDIVLTQSPASLAVSLGQRATISYRASKSVSTSGYSYMHWNQQKPGQPPRLLIYLVSNLESGVPTRFSGSGSGTSYSLTISRMEAEDAATYYCHQRNSFPFTFGSGTKLEIRGGGGAGGGGCKPCICTVPEVSSVFIFPPKPKDVLTITLTPKVTCVVVDISKDDPEVQFSWFVDDVEVHTAQTQPREEQFNSTFRSVSELPIMHQDWLNGKEFKCRVNSAAFPAPIEKTISKTKGRPKAPQVYTIPPPKEQMAKDKVSLTCMITDFFPEDITVEWQWNGQPAENYKNTQPIMDTDGSYFVYSKLNVQKSNWEAGNTFTCSVLHEGLHNHHTEKSLSHSPGK

SEQ ID NO: 7455 - protein, 484 aa, Artificial Sequence
  source: /note="Description of Artificial Sequence: Synthetic polypeptide"
MEWSWVFLFFLSVTTGVHSRVQLQQSGAELARPGASVKMSCKASGYTFTTYTIHWVKQKTGQGLEWIGYINPSSDYTRYNPKFKDKATLTTDKSSSTAYMKLNSLASDDSAVYYCQTGTRDYWGQGTTLTVSSGGGGSGGGGSGGGGSQIVLTQSPPIMSASPGEKVTMTCSAASSVSYIYWFQQKPGTSPKLWIYSTSTLPSGVPTRFSGSGSGTSYSLTISRMEAEDAATYYCHQRNSFPFTFGSGTKLEIRGGGGAGGGGCKPCICTVPEVSSVFIFPPKPKDVLTITLTPKVTCVVVDISKDDPEVQFSWFVDDVEVHTAQTQPREEQFNSTFRSVSELPIMHQDWLNGKEFKCRVNSAAFPAPIEKTISKTKGRPKAPQVYTIPPPKEQMAKDKVSLTCMITDFFPEDITVEWQWNGQPAENYKNTQPIMDTDGSYFVYSKLNVQKSNWEAGNTFTCSVLHEGLHNHHTEKSLSHSPGK

SEQ ID NO: 7456 - protein, 114 aa, Artificial Sequence
  source: /note="Description of Artificial Sequence: Synthetic polypeptide"
EVQLVQSGAEVKKPGASVKVSCKASGYTFTRYAIHWVRQAPGQGLEWMGYINPSSGYTRYNPKFKHRVTMTRDKSTSTAYMELRSLRSDDTAVYYCWTGTRDYWGQGTTVTVSS

SEQ ID NO: 7457 - protein, 114 aa, Artificial Sequence
  source: /note="Description of Artificial Sequence: Synthetic polypeptide"
EVQLVQSGAEVKKPGASVKVSCKASGYTFTRYTIHWVRQAPGQGLEWMGYINPSSGYTRYNPKFKGRVTMTRDKSTSTAYMELRSLRSDDTAVYYCWTGTRDYWGQGTTVTVSS

SEQ ID NO: 7458 - protein, 114 aa, Artificial Sequence
  source: /note="Description of Artificial Sequence: Synthetic polypeptide"
EVQLVQSGAEVKKPGASVKVSCKASGYTFTTYAIHWVRQAPGQGLEWMGYINPSSGYTRYNPKFKGRVTMTRDKSTSTAYMELRSLRSDDTAVYYCQTGTRDYWGQGTTVTVSS

SEQ ID NO: 7459 - protein, 114 aa, Artificial Sequence
  source: /note="Description of Artificial Sequence: Synthetic polypeptide"
EVQLVQSGAEVKKPGASVKVSCKASGYTFTTYAIHWVRQAPGQGLEWMGYINPSSGYTRYNPKFKGRVTMTRDKSTSTAYMELRSLRSDDTAVYYCWTGTRDYWGQGTTVTVSS

SEQ ID NO: 7460 - protein, 114 aa, Artificial Sequence
  source: /note="Description of Artificial Sequence: Synthetic polypeptide"
EVQLVQSGAEVKKPGASVKVSCKASGYTFTTYAIHWVRQAPGQGLEWMGYINPSSGYTRYNPKFKHRVTMTRDKSTSTAYMELRSLRSDDTAVYYCQTGTRDYWGQGTTVTVSS

SEQ ID NO: 7461 - protein, 114 aa, Artificial Sequence
  source: /note="Description of Artificial Sequence: Synthetic polypeptide"
EVQLVQSGAEVKKPGASVKVSCKASGYTFTTYAIHWVRQAPGQGLEWMGYINPSSGYTRYNPKFKHRVTMTRDKSTSTAYMELRSLRSDDTAVYYCWTGTRDYWGQGTTVTVSS

SEQ ID NO: 7462 - protein, 114 aa, Artificial Sequence
  source: /note="Description of Artificial Sequence: Synthetic polypeptide"
EVQLVQSGAEVKKPGASVKVSCKASGYTFTTYTIHWVRQAPGQGLEWIGYINPSSDYTRYNPKFKDRVTLTTDKSTSTAYMELRSLRSDDTAVYYCQTGTRDYWGQGTTVTVSS

SEQ ID NO: 7463 - protein, 114 aa, Artificial Sequence
  source: /note="Description of Artificial Sequence: Synthetic polypeptide"
EVQLVQSGAEVKKPGASVKVSCKASGYTFTTYTIHWVRQAPGQGLEWMGYINPKSGWTRYNPKFKGRVTMTRDKSTSTAYMELRSLRSDDTAVYYCQTGTRDYWGQGTTVTVSS

SEQ ID NO: 7464 - protein, 114 aa, Artificial Sequence
  source: /note="Description of Artificial Sequence: Synthetic polypeptide"
EVQLVQSGAEVKKPGASVKVSCKASGYTFTTYTIHWVRQAPGQGLEWMGYINPSSDYTRYNPKFKDRVTLTTDTSTSTAYMELRSLRSDDTAVYYCATGTRDYWGQGTTVTVSS

SEQ ID NO: 7465 - protein, 114 aa, Artificial Sequence
  source: /note="Description of Artificial Sequence: Synthetic polypeptide"
EVQLVQSGAEVKKPGASVKVSCKASGYTFTTYTIHWVRQAPGQGLEWMGYINPSSDYTRYNPKFKDRVTLTTDTSTSTAYMELRSLRSDDTAVYYCQRGTRDYWGQGTTVTVSS

SEQ ID NO: 7466 - protein, 114 aa, Artificial Sequence
  source: /note="Description of Artificial Sequence: Synthetic polypeptide"
EVQLVQSGAEVKKPGASVKVSCKASGYTFTTYTIHWVRQAPGQGLEWMGYINPSSDYTRYNPKFKDRVTLTTDTSTSTAYMELRSLRSDDTAVYYCQTGTRDYWGQGTTVTVSS

SEQ ID NO: 7467 - protein, 114 aa, Artificial Sequence
  source: /note="Description of Artificial Sequence: Synthetic polypeptide"
EVQLVQSGAEVKKPGASVKVSCKASGYTFTTYTIHWVRQAPGQGLEWMGYINPSSDYTRYNPKFKDRVTMTTDTSTSTAYMELRSLRSDDTAVYYCARGTRDYWGQGTTVTVSS

SEQ ID NO: 7468 - protein, 114 aa, Artificial Sequence
  source: /note="Description of Artificial Sequence: Synthetic polypeptide"
EVQLVQSGAEVKKPGASVKVSCKASGYTFTTYTIHWVRQAPGQGLEWMGYINPSSDYTRYNPKFKDRVTMTTDTSTSTAYMELRSLRSDDTAVYYCQRGTRDYWGQGTTVTVSS

SEQ ID NO: 7469 - protein, 114 aa, Artificial Sequence
  source: /note="Description of Artificial Sequence: Synthetic polypeptide"
EVQLVQSGAEVKKPGASVKVSCKASGYTFTTYTIHWVRQAPGQGLEWMGYINPSSDYTRYNPKFKDRVTMTTDTSTSTAYMELRSLRSDDTAVYYCQTGTRDYWGQGTTVTVSS

SEQ ID NO: 7470 - protein, 114 aa, Artificial Sequence
  source: /note="Description of Artificial Sequence: Synthetic polypeptide"
EVQLVQSGAEVKKPGASVKVSCKASGYTFTTYTIHWVRQAPGQGLEWMGYINPSSGWTRYNPKFKGRVTMTRDKSTSTAYMELRSLRSDDTAVYYCWTGRRDYWGQGTTVTVSS

SEQ ID NO: 7471 - protein, 114 aa, Artificial Sequence
  source: /note="Description of Artificial Sequence: Synthetic polypeptide"
EVQLVQSGAEVKKPGASVKVSCKASGYTFTTYTIHWVRQAPGQGLEWMGYINPSSGYTRYNPKFKGRVTMTRDKSTSTAYMELRSLRSDDTAVYYCQTGTRDYWGQGTTVTVSS

SEQ ID NO: 7472 - protein, 114 aa, Artificial Sequence
  source: /note="Description of Artificial Sequence: Synthetic polypeptide"
EVQLVQSGAEVKKPGASVKVSCKASGYTFTTYTIHWVRQAPGQGLEWMGYINPSSGYTRYNPKFKGRVTMTRDKSTSTAYMELRSLRSDDTAVYYCWTGRRDYWGQGTTVTVSS

SEQ ID NO: 7473 - protein, 114 aa, Artificial Sequence
  source: /note="Description of Artificial Sequence: Synthetic polypeptide"
EVQLVQSGAEVKKPGASVKVSCKASGYTFTTYTIHWVRQAPGQGLEWMGYINPSSGYTRYNPKFKHRVTMTRDKSTSTAYMELRSLRSDDTAVYYCWTGTRDYWGQGTTVTVSS

SEQ ID NO: 7474 - protein, 124 aa, Artificial Sequence
  source: /note="Description of Artificial Sequence: Synthetic polypeptide"
EVTLRESGPALVKPTQTLTLTCTFSGFSLSTSGMCVGWIRQPPGKALEWLAHIDWDDDKYYSTSLKSRLTISKDTSKNQVVLTMTNMDPVDTATYYCARIRSSVYAHYYGMDVWGQGTTVTVSS

SEQ ID NO: 7475 - protein, 124 aa, Artificial Sequence
  source: /note="Description of Artificial Sequence: Synthetic polypeptide"
EVTLRESGPALVKPTQTLTLTCTFSGFSLSTSGMGVGWIRQPPGKALEWLAHIDWDDDKYYSPSLKSRLTISKDTSKNQVVLTMTNMDPVDTATYYCARIRSSVYAHYYGMDYWGQGTTVTVSS

SEQ ID NO: 7476 - protein, 124 aa, Artificial Sequence
  source: /note="Description of Artificial Sequence: Synthetic polypeptide"
EVTLRESGPALVKPTQTLTLTCTFSGFSLSTSGMGVSWIRQPPGKALEWLAHIDWDDDKYYSTSLKSRLTISKDTSKNQVVLTMTNMDPVDTATYYCARIRSSVYAHYYGMDYWGQGTTVTVSS

SEQ ID NO: 7477 - protein, 124 aa, Artificial Sequence
  source: /note="Description of Artificial Sequence: Synthetic polypeptide"
EVTLRESGPALVKPTQTLTLTCTFSGFSLSTSGMGVSWIRQPPGKALEWLAHIDWDDDKYYSTSLKSRLTISKDTSKNQVVLTMTNMDPVDTATYYCARIRSSVYYYYYGMDVWGQGTTVTVSS

SEQ ID NO: 7478 - protein, 124 aa, Mus musculus
QVTLKESGPGILKPSQTLSLTCSFSGFSLSTSGMGVGWIRQPSGKGLEWLAHIWWDDDKYYNPSLKSQLTISKDTSRNQVFLKITSVDAADTATYYCARKRSSVVAHYYAMDYWGQGTSVTVSS

SEQ ID NO: 7479 - protein, 117 aa, Mus musculus
EVKLVESEGGLVQPGSSMKLSCTASGFTFSDYYMAWVRQVPEKGLEWVANINYDGSNTSYLDSLKSRFIISRDNAKNILYLQMSSLKSEDTATYYCAREKFAAMDYWGQGTSVTVSS

SEQ ID NO: 7480 - protein, 123 aa, Mus musculus
EVQLQQSGPELVKPGASVKISCKASGYTFTDYYMNWVKQSHGKSLEWIGDINPNNGGTSYNQKFKGKATLTVDKSSSTAYMELRSLTSEDSAVYYCAGGGIYYRYDRNYFDYWGQGTTLTVSS

SEQ ID NO: 7481 - protein, 115 aa, Mus musculus
EVQLQQSGPELVKPGASVKISCKASGYTFTDYYMNWVKQSHGKSLEWIGDINPNNGGTTYNQKFKGKATLTVDKSYSTAYMELRSLTSEDSAVYYCARWLLFAYWGQGTLVTVSA

SEQ ID NO: 7482 - protein, 118 aa, Mus musculus
QVQLQQPGAELVKPGASVKLSCKASGYTFTSYWMHWVKQRPGQGLEWIGEINPSNGRTNYNEKFKSKATLTVDKSSSTAYMQLSSLTSEDSAVYYCARERPLYAMDYWGQGTSVTVSS

SEQ ID NO: 7483 - protein, 118 aa, Homo sapiens
QVQLVQSGAEVKKPGASVKVSCKASGYTFTSYYMHWVRQAPGQGLEWMGEISPFGGRTNYNEKFKSRVTMTRDTSTSTVYMELSSLRSEDTAVYYCARERPLYASDLWGQGTTVTVSS

SEQ ID NO: 7484 - protein, 106 aa, Artificial Sequence
  source: /note="Description of Artificial Sequence: Synthetic polypeptide"
DIQLTQSPSFLSASVGDRVTITCRASSSVRYIYWFQQKPGKAPKLLIYATSFLQSGVPSRFSGSGSGTEYTLTISSLQPEDFATYYCHQRNSFPYTFGQGTKLEIK

SEQ ID NO: 7485 - protein, 106 aa, Artificial Sequence
  source: /note="Description of Artificial Sequence: Synthetic polypeptide"
DIQLTQSPSFLSASVGDRVTITCRASSSVRYIYWFQQKPGKAPKLLIYATSFRQSGVPSRFSGSGSGTEYTLTISSLQPEDFATYYCHQRNSFPYTFGQGTKLEIK

SEQ ID NO: 7486 - protein, 106 aa, Artificial Sequence
  source: /note="Description of Artificial Sequence: Synthetic polypeptide"
DIQLTQSPSFLSASVGDRVTITCRASSSVRYIYWFQQKPGKAPKLLIYATSFRRSGVPSRFSGSGSGTEYTLTISSLQPEDFATYYCHQRNSFPYTFGQGTKLEIK

SEQ ID NO: 7487 - protein, 106 aa, Artificial Sequence
  source: /note="Description of Artificial Sequence: Synthetic polypeptide"
DIQLTQSPSFLSASVGDRVTITCRASSSVRYIYWFQQKPGKAPKLLIYATSTLQSGVPSRFSGSGSGTEYTLTISSLQPEDFATYYCHQRNSFPYTFGQGTKLEIK

SEQ ID NO: 7488 - protein, 106 aa, Artificial Sequence
  source: /note="Description of Artificial Sequence: Synthetic polypeptide"
DIQLTQSPSFLSASVGDRVTITCRASSSVRYIYWFQQKPGKAPKLLIYATSTLRSGVPSRFSGSGSGTEYTLTISSLQPEDFATYYCHQRNSFPYTFGQGTKLEIK

SEQ ID NO: 7489 - protein, 106 aa, Artificial Sequence
  source: /note="Description of Artificial Sequence: Synthetic polypeptide"
DIQLTQSPSFLSASVGDRVTITCRASSSVSYIYWFQQKPGKAPKLLIYATSFLQSGVPSRFSGSGSGTEYTLTISSLQPEDFATYYCHQRNSFPYTFGQGTKLEIK

SEQ ID NO: 7490 - protein, 106 aa, Artificial Sequence
  source: /note="Description of Artificial Sequence: Synthetic polypeptide"
DIQLTQSPSFLSASVGDRVTITCRASSSVSYIYWFQQKPGKAPKLLIYATSFRQSGVPSRFSGSGSGTEYTLTISSLQPEDFATYYCHQRNSFPYTFGQGTKLEIK

SEQ ID NO: 7491 - protein, 106 aa, Artificial Sequence
  source: /note="Description of Artificial Sequence: Synthetic polypeptide"
DIQLTQSPSFLSASVGDRVTITCRASSSVSYIYWFQQKPGKAPKLLIYATSTLQSGVPSRFSGSGSGTEYTLTISSLQPEDFATYYCHQRNSFPYTFGQGTKLEIK

SEQ ID NO: 7492 - protein, 106 aa, Artificial Sequence
  source: /note="Description of Artificial Sequence: Synthetic polypeptide"
DIQLTQSPSFLSASVGDRVTITCRASSSVSYIYWFQQKPGKAPKLLIYATSTRQSGVPSRFSGSGSGTEYTLTISSLQPEDFATYYCHQRNSFPYTFGQGTKLEIK

SEQ ID NO: 7493 - protein, 111 aa, Mus musculus
DIVLTQSPASLAVSLGQRATISCKASQSVDYDGDSYLNWYQQKPGQPPKLLIYAASNLESGIPARFSGSGSGTDFTLNIHPVEEEDAATYYCQQSNGDPWTFGGGTKLEIK

SEQ ID NO: 7494 - protein, 111 aa, Artificial Sequence
  source: /note="Description of Artificial Sequence: Synthetic polypeptide"
DIVMTQSPDSLAVSLGERATISCKASQSVLYSGDNYLNWYQQKPGQPPKLLIYAASTLESGIPDRFSGSGSGTDFTLTISSLQAEDVAVYYCQQYNGDPWTFGGGTKVEIK

SEQ ID NO: 7495 - protein, 111 aa, Artificial Sequence
  source: /note="Description of Artificial Sequence: Synthetic polypeptide"
DIVMTQSPDSLAVSLGERATISCKASQSVLYSGDNYLNWYQQKPGQPPKLLIYAASTLESGIPDRFSGSGSGTDFTLTISSLQAEDVAVYYCQQYNGTPWTFGGGTKVEIK

SEQ ID NO: 7496 - protein, 111 aa, Artificial Sequence
  source: /note="Description of Artificial Sequence: Synthetic polypeptide"
DIVMTQSPDSLAVSLGERATISCKSSQSVLYSSNNYLNWYQQKPGQPPKLLIYAASTLESGIPDRFSGSGSGTDFTLTISSLQAEDVAVYYCQQYYSTPWTFGGGTKVEIK

SEQ ID NO: 7497 - protein, 120 aa, Artificial Sequence
  source: /note="Description of Artificial Sequence: Synthetic polypeptide"
QSVLTQPPSASGTPGQRVTISCSGSSEMTVHHYVYWYQQLPGTAPKLLIYSNNQRPSGVPDRFSGSKSGTSASLAISGLRSEDEADYYCAAWDASLRGVFGGGTKLTVLGQPKAAPSVTL

SEQ ID NO: 7498 - protein, 107 aa, Homo sapiens
DIQMTQSPSSLSASVGDRVTITCRASQGISSALAWYQQKPGKAPKLLIYSASYRYTGVPSRFSGSGSGTDFTFTISSLQPEDIATYYCQQRYSLWRTFGQGTKLEIK

SEQ ID NO: 7499 - protein, 107 aa, Mus musculus
DIQMTQTTSSLSASLGDRVTISCSASQGISNYLNWYQQKPDGTVKLLIYYTSSLHSGVPSRFSGSGSGTDYSLTISNLEPEDIATYYCQQYSKLPFTFGSGTKLEIK

SEQ ID NO: 7500 - protein, 108 aa, Mus musculus
DIVMTQSHKFMSTSFGDRVSITCKASQDVSNALAWYQQKPGHSPKLLIFSASYRYTGVPDRFTGSGSGTDFTFTISSVQAEDLAVYYCQQHYSTPWTFGGGTKLEIKR

SEQ ID NO: 7501 - protein, 108 aa, Mus musculus
DIVMTQSHKFMSTSVGDRVSITCKASQDVSTAVAWYQQKPGQSPKLLIYSASYRYTGVPDRFTGSGSGTDFTFTISSVQAEDLAVYYCQQRYSTPRTFGGGTKLEIKR

SEQ ID NO: 7502 - protein, 108 aa, Mus musculus
DIVMTQSQKFMSTSVGDRVSVTCKASQNVGTNVAWYQQKPGQSPKALIYSASYRYSGVPDRFTGSGSGTDFTLTISNVLSEDLAEYFCQQFYSYPYTFGGGTKLEIKR

SEQ ID NO: 7503 - protein, 111 aa, Artificial Sequence
  source: /note="Description of Artificial Sequence: Synthetic polypeptide"
DIVLTQSPASLAVSLGQRATISCKASQSVDYDGHSYMNWYQQKPGQPPKLLIYAASNLESGIPARFSGSGSGTDFTLNIHPVEEEDAATYYCQQSDENPLTFGTGTKLELK

SEQ ID NO: 7504 - protein, 107 aa, Artificial Sequence [sequence omitted]

SEQ ID NO: 7505 - protein, 111 aa, Artificial Sequence
  source: /note="Description of Artificial Sequence: Synthetic polypeptide"
DIQMTQSPSSLSASVGDRVTITCKASQSVDYDGHSYMNWYQQKPGKAPKLLIYAASNLESGVPSRFSGSGSGTDFTLTISSLQPEDFATYYCQQSDENPLTFGGGTKVEIK

SEQ ID NO: 7506 - protein, 111 aa, Artificial Sequence
  source: /note="Description of Artificial Sequence: Synthetic polypeptide"
DIQLTQSPSSLSASVGDRVTITCKASQSVDYDGHSYMNWYQQKPGKAPKLLIYAASNLESGIPSRFSGSGSGTDFTLTISSLQPEDFATYYCQQSDENPLTFGGGTKVEIK

SEQ ID NO: 7507 - protein, 112 aa, Artificial Sequence
  source: /note="Description of Artificial Sequence: Synthetic polypeptide"
DIVLTQSPASLAVSLGQRATISCKASQSVDYDGHSYMNWYQQKPGQPPKLLIYAASNLESGIPARFSGSGSGTDFTLNIHPVEEEDAATYYCQQSDENPLTFGTGTKLELKR

SEQ ID NO: 7508 - protein, 112 aa, Artificial Sequence
  source: /note="Description of Artificial Sequence: Synthetic polypeptide"
DIQMTQSPASLAVSLGQRATISCKASQSVDYDGHSYMNWYQQKPGQPPKLLIYAASNLESGIPARFSGSGSGTDFTLNIHPVEEEDAATYYCQQSDENPLTFGTGTKLELKR

SEQ ID NO: 7509 - protein, 110 aa, Artificial Sequence
  source: /note="Description of Artificial Sequence: Synthetic polypeptide"
DIVLTQSPASLAVSLGQRATISCKASQSVDYDGHSYMNWYQQKPGQPPKLLIYAASNLESGIPARFSGSGSGTDFTLNIHPVEEEDAATYYCQQSDENPLTFGTGTKLEL

SEQ ID NO: 7510 - protein, 122 aa, Artificial Sequence
  source: /note="Description of Artificial Sequence: Synthetic polypeptide"
QVQLQQSGPELVKPGALVKISCKASGYTFTSYDINWVKQRPGQGLEWIGWIYPGDGSIKYNEKFKGKATLTVDKSSSTAYMQVSSLTSENSAVYFCARRGEYGNYEGAMDYWGQGTIVTVSS

SEQ ID NO: 7511 - protein, 121 aa, Artificial Sequence
  source: /note="Description of Artificial Sequence: Synthetic polypeptide"
QVQLVQSGAEVKKPGASVKVSCKVSGYTLTELSMHWVRQAPGKGLEWMGGFDPEDGETIYAQKFQGRVTMTEDTSTDTAYMELSSLRSEDTAVYYCATPVGRCSSTSCDYWGQGTLVTVSS

SEQ ID NO: 7512 - protein, 122 aa, Artificial Sequence
  source: /note="Description of Artificial Sequence: Synthetic polypeptide"
QVQLVQSGAEVKKPGASVKVSCKVSGYTFTSYDINWVRQAPGKGLEWMGWIYPGDGSIKYNEKFKGRVTMTVDKSTDTAYMELSSLRSEDTAVYYCARRGEYGNYEGAMDYWGQGTLVTVSS

SEQ ID NO: 7513 - protein, 122 aa, Artificial Sequence
  source: /note="Description of Artificial Sequence: Synthetic polypeptide"
QVQLVQSGAEVKKPGASVKVSCKVSGYTFTSYDINWVRQAPGKGLEWIGWIYPGDGSIKYNEKFKGKATLTVDKSTDTAYMELSSLRSEDTAVYYCARRGEYGNYEGAMDYWGQGTLVTVSS

SEQ ID NO: 7514 - protein, 121 aa, Artificial Sequence
  source: /note="Description of Artificial Sequence: Synthetic polypeptide"
VKLQQSGPELVKPGALVKISCKASGYTFTSYDINWVKQRPGQGLEWIGWIYPGDGSIKYNEKFKGKATLTVDKSSSTAYMQVSSLTSENSAVYFCARRGEYGNYEGAMDYWGQGTTVTVSS

SEQ ID NO: 7515 - protein, 121 aa, Artificial Sequence
  source: /note="Description of Artificial Sequence: Synthetic polypeptide"
VQLQESGPELVKPGALVKISCKASGYTFTSYDINWVKQRPGQGLEWIGWIYPGDGSIKYNEKFKGKATLTVDKSSSTAYMQVSSLTSENSAVYFCARRGEYGNYEGAMDYWGQGTTVTVSS

SEQ ID NO: 7516 - protein, 121 aa, Artificial Sequence
  source: /note="Description of Artificial Sequence: Synthetic polypeptide"
VQLQQSGPELVKPGALVKISCKASGYTFTSYDINWVKQRPGQGLEWIGWIYPGDGSIKYNEKFKGKATLTVDKSSSTAYMQVSSLTSENSAVYFCARRGEYGNYEGAMDYWGQGTTVTVSS

SEQ ID NO: 7517 - protein, 122 aa, Artificial Sequence
  source: /note="Description of Artificial Sequence: Synthetic polypeptide"
QVQLQQSGPELVKPGALVKISCKASGYTFTSYDINWVKQRPGQGLEWIGWIYPGDGSIKYNEKFKGKATLTVDKSSSTAYMQVSSLTSENSAVYFCARRGEYGNYEGAMDYWGQGTTVTVSS

SEQ ID NO: 7518 - protein, 120 aa, Artificial Sequence
  source: /note="Description of Artificial Sequence: Synthetic polypeptide"
EVQLVESGGGLVQPGGSLRLSCAASGFTFSRYVMSWVRQAPGKGLEWVASISSGGRMYYPDTVKGRFTISRDNAKNSLYLQMNSLRAEDTAVYYCARGSIYDGYYVFPYWGQGTLVTVSS

SEQ ID NO: 7519 - protein, 126 aa, Artificial Sequence
  source: /note="Description of Artificial Sequence: Synthetic polypeptide"
QVQLVQSGAEVKKPGASVKVSCKASGYTFTDYAMHWVRQAPGQGLEWMGVISTYYGNTNYNQKFKGRVTMTRDTSISTAYMELSRLRSDDTAVYYCARGGLRRGDRPSLRYAMDYWGQGTLVTVSS

SEQ ID NO: 7520 - protein, 126 aa, Artificial Sequence
  source: /note="Description of Artificial Sequence: Synthetic polypeptide"
QVQLVQSGAEVKKPGASVKVSCKGSSYTFTDYAMHWVRLAPGQGLEWIGVISTYYGNTNYNQKFKGRATMTVDKSISTAYMELSRLRSDDTAVYYCARGGLRRGDRPSLRYAMDYWGQGTLVTVSS

SEQ ID NO: 7521 - protein, 126 aa, Artificial Sequence
  source: /note="Description of Artificial Sequence: Synthetic polypeptide"
QVQLVQSGAEVKKPGASVKVSCKASGYTFTDYAMHWVRQAPGQGLEWIGVISTYYGNTNYNQKFKGRATMTVDKSISTAYMELSRLRSDDTAVYYCARGGLRRGDRPSLRYAMDYWGQGTLVTVSS

SEQ ID NO: 7522 - protein, 126 aa, Artificial Sequence
  source: /note="Description of Artificial Sequence: Synthetic polypeptide"
QVQLVQSGAEVKKPGASVKVSCKASGYTFTDYAMHWVRQAPGQGLEWMGVISTYYGNTNYNQKFKGRATMTVDKSISTAYMELSRLRSDDTAVYYCARGGLRRGDRPSLRYAMDYWGQGTLVTVSS

SEQ ID NO: 7523 - protein, 97 aa, Artificial Sequence
  source: /note="Description of Artificial Sequence: Synthetic polypeptide"
EVMLVESGGGLVKPGGSLKLSCAASGFTFSRYVMSWVRQTPEKRLEWVASISSGGRMYYPDTVKGRFTISRDSARNILYLQMSSLRSEDTAMYYCAR

SEQ ID NO: 7524 - protein, 120 aa, Artificial Sequence
  source: /note="Description of Artificial Sequence: Synthetic polypeptide"
EVMLVESGGGLVQPGGSLRLSCAASGFTFSRYVMSWVRQAPGKGLEWVASISSGGRMYYPDTVKGRFTISRDSAKNSLYLQMNSLRAEDTAVYYCARGSIYDGYYVFPYWGQGTLVTVSS

SEQ ID NO: 7525 - protein, 120 aa, Artificial Sequence
  source: /note="Description of Artificial Sequence: Synthetic polypeptide"
EVQLVESGGGLVQPGGSLRLSCAASGFTFSRYVMSWVRQAPGKGLEWVASISSGGRMYYPDTVKGRFTISRDSAKNSLYLQMNSLRAEDTAVYYCARGSIYDGYYVFPYWGQGTLVTVSS

SEQ ID NO: 7526 - protein, 448 aa, Homo sapiens
QVQLVQSGAEVKKPGASVKVSCKASGYTFTSYDINWVRQAPGQGLEWMGWLNPNSGYTGYAQKFQGRVTMTADRSTSTAYMELSSLRSEDTAVYYCAREVPETAAFEYWGQGTLVTVSSASTKGPSVFPLAPSSKSTSGGTAALGCLVKDYFPEPVTVSWNSGALTSGVHTFPAVLQSSGLYSLSSVVTVPSSSLGTQTYICNVNHKPSNTKVDKKVEPKSCDKTHTCPPCPAPELLGGPSVFLFPPKPKDTLMISRTPEVTCVVVDVSHEDPEVKFNWYVDGVEVHNAKTKPREEQYNSTYRVVSVLTVLHQDWLNGKEYKCKVSNKALPAPIEKTISKAKGQPREPQVYTLPPSRDELTKNQVSLTCLVKGFYPSDIAVEWESNGQPENNYKTTPPVLDSDGSFFLYSKLTVDKSRWQQGNVFSCSVMHEALHNHYTQKSLSLSPG

SEQ ID NO: 7527 - protein, 108 aa, Artificial Sequence
  source: /note="Description of Artificial Sequence: Synthetic polypeptide"
EIVLTQSPATLSLSPGERATLSCSASSSVSSSYLYWYQQKPGQAPRLLIYSTSNLASGIPARFSGSGSGTDFTLTISSLEPEDFAVYYCHQWSTYPPTFGGGTKVEIK

SEQ ID NO: 7528 - protein, 111 aa, Artificial Sequence
  source: /note="Description of Artificial Sequence: Synthetic polypeptide"
EIVLTQSPATLSLSPGERATLSCRASQSVSTSSYSYMYWYQQKPGQAPRLLIYYASNLESGIPARFSGSGSGTDFTLTISSLEPEDFAVYYCQHNWEIPFTFGGGTKVEIK

SEQ ID NO: 7529 - protein, 111 aa, Artificial Sequence
  source: /note="Description of Artificial Sequence: Synthetic polypeptide"
DIVLTQSPATLSLSPGERATLSCRASQSVSTSSYSYMYWYQQKPGQAPRFLIKYASNLESGIPARFSGSGSGTDFTLTISSLEPEDFAVYYCQHNWEIPFTFGGGTKVEIK

SEQ ID NO: 7530 - protein, 111 aa, Artificial Sequence
  source: /note="Description of Artificial Sequence: Synthetic polypeptide"
EIVLTQSPATLSLSPGERATLSCRASQSVSTSSYSYMYWYQQKPGQAPRFLIKYASNLESGIPARFSGSGSGTDFTLTISSLEPEDFAVYYCQHNWEIPFTFGGGTKVEIK

SEQ ID NO: 7531 - protein, 111 aa, Artificial Sequence
  source: /note="Description of Artificial Sequence: Synthetic polypeptide"
EIVLTQSPATLSLSPGERATLSCRASQSVSTSSYSYMYWYQQKPGQAPRLLIKYASNLESGIPARFSGSGSGTDFTLTISSLEPEDFAVYYCQHNWEIPFTFGGGTKVEIK

SEQ ID NO: 7532 - protein, 98 aa, Artificial Sequence
  source: /note="Description of Artificial Sequence: Synthetic polypeptide"
QIVLTQSPAIMSASPGEKVTLTCSANSSVSSSYLYWYQQKSGSSPKLWIYSTSNLASGVPVRFSGSGSGTSFSLTISSMEAEDAASYFCHQWSTYPPT

SEQ ID NO: 7533 - protein, 71 aa, Artificial Sequence
  source: /note="Description of Artificial Sequence: Synthetic polypeptide"
EIVLTQSPATLSLSPGERATLSCSWYQQKPGQAPRLLIYGIPARFSGSGSGTDFTLTISSLEPEDFAVYYC

SEQ ID NO: 7534 - protein, 98 aa, Artificial Sequence
  source: /note="Description of Artificial Sequence: Synthetic polypeptide"
QVQLQQSGPELVRPGVSVKISCKGSSYTFTDYAMHWVKLSHAKSLEWIGVISTYYGNTNYNQKFKGKATMTVDKSSSTAYMELARLTSEDSAVYYCAR

SEQ ID NO: 7535 - protein, 99 aa, Artificial Sequence
  source: /note="Description of Artificial Sequence: Synthetic polypeptide"
DIVLTQSPASLAVSLGQRAIISCRASQSVSTSSYSYMYWYQQKPGQSPKFLIKYASNLESGVPARFSGSGSGTDFTLNIHPVEEEDTATYYCQHNWEIP

SEQ ID NO: 7536 - protein, 70 aa, Artificial Sequence
  source: /note="Description of Artificial Sequence: Synthetic polypeptide"
EIVLTQSPATLSLSPGERATLSCWYQQKPGQAPRLLIYGIPARFSGSGSGTDFTLTISSLEPEDFAVYYC

SEQ ID NO: 7537 - protein, 237 aa, Artificial Sequence
  source: /note="Description of Artificial Sequence: Synthetic polypeptide"
MDFQVQIFSFLLISVSVIMSRGEIVLTQSPATLSLSPGERATLSCSASSSVSSSYLYWYQQKPGQAPRLLIYSTSNLASGIPARFSGSGSGTDFTLTISSLEPEDFAVYYCHQWSTYPPTFGGGTKVEIKRTVAAPSVFIFPPSDEQLKSGTASVVCLLNNFYPREAKVQWKVDNALQSGNSQESVTEQDSKDSTYSLSSTLTLSKADYEKHKVYACEVTHQGLSSPVTKSFNRGEC

SEQ ID NO: 7538 - protein, 468 aa, Artificial Sequence
  source: /note="Description of Artificial Sequence: Synthetic polypeptide"
MDFGLSWVFLVLVLKGVQCEVQLVESGGGLVQPGGSLRLSCAASGFTFSRYVMSWVRQAPGKGLEWVASISSGGRMYYPDTVKGRFTISRDNAKNSLYLQMNSLRAEDTAVYYCARGSIYDGYYVFPYWGQGTLVTVSSASTKGPSVFPLAPSSKSTSGGTAALGCLVKDYFPEPVTVSWNSGALTSGVHTFPAVLQSSGLYSLSSVVTVPSSSLGTQTYICNVNHKPSNTKVDKKVEPKSCDKTHTCPPCPAPELLGGPSVFLFPPKPKDTLMISRTPEVTCVVVDVSHEDPEVKFNWYVDGVEVHNAKTKPREEQYNSTYRVVSVLTVLHQDWLNGKEYKCKVSNKALPAPIEKTISKAKGQPREPQVYTLPPSRDELTKNQVSLTCLVKGFYPSDIAVEWESNGQPENNYKTTPPVLDSDGSFFLYSKLTVDKSRWQQGNVFSCSVMHEALHNHYTQKSLSLSPG

SEQ ID NO: 7539 - protein, 468 aa, Artificial Sequence
  source: /note="Description of Artificial Sequence: Synthetic polypeptide"
MDFGLSWVFLVLVLKGVQCEVQLVESGGGLVQPGGSLRLSCAASGFTFSRYVMSWVRQAPGKGLEWVASISSGGRMYYPDTVKGRFTISRDNAKNSLYLQMNSLRAEDTAVYYCARGSIYDGYYVFPYWGQGTLVTVSSASTKGPSVFPLAPSSKSTSGGTAALGCLVKDYFPEPVTVSWNSGALTSGVHTFPAVLQSSGLYSLSSVVTVPSSSLGTQTYICNVNHKPSNTKVDKKVEPKSCDKTHTCPPCPAPELLGGPSVFLFPPKPKDTLMISRTPEVTCVVVDVSHEDPEVKFNWYVDGVEVHNAKTKPREEQYQSTYRVVSVLTVLHQDWLNGKEYKCKVSNKALPAPIEKTISKAKGQPREPQVYTLPPSRDELTKNQVSLTCLVKGFYPSDIAVEWESNGQPENNYKTTPPVLDSDGSFFLYSKLTVDKSRWQQGNVFSCSVMHEALHNHYTQKSLSLSPG

SEQ ID NO: 7540 - protein, 108 aa, Artificial Sequence
  source: /note="Description of Artificial Sequence: Synthetic polypeptide"
EIVLTQSPATLSLSPGERATLSCSASSSVSSSYLYWYQQKPGQAPRLWIYSTSNLASGVPVRFSGSGSGTDFTLTISSLEPEDFAVYFCHQWSTYPPTFGGGTKVEIK

SEQ ID NO: 7541 - protein, 108 aa, Artificial Sequence
  source: /note="Description of Artificial Sequence: Synthetic polypeptide"
EIVLTQSPATLSLSPGERATLSCSASSSVSSSYLYWYQQKPGQAPRLWIYSTSNLASGVPARFSGSGSGTDFTLTISSLEPEDFAVYYCHQWSTYPPTFGGGTKVEIK

SEQ ID NO: 7542 - protein, 108 aa, Artificial Sequence
  source: /note="Description of Artificial Sequence: Synthetic polypeptide"
EIVLTQSPATLSLSPGERATLSCSASSSVSSSYLYWYQQKPGQAPRLWIYSTSNLASGIPARFSGSGSGTDFTLTISSLEPEDFAVYYCHQWSTYPPTFGGGTKVEIK

SEQ ID NO: 7543 - protein, 108 aa, Artificial Sequence
  source: /note="Description of Artificial Sequence: Synthetic polypeptide"
QIVLTQSPATLSLSPGERATLSCSASSSVSSSYLYWYQQKPGQAPRLWIYSTSNLASGIPARFSGSGSGTDFTLTISSLEPEDFAVYYCHQWSTYPPTFGGGTKVEIK

SEQ ID NO: 7544 - protein, 216 aa, Homo sapiens
QSVLTQPPSVSGAPGQRVTISCTSSSSDIGAGLGVHWYQQLPGTAPKLLIEGYYNRPSGVPDRFSGSKSGTSASLTITGLLPEDEGDYYCQSWDGTLSALFGGGTKLTVLGQPKAAPSVTLFPPSSEELQANKATLVCLISDFYPGAVTVAWKADSSPVKAGVETTTPSKQSNNKYAASSYLSLTPEQWKSHRSYSCQVTHEGSTVEKTVAPTECS

SEQ ID NO: 7545 - protein, 97 aa, Artificial Sequence
  source: /note="Description of Artificial Sequence: Synthetic polypeptide"
EVMLVESGGGLVQPGGSLRLSCAASGFTFSRYVMSWVRQAPGKGLEWVASISSGGRMYYPDTVKGRFTISRDSAKNSLYLQMNSLRAEDTAVYYCAR

SEQ ID NO: 7546 - protein, 97 aa, Artificial Sequence
  source: /note="Description of Artificial Sequence: Synthetic polypeptide"
EVQLVESGGGLVQPGGSLRLSCAASGFTFSRYVMSWVRQAPGKGLEWVASISSGGRMYYPDTVKGRFTISRDSAKNSLYLQMNSLRAEDTAVYYCAR

SEQ ID NO: 7547 - protein, 97 aa, Artificial Sequence
  source: /note="Description of Artificial Sequence: Synthetic polypeptide"
EVQLVESGGGLVQPGGSLRLSCAASGFTFSRYVMSWVRQAPGKGLEWVASISSGGRMYYPDTVKGRFTISRDNAKNSLYLQMNSLRAEDTAVYYCAR

SEQ ID NO: 7548 - protein, 76 aa, Artificial Sequence
  source: /note="Description of Artificial Sequence: Synthetic polypeptide"
EVQLVESGGGLVQPGGSLRLSCAASGFTFSWVRQAPGKGLEWVARFTISRDNAKNSLYLQMNSLRAEDTAVYYCAR

SEQ ID NO: 7549 - protein, 98 aa, Artificial Sequence
  source: /note="Description of Artificial Sequence: Synthetic polypeptide"
QVQLVQSGAEVKKPGASVKVSCKGSSYTFTDYAMHWVRLAPGQGLEWIGVISTYYGNTNYNQKFKGRATMTVDKSISTAYMELSRLRSDDTAVYYCAR

SEQ ID NO: 7550 - protein, 98 aa, Artificial Sequence
  source: /note="Description of Artificial Sequence: Synthetic polypeptide"
QVQLVQSGAEVKKPGASVKVSCKASGYTFTDYAMHWVRQAPGQGLEWIGVISTYYGNTNYNQKFKGRATMTVDKSISTAYMELSRLRSDDTAVYYCAR

SEQ ID NO: 7551 - protein, 98 aa, Artificial Sequence
  source: /note="Description of Artificial Sequence: Synthetic polypeptide"
QVQLVQSGAEVKKPGASVKVSCKASGYTFTDYAMHWVRQAPGQGLEWMGVISTYYGNTNYNQKFKGRATMTVDKSISTAYMELSRLRSDDTAVYYCAR

SEQ ID NO: 7552 - protein, 76 aa, Artificial Sequence
  source: /note="Description of Artificial Sequence: Synthetic polypeptide"
QVQLVQSGAEVKKPGASVKVSCKASGYTFTWVRQAPGQGLEWMGRVTMTRDTSISTAYMELSRLRSDDTAVYYCAR

SEQ ID NO: 7553 - protein, 119 aa, Homo sapiens
QVQLVQSGAEVKKPGASVKVSCKASGYTFTSYDINWVRQAPGQGLEWMGWLNPNSGNTGYAQKFQGRVTMTADRSTSTAYMELSSLRSEDTAVYYCAREVPETAAFEYWGQGTLVTVSS

SEQ ID NO: 7554 - protein, 119 aa, Homo sapiens
QVQLVQSGAEVKKPGASVKVSCKASGYTFTSYDINWVRQAPGQGLEWMGWLNPNSGYTGYAQKFQGRVTMTADRSTSTAYMELSSLRSEDTAVYYCAREVPETAAFEYWGQGTLVTVSS

SEQ ID NO: 7555 - protein, 98 aa, Artificial Sequence
  source: /note="Description of Artificial Sequence: Synthetic polypeptide"
EIVLTQSPATLSLSPGERATLSCSASSSVSSSYLYWYQQKPGQAPRLWIYSTSNLASGVPVRFSGSGSGTDFTLTISSLEPEDFAVYFCHQWSTYPPT

SEQ ID NO: 7556 - protein, 98 aa, Artificial Sequence
  source: /note="Description of Artificial Sequence: Synthetic polypeptide"
EIVLTQSPATLSLSPGERATLSCSASSSVSSSYLYWYQQKPGQAPRLWIYSTSNLASGVPARFSGSGSGTDFTLTISSLEPEDFAVYYCHQWSTYPPT

SEQ ID NO: 7557 - protein, 98 aa, Artificial Sequence
  source: /note="Description of Artificial Sequence: Synthetic polypeptide"
EIVLTQSPATLSLSPGERATLSCSASSSVSSSYLYWYQQKPGQAPRLWIYSTSNLASGIPARFSGSGSGTDFTLTISSLEPEDFAVYYCHQWSTYPPT

SEQ ID NO: 7558 - protein, 98 aa, Artificial Sequence
  source: /note="Description of Artificial Sequence: Synthetic polypeptide"
QIVLTQSPATLSLSPGERATLSCSASSSVSSSYLYWYQQKPGQAPRLWIYSTSNLASGIPARFSGSGSGTDFTLTISSLEPEDFAVYYCHQWSTYPPT

SEQ ID NO: 7559 - protein, 98 aa, Artificial Sequence
  source: /note="Description of Artificial Sequence: Synthetic polypeptide"
EIVLTQSPATLSLSPGERATLSCSASSSVSSSYLYWYQQKPGQAPRLLIYSTSNLASGIPARFSGSGSGTDFTLTISSLEPEDFAVYYCHQWSTYPPT

SEQ ID NO: 7560 - protein, 99 aa, Artificial Sequence
  source: /note="Description of Artificial Sequence: Synthetic polypeptide"
DIVLTQSPATLSLSPGERATLSCRASQSVSTSSYSYMYWYQQKPGQAPRFLIKYASNLESGIPARFSGSGSGTDFTLTISSLEPEDFAVYYCQHNWEIP

SEQ ID NO: 7561 - protein, 99 aa, Artificial Sequence
  source: /note="Description of Artificial Sequence: Synthetic polypeptide"
EIVLTQSPATLSLSPGERATLSCRASQSVSTSSYSYMYWYQQKPGQAPRFLIKYASNLESGIPARFSGSGSGTDFTLTISSLEPEDFAVYYCQHNWEIP

SEQ ID NO: 7562 - protein, 99 aa, Artificial Sequence
  source: /note="Description of Artificial Sequence: Synthetic polypeptide"
EIVLTQSPATLSLSPGERATLSCRASQSVSTSSYSYMYWYQQKPGQAPRLLIKYASNLESGIPARFSGSGSGTDFTLTISSLEPEDFAVYYCQHNWEIP

SEQ ID NO: 7563 - protein, 111 aa, Homo sapiens
QSVLTQPPSVSGAPGQRVTISCTSSSSDIGAGLGVHWYQQLPGTAPKLLIEGYYNRPSGVPDRFSGSKSGTSASLTITGLLPEDEGDYYCQSYDGTLSALFGGGTKLTVLG

SEQ ID NO: 7564 - protein, 111 aa, Homo sapiens
QSVLTQPPSVSGAPGQRVTISCTSSSSDIGAGLGVHWYQQLPGTAPKLLIEGYYNRPSGVPDRFSGSKSGTSASLTITGLLPEDEGDYYCQSWDGTLSALFGGGTKLTVLG

SEQ ID NO: 7565 - protein, 111 aa, Homo sapiens
QSVLTQPPSVSGAPGQRVTISCTSSSSDIGAALGVHWYQQLPGTAPKLLIEGYYNRPSGVPDRFSGSKSGTSASLTITGLLPEDEGDYYCQSWDGTLSALFGGGTKLTVLG

SEQ ID NO: 7566 - protein, 111 aa, Homo sapiens
QSVLTQPPSVSGAPGQRVTISCTSSSSDIGAGSGVHWYQQLPGTAPKLLIEGYYNRPSGVPDRFSGSKSGTSASLTITGLLPEDEGDYYCQSWDGTLSALFGGGTKLTVLG

SEQ ID NO: 7567 - protein, 111 aa, Homo sapiens
QSVLTQPPSVSGAPGQRVTISCTSSSSDIGAGQGVHWYQQLPGTAPKLLIEGYYNRPSGVPDRFSGSKSGTSASLTITGLLPEDEGDYYCQSWDGTLSALFGGGTKLTVLG

SEQ ID NO: 7568 - protein, 111 aa, Homo sapiens
QSVLTQPPSVSGAPGQRVTISCTSSSSDIGAGLGVLWYQQLPGTAPKLLIEGYYNRPSGVPDRFSGSKSGTSASLTITGLLPEDEGDYYCQSWDGTLSALFGGGTKLTVLG

SEQ ID NO: 7569 - protein, 111 aa, Homo sapiens
QSVLTQPPSVSGAPGQRVTISCTSSSSDIGAGLGVLWYQQLPGTAPKLLIEGYYNRPSGVPDRFSGSKSGTSASLTITGLLPEDEGDYYCQSYDGTLSALFGGGTKLTVLG

SEQ ID NO: 7570 - protein, 111 aa, Homo sapiens
QSVLTQPPSVSGAPGQRVTISCTSSSSDIGAGLGVHWYQQLPGTAPKLLIEGYYNRPSGVPDRFSGSKSGTSASLTITGLLPEDEGDYYCQSFDGTLSALFGGGTKLTVLG

SEQ ID NO: 7571 - protein, 111 aa, Homo sapiens
QSVLTQPPSVSGAPGQRVTISCTSSSSDIGAALGVHWYQQLPGTAPKLLIEGYYNRPSGVPDRFSGSKSGTSASLTITGLLPEDEGDYYCQSYDGTLSALFGGGTKLTVLG

SEQ ID NO: 7572 - protein, 111 aa, Homo sapiens
QSVLTQPPSVSGAPGQRVTISCTSSSSDIGAGSGVHWYQQLPGTAPKLLIEGYYNRPSGVPDRFSGSKSGTSASLTITGLLPEDEGDYYCQSYDGTLSALFGGGTKLTVLG

SEQ ID NO: 7573 - protein, 111 aa, Homo sapiens
QSVLTQPPSVSGAPGQRVTISCTSSSSDIGAGQGVHWYQQLPGTAPKLLIEGYYNRPSGVPDRFSGSKSGTSASLTITGLLPEDEGDYYCQSYDGTLSALFGGGTKLTVLG

SEQ ID NO: 7574 - protein, 111 aa, Homo sapiens
  MOD_RES (32)..(32): Any amino acid
  VARIANT (33)..(33): /replace="Ser" or "Gln"
  VARIANT (36)..(36): /replace="Leu"
  VARIANT (93)..(93): /replace="Phe" or "Trp"
  SITE (1)..(111): /note="Variant residues given in the sequence have no preference with respect to those in the annotations for variant positions"
QSVLTQPPSVSGAPGQRVTISCTSSSSDIGAXLGVHWYQQLPGTAPKLLIEGYYNRPSGVPDRFSGSKSGTSASLTITGLLPEDEGDYYCQSYDGTLSALFGGGTKLTVLG

SEQ ID NO: 7575 - protein, 238 aa, Artificial Sequence
  source: /note="Description of Artificial Sequence: Synthetic polypeptide"
MKLPVRLLVLMFWIPASSSDVVMTQSPLSLPVSLGDRAAISCRSSQSLVNSYGITYLYWYLQKPGQSPKVLIYKVSKRFSGVPDRFSGSGSGTDFTLKISRVETEDLGVYFCSQTSHFPPTFGAGTKLELKRADAAPTVSIFPPSSEQLTSGGASVVCFLNNFYPKDINVKWKIDGSERQNGVLNSWTDQDSKDSTYSMSSTLTLTKDEYERHNSYTCEATHKTSTSPIVKSFNRNEC

SEQ ID NO: 7576 - DNA, 2200 bp, Artificial Sequence
  source: /note="Description of Artificial Sequence: Synthetic polynucleotide"
gccaccatggaatggacctgggtctttctcttcctcctgtcagtgcctgcaggtgtccactcccagtttcagctgcagcagtctggaactgagctgatgaagcctggggcctcagtgaagatatcctgcaaggcttctgcctacacattcaatacctactggatagagtggattaaacagaggcctggacttggccttgagtggattggagaaattttacctggaagtggaagtactcactacaatgagaaattcaaggccaaggccacattcactgcagatacatcctccaacacagccttcatgcaactcaacagcctgacatctgaggactctgccgtctattactgtgcaacgggtgggtcctatggtaactacgattacttcgatgtctggggcgctgggaccacggtcaccgtctcctcagccaaaacgacacccccatctgtctatccactggcccctggatctgctgcccaaactaactccatggtgaccctgggatgcctggtcaagggctatttccctgagccagtgacagtgacctggaactctggatccctgtccagcggtgtgcacaccttcccagctgtcctgcagtctgacctctacactctgagcagctcagtgactgtcccctccagcacctggcccagcgagaccgtcacctgcaacgttgcccacccggccagcagcaccaaggtggacaagaaaattgtgcccagggattgtggttgtaagccttgcatatgtacagtcccagaagtatcatctgtcttcatcttccccccaaagcccaaggatgtgctcaccattactctgactcctaaggtcacgtgtgttgtggtagacatcagcaaggatgatcccgaggtccagttcagctggtttgtagatgatgtggaggtgcacacagctcagacgcaaccccgggaggagcagttcaacagcactttccgctcagtcagtgaacttcccatcatgcaccaggactggctcaatggcaaggagttcaaatgcagggtcaacagtgcagctttccctgcccccatcgagaaaaccatctccaaaaccaaaggcagaccgaaggctccacaggtgtacaccattccacctcccaaggagcagatggccaaggataaagtcagtctgacctgcatgataacagacttcttccctgaagacattactgtggagtggcagtggaatgggcagccagcggagaactacaagaacactcagcccatcatggacacagatggctcttacttcgtctacagcaagctcaatgtgcagaagagcaactgggaggcaggaaatactttcacctgctctgtgttacatgagggcctgcacaaccaccatactgagaagagcctctcccactctcctggtaaaagagccaagagggcacctgtgaaacagactttgaattttgaccttctcaagttggcgggagacgtcgagtccaaccctgggcccatgaagttgcctgttaggctgttggtgctgatgttctggattcctgcttccagcagtgatgttgtgatgacccaaagtccactctccctgcctgtcagtcttggagatcgagccgccatatcttgcagatctagtcagagccttgtaaacagttatggaatcacctatttatattggtatttgcagaagcccggccagtctccaaaggtcctgatttacaaagtttccaaacgattttctggggtcccagacaggttcagtggcagtggatcagggacagatttcacactcaagatcagcagagtggagactgaggatctgggagtttatttctgctctcaaacttcacattttcctcccacgttcggtgctgggaccaagctggagttgaaacgggctgatgctgcaccaactgtatccatcttcccaccatccagtgagcagttaacatctggaggtgcctcagtcgtgtgcttcttgaacaacttctaccccaaagacatcaatgtcaagtggaagattgatggcagtgaacgacaaaatggcgtcctgaacagttggactgatcaggacagcaaagacagcacctacagcatgagcagcaccctcacgttgaccaaggacgagtatgaacgacataacagctatacctgtgaggccactcacaagacatcaacttcacccattgtcaagagcttcaacaggaatgagtgttaga

SEQ ID NO: 7577 - protein, 464 aa, Artificial Sequence
  source: /note="Description of Artificial Sequence: Synthetic polypeptide"
MEWTWVFLFLLSVPAGVHSQFQLQQSGTELMKPGASVKISCKASAYTFNTYWIEWIKQRPGLGLEWIGEILPGSGSTHYNEKFKAKATFTADTSSNTAFMQLNSLTSEDSAVYYCATGGSYGNYDYFDVWGAGTTVTVSSAKTTPPSVYPLAPGSAAQTNSMVTLGCLVKGYFPEPVTVTWNSGSLSSGVHTFPAVLQSDLYTLSSSVTVPSSTWPSETVTCNVAHPASSTKVDKKIVPRDCGCKPCICTVPEVSSVFIFPPKPKDVLTITLTPKVTCVVVDISKDDPEVQFSWFVDDVEVHTAQTQPREEQFNSTFRSVSELPIMHQDWLNGKEFKCRVNSAAFPAPIEKTISKTKGRPKAPQVYTIPPPKEQMAKDKVSLTCMITDFFPEDITVEWQWNGQPAENYKNTQPIMDTDGSYFVYSKLNVQKSNWEAGNTFTCSVLHEGLHNHHTEKSLSHSPGK

SEQ ID NO: 7578 - protein, 124 aa, Homo sapiens
EVQLLESGGGLIRPGGSLRLSCAASGFTFSNYAMGWVRQAPGKGLEWVSAISGNGGSTYYGGSVKGRFTISRDKSKNTLYLQMNNLRADDTAVYFCAKLEAVAPTLTLRYFKHWGKGTLVTVSS

SEQ ID NO: 7579 - protein, 125 aa, Homo sapiens
EVQLLESGGGLVQPGGSLRLSCAVSGFTFDTFAMSWVRQAPGKGLEWVSAITASSSKTYYADSVKGRFTISRDNSRNTVYLRLSSLRADDTAVYFCARPKGAHSGLYIESAFDLWGPGTMVTVSS

SEQ ID NO: 7580 - protein, 114 aa, Homo sapiens
EVQLVESGGDIVQSGGSLRLSCAASGFVFSSNWMHWVRQRPGKGLEWISLINVDGRTTKYADSVKGRFTISRDNAKKTVYLQMDSLRAEDTAVYYCVKVEGLNWGPGTLVTVSS

SEQ ID NO: 7581 - protein, 126 aa, Homo sapiens
EVQLVESGGDLVRPGGSLRLSCVASGFTFSNYWMHWVRQAPGQRPVWVSRTNTDGRNTAYADYAKGRFTISRDNAKSTLYLQLNSLRAEDTAVYFCARLRRNVADQITHNYYMDVWGKGTLVTVSS

SEQ ID NO: 7582 - protein, 127 aa, Homo sapiens
EVQLVESGGGLVKPGGSLRLSCAASGLPFSKAWMSWVRQAPGKGLEWVGRIKSQADGGAIDYATSVNGRFTITRDDSKNTLYLQMTSLKTEDTAVYYCTPGIILRFLEGTLRGMDVWGQGTTVTVSS

SEQ ID NO: 7583 - protein, 122 aa, Homo sapiens
EVQLVESGGGLVKPGGSLRVSCDVSGQRLSKAWMNWVRQTPTRGLEWVGLIKRDADGGTTEFAAPVEGRFTISRDDIQNTMTLHMTRLRVDDTGVYYCVAGDIGCIKENCRWGEGTTVTVSS

SEQ ID NO: 7584 - protein, 119 aa, Homo sapiens
QVQLQESGPGLVKPSETLSLTCTVSGGSISSSYWSWIRQPPGQGLEWIGYIYYSGNTYYNPSLKSRVTISIDTSKTQFSLNLTSVSAADTAVYYCARDGIPGAIGMDVWGQGTTVTVSS

SEQ ID NO: 7585 - protein, 122 aa, Homo sapiens
QVQLQQWGAGRLRPSETLSLTCAVYGGSFNGYARTWIRQPPGKGLEWIGEIDHRENTNYNPSLKSRVTMSVDTSKNQFSLRLNSVTAADTAVYFCARGQKNAKDQHEGFRYWGRGTLVTVSS

SEQ ID NO: 7586 - protein, 130 aa, Homo sapiens
QVQLVESGGGVVQAGGSLRLSCVASGLTFSSYGMHWVRQAPGKGLEWVAVISYDGRSKFYADSVKGRFTISRDNSKNTLYLQMNSLRAEDAAVYYCANARVRDACSGTRCDKFGFYMDVWGKGTTVTVSS

SEQ ID NO: 7587 - protein, 121 aa, Homo sapiens
QVQLVESGGGVVQPGRSLRLSCAASGYIFSSFGMHWVRQTPGKGLEWVALIWYDGSRQSYADSVRGRFTISRDNSKNTVFLQMNSLRGEDTAVYHCARTGYDDKRGGFDTWGQGTMVTVSS

SEQ ID NO: 7588 - protein, 121 aa, Homo sapiens
QVQLVQSGAEVKEPGSSVRVSCKTSGGSFNRHVITWVRQAPGQGLEWMGEIIPFFGTPKYAPKFQGRVTIIADASTSTFFLDVKSLTSEDTALYFCWIVVVSVVQRREDFWGQGILVTVSS

SEQ ID NO: 7589 - protein, 123 aa, Homo sapiens
QVQLVQSGAEVKKPGASVTLSCKASGYTFTAYYIHWVRQAREQGLEWMGVINPSTGTTFYAQNFPDRVSVTRDTSTSTVFMELHNLKSEDTAVYYCARAISEHGSGSYSPYYWGQGTLVTVSS

SEQ ID NO: 7590 - protein, 107 aa, Homo sapiens
DIQMTQSPSSLSASVGDTVTITCRSSQNISNYLSWFQHKPGKAPRILVYAASTLQTGVPSRFSGRGSGTIFTLSITSLQSEDYATYYCQQNDKIPRTFGQGTKVEIK

SEQ ID NO: 7591 - protein, 107 aa, Homo sapiens
DIQMTQSPSTLSASVGDRVTITCRASQSISRWLAWYQQRPGRAPDLLIYDASNLESGVPSRFSGSGSGTEFTLTISSLQPGDFATYYCQQYYSYVYTFGQGTKLEIK

SEQ ID NO: 7592 - protein, 111 aa, Homo sapiens
EIVLTQSPGSLAVSLGERATINCKSSQTVLYNNKNYLAWYQQKPGQPPKLLISWASSRESGVPDRFSGSGSGTDFTLTISSLQAEDVAVYYCQHYYGTPVTFGGGTKVEIK

SEQ ID NO: 7593 - protein, 107 aa, Homo sapiens
EIVLTQSPPTLSLSPGERATLSCRASQTVSKYLAWYQQKPGQAPRLLVYDTSNRAIGIPPRFSGSGSGTDFTLTISTLEPEDFALYYCQQRSNWPPTFGQGTRLEIK

SEQ ID NO: 7594 - protein, 110 aa, Homo sapiens
QSVLTQPPSVSAAPGQKVNISCSGSSSNIGNNYVSWYQRLPGTAPKLLIYDNNKRPSGIPDRFSGSKSGTSATLGITGLQTGDGADYYCATWDKSLIAVVFGGGTKLTVL

SEQ ID NO: 7595 - protein, 107 aa, Homo sapiens
SEYLTQPPSVSVSPGQTARITCSGDELSKQYAYWYQKKSGQAPVMVVNEDTKRPPGIPERFSGSSSGTTSTLTISGVQAEDEADYYCQSADITGSWVFGGGTKLTVL

SEQ ID NO: 7596 - protein, 108 aa, Homo sapiens
SYELTQPPSVSVSAGQTASITCSADMLGDTYVSWYQKRPGQSPVLLIYQDSKRPSEIPERFSGSSSEDTATLTITGTQALDEAAYYCQVWDRRTTTYVFGPGTEVTVL

SEQ ID NO: 7597 - protein, 107 aa, Homo sapiens
SYELTQPPSVSVSLGQMAAITCSGEALPKKYGYWYQQKPGQVPVLLIYRDVERPSGVPDRFSGSSSGTMVTLTISGVQAEDEADYYCLSADSSGTWVFGGGTKLTVL

SEQ ID NO: 7598 - protein, 107 aa, Homo sapiens
SYELTQPPSVSVSPGQTARITCSGDALAKQYSYWYQHKPGQAPVMVMYKDRERPSGIPERFSGSSSGTTVTLTISAVQAEDEADYYCQSTGTDSPYIFGTGTKVTVL

SEQ ID NO: 7599 - protein, 108 aa, Homo sapiens
SYELTQPPSVSVSPGQTARITCSGDALPKKYAYWYQQKSGQAPVLVIYEDIKRPSGIPERFSGSSSGTMATLTISGAQVEDEGDYYCYSADRSGNRWAFGGGTKLTVL

SEQ ID NO: 7600 - protein, 108 aa, Homo sapiens
SYELTQPPSVSVSPGQTARITCSGDALPKQFAYWYQQKSGQAPKLVIFKDTERPSGIPERFSASSSGTKATLTISGVQAEDEADYYCQSADRTATSWVFGGGTKLTVL

SEQ ID NO: 7601 - protein, 108 aa, Homo sapiens
SYELTQPPSVSVSPGQTARITCSGDALPTKFAFWYQQKSGQAPVLVIYEDDKRPSGIPQRFSGSSSGTTATLTISGAQEEDDADYYCYSKDSTNVERVFGTGTKLSVL

SEQ ID NO: 7602 - DNA, 366 bp, Homo sapiens
  CDS (1)..(366): /note="NI204.6H1VH variable heavy chain (VH) sequence"
  misc_feature (91)..(105): /note="complementarity determining region (CDR) VHCDR1"
  misc_feature (148)..(195): /note="complementarity determining region (CDR) VHCDR2"
  misc_feature (292)..(333): /note="complementarity determining region (CDR) VHCDR3"
caggtgcagctacagcagtggggcgcaggacggctgaggccttcggagaccctgtccctcacctgcgctgtctatggtgggtccttcaatggttacgccaggacctggatccgccagcccccggggaaggggctggagtggattggggaaatcgatcatagggaaaacaccaactacaacccgtccctcaagagtcgagtcaccatgtcagtagacacgtccaagaatcagttctccctgaggctgaactctgtgaccgccgcggacacggctgtttatttctgtgcgagaggccaaaagaacgcgaaggatcaacacgagggttttcgctactggggccggggaaccctggtcaccgtctcctcg

SEQ ID NO: 7603 - DNA, 357 bp, Homo sapiens
  CDS (1)..(357): /note="NI204.25H3VH variable heavy chain (VH) sequence"
  misc_feature (91)..(105): /note="complementarity determining region (CDR) VHCDR1"
  misc_feature (148)..(195): /note="complementarity determining region (CDR) VHCDR2"
  misc_feature (292)..(324): /note="complementarity determining region (CDR) VHCDR3"
caggtgcagctgcaggagtcgggcccaggactggtgaagccctcggagaccctgtccctcacctgcactgtctctggtggctccatcagtagttcttactggagttggatccggcagcccccagggcagggactggagtggattgggtatatctattacagcggaaacacctactacaacccctccctcaagagtcgagtcaccatatcaatagacacgtccaagacccagttctccctgaacctgacctctgtgagcgctgcggacacggccgtgtattactgtgcgagagatggcataccaggagccataggtatggacgtctggggccaagggaccacggtcaccgtctcctcg

SEQ ID NO: 7604 - DNA, 358 bp, Homo sapiens
  CDS (1)..(357)
  misc_feature (91)..(105): /note="complementarity determining region (CDR) VHCDR1"
  misc_feature (148)..(195): /note="complementarity determining region (CDR) VHCDR2"
  misc_feature (292)..(324): /note="complementarity determining region (CDR) VHCDR3"
caggtgcagctgcaggagtcgggcccaggactggtgaagccctcggagaccctgtccctcacctgcactgtctctggtggctccatcagtagttcttactggagttggatccggcagcccccagggcagggactggagtggatttgggtatatctattacagcggaaacacctactacaacccctccctcaagagtcgagtcaccatatcaatagacacgtccaagacccagttctccctgaacctgacctctgtgagcgctgcggacacggccgtgtattactgtgcgagagatggcataccaggagccataggtatggacgtctggggccaagggaccacggtcaccgtctcctcg

SEQ ID NO: 7605 - DNA, 363 bp, Homo sapiens
  CDS (1)..(363): /note="NI204.12G3VH variable heavy chain (VH) sequence"
  misc_feature (91)..(105): /note="complementarity determining region (CDR) VHCDR1"
  misc_feature (148)..(198): /note="complementarity determining region (CDR) VHCDR2"
  misc_feature (295)..(330): /note="complementarity determining region (CDR) VHCDR3"
caggtgcagctggtggagtctgggggaggcgtggtccagcctgggaggtccctcagactctcctgtgcagcctctggatacatcttcagtagctttggcatgcactgggtccgccagactccaggcaaggggctggagtgggtggcactcatttggtatgatggaagtcgtcagtcctatgcggactctgtgaggggccggttcaccatctccagagacaattctaagaacacggtgtttttgcaaatgaacagcctgagaggcgaggacacggctgtatatcactgtgcgagaacgggctacgatgacaaacgcggtggttttgatacttggggccaagggacaatggtcaccgtctcttcg

SEQ ID NO: 7606 - DNA, 342 bp, Homo sapiens
  CDS (1)..(342): /note="NI204.7B3VH variable heavy chain (VH) sequence, wherein Gln at position 6 of the amino acid sequence can also be Glu"
  misc_feature (91)..(105): /note="complementarity determining region (CDR) VHCDR1"
  misc_feature (148)..(198): /note="complementarity determining region (CDR) VHCDR2"
  misc_feature (295)..(309): /note="complementarity determining region (CDR) VHCDR3"
gaggtgcagctggtgcagtctgggggagacatcgttcagtcgggagggtccctgagactctcctgtgcagcctctggattcgtcttcagtagcaactggatgcactgggtccgccaacgtccagggaagggactggagtggatctcacttattaatgtcgatgggcgaaccacaaagtatgcggactccgtgaagggccgattcaccatttccagagacaacgccaagaaaacagtgtatctgcagatggacagtctgagagccgaagacacggccgtgtattactgtgtgaaagtggagggattgaactggggcccgggaaccctggtcaccgtctcctcg

SEQ ID NO: 7607 - DNA, 369 bp, Homo sapiens
  CDS (1)..(369): /note="NI104.12G7VH variable heavy chain (VH) sequence, wherein Glu at positions 1 and 6 of the amino acid sequence can also be Gln"
  misc_feature (91)..(105): /note="complementarity determining region (CDR) VHCDR1"
  misc_feature (148)..(198): /note="complementarity determining region (CDR) VHCDR2"
  misc_feature (295)..(336): /note="complementarity determining region (CDR) VHCDR3"
gaggtgcagctggtggagtctggggctgaggtgaagaagcctggggcctcagtgacactgtcctgcaaggcatctggatacaccttcaccgcctactatatacactgggtgcgacaggcccgagaacaagggcttgagtggatgggcgtaatcaaccctagtactggaaccacattttacgcacagaacttcccggacagagtctccgtgaccagggacacgtccacgagtacagtcttcatggagctgcacaacctgaaatctgaggacacggccgtatattactgtgcgagagcaatcagtgagcatggttcagggagttattcaccttattactggggccagggcaccctggtcaccgtctcctcg

SEQ ID NO: 7608 - DNA, 363 bp, Homo sapiens
  CDS (1)..(363): /note="NI204.10A8VH variable heavy chain (VH) sequence, wherein Glu at positions 1 and 6 of the amino acid sequence can also be Gln"
  misc_feature (91)..(105): /note="complementarity determining region (CDR) VHCDR1"
  misc_feature (148)..(198): /note="complementarity determining region (CDR) VHCDR2"
  misc_feature (295)..(330): /note="complementarity determining region (CDR) VHCDR3"
gaggtgcagctggtggagtctggggctgaggtgaaggagcctgggtcgtcggtgagggtctcctgcaagacttctggaggctccttcaacagacatgttatcacctgggtgcgacaggcccctggacaagggcttgagtggatgggcgagatcatccctttctttggtacaccaaagtatgcaccgaagttccagggcagagtcaccattatcgccgacgcgtccacgagcacattcttcttggacgtgaagagcctgacatctgaggacacggccctgtatttctgttggattgttgtggtgtctgttgttcagcgaagggaggacttctggggccagggaatcctggtcaccgtctcctcg

SEQ ID NO: 7609 - DNA, 375 bp, Homo sapiens
  CDS (1)..(375): /note="NI204.9F6VH variable heavy chain (VH) sequence, wherein Val at position 5 of the amino acid sequence can also be Leu"
  misc_feature (91)..(105): /note="complementarity determining region (CDR) VHCDR1"
  misc_feature (148)..(198): /note="complementarity determining region (CDR) VHCDR2"
  misc_feature (295)..(342): /note="complementarity determining region (CDR) VHCDR3"
gaggtgcagctggtggagtctgggggaggcctggtccagccgggggggtccctaagactctcctgtgcggtctctggattcacctttgacacctttgccatgagttgggtccgccaggctccagggaagggtctggagtgggtctcggcaattactgccagttcttctaagacgtactacgccgactccgtgaagggccgcttcaccatctccagagacaattccaggaatacggtgtatctgcgcctgagcagtctgagagccgacgacacggccgtttatttctgtgcgaggccgaaaggggcacacagtggcctctacatagaaagcgcttttgatctgtggggcccagggacaatggtcaccgtctcttcg

SEQ ID NO: 7610 - DNA, 366 bp, Homo sapiens
  CDS (1)..(366): /note="NI204.34A3VH variable heavy chain (VH) sequence"
  misc_feature (91)..(105): /note="complementarity determining region (CDR) VHCDR1"
  misc_feature (148)..(204): /note="complementarity determining region (CDR) VHCDR2"
  misc_feature (301)..(333): /note="complementarity determining region (CDR) VHCDR3"
gaggtgcagctggtggagtctgggggaggcctggtgaagccgggggggtccctaagagtctcctgtgacgtctctgggcagagactttctaaggcttggatgaactgggtccgccaaactccaacgaggggactggagtgggtcggcctaattaagagagatgcagatggagggaccacagaattcgctgcacccgtggagggacggttcactatttcaagggatgacatacaaaacaccatgactctgcatatgaccaggctgagagtcgacgacacgggcgtgtattactgtgtcgcaggagatatcggctgcattaaagagaattgccgttggggcgaggggaccacggtcaccgtctcctcg

SEQ ID NO: 7611 - DNA, 390 bp, Homo sapiens
  CDS (1)..(390): /note="NI204.7G5VH variable heavy chain (VH) sequence, wherein Glu in position 1 of the amino acid sequence can also be Gln"
  misc_feature (91)..(105): /note="complementarity determining region (CDR) VHCDR1"
  misc_feature (148)..(198): /note="complementarity determining region (CDR) VHCDR2"
  misc_feature (295)..(357): /note="complementarity determining region (CDR) VHCDR3"
gaggtgcagctggtggagtctgggggaggcgtggtccaggctggggggtccctgagactctcctgtgtagcctctggactcaccttcagttcctatggcatgcactgggtccgccaggctccaggcaaggggctggagtgggtggcagtcatttcatatgatggaagaagtaaattctatgcagactccgtgaagggccgattcaccatctccagagacaattccaagaacacgttgtatctccaaatgaacagcctgagagctgaggacgcggctgtgtattactgtgcgaacgcacgcgtccgtgacgcttgttctggtaccagatgcgataaatttggcttctacatggacgtctggggcaaagggaccacggtcaccgtctcctcg

SEQ ID NO: 7612 - DNA, 381 bp, Homo sapiens
  CDS (1)..(381): /note="NI204.11F11VH variable heavy chain (VH) sequence"
  misc_feature (91)..(105): /note="complementarity determining region (CDR) VHCDR1"
  misc_feature (148)..(204): /note="complementarity determining region (CDR) VHCDR2"
  misc_feature (301)..(348): /note="complementarity determining region (CDR) VHCDR3"
gaggtgcagctggtggagtctgggggaggcttggttaagccgggggggtcccttagactctcctgtgcagcctctggattgcctttcagcaaggcctggatgagctgggtccgccaggctccagggaaggggctggagtgggtcggccgtatcaaaagtcaagctgatggtggggcaatagactacgctacatccgtgaatggcagattcaccatcacaagagatgattcaaaaaatacgctgtatctgcaaatgaccagcctgaaaaccgaggacacagccgtgtattactgtaccccggggataatattacgatttttggagggcacccttcggggaatggacgtctggggccaagggaccacggtcaccgtctcctcg

SEQ ID NO: 7613 - DNA, 382 bp, Homo sapiens
  CDS (1)..(381)
  misc_feature (91)..(105): /note="complementarity determining region (CDR) VHCDR1"
  misc_feature (148)..(204): /note="complementarity determining region (CDR) VHCDR2"
  misc_feature (301)..(348): /note="complementarity determining region (CDR) VHCDR3"
gaggtgcagctggtggagtctgggggaggcttggttaagccgggggggtcccttagactctcctgtgcagcctctggattgcctttcagcaaggcctggatgagctgggtccgccaggctccagggaaggggctggagtgggtcggccgtatcaaaagtcaagctgatggtggggcaatagactacgctacatccgtgaatggcagattcaccatcacaagagatgattcaaaaaatacgctgtatctgcaaatgaccagcctgaaaaccgaggacacagccgtgtattactgtaccccggggataatattacgatttttggagggcacccttcggtggaatggacgtctggggccaagggaccacggtcaccgtctcctcg

SEQ ID NO: 7614 - DNA, 378 bp, Homo sapiens
  CDS (1)..(378): /note="NI204.10D12VH variable heavy chain (VH) sequence"
  misc_feature (91)..(105): /note="complementarity determining region (CDR) VHCDR1"
  misc_feature (148)..(198): /note="complementarity determining region (CDR) VHCDR2"
  misc_feature (295)..(345): /note="complementarity determining region (CDR) VHCDR3"
gaggtgcagctggtggagtctgggggggacttagttcgccctggggggtccctgagactctcctgtgtcgcctctggattcaccttcagcaactactggatgcactgggtccgccaagctccagggcagcggccggtgtgggtctcacgtactaatactgatggccgtaacacagcctacgcggactacgcgaagggccgattcaccatctccagagacaatgccaagagcacgctgtatctgcaactgaacagtctgagagccgaagacacggctgtgtacttctgtgcaaggctgcgaagaaacgtcgccgaccaaatcactcacaactactacatggacgtctggggcaaaggcaccctggtcaccgtctcctcg

SEQ ID NO: 7615 - DNA, 372 bp, Homo sapiens
  CDS (1)..(372): /note="NI204.67E12VH variable heavy chain (VH) sequence"
  misc_feature (1)..(102): /note="complementarity determining region (CDR) VHCDR1"
  misc_feature (148)..(198): /note="complementarity determining region (CDR) VHCDR2"
  misc_feature (294)..(339): /note="complementarity determining region (CDR) VHCDR3"
gaggtgcagctgttggagtctgggggaggcttaatccggcctggggggtccctgagactctcctgtgcagcctctggattcaccttcagtaactatgccatgggctgggtccgccaggctccagggaaggggctggagtgggtctcagccatcagtggcaatggtggaagcacctattatggaggctccgtgaagggccggttcaccatctccagagacaagtccaagaataccctgtatctacaaatgaacaacttgagagccgacgacacggccgtttacttttgtgcgaaattagaggccgtagcccccactttgacattgcgatacttcaagcactggggcaagggcaccctggtcaccgtctcctcg

SEQ ID NO: 7616 - DNA, 324 bp, Homo sapiens
tcctatgagctgactcagccaccctcggtgtcagtgtccccaggacagacggccaggatcacctgttctggagatgcattgccaaagcaatttgcttattggtaccagcagaagtcaggccaggcccctaaattggtgatctttaaagacactgagaggccctcagggatccctgagcgattctctgcctccagctcaggtacaaaagccacgttgaccatcagtggagtccaggcagaggatgaggctgactattactgtcaatcagcggacagaactgctacttcttgggtgttcggcggagggaccaagctgaccgtccta

SEQ ID NO: 7617 - protein, 147 aa, Homo sapiens
  MOD_RES (122)..(134): Any amino acid
  MOD_RES (136)..(136): Any amino acid
  MOD_RES (139)..(147): Any amino acid
EVQLVESGAEVKEPGSSVRVSCKTSGGSFNRHVITWVRQAPGQGLEWMGEIIPFFGTPKYAPKFQGRVTIIADASTSTFFLDVKSLTSEDTALYFCWIVVVSVVQRREDFWGQGILVTVSSXXXXXXXXXXXXXDXVLXXXXXXXXX

SEQ ID NO: 7618 - protein, 137 aa, Homo sapiens
  MOD_RES (124)..(136): Any amino acid
EVQLVESGAEVKKPGASVTLSCKASGYTFTAYYIHWVRQAREQGLEWMGVINPSTGTTFYAQNFPDRVSVTRDTSTSTVFMELHNLKSEDTAVYYCARAISEHGSGSYSPYYWGQGTLVTVSSXXXXXXXXXXXXXE

SEQ ID NO: 7619 - protein, 139 aa, Homo sapiens
  MOD_RES (126)..(138): Any amino acid
EVQLVESGGGLVQPGGSLRLSCAVSGFTFDTFAMSWVRQAPGKGLEWVSAITASSSKTYYADSVKGRFTISRDNSRNTVYLRLSSLRADDTAVYFCARPKGAHSGLYIESAFDLWGPGTMVTVSSXXXXXXXXXXXXXE

SEQ ID NO: 7620 - protein, 144 aa, Homo sapiens
  MOD_RES (131)..(143): Any amino acid
EVQLVESGGGVVQAGGSLRLSCVASGLTFSSYGMHWVRQAPGKGLEWVAVISYDGRSKFYADSVKGRFTISRDNSKNTLYLQMNSLRAEDAAVYYCANARVRDACSGTRCDKFGFYMDVWGKGTTVTVSSXXXXXXXXXXXXXE

SEQ ID NO: 7621 - protein, 135 aa, Homo sapiens
  MOD_RES (118)..(135): Any amino acid
EVQLVQSGGDIVQSGGSLRLSCAASGFVFSSNWMHWVRQRPGKGLEWISLINVDGRTTKYADSVKGRFTISRDNAKKTVYLQMDSLRAEDTAVYYCVKVEGLNWGPGTLVTVSSLPVXXXXXXXXXXXXXXXXXX

SEQ ID NO: 7622 - DNA, 330 bp, Homo sapiens
  CDS (1)..(330): /note="NI204.25H3VL variable light chain (VL) sequence"
  misc_feature (67)..(105): /note="complementarity determining region (CDR) VLCDR1"
  misc_feature (151)..(171): /note="complementarity determining region (CDR) VLCDR2"
  misc_feature (268)..(300): /note="complementarity determining region (CDR) VLCDR3"
cagtctgtgttgacgcagccgccctcagtgtctgcggccccaggacagaaggtcaacatctcctgctctggaagcagctccaacattgggaataattatgtatcctggtaccagcgactcccaggaacagcccccaaactcctcatttatgacaataataaacgaccctcagggattcctgaccgattctctggctccaagtctggcacgtcagccaccctgggcatcaccggactccagactggggacggggccgattattactgcgcaacttgggataaaagcctgattgctgtggtgttcggcggagggaccaagctgaccgtctta

SEQ ID NO: 7623 - DNA, 321 bp, Homo sapiens
  CDS (1)..(321): /note="NI204.7B3VL variable light chain (VL) sequence, wherein LeuProVal at positions 13 of the of the amino acid sequence can also be SerGluTyr"
  misc_feature (67)..(99): /note="complementarity determining region (CDR) VLCDR1"
  misc_feature (145)..(165): /note="complementarity determining region (CDR) VLCDR2"
  misc_feature (262)..(291): /note="complementarity determining region (CDR) VLCDR3"
ctgcctgtgctgactcagccaccctcggtgtcagtgtccccaggacagacggccaggatcacctgctctggagacgagttgtcaaaacaatatgcttattggtaccagaagaagtcaggccaggcccctgtgatggtggtgaatgaagacactaagaggcccccggggattcctgaacggttttctggttccagttcagggacaacaagcacattgaccatcagtggagtccaggcggaagatgaggctgactattattgtcaatcagcagacataaccggttcttgggtgtttggcggagggaccaaattgaccgtccta

SEQ ID NO: 7624 - DNA, 321 bp, Homo sapiens
  CDS (1)..(321): /note="NI204.11F11VL variable light chain (VL) sequence"
  misc_feature (70)..(102): /note="complementarity determining region (CDR) VLCDR1"
  misc_feature (148)..(168): /note="complementarity determining region (CDR) VLCDR2"
  misc_feature (265)..(291): /note="complementarity determining region (CDR) VLCDR3"
gaaattgtgctgactcagtctccacccaccctgtctttgtctccaggggaaagagccaccctctcctgcagggccagtcagactgttagtaagtacttagcctggtaccaacagaagcctggccaggctcccaggctcctcgtctatgatacatccaacagggccattggcatcccacccaggttcagtggcagtgggtctgggacagacttcactctcaccatcagcaccctagagcctgaggatttcgcactttattattgtcagcagcgtagcaactggcctccgaccttcggccaagggacacgactggagattaaa

SEQ ID NO: 7625 - DNA, 333 bp, Homo sapiens
  CDS (1)..(333): /note="NI204.10D12VL variable light chain (VL) sequence"
  misc_feature (70)..(114): /note="complementarity determining region (CDR) VLCDR1"
  misc_feature (160)..(180): /note="complementarity determining region (CDR) VLCDR2"
  misc_feature (277)..(303): /note="complementarity determining region (CDR) VLCDR3"
gaaattgtgctgactcagtctccaggctccctggctgtgtctctgggcgagagggccaccatcaactgcaagtccagccagactgttttatacaataataagaactatttagcttggtaccagcagaaaccaggacagcctccgaagttgctcatttcctgggcatcttcccgagaatccggggtccctgaccggttcagtggcagcgggtctgggacagatttcactctcaccatcagcagcctgcaggctgaagatgtggcagtttattactgtcagcactattatggtactcctgtcactttcggcggagggaccaaggtggaaatcaaa

SEQ ID NO: 7626 - DNA, 321 bp, Homo sapiens
  CDS (1)..(321): /note="NI204.10A8VL variable light chain (VL) sequence, wherein Glu at position 1 of the amino acid sequence can also be Asp and ValLeu at positions 3 to 4 can also be  GlnMet"
  misc_feature (70)..(102): /note="complementarity determining region (CDR) VLCDR1"
  misc_feature (148)..(168): /note="complementarity determining region (CDR) VLCDR2"
  misc_feature (265)..(291): /note="complementarity determining region (CDR) VLCDR3"
gaaattgtgttgacgcagtctccatcgtccctgtctgcatctgttggagacacagtcaccatcacttgccggtcaagtcagaacatcagcaactatctgagttggtttcagcataagccaggcaaggcccctagaatcctggtctatgctgcatccactttgcagactggggtcccgtcaaggttcagtggcagaggatctgggacaattttcactctttccatcaccagtctacaatccgaggattatgcaacttactactgtcaacagaatgacaaaattccccgaacgttcggccaagggaccaaggtggaaatcaaa

SEQ ID NO: 7627 - DNA, 321 bp, Homo sapiens
  CDS (1)..(321)
  misc_feature (70)..(102): /note="complementarity determining region (CDR) VLCDR1"
  misc_feature (148)..(168): /note="complementarity determining region (CDR) VLCDR2"
  misc_feature (265)..(291): /note="complementarity determining region (CDR) VLCDR3"
gacatccagatgacccagtctccatccaccctgtctgcatctgtaggagacagagtcaccatcacttgtcgggccagtcagagtattagcaggtggttggcctggtatcaacagagaccaggtagagcccctgacctcctgatctatgatgcctccaacttggaaagtggggtcccatcaaggttcagcggcagtggatctgggacagagttcactctcaccatcagtagcctgcagcctggtgatttcgcaacttattactgtcaacaatattatagttatgtttacacttttggccaggggaccaagctggagatcaaa

SEQ ID NO: 7628 - DNA, 324 bp, Homo sapiens
  CDS (1)..(324): /note="NI204.34A3VL variable light chain (VL) sequence"
  misc_feature (67)..(99): /note="complementarity determining region (CDR) VLCDR1"
  misc_feature (145)..(165): /note="complementarity determining region (CDR) VLCDR2"
  misc_feature (262)..(294): /note="complementarity determining region (CDR) VLCDR3"
tcctatgagctgactcagccaccctcggtgtcagtgtccccaggacaaacggccaggatcacctgctctggagacgcgttgccaacaaaatttgctttttggtatcaacaaaaatcaggccaggcccctgtcttggtcatctatgaggacgacaaacgaccttccgggattcctcagagattctctggctccagttctgggacaacggccaccctgactatcagtggggcccaggaggaagatgacgctgattactattgttattcaaaagacagcactaatgttgaacgagtcttcggaacagggaccaagctctccgtcctg

SEQ ID NO: 7629 - DNA, 321 bp, Homo sapiens
  CDS (1)..(321): /note="NI204.12G3VL variable light chain (VL) sequence"
  misc_feature (67)..(99): /note="complementarity determining region (CDR) VLCDR1"
  misc_feature (145)..(165): /note="complementarity determining region (CDR) VLCDR2"
  misc_feature (262)..(291): /note="complementarity determining region (CDR) VLCDR3"
tcctatgagctgactcagccaccctcggtgtcagtgtccccaggacagacggctaggatcacctgctctggagatgcattggcaaagcaatattcttattggtaccagcataagccaggccaggcccctgtgatggtgatgtataaagacagagagaggccctcagggatccctgagcgattctctggctccagttcagggacaacagtcacgttgaccatcagtgcagtccaggccgaagacgaggctgactattactgtcaatcaacaggcaccgatagtccttatatcttcggaactgggaccaaggtcaccgtctta

SEQ ID NO: 7630 - DNA, 324 bp, Homo sapiens
  CDS (1)..(324): /note="NI204.9F6VL variable light chain (VL) sequence, wherein Val at position 3 of the amino acid sequence can also be Glu"
  misc_feature (67)..(99): /note="complementarity determining region (CDR) VLCDR1"
  misc_feature (145)..(165): /note="complementarity determining region (CDR) VLCDR2"
  misc_feature (262)..(294): /note="complementarity determining region (CDR) VLCDR3"
tcctatgtgctgactcagccaccctcagtgtccgtgtccgcaggacagacagcctccatcacctgttctgcagatatgttgggggacacatatgtttcctggtatcagaagaggccaggccagtcccctgtcctgctcatctatcaggattccaagaggccctcagagatccctgagcgattctctggctccagctctgaggacacagctactctgaccattaccgggacccaggctctcgatgaggctgcctattactgtcaagtgtgggacaggcgcactacaacatatgtcttcggacctgggaccgaggtcaccgtcctg

SEQ ID NO: 7631 - DNA, 324 bp, Homo sapiens
  CDS (1)..(324): /note="NI204.7G5VL variable light chain (VL) sequence, wherein Val in position 3 of the amino acid sequence can also be Glu"
  misc_feature (67)..(99): /note="complementarity determining region (CDR) VLCDR1"
  misc_feature (145)..(165): /note="complementarity determining region (CDR) VLCDR2"
  misc_feature (262)..(294): /note="complementarity determining region (CDR) VLCDR3"
tcctatgtgctgactcagccaccctcggtgtcagtgtccccaggacaaacggccaggatcacctgctctggagatgcattgccaaagaaatatgcttattggtaccagcagaagtcaggccaggcccctgtgctggtcatctatgaggacatcaagcgaccctccgggatccctgagagattctctggctccagctcagggacaatggccaccttgactatcagtggggcccaggtggaggatgaaggtgactattattgttactcagcagacagaagtggaaatcgctgggcgttcggcggagggaccaagctgaccgtccta

SEQ ID NO: 7632 - DNA, 321 bp, Homo sapiens
  CDS (1)..(321)
  misc_feature (67)..(99): /note="complementarity determining region (CDR) VLCDR1"
  misc_feature (145)..(165): /note="complementarity determining region (CDR) VLCDR2"
  misc_feature (262)..(291): /note="complementarity determining region (CDR) VLCDR3"
tcctatgtgctgactcagccaccctcggtgtcagtgtccctaggacagatggccgcgatcacctgctctggagaggcattgccaaaaaagtatggttattggtaccagcagaagccaggccaggtccctgttctgctaatttatagagacgtcgagaggccctcaggggtccctgaccgattctctggctccagctcagggacaatggtcacattgaccatcagtggagtccaggcagaggacgaggctgactattactgtctctcagcagacagcagtggtacttgggtgttcggcggagggaccaagctgaccgtccta

SEQ ID NO: 7633 - protein, 126 aa, Homo sapiens
  MOD_RES (112)..(126): Any amino acid
EIVLTQSPGSLAVSLGERATINCKSSQTVLYNNKNYLAWYQQKPGQPPKLLISWASSRESGVPDRFSGSGSGTDFTLTISSLQAEDVAVYYCQHYYGTPVTFGGGTKVEIKXXXXXXXXXXXXXXX

SEQ ID NO: 7634 - protein, 121 aa, Homo sapiens
  MOD_RES (108)..(120): Any amino acid
EIVLTQSPSSLSASVGDTVTITCRSSQNISNYLSWFQHKPGKAPRILVYAASTLQTGVPSRFSGRGSGTIFTLSITSLQSEDYATYYCQQNDKIPRTFGQGTKVEIKXXXXXXXXXXXXXL

SEQ ID NO: 7635 - protein, 107 aa, Homo sapiens
LPVLTQPPSVSVSPGQTARITCSGDELSKQYAYWYQKKSGQAPVMVVNEDTKRPPGIPERFSGSSSGTTSTLTISGVQAEDEADYYCQSADITGSWVFGGGTKLTVL

SEQ ID NO: 7636 - protein, 121 aa, Homo sapiens
  MOD_RES (108)..(120): Any amino acid
SYELTQPPSVSVSPGQTARITCSGDALAKQYSYWYQHKPGQAPVMVMYKDRERPSGIPERFSGSSSGTTVTLTISAVQAEDEADYYCQSTGTDSPYIFGTGTKVTVLXXXXXXXXXXXXXQ

SEQ ID NO: 7637 - protein, 108 aa, Homo sapiens
SYVLTQPPSVSVSAGQTASITCSADMLGDTYVSWYQKRPGQSPVLLIYQDSKRPSEIPERFSGSSSEDTATLTITGTQALDEAAYYCQVWDRRTTTYVFGPGTEVTVL

SEQ ID NO: 7638 - protein, 122 aa, Homo sapiens
  MOD_RES (108)..(122): Any amino acid
SYVLTQPPSVSVSLGQMAAITCSGEALPKKYGYWYQQKPGQVPVLLIYRDVERPSGVPDRFSGSSSGTMVTLTISGVQAEDEADYYCLSADSSGTWVFGGGTKLTVLXXXXXXXXXXXXXXX

SEQ ID NO: 7639 - protein, 122 aa, Homo sapiens
  MOD_RES (109)..(121): Any amino acid
SYVLTQPPSVSVSPGQTARITCSGDALPKKYAYWYQQKSGQAPVLVIYEDIKRPSGIPERFSGSSSGTMATLTISGAQVEDEGDYYCYSADRSGNRWAFGGGTKLTVLXXXXXXXXXXXXXE

SEQ ID NO: 7640 - protein, 229 aa, Artificial Sequence
  source: /note="Description of Artificial Sequence: Synthetic polypeptide"
QSMQESGPGLVKPSQTLSLTCTVSGFSLSSYAMSWIRQHPGKGLEWIGYIWSGGSTDYASWAKSRVTISKTSTTVSLKLSSVTAADTAVYYCARRYGTSYPDYGDASGFDPWGQGTLVTVSSASVAAPSVFIFPPSDEQLKSGTASVVCLLNNFYPREAKVQWKVDNALQSGNSQESVTEQDSKDSTYSLSSTLTLSKADYEKHKVYACEVTHQGLSSPVTKSFNRGEC

SEQ ID NO: 7641 - protein, 214 aa, Artificial Sequence
  source: /note="Description of Artificial Sequence: Synthetic polypeptide"
DIQMTQSPASLSASLEEIVTITCQASQDIGNWLAWYQQKPGKSPQLLIYGATSLADGVPSRFSGSRSGTQFSLKISRVQVEDIGIYYCLQAYNTPWTFGGGTKVEIKRTVAAPSVFIFPPSDEQLKSGTASVVCLLNNFYPREAKVQWKVDNALQSGNSQESVTEQDSKDSTYSLSSTLTLSKADYEKHKVYACEVTHQGLSSPVTKSFNRGEC

SEQ ID NO: 7642 - protein, 107 aa, Artificial Sequence
  source: /note="Description of Artificial Sequence: Synthetic polypeptide"
DIQMTQSPASLSASLEEIVTITCQASQDIGNWLAWYQQKPGKSPQLLIYGATSLADGVPSRFSGSRSGTQFSLKISRVQVEDIGIYYCLQAYNTPWTFGGGTKVEIK

SEQ ID NO: 7643 - protein, 449 aa, Artificial Sequence
  source: /note="Description of Artificial Sequence: Synthetic polypeptide"
QVQLQESGPGLVRPSQTLSLTCTVSGYSITSDHAWSWVRQPPGRGLEWIGYISYSGITTYNPSLKSRVTMLRDTSKNQFSLRLSSVTAADTAVYYCARSLARTTAMDYWGQGSLVTVSSASTKGPSVFPLAPSSKSTSGGTAALGCLVKDYFPEPVTVSWNSGALTSGVHTFPAVLQSSGLYSLSSVVTVPSSSLGTQTYICNVNHKPSNTKVDKKVEPKSCDKTHTCPPCPAPELLGGPSVFLFPPKPKDTLMISRTPEVTCVVVDVSHEDPEVKFNWYVDGVEVHNAKTKPREEQYNSTYRVVSVLTVLHQDWLNGKEYKCKVSNKALPAPIEKTISKAKGQPREPQVYTLPPSRDELTKNQVSLTCLVKGFYPSDIAVEWESNGQPENNYKTTPPVLDSDGSFFLYSKLTVDKSRWQQGNVFSCSVMHEALHNHYTQKSLSLSPGK

SEQ ID NO: 7644 - protein, 449 aa, Artificial Sequence
  source: /note="Description of Artificial Sequence: Synthetic polypeptide"
QVQLQESGPGLVRPSQTLSLTCTVSGYSITSDHAWSWVRQPPGRGLEWIGYISYSGITTYNPSLKSRVTMLRDTSKNQFSLRLSSVTAADTAVYYCARVLARITAMDYWGQGSLVTVSSASTKGPSVFPLAPSSKSTSGGTAALGCLVKDYFPEPVTVSWNSGALTSGVHTFPAVLQSSGLYSLSSVVTVPSSSLGTQTYICNVNHKPSNTKVDKKVEPKSCDKTHTCPPCPAPELLGGPSVFLFPPKPKDTLMISRTPEVTCVVVDVSHEDPEVKFNWYVDGVEVHNAKTKPREEQYNSTYRVVSVLTVLHQDWLNGKEYKCKVSNKALPAPIEKTISKAKGQPREPQVYTLPPSRDELTKNQVSLTCLVKGFYPSDIAVEWESNGQPENNYKTTPPVLDSDGSFFLYSKLTVDKSRWQQGNVFSCSVMHEALHNHYTQKSLSLSPGK

SEQ ID NO: 7645 - protein, 449 aa, Artificial Sequence
  source: /note="Description of Artificial Sequence: Synthetic polypeptide"
QVQLQESGPGLVKPSETLSLTCAVSGYSISDDHAWSWVRQPPGEGLEWIGYISYSGITNYNPSLKGRVTISRDTSKNQFSLKLSSVTAADTAAYYCARSLARTTAMDYWGEGTLVTVSSASTKGPSVFPLAPSSKSTSGGTAALGCLVKDYFPEPVTVSWNSGALTSGVHTFPAVLQSSGLYSLSSVVTVPSSSLGTQTYICNVNHKPSNTKVDKKVEPKSCDKTHTCPPCPAPELLGGPSVFLFPPKPKDTLMISRTPEVTCVVVDVSHEDPEVKFNWYVDGVEVHNAKTKPREEQYNSTYRVVSVLTVLHQDWLNGKEYKCKVSNKALPAPIEKTISKAKGQPREPQVYTLPPSRDELTKNQVSLTCLVKGFYPSDIAVEWESNGQPENNYKTTPPVLDSDGSFFLYSKLTVDKSRWQQGNVFSCSVMHEALHNHYTQKSLSLSPGK

SEQ ID NO: 7646 - protein, 30 aa, Artificial Sequence
  source: /note="Description of Artificial Sequence: Synthetic polypeptide"
QVQLQESGPGLVRPSQTLSLTCTVSGYSIT

SEQ ID NO: 7647 - protein, 32 aa, Artificial Sequence
  source: /note="Description of Artificial Sequence: Synthetic polypeptide"
RVTMLRDTSKNQFSLRLSSVTAADTAVYYCAR

SEQ ID NO: 7648 - protein, 30 aa, Artificial Sequence
  source: /note="Description of Artificial Sequence: Synthetic polypeptide"
QVQLQESGPGLVKPSETLSLTCAVSGHSIS

SEQ ID NO: 7649 - protein, 449 aa, Artificial Sequence
  source: /note="Description of Artificial Sequence: Synthetic polypeptide"
QVQLQESGPGLVKPSETLSLTCAVSGHSISHDHAHSWVRQPPGEGLEWIGYISYSGITNYNPSLKGRVTISRDTSKNQFSLKLSSVTAADTAAYYCARSLARTTAMDYWGEGTLVTVSSASTKGPSVFPLAPSSKSTSGGTAALGCLVKDYFPEPVTVSWNSGALTSGVHTFPAVLQSSGLYSLSSVVTVPSSSLGTQTYICNVNHKPSNTKVDKKVEPKSCDKTHTCPPCPAPELLGGPSVFLFPPKPKDTLMISRTPEVTCVVVDVSHEDPEVKFNWYVDGVEVHNAKTKPREEQYNSTYRVVSVLTVLHQDWLNGKEYKCKVSNKALPAPIEKTISKAKGQPREPQVYTLPPSRDELTKNQVSLTCLVKGFYPSDIAVEWESNGQPENNYKTTPPVLDSDGSFFLYSKLTVDKSRWQQGNVFSCSVMHEALHNHYTQKSLSLSPGK

SEQ ID NO: 7650 - protein, 448 aa, Artificial Sequence
  source: /note="Description of Artificial Sequence: Synthetic polypeptide"
QVQLQESGPGLVRPSQTLSLTCTVSGYSITSDHAWSWVRQPPGRGLEWIGYISYSGITTYNPSLKSRVTMLRDTSKNQFSLRLSSVTAADTAVYYCARSLARTTAMDYWGQGSLVTVSSASTKGPSVFPLAPSSKSTSGGTAALGCLVKDYFPEPVTVSWNSGALTSGVHTFPAVLQSSGLYSLSSVVTVPSSSLGTQTYICNVNHKPSNTKVDKKVEPKSCDKTHTCPPCPAPELLGGPSVFLFPPKPKDTLMISRTPEVTCVVVDVSHEDPEVKFNWYVDGVEVHNAKTKPREEQYNSTYRVVSVLTVLHQDWLNGKEYKCKVSNKALPAPIEKTISKAKGQPREPQVYTLPPSRDELTKNQVSLTCLVKGFYPSDIAVEWESNGQPENNYKTTPPVLDSDGSFFLYSKLTVDKSRWQQGNVFSCSVMHEALHNHYTQKSLSLSPG

SEQ ID NO: 7651 - protein, 445 aa, Artificial Sequence
  source: /note="Description of Artificial Sequence: Synthetic polypeptide"
QVQLQESGPGLVRPSQTLSLTCTVSGYSITSDHAWSWVRQPPGRGLEWIGYISYSGITTYNPSLKSRVTMLRDTSKNQFSLRLSSVTAADTAVYYCARSLARTTAMDYWGQGSLVTVSSASTKGPSVFPLAPSSKSTSESTAALGCLVKDYFPEPVTVSWNSGALTSGVHTFPAVLQSSGLYSLSSVVTVPSSNFGTQTYTCNVDHKPSNTKVDKTVERKSCVECPPCPAPPVAGPSVFLFPPKPKDTLMISRTPEVTCVVVDVSHEDPEVQFNWYVDGVEVHNAKTKPREEQFNSTFRVVSVLTVVHQDWLNGKEYKCKVSNKGLPAPIEKTISKTKGQPREPQVYTLPPSREEMTKNQVSLTCLVKGFYPSDIAVEWESNGQPENNYKTTPPMLDSDGSFFLYSKLTVDKSRWQQGNVFSCSVMHEALHNHYTQKSLSLSPGK

SEQ ID NO: 7652 - protein, 449 aa, Artificial Sequence
  source: /note="Description of Artificial Sequence: Synthetic polypeptide"
QVQLQESGPGLVRPSQTLSLTCTVSGYSITSDHAWSWVRQPPGRGLEWIGYISYSGITTYNPSLKSRVTMLRDTSKNQFSLRLSSVTAADTAVYYCARSLARTTAMDYWGQGSLVTVSSASTKGPSVFPLAPSSKSTSGGTAALGCLVKDYFPEPVTVSWNSGALTSGVHTFPAVLQSSGLYSLSSVVTVPSSSLGTQTYICNVNHKPSNTKVDKKVEPKSCDKTHTCPPCPAPELLGGPSVFLFPPKPKDTLMISRTPEVTCVVVDVSHEDPEVKFNWYVDGVEVHNAKTKPREEQYNSTYRVVSVLTVLHQDWLNGKEYKCKVSNKALPAPIEKTISKAKGQPREPQVYTLPPSRDELTKNQVSLTCLVKGFYPSDIAVEWESNGQPENNYKTTPPVLDSDGSFFLYSKLTVDKSRWQQGNVFSCSVMHEALHAHYTQKSLSLSPGK

SEQ ID NO: 7653 - protein, 447 aa, Artificial Sequence
  source: /note="Description of Artificial Sequence: Synthetic polypeptide"
QVQLQESGPGLVRPSQTLSLTCTVSGYSITSDHAWSWVRQPPGRGLEWIGYISYSGITTYNPSLKSRVTMLRDTSKNQFSLRLSSVTAADTAVYYCARSLARTTAMDYWGQGSLVTVSSASTKGPSVFPLAPSSKSTSGGTAALGCLVKDYFPEPVTVSWNSGALTSGVHTFPAVLQSSGLYSLSSVVTVPSSSLGTQTYICNVNHKPSNTKVDKKVEPKSCDKTHTCPPCPAPELLGGPSVFLFPPKPKDTLMISRTPEVTCVVVDVSHEDPEVKFNWYVDGVEVHNAKTKPREEQYNSTYRVVSVLTVLHQDWLNGKEYKCKVSNKALPAPIEKTISKAKGQPREPQVYTLPPSRDELTKNQVSLTCLVKGFYPSDIAVEWESNGQPENNYKTTPPVLDSDGSFFLYSKLTVDKSRWQQGNVFSCSVMHEALHAHYTQKSLSLSP

SEQ ID NO: 7654 - protein, 443 aa, Artificial Sequence
  source: /note="Description of Artificial Sequence: Synthetic polypeptide"
QVQLQESGPGLVRPSQTLSLTCTVSGYSITSDHAWSWVRQPPGRGLEWIGYISYSGITTYNPSLKSRVTMLRDTSKNQFSLRLSSVTAADTAVYYCARSLARTTAMDYWGQGSLVTVSSASTKGPSVFPLAPSSKSTSGGTAALGCLVKDYFPEPVTVSWNSGALTSGVHTFPAVLQSSGLYSLSSVVTVPSSNFGTQTYTCNVDHKPSNTKVDKTVERKSCVECPPCPAPPVAGPSVFLFPPKPKDTLMISRTPEVTCVVVDVSQEDPEVQFNWYVDGVEVHNAKTKPREEQFNSTFRVVSVLTVVHQDWLNGKEYKCKVSNKGLPAPIEKTISKTKGQPREPQVYTLPPSQEEMTKNQVSLTCLVKGFYPSDIAVEWESNGQPENNYKTTPPMLDSDGSFFLYSKLTVDKSRWQEGNVFSCSVMHEALHAHYTQKSLSLSP

SEQ ID NO: 7655 - protein, 444 aa, Artificial Sequence
  source: /note="Description of Artificial Sequence: Synthetic polypeptide"
EVQLVESGGGLVQPGGSLRLSCAASGFPFSNYWMNWVRQAPGKGLEWVGQIRLKSNNYATHYAESVKGRFTISRDDSKNSLYLQMNSLKTEDTAVYYCTPIDYWGQGTTVTVSSASTKGPSVFPLAPSSKSTSGGTAALGCLVKDYFPEPVTVSWNSGALTSGVHTFPAVLQSSGLYSLSSVVTVPSSSLGTQTYICNVNHKPSNTKVDKKVEPKSCDKTHTCPPCPAPELLGGPSVFLFPPKPKDTLMISRTPEVTCVVVDVSHEDPEVKFNWYVDGVEVHNAKTKPREEQYNSTYRVVSVLTVLHQDWLNGKEYKCKVSNKALPAPIEKTISKAKGQPREPQVYTLPPSRDELTKNQVSLTCLVKGFYPSDIAVEWESNGQPENNYKTTPPVLDSDGSFFLYSKLTVDKSRWQQGNVFSCSVMHEALHNHYTQKSLSLSPGK

SEQ ID NO: 7656 - protein, 114 aa, Artificial Sequence
  source: /note="Description of Artificial Sequence: Synthetic polypeptide"
EVQLVESGGGLVQPGGSLRLSCAASGFPFSNYWMNWVRQAPGKGLEWVGQIRLKSNNYATHYAESVKGRFTISRDDSKNSLYLQMNSLKTEDTAVYYCTPIDYWGQGTTVTVSS

SEQ ID NO: 7657 - protein, 449 aa, Mus musculus
QVQLQQPGAELVRPGASVKLSCKTSGYTFTRYWINWVKQRPGQGLEWIGNIRPSDSYTNYNQKFKDKATLTVDKSSSTAYMQLNRPTSEDSAVYYCTREGAYSDYETYWGQGTLVTVSAAKTTAPSVYPLAPVCGDTTGSSVTLGCLVKGYFPEPVTLTWNSGSLSSGVHTFPAVLQSDLYTLSSSVTVTSSTWPSQSITCNVAHPASSTKVDKKIEPRGPTIKPCPPCKCPAPNLLGGPSVFIFPPKIKDVLMISLSPIVTCVVVDVSEDDPDVQISWFVNNVEVHTAQTQTHREDYNSTLRVVSALPIQHQDWMSGKEFKCKVNNKDLPAPIERTISKPKGSVRAPQVYVLPPPEEEMTKKQVTLTCMVTDFMPEDIYVEWTNNGKTELNYKNTEPVLDSDGSYFMYSKLRVEKKNWVERNSYSCSVVHEGLHNHHTTKSFSRTPGK

SEQ ID NO: 7658 - protein, 443 aa, Mus musculus
QVQLQQPGAELVRPGASVKLSCKTSGYTFTRYWINWVKQRPGQGLEWIGNIRPSDSYTNYNQKFKDKATLTVDKSSSTAYMQLNRPTSEDSAVYYCTREGAYSDYETYWGQGTLVTVSAAKTTPPSVYPLAPGSAAQTNSMVTLGCLVKGYFPEPVTVTWNSGSLSSGVHTFPAVLESDLYTLSSSVTVPSSPRPSETVTCNVAHPASSTKVDKKIVPRDCGCKPCICTVPEVSSVFIFPPKPKDVLTITLTPKVTCVVVDISKDDPEVQFSWFVDDVEVHTAQTQPREEQFNSTFRSVSELPIMHQDWLNGKEFKCRVNSAAFPAPIEKTISKTKGRPKAPQVYTIPPPKEQMAKDKVSLTCMITDFFPEDITVEWQWNGQPAENYKNTQPIMNTNGSYFVYSKLNVQKSNWEAGNTFTCSVLHEGLHNHHTEKSLSHSPGK

SEQ ID NO: 7659 - protein, 452 aa, Artificial Sequence
  source: /note="Description of Artificial Sequence: Synthetic polypeptide"
EVQLVESGGGLVQPGGSLRLSCAASGYTFTSYNMHWVRQAPGKGLEWVGAIYPGNGDTSYNQKFKGRFTISVDKSKNTLYLQMNSLRAEDTAVYYCARVVYYSNSYWYFDVWGQGTLVTVSSASTKGPSVFPLAPSSKSTSGGTAALGCLVKDYFPEPVTVSWNSGALTSGVHTFPAVLQSSGLYSLSSVVTVPSSSLGTQTYICNVNHKPSNTKVDKKVEPKSCDKTHTCPPCPAPELLGGPSVFLFPPKPKDTLMISRTPEVTCVVVDVSHEDPEVKFNWYVDGVEVHNAKTKPREEQYNATYRVVSVLTVLHQDWLNGKEYKCKVSNKALPAPIAATISKAKGQPREPQVYTLPPSREEMTKNQVSLTCLVKGFYPSDIAVEWESNGQPENNYKTTPPVLDSDGSFFLYSKLTVDKSRWQQGNVFSCSVMHEALHNHYTQKSLSLSPGK

SEQ ID NO: 7660 - protein, 451 aa, Artificial Sequence
  source: /note="Description of Artificial Sequence: Synthetic polypeptide"
EVQLVESGGGLVQPGGSLRLSCAASGYTFTSYNMHWVRQAPGKGLEWVGAIYPGNGDTSYNQKFKGRFTISVDKSKNTLYLQMNSLRAEDTAVYYCARVVYYSNSYWYFDVWGQGTLVTVSSASTKGPSVFPLAPSSKSTSGGTAALGCLVKDYFPEPVTVSWNSGALTSGVHTFPAVLQSSGLYSLSSVVTVPSSSLGTQTYICNVNHKPSNTKVDKKVEPKSCDKTHTCPPCPAPELLGGPSVFLFPPKPKDTLMISRTPEVTCVVVDVSHEDPEVKFNWYVDGVEVHNAKTKPREEQYNATYRVVSVLTVLHQDWLNGKEYKCKVSNKALPAPIAATISKAKGQPREPQVYTLPPSREEMTKNQVSLTCLVKGFYPSDIAVEWESNGQPENNYKTTPPVLDSDGSFFLYSKLTVDKSRWQQGNVFSCSVMHEALHNHYTQKSLSLSPG

SEQ ID NO: 7661 - protein, 214 aa, Artificial Sequence [sequence omitted]

SEQ ID NO: 7662 - protein, 214 aa, Artificial Sequence
  source: /note="Description of Artificial Sequence: Synthetic polypeptide"
DIQMTQSPSSLSASVGDRVTITCRASQDISSYLNWYQQKPGKAPKLLIYYTSRLHSGVPSRFSGSGSGTDFTFTISSLQPEDIATYYCGQGNRLPYTFGQGTKVEIKRTVAAPSVFIFPPSDEQLKSGTASVVCLLNNFYPREAKVQWKVDNALQSGNSQESVTEQDSKDSTYSLSSTLTLSKADYEKHKVYACEVTHQGLSSPVTKSFNRGEC

SEQ ID NO: 7663 - protein, 214 aa, Artificial Sequence
  source: /note="Description of Artificial Sequence: Synthetic polypeptide"
DIQMTQSPSSLSASVGDSVTITCQASQDISSYLNWYQQKPGKAPELLIYYGSELHSGVPSRFSGSGSGTDFTFTISSLEAEDAATYYCQQGNSLPYTFGQGTKVEIERTVAAPSVFIFPPSDEQLKSGTASVVCLLNNFYPREAKVQWKVDNALQSGNSQESVTEQDSKDSTYSLSSTLTLSKADYEKHKVYACEVTHQGLSSPVTKSFNRGEC

SEQ ID NO: 7664 - protein, 30 aa, Artificial Sequence
  source: /note="Description of Artificial Sequence: Synthetic polypeptide"
QVQLQESGPGLVKPSETLSLTCAVSGYSIS

SEQ ID NO: 7665 - protein, 32 aa, Artificial Sequence
  source: /note="Description of Artificial Sequence: Synthetic polypeptide"
RVTISRDNSKNTLYLQMNSLRAEDTAVYYCAR

SEQ ID NO: 7666 - protein, 214 aa, Artificial Sequence
  source: /note="Description of Artificial Sequence: Synthetic polypeptide"
DIQMTQSPSSLSASVGDSVTITCQASQHISSHLNWYQQKPGKAPELLIYYGSHLHSGVPSRFSGSGSGTDFTFTISSLEAEDAATYYCGQGNRLPYTFGQGTKVEIERTVAAPSVFIFPPSDEQLKSGTASVVCLLNNFYPREAKVQWKVDNALQSGNSQESVTEQDSKDSTYSLSSTLTLSKADYEKHKVYACEVTHQGLSSPVTKSFNRGEC

SEQ ID NO: 7667 - protein, 445 aa, Artificial Sequence
  source: /note="Description of Artificial Sequence: Synthetic polypeptide"
QVQLQESGPGLVRPSQTLSLTCTVSGYSITSDHAWSWVRQPPGRGLEWIGYISYSGITTYNPSLKSRVTMLRDTSKNQFSLRLSSVTAADTAVYYCARSLARTTAMDYWGQGSLVTVSSASTKGPSVFPLAPCSRSTSESTAALGCLVKDYFPEPVTVSWNSGALTSGVHTFPAVLQSSGLYSLSSVVTVPSSNFGTQTYTCNVDHKPSNTKVDKTVERKCCVECPPCPAPPVAGPSVFLFPPKPKDTLMISRTPEVTCVVVDVSHEDPEVQFNWYVDGVEVHNAKTKPREEQFNSTFRVVSVLTVVHQDWLNGKEYKCKVSNKGLPAPIEKTISKTKGQPREPQVYTLPPSREEMTKNQVSLTCLVKGFYPSDIAVEWESNGQPENNYKTTPPMLDSDGSFFLYSKLTVDKSRWQQGNVFSCSVMHEALHNHYTQKSLSLSPGK

SEQ ID NO: 7668 - protein, 443 aa, Artificial Sequence
  source: /note="Description of Artificial Sequence: Synthetic polypeptide"
QVQLQESGPGLVRPSQTLSLTCTVSGYSITSDHAWSWVRQPPGRGLEWIGYISYSGITTYNPSLKSRVTMLRDTSKNQFSLRLSSVTAADTAVYYCARSLARTTAMDYWGQGSLVTVSSASTKGPSVFPLAPSSKSTSGGTAALGCLVKDYFPEPVTVSWNSGALTSGVHTFPAVLQSSGLYSLSSVVTVPSSNFGTQTYTCNVDHKPSNTKVDKTVERKSCVECPPCPAPPVAGPSVFLFPPKPKDTLMISRTPEVTCVVVDVSQEDPEVQFNWYVDGVEVHNAKTKPREEQFNSTFRVVSVLTVVHQDWLNGKEYKCKVSNKGLPAPIEKTISKTKGQPREPQVYTLPPSQEEMTKNQVSLTCLVKGFYPSDIAVEWESNGQPENNYKTTPPMLDSDGSFFLYSKLTVDKSRWQEGNVFSCSVMHEALHNHYTQKSLSLSP

SEQ ID NO: 7669 - protein, 449 aa, Artificial Sequence
  source: /note="Description of Artificial Sequence: Synthetic polypeptide"
QVQLQESGPGLVKPSETLSLTCAVSGYSISDDHAVSWVRQPPGEGLEWIGFISYSGITNYNPTLQDRVTISRDNSKNTLYLQMNSLRAEDTAVYYCARLLARATAMDVWGEGTLVTVSSASTKGPSVFPLAPSSKSTSGGTAALGCLVKDYFPEPVTVSWNSGALTSGVHTFPAVLQSSGLYSLSSVVTVPSSSLGTQTYICNVNHKPSNTKVDKKVEPKSCDKTHTCPPCPAPELLGGPSVFLFPPKPKDTLMISRTPEVTCVVVDVSHEDPEVKFNWYVDGVEVHNAKTKPREEQYNSTYRVVSVLTVLHQDWLNGKEYKCKVSNKALPAPIEKTISKAKGQPREPQVYTLPPSRDELTKNQVSLTCLVKGFYPSDIAVEWESNGQPENNYKTTPPVLDSDGSFFLYSKLTVDKSRWQQGNVFSCSVMHEALHNHYTQKSLSLSPGK

SEQ ID NO: 7670 - protein, 215 aa, Artificial Sequence
  source: /note="Description of Artificial Sequence: Synthetic polypeptide"
DIVLTQSPATLSLSPGERATLSCRASQSVSSSYLAWYQQKPGQAPRLLIYGASSRATGVPARFSGSGSGTDFTLTISSLEPEDFATYYCLQIYNMPITFGQGTKVEIKRTVAAPSVFIFPPSDRKLKSGTASVVCLLNNFYPREAKVQWKVDNALQSGNSQESVTEQDSKDSTYSLSSTLTLSKADYEKHKVYACEVTHQGLSSPVTKSFNRGEC

SEQ ID NO: 7671 - protein, 215 aa, Artificial Sequence
  source: /note="Description of Artificial Sequence: Synthetic polypeptide"
AIQLTQSPSSLSASVGDRVTITCRASQSISSYLAWYQQKPGKAPKLLIYRASTLASGVPSRFSGSGSGTDFTLTISSLQPEDFATYYCQQNYASSNVDNTFGGGTKVEIKSSASTKGPSVFPLAPSSKSTSGGTAALGCLVKDYFPEPVTVSWNSGALTSGVHTFPAVLQSSGLYSLSSVVTVPSSSLGTQTYICNVNHKPSNTKVDKKVEPKSC

SEQ ID NO: 7672 - protein, 215 aa, Artificial Sequence
  source: /note="Description of Artificial Sequence: Synthetic polypeptide"
DIVLTQSPATLSLSPGERATLSCRASQSVSSSYLAWYQQKPGQAPRLLIYGASSRATGVPARFSGSGSGTDFTLTISSLEPEDFATYYCLQIYNMPITFGQGTKVEIKRTVAAPSVFIFPPSDEQLKSGTASVVCLLNNFYPREAKVQWKVDNALQSGNSQESVTEQDSKDSTYSLSSTLTLSKADYEKHKVYACEVTHQGLSSPVTKSFNRGEC

SEQ ID NO: 7673 - protein, 218 aa, Artificial Sequence
  source: /note="Description of Artificial Sequence: Synthetic polypeptide"
DIVMTQTPLSLSVTPGQPASISCKSSQSLLYSNGKTYLNWVLQKPGQSPQRLIYLVSKLDSGVPDRFSGSGSGTDFTLKISRVEAEDVGVYYCVQGSHFHTFGQGTKLEIKRTVAAPSVFIFPPSDEQLKSGTASVVCLLNNFYPREAKVQWKVDNALQSGNSQESVTEQDSKDSTYSLSSTLTLSKADYEKHKVYACEVTHQGLSSPVTKSFNRGEC

SEQ ID NO: 7674 - protein, 111 aa, Artificial Sequence
  source: /note="Description of Artificial Sequence: Synthetic polypeptide"
DIVMTQTPLSLSVTPGQPASISCKSSQSLLYSNGKTYLNWVLQKPGQSPQRLIYLVSKLDSGVPDRFSGSGSGTDFTLKISRVEAEDVGVYYCVQGSHFHTFGQGTKLEIK

SEQ ID NO: 7675 - protein, 219 aa, Mus musculus
DVVMTQTPLTLSVTIGQPASISCKSSQSLLDSNGKTYLNWLLQRPGQSPKRLIYLVSKLDSGVPDRFTGSGSGTDFTLKISRVEAEDLGVYYCVQGTHFPFTFGGGTKLEIKRADAAPTVSIFPPSSEQLTSGGASVVCFLNNFYPKDINVKWKIDGSERQNGVLNSWTDQDSKDSTYSMSSTLTLTKDEYERHNSYTCEATHKTSTSPIVKSFNRNEC

SEQ ID NO: 7676 - protein, 120 aa, Artificial Sequence
  source: /note="Description of Artificial Sequence: Synthetic polypeptide"
EVQLVQSGAEVKKPGASVKVSCKASGYTFTSHGISWVRQAPGQGLDWMGWISPYSGNTNYAQKLQGRVTMTTDTSTSTAYMELSSLRSEDTAVYYCARVGSGPYYYMDVWGQGTLVTVSS

SEQ ID NO: 7677 - protein, 450 aa, Artificial Sequence
  source: /note="Description of Artificial Sequence: Synthetic polypeptide"
EVQLVQSGAEVKKPGASVKVSCKASGYTFTSHGISWVRQAPGQGLDWMGWISPYSGNTNYAQKLQGRVTMTTDTSTSTAYMELSSLRSEDTAVYYCARVGSGPYYYMDVWGQGTLVTVSSASTKGPSVFPLAPSSKSTSGGTAALGCLVKDYFPEPVTVSWNSGALTSGVHTFPAVLQSSGLYSLSSVVTVPSSSLGTQTYICNVNHKPSNTKVDKKVEPKSCDKTHTCPPCPAPEAAGGPSVFLFPPKPKDQLMISRTPEVTCVVVDVSHEDPEVKFNWYVDGVEVHNAKTKPREEQYNSTYRVVSVLTVLHQDWLNGKEYKCKVSNKALPAPIEKTISKAKGQPREPQVYTLPPSREEMTKNQVSLTCLVKGFYPSDIAVEWESNGQPENNYKTTPPVLDSDGSFFLYSKLTVDKSRWQQGNVFSCSVLHEALHNHYTQKSLSLSPGK

SEQ ID NO: 7678 - protein, 119 aa, Artificial Sequence
  source: /note="Description of Artificial Sequence: Synthetic polypeptide"
QVQLQESGPGLVKPSETLSLTCAVSGHSISHDHAWSWVRQPPGEGLEWIGFISYSGITNYNPTLQGRVTISRDNSKNTLYLQMNSLRAEDTAVYYCARSLARTTAMDYWGEGTLVTVSS

SEQ ID NO: 7679 - protein, 119 aa, Artificial Sequence
  source: /note="Description of Artificial Sequence: Synthetic polypeptide"
QVQLQESGPGLVKPSETLSLTCAVSGHSISHDHAWSWVRQPPGEGLEWIGFISYSGITNYNPSLQGRVTISRDNSKNTLYLQMNSLRAEDTAVYYCARSLARTTAMDYWGEGTLVTVSS

SEQ ID NO: 7680 - protein, 119 aa, Artificial Sequence
  source: /note="Description of Artificial Sequence: Synthetic polypeptide"
QVQLQESGPGLVKPSETLSLTCAVSGYSISDDHAVSWVRQPPGEGLEWIGFISYSGITNYNPTLQDRVTISRDNSKNTLYLQMNSLRAEDTAVYYCARLLARATAMDVWGEGTLVTVSS

SEQ ID NO: 7681 - protein, 443 aa, Artificial Sequence
  source: /note="Description of Artificial Sequence: Synthetic polypeptide"
QVQLQESGPGLVKPSETLSLTCAVSGHSISHDHAWSWVRQPPGEGLEWIGFISYSGITNYNPTLQGRVTISRDNSKNTLYLQMNSLRAEDTAVYYCARSLARTTAMDYWGEGTLVTVSSASTKGPSVFPLAPSSKSTSGGTAALGCLVKDYFPEPVTVSWNSGALTSGVHTFPAVLQSSGLYSLSSVVTVPSSNFGTQTYTCNVDHKPSNTKVDKTVERKSCVECPPCPAPPVAGPSVFLFPPKPKDTLMISRTPEVTCVVVDVSQEDPEVQFNWYVDGVEVHNAKTKPREEQFNSTFRVVSVLTVVHQDWLNGKEYKCKVSNKGLPAPIEKTISKTKGQPREPQVYTLPPSQEEMTKNQVSLTCLVKGFYPSDIAVEWESNGQPENNYKTTPPMLDSDGSFFLYSKLTVDKSRWQEGNVFSCSVMHEALHAHYTQKSLSLSP

SEQ ID NO: 7682 - protein, 443 aa, Artificial Sequence
  source: /note="Description of Artificial Sequence: Synthetic polypeptide"
QVQLQESGPGLVKPSETLSLTCAVSGHSISHDHAWSWVRQPPGEGLEWIGFISYSGITNYNPSLQGRVTISRDNSKNTLYLQMNSLRAEDTAVYYCARSLARTTAMDYWGEGTLVTVSSASTKGPSVFPLAPSSKSTSGGTAALGCLVKDYFPEPVTVSWNSGALTSGVHTFPAVLQSSGLYSLSSVVTVPSSNFGTQTYTCNVDHKPSNTKVDKTVERKSCVECPPCPAPPVAGPSVFLFPPKPKDTLMISRTPEVTCVVVDVSQEDPEVQFNWYVDGVEVHNAKTKPREEQFNSTFRVVSVLTVVHQDWLNGKEYKCKVSNKGLPAPIEKTISKTKGQPREPQVYTLPPSQEEMTKNQVSLTCLVKGFYPSDIAVEWESNGQPENNYKTTPPMLDSDGSFFLYSKLTVDKSRWQEGNVFSCSVMHEALHAHYTQKSLSLSP

SEQ ID NO: 7683 - protein, 447 aa, Artificial Sequence
  source: /note="Description of Artificial Sequence: Synthetic polypeptide"
QVQLQESGPGLVKPSETLSLTCAVSGYSISDDHAVSWVRQPPGEGLEWIGFISYSGITNYNPTLQDRVTISRDNSKNTLYLQMNSLRAEDTAVYYCARLLARATAMDVWGEGTLVTVSSASTKGPSVFPLAPSSKSTSGGTAALGCLVKDYFPEPVTVSWNSGALTSGVHTFPAVLQSSGLYSLSSVVTVPSSSLGTQTYICNVNHKPSNTKVDKKVEPKSCDKTHTCPPCPAPELLGGPSVFLFPPKPKDTLMISRTPEVTCVVVDVSHEDPEVKFNWYVDGVEVHNAKTKPREEQYNSTYRVVSVLTVLHQDWLNGKEYKCKVSNKALPAPIEKTISKAKGQPREPQVYTLPPSRDELTKNQVSLTCLVKGFYPSDIAVEWESNGQPENNYKTTPPVLDSDGSFFLYSKLTVDKSRWQQGNVFSCSVMHEALHAHYTQKSLSLSP

SEQ ID NO: 7684 - protein, 118 aa, Artificial Sequence
  source: /note="Description of Artificial Sequence: Synthetic polypeptide"
EVQLVESGGGLVQPGNSLTLSCVASGFTFSNYGMHWIRQAPKKGLEWIAMIYYDSSKMNYADTVKGRFTISRDNSKNTLYLEMNSLRSEDTAMYYCAVPTSHYVVDVWGQGVSVTVSS

SEQ ID NO: 7685 - protein, 122 aa, Artificial Sequence
  source: /note="Description of Artificial Sequence: Synthetic polypeptide"
QSMQESGPGLVKPSQTLSLTCTVSGFSLSSYAMSWIRQHPGKGLEWIGYIWSGGSTDYASWAKSRVTISKTSTTVSLKLSSVTAADTAVYYCARRYGTSYPDYGDASGFDPWGQGTLVTVSS

SEQ ID NO: 7686 - protein, 119 aa, Mus musculus
QVQLQQPGAELVRPGASVKLSCKTSGYTFTRYWINWVKQRPGQGLEWIGNIRPSDSYTNYNQKFKDKATLTVDKSSSTAYMQLNRPTSEDSAVYYCTREGAYSDYETYWGQGTLVTVSA

SEQ ID NO: 7687 - protein, 109 aa, Artificial Sequence
  source: /note="Description of Artificial Sequence: Synthetic polypeptide"
QSALTQPRSVSGSPGQSVTISCTGTSSSVGDSIYVSWYQQHPGKAPKLMLYDVTKRPSGVPDRFSGSKSGNTASLTISGLQAEDEADYYCCSYAGTDTLFGGGTKVTVL

SEQ ID NO: 7688 - protein, 109 aa, Artificial Sequence
  source: /note="Description of Artificial Sequence: Synthetic polypeptide"
QSALTQPRSVSGSPGQSVTISCTGTSSSVGDSIYVSWYQQHPGKAPKLMLYDVTKRPSGVPDRFSGSKSGNTASLTISGLQAEDEADYYCYSYAGTDTLFGGGTKVTVL

SEQ ID NO: 7689 - protein, 215 aa, Artificial Sequence
  source: /note="Description of Artificial Sequence: Synthetic polypeptide"
QSALTQPRSVSGSPGQSVTISCTGTSSSVGDSIYVSWYQQHPGKAPKLMLYDVTKRPSGVPDRFSGSKSGNTASLTISGLQAEDEADYYCYSYAGTDTLFGGGTKVTVLGQPKAAPSVTLFPPSSEELQANKATLVCLISDFYPGAVTVAWKADSSPVKAGVETTTPSKQSNNKYAASSYLSLTPEQWKSHRSYSCQVTHEGSTVEKTVAPTECS

SEQ ID NO: 7690 - protein, 107 aa, Artificial Sequence
  source: /note="Description of Artificial Sequence: Synthetic polypeptide"
DIQMTQSPSSLSASVGDSVTITCQASRDISSHLNWYQQKPGKAPELLIYYGSHLLSGVPSRFSGSGSGTDFTFTISSLEAEDAATYYCGQGNRLPYTFGQGTKVEIE

SEQ ID NO: 7691 - protein, 107 aa, Artificial Sequence
  source: /note="Description of Artificial Sequence: Synthetic polypeptide"
DIQMTQSPSSLSASVGDSVTITCQASTDISSHLNWYQQKPGKAPELLIYYGSHLLSGVPSRFSGSGSGTDFTFTISSLEAEDAATYYCGQGNRLPYTFGQGTKVEIE

SEQ ID NO: 7692 - protein, 107 aa, Artificial Sequence
  source: /note="Description of Artificial Sequence: Synthetic polypeptide"
DIQMTQSPSSLSASVGDSVTITCQASQDISSYLNWYQQKPGKAPELLIYYGSELESGVPSRFSGSGSGTDFTFTISSLEAEDAATYYCGQGNRLPYTFGQGTKVEIE

SEQ ID NO: 7693 - protein, 214 aa, Artificial Sequence
  source: /note="Description of Artificial Sequence: Synthetic polypeptide"
DIQMTQSPSSLSASVGDSVTITCQASRDISSHLNWYQQKPGKAPELLIYYGSHLLSGVPSRFSGSGSGTDFTFTISSLEAEDAATYYCGQGNRLPYTFGQGTKVEIERTVAAPSVFIFPPSDEQLKSGTASVVCLLNNFYPREAKVQWKVDNALQSGNSQESVTEQDSKDSTYSLSSTLTLSKADYEKHKVYACEVTHQGLSSPVTKSFNRGEC

SEQ ID NO: 7694 - protein, 214 aa, Artificial Sequence
  source: /note="Description of Artificial Sequence: Synthetic polypeptide"
DIQMTQSPSSLSASVGDSVTITCQASTDISSHLNWYQQKPGKAPELLIYYGSHLLSGVPSRFSGSGSGTDFTFTISSLEAEDAATYYCGQGNRLPYTFGQGTKVEIERTVAAPSVFIFPPSDEQLKSGTASVVCLLNNFYPREAKVQWKVDNALQSGNSQESVTEQDSKDSTYSLSSTLTLSKADYEKHKVYACEVTHQGLSSPVTKSFNRGEC

SEQ ID NO: 7695 - protein, 214 aa, Artificial Sequence
  source: /note="Description of Artificial Sequence: Synthetic polypeptide"
DIQMTQSPSSLSASVGDSVTITCQASQDISSYLNWYQQKPGKAPELLIYYGSELESGVPSRFSGSGSGTDFTFTISSLEAEDAATYYCGQGNRLPYTFGQGTKVEIERTVAAPSVFIFPPSDEQLKSGTASVVCLLNNFYPREAKVQWKVDNALQSGNSQESVTEQDSKDSTYSLSSTLTLSKADYEKHKVYACEVTHQGLSSPVTKSFNRGEC

SEQ ID NO: 7696 - protein, 112 aa, Mus musculus
DVVMTQTPLTLSVTIGQPASISCKSSQSLLDSNGKTYLNWLLQRPGQSPKRLIYLVSKLDSGVPDRFTGSGSGTDFTLKISRVEAEDLGVYYCVQGTHFPFTFGGGTKLEIK

SEQ ID NO: 7697 - DNA, 21 bp, Artificial Sequence
  source: /note="Description of Artificial Sequence: Synthetic oligonucleotide"
aaagtttccaaccgattttct

SEQ ID NO: 7698 - DNA, 48 bp, Artificial Sequence
  source: /note="Description of Artificial Sequence: Synthetic oligonucleotide"
agatctagtcagagcattgtacatagtaatggaaacacctatttagaa

SEQ ID NO: 7699 - DNA, 15 bp, Artificial Sequence
  source: /note="Description of Artificial Sequence: Synthetic oligonucleotide"
agctttggaatgcac

SEQ ID NO: 7700 - DNA, 45 bp, Artificial Sequence
  source: /note="Description of Artificial Sequence: Synthetic oligonucleotide"
gaggggggatattactacggtaggagttactatactatggactac

SEQ ID NO: 7701 - DNA, 51 bp, Artificial Sequence
  source: /note="Description of Artificial Sequence: Synthetic oligonucleotide"
tacattagtagtggcagtagtaccatctactatggagacacagtgaagggc

SEQ ID NO: 7702 - DNA, 27 bp, Artificial Sequence
  source: /note="Description of Artificial Sequence: Synthetic oligonucleotide"
tttcaaggttcacatgttcctccgacg

SEQ ID NO: 7703 - protein, 15 aa, Artificial Sequence
  source: /note="Description of Artificial Sequence: Synthetic peptide"
  SITE (1)..(15): /note="Denomination of CDR protein sequences in Kabat Nomenclature of NI101.11and NI101.12F6A Vh, CDR3"
DRGIGARRGPYYMDV

SEQ ID NO: 7704 - protein, 5 aa, Mus musculus
DYEMV

SEQ ID NO: 7705 - protein, 10 aa, Artificial Sequence
  source: /note="Description of Artificial Sequence: Synthetic peptide"
GFAFSSYGMH

SEQ ID NO: 7706 - protein, 10 aa, Artificial Sequence
  source: /note="Description of Artificial Sequence: Synthetic peptide"
GFTFSSYGMS

SEQ ID NO: 7707 - protein, 11 aa, Mus musculus
KASQDINSYLT

SEQ ID NO: 7708 - protein, 13 aa, Mus musculus
MSKLSGTHAWFAY

SEQ ID NO: 7709 - protein, 9 aa, Artificial Sequence
  source: /note="Description of Artificial Sequence: Synthetic peptide"
  SITE (1)..(9): /note="Denomination of CDR protein sequences in Kabat Nomenclature of NI101.10, NI101.11 and NI101.12F6A Vkappa, CDR3"
QQSYSTPLT

SEQ ID NO: 7710 - protein, 9 aa, Mus musculus
QQYYSYPWT

SEQ ID NO: 7711 - protein, 17 aa, Mus musculus
RIDPKSGDTKYTEKFKS

SEQ ID NO: 7712 - protein, 16 aa, Artificial Sequence
  source: /note="Description of Artificial Sequence: Synthetic peptide"
RSSQSLVYSNGDTYLH

SEQ ID NO: 7713 - protein, 16 aa, Artificial Sequence
  source: /note="Description of Artificial Sequence: Synthetic peptide"
SINSNGGSTYYPDSVK

SEQ ID NO: 7714 - protein, 9 aa, Artificial Sequence
  source: /note="Description of Artificial Sequence: Synthetic peptide"
SQSTHVPWT

SEQ ID NO: 7715 - protein, 5 aa, Artificial Sequence
  source: /note="Description of Artificial Sequence: Synthetic peptide"
  SITE (1)..(5): /note="Denomination of CDR protein sequences in Kabat Nomenclature of NI101.11 and NI101.12F6A Vh, CDR1"
SYGMH

SEQ ID NO: 7716 - protein, 9 aa, Mus musculus
TLLRLHFDY

SEQ ID NO: 7717 - protein, 17 aa, Artificial Sequence
  source: /note="Description of Artificial Sequence: Synthetic peptide"
  SITE (1)..(17): /note="Denomination of CDR protein sequences in Kabat Nomenclature of NI101.11 and NI101.12F6A Vh, CDR2"
VIWFDGTKKYYTDSVKG

SEQ ID NO: 7718 - protein, 17 aa, Mus musculus
YISSGSRTIHYADTVKG

SEQ ID NO: 7719 - protein, 16 aa, Artificial Sequence
  source: /note="Description of Artificial Sequence: Synthetic peptide"
AASGFTFSSFGMHWVR

SEQ ID NO: 7720 - protein, 16 aa, Artificial Sequence
  source: /note="Description of Artificial Sequence: Synthetic peptide"
AASGFTFSSYAMSWVR

SEQ ID NO: 7721 - protein, 21 aa, Artificial Sequence
  source: /note="Description of Artificial Sequence: Synthetic peptide"
CAREGGYYYGRSYYTMDYWGQ

SEQ ID NO: 7722 - protein, 16 aa, Artificial Sequence
  source: /note="Description of Artificial Sequence: Synthetic peptide"
CARNYGSRRYFDVWGA

SEQ ID NO: 7723 - protein, 14 aa, Artificial Sequence
  source: /note="Description of Artificial Sequence: Synthetic peptide"
CARYGNYAMDYWGQ

SEQ ID NO: 7724 - protein, 15 aa, Artificial Sequence
  source: /note="Description of Artificial Sequence: Synthetic peptide"
EGGYYYGRSYYTMDY

SEQ ID NO: 7725 - protein, 9 aa, Artificial Sequence
  source: /note="Description of Artificial Sequence: Synthetic peptide"
FQGSHVPPT

SEQ ID NO: 7726 - protein, 22 aa, Artificial Sequence
  source: /note="Description of Artificial Sequence: Synthetic peptide"
ISCRSSQSIVHSNGNTYLEWYL

SEQ ID NO: 7727 - protein, 16 aa, Artificial Sequence
  source: /note="Description of Artificial Sequence: Synthetic peptide"
ITCKASQSVSNDVAWY

SEQ ID NO: 7728 - protein, 13 aa, Artificial Sequence
  source: /note="Description of Artificial Sequence: Synthetic peptide"
LIYKVSNRFSGVP

SEQ ID NO: 7729 - protein, 14 aa, Artificial Sequence
  source: /note="Description of Artificial Sequence: Synthetic peptide"
LIYYASNRYTGVPR

SEQ ID NO: 7730 - protein, 5 aa, Artificial Sequence
  source: /note="Description of Artificial Sequence: Synthetic peptide"
SFGMH

SEQ ID NO: 7731 - protein, 23 aa, Artificial Sequence
  source: /note="Description of Artificial Sequence: Synthetic peptide"
WVATISSGGSYTYYPDSVKGRFT

SEQ ID NO: 7732 - protein, 16 aa, Artificial Sequence
  source: /note="Description of Artificial Sequence: Synthetic peptide"
WVAYISSGSSTIYYAD

SEQ ID NO: 7733 - protein, 17 aa, Artificial Sequence
  source: /note="Description of Artificial Sequence: Synthetic peptide"
WVAYISSGSSTIYYGAS

SEQ ID NO: 7734 - protein, 23 aa, Artificial Sequence
  source: /note="Description of Artificial Sequence: Synthetic peptide"
WVAYISSGSSTIYYGDTVKGRFT

SEQ ID NO: 7735 - protein, 15 aa, Artificial Sequence
  source: /note="Description of Artificial Sequence: Synthetic peptide"
YFCQQDYSSPFTFGS

SEQ ID NO: 7736 - protein, 16 aa, Artificial Sequence
  source: /note="Description of Artificial Sequence: Synthetic peptide"
YISSGSSTIYYGDTVK

SEQ ID NO: 7737 - protein, 15 aa, Artificial Sequence
  source: /note="Description of Artificial Sequence: Synthetic peptide"
YYCFQGSHVPPTFGG

SEQ ID NO: 7738 - protein, 7 aa, Artificial Sequence
  source: /note="Description of Artificial Sequence: Synthetic peptide"
  SITE (1)..(7): /note="This sequence represents LCDR2B12L/R17L/he8L/CIC7"
AVSKLDS

SEQ ID NO: 7739 - protein, 7 aa, Artificial Sequence
  source: /note="Description of Artificial Sequence: Synthetic peptide"
  SITE (1)..(7): /note="This sequence represents LCDR2R17"
AVSKLGS

SEQ ID NO: 7740 - protein, 7 aa, Artificial Sequence
  source: /note="Description of Artificial Sequence: Synthetic peptide"
  SITE (1)..(7): /note="This sequence represents LCDR2 consensus"
  VARIANT (6)..(6): /replace="Gly"
  SITE (1)..(7): /note="Variant residues given in the sequence have no preference with respect to those in the annotations for variant positions"
AVSKLDS

SEQ ID NO: 7741 - protein, 112 aa, Artificial Sequence
  source: /note="Description of Artificial Sequence: Synthetic polypeptide"
  SITE (1)..(112): /note="This sequence represents LCVRR17"
DIVMTQTPLSLSVTPGQPASISCKSSQSLLYSRGKTYLNWYLQKPGQSPQLLIYAVSKLGSGVPDRFSGSGSGTDFTLKISRVEAEDVGVYYCVQGTHYPFTFGQGTKLEIK

SEQ ID NO: 7742 - protein, 6 aa, Artificial Sequence
  source: /note="Description of Artificial Sequence: Synthetic peptide"
  SITE (1)..(6): /note="This sequence represents HCDR3hE8L"
EGETVY

SEQ ID NO: 7743 - protein, 6 aa, Artificial Sequence
  source: /note="Description of Artificial Sequence: Synthetic peptide"
  SITE (1)..(6): /note="This sequence represents HCDR3B12L"
EGITVY

SEQ ID NO: 7744 - protein, 6 aa, Artificial Sequence
  source: /note="Description of Artificial Sequence: Synthetic peptide"
  SITE (1)..(6): /note="This sequence represents HCDR3R17L/R17"
EGTTVY

SEQ ID NO: 7745 - protein, 6 aa, Artificial Sequence
  source: /note="Description of Artificial Sequence: Synthetic peptide"
  SITE (1)..(6): /note="This sequence represents HCDR3CIC7"
EGVTVY

SEQ ID NO: 7746 - protein, 6 aa, Artificial Sequence
  source: /note="Description of Artificial Sequence: Synthetic peptide"
  SITE (1)..(6): /note="This sequence represents HCDR3 consensus"
  VARIANT (3)..(3): /replace="Thr" or "Glu" or "Val"
  SITE (1)..(6): /note="Variant residues given in the sequence have no preference with respect to those in the annotations for variant positions"
EGITVY

SEQ ID NO: 7747 - protein, 10 aa, Artificial Sequence
  source: /note="Description of Artificial Sequence: Synthetic peptide"
  SITE (1)..(10): /note="This sequence represents HCDR1B12L"
GYDFTRYYIN

SEQ ID NO: 7748 - protein, 10 aa, Artificial Sequence
  source: /note="Description of Artificial Sequence: Synthetic peptide"
  SITE (1)..(10): /note="This sequence represents HCDR1hE8L/CIC7"
GYTFTDYYIN

SEQ ID NO: 7749 - protein, 10 aa, Artificial Sequence
  source: /note="Description of Artificial Sequence: Synthetic peptide"
  SITE (1)..(10): /note="This sequence represents HCDR1R17L/R17"
GYTFTRYYIN

SEQ ID NO: 7750 - protein, 10 aa, Artificial Sequence
  source: /note="Description of Artificial Sequence: Synthetic peptide"
  SITE (1)..(10): /note="This sequence represents HCDR1 consensus"
  VARIANT (3)..(3): /replace="Thr"
  VARIANT (6)..(6): /replace="Asp"
  SITE (1)..(10): /note="Variant residues given in the sequence have no preference with respect to those in the annotations for variant positions"
GYDFTRYYIN

SEQ ID NO: 7751 - protein, 16 aa, Artificial Sequence
  source: /note="Description of Artificial Sequence: Synthetic peptide"
  SITE (1)..(16): /note="This sequence represents LCDR1B12L/R17L/hE8L/R17"
KSSQSLLYSRGKTYLN

SEQ ID NO: 7752 - protein, 16 aa, Artificial Sequence
  source: /note="Description of Artificial Sequence: Synthetic peptide"
  SITE (1)..(16): /note="This sequence represents LCDR1CIC7"
KSTRSLLYSRSKTYLN

SEQ ID NO: 7753 - protein, 16 aa, Artificial Sequence
  source: /note="Description of Artificial Sequence: Synthetic peptide"
  SITE (1)..(16): /note="This sequence represents LCDR1 consensus"
  VARIANT (3)..(3): /replace="Thr"
  VARIANT (4)..(4): /replace="Arg"
  VARIANT (11)..(11): /replace="Ser"
  SITE (1)..(16): /note="Variant residues given in the sequence have no preference with respect to those in the annotations for variant positions"
KSSQSLLYSRGKTYLN

SEQ ID NO: 7754 - protein, 9 aa, Artificial Sequence
  source: /note="Description of Artificial Sequence: Synthetic peptide"
  SITE (1)..(9): /note="This sequence represents LCDR3B12L/R17L/hE8L/R17/CIC7"
VQGTHYPFT

SEQ ID NO: 7755 - protein, 17 aa, Artificial Sequence
  source: /note="Description of Artificial Sequence: Synthetic peptide"
  SITE (1)..(17): /note="This sequence represents HCDR2B12L/R17L/R17/CIC7"
WINPGSGNTKYNEKFKG

SEQ ID NO: 7756 - protein, 5 aa, Artificial Sequence
  source: /note="Description of Artificial Sequence: Synthetic peptide"
DYWMH

SEQ ID NO: 7757 - protein, 17 aa, Artificial Sequence
  source: /note="Description of Artificial Sequence: Synthetic peptide"
FINPRSGSTTYNQKFRD

SEQ ID NO: 7758 - protein, 9 aa, Artificial Sequence
  source: /note="Description of Artificial Sequence: Synthetic peptide"
FQASHVPLT

SEQ ID NO: 7759 - protein, 10 aa, Artificial Sequence
  source: /note="Description of Artificial Sequence: Synthetic peptide"
IYSQSISFDY

SEQ ID NO: 7760 - protein, 16 aa, Artificial Sequence
  source: /note="Description of Artificial Sequence: Synthetic peptide"
KSRQSLLDSDGKTYLH

SEQ ID NO: 7761 - protein, 5 aa, Artificial Sequence
  source: /note="Description of Artificial Sequence: Synthetic peptide"
NYAMS

SEQ ID NO: 7762 - protein, 8 aa, Artificial Sequence
  source: /note="Description of Artificial Sequence: Synthetic peptide"
PDFDYFDY

SEQ ID NO: 7763 - protein, 16 aa, Artificial Sequence
  source: /note="Description of Artificial Sequence: Synthetic peptide"
RSSQSIVQSNGNTYLE

SEQ ID NO: 7764 - protein, 16 aa, Artificial Sequence
  source: /note="Description of Artificial Sequence: Synthetic peptide"
SIGRGGSTFYPDSVKG

SEQ ID NO: 7765 - protein, 30 aa, Homo sapiens
EVQLVESGGGLVQPGGSLRLSCAASGFTFS

SEQ ID NO: 7766 - protein, 30 aa, Homo sapiens
QVQLVQSGAEVKKPGSSVKVSCKASGGTFS

SEQ ID NO: 7767 - protein, 30 aa, Homo sapiens
QVQLVQSGSELKKPGASVKVSCKASGYTFT

SEQ ID NO: 7768 - protein, 32 aa, Homo sapiens
RFTISRDNAKNSLYLQRFTISRDNAKNSLYLQ

SEQ ID NO: 7769 - protein, 32 aa, Homo sapiens
RFVFSLDTSVSTAYLQRFVFSLDTSVSTAYLQ

SEQ ID NO: 7770 - protein, 32 aa, Homo sapiens
RVTITADKSTSTAYMELSSLRSEDTAVYYCAR

SEQ ID NO: 7771 - protein, 15 aa, Homo sapiens
WFQQKPGKAPKSLIY

SEQ ID NO: 7772 - DNA, 96 bp, Artificial Sequence
  source: /note="Description of Artificial Sequence: Synthetic oligonucleotide"
cgattcaccatctccagagacaacgccaagaactcactgtttctgcaaatgagcagcctgagagccgaggacacggccgtgtattattgtgcgaga

SEQ ID NO: 7773 - DNA, 90 bp, Artificial Sequence
  source: /note="Description of Artificial Sequence: Synthetic oligonucleotide"
gaggtgcagctggtggagtctgggggaggcttggtccagcctggggggtccctgagactctcctgttcagcctctggattcacctttagt

SEQ ID NO: 7774 - DNA, 69 bp, Artificial Sequence
  source: /note="Description of Artificial Sequence: Synthetic oligonucleotide"
gatgttgtgatgactcagtctccactctccctgcccgtcacccctggagcgccggcctccatctcctgc

SEQ ID NO: 7775 - DNA, 96 bp, Artificial Sequence
  source: /note="Description of Artificial Sequence: Synthetic oligonucleotide"
ggagtccctgacaggttcagtggcagtgggtcaggcacagattttacactgagaatcagcagagtggaggctgaggatgttggaatttattactgc

SEQ ID NO: 7776 - DNA, 30 bp, Artificial Sequence
  source: /note="Description of Artificial Sequence: Synthetic oligonucleotide"
tggggccaagggaccacggtcaccgtctcc

SEQ ID NO: 7777 - DNA, 42 bp, Artificial Sequence
  source: /note="Description of Artificial Sequence: Synthetic oligonucleotide"
tgggtccgccaggctccagggaaggggctggagtgggtggcc

SEQ ID NO: 7778 - DNA, 45 bp, Artificial Sequence
  source: /note="Description of Artificial Sequence: Synthetic oligonucleotide"
tggtatctgcagaagccagggcagtctccaaagctcctgatctat

SEQ ID NO: 7779 - DNA, 30 bp, Artificial Sequence
  source: /note="Description of Artificial Sequence: Synthetic oligonucleotide"
ttcggccctgggaccaaattggaaatcaaa

SEQ ID NO: 7780 - DNA, 16 bp, Artificial Sequence
  source: /note="Description of Artificial Sequence: Synthetic oligonucleotide"
  source: /note="Description of Combined DNA/RNA Molecule: Synthetic oligonucleotide"
  modified_base (12)..(12): a, c, g, t or u
yyyyyyyyyyyncagg

SEQ ID NO: 7781 - protein, 23 aa, Artificial Sequence
  source: /note="Description of Artificial Sequence: Synthetic peptide"
DVVMTQSPLSLPVTPGAPASISC

SEQ ID NO: 7782 - protein, 30 aa, Artificial Sequence
  source: /note="Description of Artificial Sequence: Synthetic polypeptide"
EVQLVESGGGLVQPGGSLRLSCSASGFTFS

SEQ ID NO: 7783 - protein, 10 aa, Artificial Sequence
  source: /note="Description of Artificial Sequence: Synthetic peptide"
FGPGTKLEIK

SEQ ID NO: 7784 - protein, 32 aa, Artificial Sequence
  source: /note="Description of Artificial Sequence: Synthetic polypeptide"
GVPDRFSGSGSGTDFTLRISRVEAEDVGIYYC

SEQ ID NO: 7785 - protein, 32 aa, Artificial Sequence
  source: /note="Description of Artificial Sequence: Synthetic polypeptide"
RFTISRDNAKNSLFLQMSSLRAEDTAVYYCAR

SEQ ID NO: 7786 - protein, 22 aa, Artificial Sequence
  source: /note="Description of Artificial Sequence: Synthetic peptide"
VAGFTFSVQLWVAFIRNLYARW

SEQ ID NO: 7787 - protein, 10 aa, Artificial Sequence
  source: /note="Description of Artificial Sequence: Synthetic peptide"
WGQGTTVTVS

SEQ ID NO: 7788 - DNA, 396 bp, Artificial Sequence
  source: /note="Description of Artificial Sequence: Synthetic polynucleotide"
atgaggctccctgctcagctcctggggctgctaatgctctgggtctctggaagcagtggggatgttgtgatgactcagtctccactctccctgcccgtcacccctggagcgccggcctccatctcctgcagatctagtcagagcattgtacatagtaatggaaacacctatttagagtggtatcttcaaaagccagggcagtctccaaagctcctgatctataaagtttccaaccgattttctggagtccctgacaggttcagtggaagtggatcaggcacagattttacactgagaatcagcagagtggaggctgaggatgttggaatttattactgctttcaaggttcacatgttcctccgacgttcggccctgggaccaaattggaaatcaaa

SEQ ID NO: 7789 - DNA, 396 bp, Artificial Sequence
  source: /note="Description of Artificial Sequence: Synthetic polynucleotide"
atgaggctccctgctcagctcctggggctgctaatgctctgggtctctggatccagtggggatgttgtgatgactcagtctccactctccctgcccgtcacccctggagcgccggcctccatctcctgcagatctagtcagagcattgtacatagtaatggaaacacctatttagaatggtatctgcagaagccagggcagtctccaaagctcctgatctataaagtttccaaccgattttctggagtccctgacaggttcagtggcagtgggtcaggcacagattttacactgagaatcagcagagtggaggctgaggatgttggaatttattactgctttcaaggttcacatgttcctccgacgttcggccctgggaccaaattggaaatcaaa

SEQ ID NO: 7790 - DNA, 426 bp, Artificial Sequence
  source: /note="Description of Artificial Sequence: Synthetic polynucleotide"
atggaattggggctgagctgggttttccttgttgctattttagaaggtgtccagtgtgaggtgcagctggtggagtctgggggaggcttggtccagcctggggggtccctgagactctcctgttcagcctctggattcacctttagtagctttggaatgcactgggtccgccaggctccagggaaggggctggagtgggtggcctacattagtagtggcagtagtaccatctactatggagacacagtgaagggccgattcaccatctccagagacaacgccaagaactcactgtttctgcaaatgagcagcctgagagccgaggacacggccgtgtattattgtgcgagagaggggggatattactacggtaggagttactatactatggactactggggccaagggaccacggtcaccgtctcc

SEQ ID NO: 7791 - DNA, 426 bp, Artificial Sequence
  source: /note="Description of Artificial Sequence: Synthetic polynucleotide"
atggaattggggctgagctgggttttccttgttgctattttagagggagtccagtgcgaagtgcagctggtggagtctgggggaggcttggtccagcctggggggtccctgagactctcctgttcagcctctggattcacctttagtagctttggaatgcactgggtccgccaggctccagggaaggggctggaatgggtggcctacattagtagtggcagtagtaccatctactatggagacaccgtgaagggccgattcaccatctccagagacaacgccaagaactcactgtttctgcaaatgagcagcctgagagccgaggacacggccgtgtattattgtgcgagagaggggggatattactacggaaggagttactatactatggactactggggccaagggaccacggtcaccgtctcc

SEQ ID NO: 7792 - protein, 116 aa, Artificial Sequence
  source: /note="Description of Artificial Sequence: Synthetic polypeptide"
CEVQLVESGGGLVQPGGSLRLSCSASGFTFSTYWMTWVRQAPGKGLEWVANIKPHGSEAYYVDSVKGRFTISRDNAKNSLFLQMSSLRAEDTAVYYCARANSLDVWGQGTTVTVSS

SEQ ID NO: 7793 - protein, 112 aa, Artificial Sequence
  source: /note="Description of Artificial Sequence: Synthetic polypeptide"
DVLMTQSPLSLPVTPGAPASISCRSSQSIVHSNGNTYLEWYLQKPGQSPKLLIYKVSNRFSGVPDRFSGSGSGTDFTLRISRVEAEDVGIYYCFQGSHVPPTFGPGTKLEIK

SEQ ID NO: 7794 - protein, 123 aa, Artificial Sequence
  source: /note="Description of Artificial Sequence: Synthetic polypeptide"
DVQLVESGGGLVQPGGSLRLSCSASGFTFSSFGMHWVRQAPGKGLEWVAYISSGSSTIYYGDTVKGRFTISRDNAKNSLFLQMSSLRAEDTAVYYCAREGGYYYGRSYYTMDYWGQGTTVTVS

SEQ ID NO: 7795 - protein, 112 aa, Artificial Sequence
  source: /note="Description of Artificial Sequence: Synthetic polypeptide"
DVVMTQSPLSLPVTPGAPASISCRSSQSIVHSNGNTYLEWYLQKPGQSPKLLIYKVSNRFSGVPDRFSGSGSGTDFTLRISRVEAEDVGIYYCFQGSHVPPTFGGGTKLEIK

SEQ ID NO: 7796 - protein, 112 aa, Artificial Sequence
  source: /note="Description of Artificial Sequence: Synthetic polypeptide"
DVVMTQSPLSLPVTPGAPASISCRSSQSIVHSNGNTYLEWYLQKPGQSPKLLIYKVSNRFSGVPDRFSGSGSGTDFTLRISRVEAEDVGIYYCFQGSHVPPTFGPGTKLEIK

SEQ ID NO: 7797 - protein, 112 aa, Homo sapiens
DVVMTQSPLSLPVTPGAPASISCRSSQSLLHTNGVNFLDWYLQKPGQSPKLLIYLASHRASGVPDRFSGSGSGTDFTLRISRVEAEDVGIYYCMQGLQTPFTFGPGTKLEIK

SEQ ID NO: 7798 - protein, 123 aa, Artificial Sequence
  source: /note="Description of Artificial Sequence: Synthetic polypeptide"
EVQLVESGGGLVQPGGSLRLSCSASGFTFSSFGMHWVRQAPGKGLEWVAYISSGSSTIYYGDTVKGRFTISRDNAKNSLFLQMSSLRAEDTAVYYCAREGGYYYGRSYYTMDYWGQGTTVTVS

SEQ ID NO: 7799 - protein, 123 aa, Artificial Sequence
  source: /note="Description of Artificial Sequence: Synthetic polypeptide"
EVQLVESGGGLVQPGGSLRLSCSASGFTFSSFGMHWVRQAPGKGLEWVAYISSGSSTIYYGDTVKGRFTISRDNAKNSLFLQMTSLRAEDTAVYYCAREGGYYYGRSYYTMDYWGQGTTVTVS

SEQ ID NO: 7800 - protein, 123 aa, Artificial Sequence
  source: /note="Description of Artificial Sequence: Synthetic polypeptide"
EVQLVESGGGLVQPGGSLRLSCSASGFTFSSFGMHWVRQAPGKGLEWVAYISSGSSTIYYGDTVKGRFTISRDNPKNSLFLQMSSLRAEDTAVYYCAREGGYYYGRSYYTMDYWGQGTTVTVS

SEQ ID NO: 7801 - protein, 142 aa, Artificial Sequence
  source: /note="Description of Artificial Sequence: Synthetic polypeptide"
MELGLSWVFLVAILEGVQCEVQLVESGGGLVQPGGSLRLSCSASGFTFSSFGMHWVRQAPGKGLEWVAYISSGSSTIYYGDTVKGRFTISRDNAKNSLFLQMSSLRAEDTAVYYCAREGGYYYGRSYYTMDYWGQGTTVTVS

SEQ ID NO: 7802 - protein, 132 aa, Artificial Sequence
  source: /note="Description of Artificial Sequence: Synthetic polypeptide"
MRLPAQLLGLLMLWVSGSSGDVVMTQSPLSLPVTPGAPASISCRSSQSIVHSNGNTYLEWYLQKPGQSPKLLIYKVSNRFSGVPDRFSGSGSGTDFTLRISRVEAEDVGIYYCFQGSHVPPTFGPGTKLEIK

SEQ ID NO: 7803 - DNA, 1332 bp, Artificial Sequence
  source: /note="Description of Artificial Sequence: Synthetic polynucleotide"
  misc_feature (1)..(1332): /note="This sequence represents HC DNAR17L"
  misc_feature (1)..(1332): /note="This sequence represents HC DNAR17L"
caggtgcagctggtgcagtctggggctgaggtgaagaagcctgggtcctcagtgaaggtttcctgcaaggcatctggttacaccttcactagatattatataaactgggtgcgacaggcccctggacaagggcttgagtggatgggatggattaatcctggaagcggtaatactaagtacaatgagaaattcaagggcagagtcaccattaccgcggacgaatccacgagcacagcctacatggagctgagcagcctgagatctgaggacacggccgtgtattactgtgcgagagaaggcacaacggtctactggggccaagggaccacggtcaccgtctcctcagcctccaccaagggcccatcggtcttcccgctagcaccctcctccaagagcacctctgggggcacagcggccctgggctgcctggtcaaggactacttccccgaaccggtgacggtgtcgtggaactcaggcgccctgaccagcggcgtgcacaccttcccggctgtcctacagtcctcaggactctactccctcagcagcgtggtgaccgtgccctccagcagcttgggcacccagacctacatctgcaacgtgaatcacaagcccagcaacaccaaggtggacaagaaagttgagcccaaatcttgtgacaaaactcacacatgcccaccgtgcccagcacctgaactcctggggggaccgtcagtcttcctcttccccccaaaacccaaggacaccctcatgatctcccggacccctgaggtcacatgcgtggtggtggacgtgagccacgaagaccctgaggtcaagttcaactggtacgtggacggcgtggaggtgcataatgccaagacaaagccgcgggaggagcagtacaacagcacgtaccgtgtggtcagcgtcctcaccgtcctgcaccaggactggctgaatggcaaggagtacaagtgcaaggtctccaacaaagccctcccagcccccatcgagaaaaccatctccaaagccaaagggcagccccgagaaccacaggtgtacaccctgcccccatcccgggacgagctgaccaagaaccaggtcagcctgacctgcctggtcaaaggcttctatcccagcgacatcgccgtggagtgggagagcaatgggcagccggagaacaactacaagaccacgccccccgtgctggactccgacggctccttcttcctctatagcaagctcaccgtggacaagagcaggtggcagcaggggaacgtcttctcatgctccgtgatgcatgaggctctgcacaaccactacacgcagaagagcctctccctgtctccgggt

SEQ ID NO: 7804 - DNA, 1332 bp, Artificial Sequence
  source: /note="Description of Artificial Sequence: Synthetic polynucleotide"
  misc_feature (1)..(1332): /note="This sequence represents HC DNAB12L"
caggtgcagctggtgcagtctggggctgaggtgaagaagcctgggtcctcagtgaaggtttcctgcaaggcatctggttacgacttcactagatactatataaactgggtgcgacaggcccctggacaagggcttgagtggatgggatggattaatcctggaagcggtaatactaagtacaatgagaaattcaagggcagagtcaccattaccgcggacgaatccacgagcacagcctacatggagctgagcagcctgagatctgaggacacggccgtgtattactgtgcgagagaaggcatcacggtctactggggccaagggaccacggtcaccgtctcctcagcctccaccaagggcccatcggtcttcccgctagcaccctcctccaagagcacctctgggggcacagcggccctgggctgcctggtcaaggactacttccccgaaccggtgacggtgtcgtggaactcaggcgccctgaccagcggcgtgcacaccttcccggctgtcctacagtcctcaggactctactccctcagcagcgtggtgaccgtgccctccagcagcttgggcacccagacctacatctgcaacgtgaatcacaagcccagcaacaccaaggtggacaagaaagttgagcccaaatcttgtgacaaaactcacacatgcccaccgtgcccagcacctgaactcctggggggaccgtcagtcttcctcttccccccaaaacccaaggacaccctcatgatctcccggacccctgaggtcacatgcgtggtggtggacgtgagccacgaagaccctgaggtcaagttcaactggtacgtggacggcgtggaggtgcataatgccaagacaaagccgcgggaggagcagtacaacagcacgtaccgtgtggtcagcgtcctcaccgtcctgcaccaggactggctgaatggcaaggagtacaagtgcaaggtctccaacaaagccctcccagcccccatcgagaaaaccatctccaaagccaaagggcagccccgagaaccacaggtgtacaccctgcccccatcccgggacgagctgaccaagaaccaggtcagcctgacctgcctggtcaaaggcttctatcccagcgacatcgccgtggagtgggagagcaatgggcagccggagaacaactacaagaccacgccccccgtgctggactccgacggctccttcttcctctatagcaagctcaccgtggacaagagcaggtggcagcaggggaacgtcttctcatgctccgtgatgcatgaggctctgcacaaccactacacgcagaagagcctctccctgtctccgggt

SEQ ID NO: 7805 - protein, 330 aa, Homo sapiens
ASTKGPSVFFLAPSSKSTSGGTAALGCLVKDYFPEPVTVSWNSGALTSGVHTFPAVLQSSGLYSLSSVVTVPSSSLGTQTYICNVNHKPSNTKVDKKVEPKSCDKTHTCPPCPAPELLGGPSVFLFPPKPKDTLMISRTPEVTCVVVDVSHEDPEVKFNWYVDGVEVHNAKTKPREEQYNSTYRVVSVLTVLHQDWLNGKEYKCKVSNKALPAPIEKTISKAKGQPREPQVYTLPPSREEMTKNQVSLTCLVKGFYPSDIAVEWESNGQPENNYKTTPPVLDSDGSFFLYSKLTVDKSRWQQGNVFSCSVMHEALHNHYTQKSLSLSPGK

SEQ ID NO: 7806 - protein, 330 aa, Artificial Sequence
  source: /note="Description of Artificial Sequence: Synthetic polypeptide"
ASTKGPSVFPLAPSSKSTSGGTAALGCLVKDYFPEPVTVSWNSGALTSGVHTFPAVLQSSGLYSLSSVVTVPSSSLGTQTYICNVNHKPSNTKVDKKVEPKSCDKTHTCPPCPAPEAAGGPSVFLFPPKPKDTLMISRTPEVTCVVVDVSHEDPEVKFNWYVDGVEVHNAKTKPREEQYNSTYRVVSVLTVLHQDWLNGKEYKCKVSNKALPAPIEKTISKAKGQPREPQVYTLPPSREEMTKNQVSLTCLVKGFYPSDIAVEWESNGQPENNYKTTPPVLDSDGSFFLYSKLTVDKSRWQQGNVFSCSVMHEALHNHYTQKSLSLSPGK

SEQ ID NO: 7807 - protein, 19 aa, Artificial Sequence
  source: /note="Description of Artificial Sequence: Synthetic peptide"
  VARIANT (12)..(12): /replace="Ile" or "Leu" or "Met" or "Phe" or "Trp" or "Tyr" or "Val"
  SITE (1)..(19): /note="Variant residues given in the sequence have no preference with respect to those in the annotations for variant positions"
EIRNKADNHATAYAESVKG

SEQ ID NO: 7808 - protein, 445 aa, Artificial Sequence
  source: /note="Description of Artificial Sequence: Synthetic polypeptide"
  SITE (1)..(445): /note="This sequence represents HCmE8c"
EVQLLESGPELVKPGASVKISCKASGYTFTDYYINWVKQRPGQGLEWIGWINPGSGNTKYNEKFKGKATLTVDTSSSTAYMQLSSLTSEDSAVYFCTREGETVYWGQGTTLTVSSAKTTAPSVYPLAPVCGDTTGSSVTLGCLVKGYFPEPVTLTWNSGSLSSGVHTFPAVLQSDLYTLSSSVTVTSSTWPSQSITCNVAHPASSTKVDKKIEPRGPTIKPCPPCKCPAPNLLGGPSVFIFPPKIKDVLMISLSPIVTCVVVDVSEDDPDVQISWFVNNVEVHTAQTQTHREDYNSTLRVVSALPIQHQDWMSGKEFKCKVNNKDLPAPIERTISKPKGSVRAPQVYVLPPPEEEMTKKQVTLTCMVTDFMPEDIYVEWTNNGKTELNYKNTEPVLDSDGSYFMYSKLRVEKKNWVERNSYSCSVVHEGLHNHHTTKSFSRTPGK

SEQ ID NO: 7809 - protein, 439 aa, Artificial Sequence
  source: /note="Description of Artificial Sequence: Synthetic polypeptide"
  SITE (1)..(439): /note="This sequence represents HCmE8"
EVQLLESGPELVKPGASVKISCKASGYTFTDYYINWVKQRPGQGLEWIGWINPGSGNTKYNEKFKGKATLTVDTSSSTAYMQLSSLTSEDSAVYFCTREGETVYWGQGTTLTVSSAKTTPPSVYPLAPGSAAQTNSMVTLGCLVKGYFPEPVTVTWNSGSLSSGVHTFPAVLQSDLYTLSSSVTVPSSTWPSETVTCNVAHPASSTKVDKKIVPRDCGCKPCICTVPEVSSVFIFPPKPKDVLTITLTPKVTCVVVDISKDDPEVQFSWFVDDVEVHTAQTQPREEQFNSTFRSVSELPIMHQDWLNGKEFKCRVNSAAFPAPIEKTISKTKGRPKAPQVYTIPPPKEQMAKDKVSLTCMITDFFPEDITVEWQWNGQPAENYKNTQPIMDTDGSYFVYSKLNVQKSNWEAGNTFTCSVLHEGLHNHHTEKSLSHSPGK

SEQ ID NO: 7810 - protein, 444 aa, Artificial Sequence
  source: /note="Description of Artificial Sequence: Synthetic polypeptide"
  SITE (1)..(444): /note="This sequence represents HCCIC7"
EVQLVQSGAEVKKPGESLKISCKGSGYTFTDYYINWVRQMPGKGLEWMGWINPGSGNTKYNEKFKGQVTISADKSISTAYLQWSSLKASDTAMYYCAREGVTVYWGQGTLVTVSSASTKGPSVFPLAPSSKSTSGGTAALGCLVKDYFPEPVTVSWNSGALTSGVHTFPAVLQSSGLYSLSSVVTVPSSSLGTQTYICNVNHKPSNTKVDKKVEPKSCDKTHTCPPCPAPELLGGPSVFLFPPKPKDTLMISRTPEVTCVVVDVSHEDPEVKFNWYVDGVEVHNAKTKPREEQYNSTYRVVSVLTVLHQDWLNGKEYKCKVSNKALPAPIEKTISKAKGQPREPQVYTLPPSRDELTKNQVSLTCLVKGFYPSDIAVEWESNGQPENNYKTTPPVLDSDGSFFLYSKLTVDKSRWQQGNVFSCSVMHEALHNHYTQKSLSLSPG

SEQ ID NO: 7811 - protein, 444 aa, Artificial Sequence
  source: /note="Description of Artificial Sequence: Synthetic polypeptide"
  SITE (1)..(444): /note="This sequence represents HChE8C6"
QVQLVQSGAEVKKPGSSVKVSCKASGYTFTDYYINWVRQAPGQGLEWMGWINPGSGNTKYNEKFKGRVTITADESTSTAYMELSSLRSEDTAVYYCAREGETVYWGQGTTVTVSSASTKGPSVFPLAPSSKSTSGGTAALGCLVKDYFPEPVTVSWNSGALTSGVHTFPAVLQSSGLYSLSSVVTVPSSSLGTQTYICNVNHKPSNTKVDKKVEPKSCDKTHTCPPCPAPELLGGPSVFLFPPKPKDTLMISRTPEVTCVVVDVSHEDPEVKFNWYVDGVEVHNAKTKPREEQYNSTYRVVSVLTVLHQDWLNGKEYKCKVSNKALPAPIEKTISKAKGQPREPQVYTLPPSRDELTKNQVSLTCLVKGFYPSDIAVEWESNGQPENNYKTTPPVLDSDGSFFLYSKLTVDKSRWQQGNVFSCSVMHEALHNHYTQKSLSLSPG

SEQ ID NO: 7812 - protein, 14 aa, Artificial Sequence
  source: /note="Description of Artificial Sequence: Synthetic peptide"
  SITE (1)..(14): /note="This sequence represents pEF10"
  MOD_RES (1)..(1): pyroglutamic acid
  MOD_RES (14)..(14): Lys-Biotin
XFRHDSGFEVHHQX

SEQ ID NO: 7813 - DNA, 657 bp, Artificial Sequence
  source: /note="Description of Artificial Sequence: Synthetic polynucleotide"
  misc_feature (1)..(657): /note="This sequence represents LC DNAB12L/R17L"
gatattgtgatgactcagactccactctccctgtccgtcacccctggacagccggcctccatctcctgcaagtcaagtcagagcctcttatatagtcgcggaaaaacctatttgaattggctcctgcagaagccaggccaatctccacagctcctaatttatgcggtgtctaaactggactctggggtcccagacagattcagcggcagtgggtcaggcacagatttcacactgaaaatcagcagggtggaggccgaagatgttggggtttattactgcgtgcaaggtacacattacccattcacgtttggccaagggaccaagctggagatcaaacgaactgtggctgcaccatctgtcttcatcttcccgccatctgatgagcagttgaaatctggaactgcctctgttgtgtgcctgctgaataacttctatcccagagaggccaaagtacagtggaaggtggataacgccctccaatcgggtaactcccaggagagtgtcacagagcaggacagcaaggacagcacctacagcctcagcagcaccctgacgctgagcaaagcagactacgagaaacacaaagtctacgcctgcgaagtcacccatcagggcctgagctcgcccgtcacaaagagcttcaacaggggagagtgc

SEQ ID NO: 7814 - protein, 105 aa, Homo sapiens
QPKAAPSVTLFPPSSEELQANKATLVCLISDFYPGAVTVAWKADSSPVKAGVETTTPSKQSNNKYAASSYLSLTPEQWKSHRSYSCQVTHEGSTVEKTVAPTECS

SEQ ID NO: 7815 - protein, 106 aa, Homo sapiens
TVAAPSVFIFPPSDEQLKSGTASVVCLLNNFYPREAKVQWKVDNALQSGNSQESVTEQDSKDSTYSLSSTLTLSKADYEKHKVYACEVTHQGLSSPVTKSFNRGEC

SEQ ID NO: 7816 - protein, 219 aa, Artificial Sequence
  source: /note="Description of Artificial Sequence: Synthetic polypeptide"
  SITE (1)..(219): /note="This sequence represents LCCIC7"
DIQMTQSPSSLSASVGDRVTITCKSTRSLLYSRSKTYLNWYQQKPGKAPKLLIYAVSKLDSGVPSRFSGSGSGTDFTLTISSLQPEDFATYYCVQGTHYPFTFGGGTKVEIKRTVAAPSVFIFPPSDEQLKSGTASVVCLLNNFYPREAKVQWKVDNALQSGNSQESVTEQDSKDSTYSLSSTLTLSKADYEKHKVYACEVTHQGLSSPVTKSFNRGEC

SEQ ID NO: 7817 - protein, 219 aa, Artificial Sequence
  source: /note="Description of Artificial Sequence: Synthetic polypeptide"
  SITE (1)..(219): /note="This sequence represents LChE8C6"
DIVMTQTPLSLSVTPGQPASISCKSSQSLLYSRGKTYLNWYLQKPGQSPQLLIYAVSKLDSGVPDRFSGSGSGTDFTLKISRVEAEDVGVYYCVQGTHYPFTFGQGTKLEIKRTVAAPSVFIFPPSDEQLKSGTASVVCLLNNFYPRQAKVQWKVDNALQSGNSQESVTEQDSKDSTYSLSSTLTLSKADYEKHKVYACEVTHQGLSSPVTKSFNRGEC

SEQ ID NO: 7818 - protein, 219 aa, Artificial Sequence
  source: /note="Description of Artificial Sequence: Synthetic polypeptide"
  SITE (1)..(219): /note="This sequence represents LCR17"
DIVMTQTPLSLSVTPGQPASISCKSSQSLLYSRGKTYLNWYLQKPGQSPQLLIYAVSKLGSGVPDRFSGSGSGTDFTLKISRVEAEDVGVYYCVQGTHYPFTFGQGTKLEIKRTVAAPSVFIFPPSDEQLKSGTASVVCLLNNFYPREAKVQWKVDNALQSGNSQESVTEQDSKDSTYSLSSTLTLSKADYEKHKVYACEVTHQGLSSPVTKSFNRGEC

SEQ ID NO: 7819 - protein, 219 aa, Artificial Sequence
  source: /note="Description of Artificial Sequence: Synthetic polypeptide"
  SITE (1)..(219): /note="This sequence represents LCmE8 and mE8c"
NIVLTQTPLTLSVTIGQPASISCKSSQSLLYSRGKTYLNWLLQRPGQSPKRLIYAVSKLDSGVPDRFIGSGSGTDFTLKISRVEAEDLGVYYCVQGTHYPFTFGSGTKLEIKRADAAPTVSIFPPSSEQLTSGGASVVCFLNNFYPKDINVKWKIDGSERQNGVLNSWTDQDSKDSTYSMSSTLTLTKDEYERHNSYTCEATHKTSTSPIVKSFNRNEC

SEQ ID NO: 7820 - DNA, 461 bp, Artificial Sequence
  source: /note="Description of Artificial Sequence: Synthetic polynucleotide"
aagcttgccgccaccatggactccaggctcaatttagttttccttgtccttattttaaaaggtgtccagtgtgatgtgcagctggtggagtctgggggaggcttagtgcagcctggagggtcccggaaactctcctgtgcagcctctggattcactttcagtagctttggaatgcactgggttcgtcaggctccagagaaggggctggagtgggtcgcatacattagtagtggcagtagtaccatctactatggagacacagtgaagggccgattcaccatctccagagacaatcccaagaacaccctgttcctgcaaatgaccagtctaaggtctgaggacacggccatgtattactgtgcaagagaggggggatattactacggtaggagttactatactatggactactggggtcaaggaacctcagtcaccgtctcctcagcctccaccaagggccc

SEQ ID NO: 7821 - DNA, 57 bp, Homo sapiens
atggaattggggctgagctgggttttccttgttgctattttagaaggtgtccagtgt

SEQ ID NO: 7822 - DNA, 345 bp, Artificial Sequence
  source: /note="Description of Artificial Sequence: Synthetic polynucleotide"
  misc_feature (1)..(345): /note="This sequence represents HCVR DNAR17L"
caggtgcagctggtgcagtctggggctgaggtgaagaagcctgggtcctcagtgaaggtttcctgcaaggcatctggttacaccttcactagatattatataaactgggtgcgacaggcccctggacaagggcttgagtggatgggatggattaatcctggaagcggtaatactaagtacaatgagaaattcaagggcagagtcaccattaccgcggacgaatccacgagcacagcctacatggagctgagcagcctgagatctgaggacacggccgtgtattactgtgcgagagaaggcacaacggtctactggggccaagggaccacggtcaccgtctcctca

SEQ ID NO: 7823 - DNA, 345 bp, Artificial Sequence
  source: /note="Description of Artificial Sequence: Synthetic polynucleotide"
  misc_feature (1)..(345): /note="This sequence represents HCVR DNAB12L"
caggtgcagctggtgcagtctggggctgaggtgaagaagcctgggtcctcagtgaaggtttcctgcaaggcatctggttacgacttcactagatactatataaactgggtgcgacaggcccctggacaagggcttgagtggatgggatggattaatcctggaagcggtaatactaagtacaatgagaaattcaagggcagagtcaccattaccgcggacgaatccacgagcacagcctacatggagctgagcagcctgagatctgaggacacggccgtgtattactgtgcgagagaaggcatcacggtctactggggccaagggaccacggtcaccgtctcctca

SEQ ID NO: 7824 - protein, 118 aa, Mus musculus
EVKLVESGGGLVQPGGSRKLSCAASGFTFSDYEMVWVRQAPGEGLEWVAYISSGSRTIHYADTVKGRFTISRDNPKNTLFLQMSSLRSEDTAMYYCARTLLRLHFDYWGQGTILTVSS

SEQ ID NO: 7825 - protein, 118 aa, Artificial Sequence
  source: /note="Description of Artificial Sequence: Synthetic polypeptide"
EVQLVESGGGLVQPGGSLRLSCAASGFTFSDYEMVWVRQAPGKGLEWVAYISSGSRTIHYADTVKGRFTISRDNAKNSLYLQMNSLRAEDTAVYYCARTLLRLHFDYWGQGTLVTVSS

SEQ ID NO: 7826 - protein, 118 aa, Artificial Sequence
  source: /note="Description of Artificial Sequence: Synthetic polypeptide"
EVQLVESGGGLVQPGGSLRLSCAASGFTFSDYEMVWVRQAPGKGLEWVSYISSGSRTIHYADTVKGRFTISRDNAKNSLYLQMNSLRAEDTAVYYCARTLLRLHFDYWGQGTLVTVSS

SEQ ID NO: 7827 - protein, 118 aa, Artificial Sequence
  source: /note="Description of Artificial Sequence: Synthetic polypeptide"
  VARIANT (49)..(49): /replace="Ala"
  SITE (1)..(118): /note="Variant residues given in the sequence have no preference with respect to those in the annotations for variant positions"
EVQLVESGGGLVQPGGSLRLSCAASGFTFSDYEMVWVRQAPGKGLEWVSYISSGSRTIHYADTVKGRFTISRDNAKNSLYLQMNSLRAEDTAVYYCARTLLRLHFDYWGQGTLVIVSS

SEQ ID NO: 7828 - protein, 112 aa, Artificial Sequence
  source: /note="Description of Artificial Sequence: Synthetic polypeptide"
EVQLVESGGGLVQPGGSLRLSCAASGFTFSSYGMSWVRQAPGKGLELVASINSNGGSTYYPDSVKGRFTISRDNAKNSLYLQMNSLRAEDTAVYYCASGDYWGQGTTVTVSS

SEQ ID NO: 7829 - protein, 438 aa, Artificial Sequence
  source: /note="Description of Artificial Sequence: Synthetic polypeptide"
EVQLVESGGGLVQPGGSLRLSCAASGFTFSSYGMSWVRQAPGKGLELVASINSNGGSTYYPDSVKGRFTISRDNAKNSLYLQMNSLRAEDTAVYYCASGDYWGQGTTVTVSSASTKGPSVFPLAPCSRSTSESTAALGCLVKDYFPEPVTVSWNSGALTSGVHTFPAVLQSSGLYSLSSVVTVPSSSLGTKTYTCNVDHKPSNTKVDKRVESKYGPPCPPCPAPEFLGGPSVFLFPPKPKDTLMISRTPEVTCVVVDVSQEDPEVQFNWYVDGVEVHNAKTKPREEQFNSTYRVVSVLTVLHQDWLNGKEYKCKVSNKGLPSSIEKTISKAKGQPREPQVYTLPPSQEEMTKNQVSLTCLVKGFYPSDIAVEWESNGQPENNYKTTPPVLDSDGSFFLYSRLTVDKSRWQEGNVFSCSVMHEALHNHYTQKSLSLSLG

SEQ ID NO: 7830 - protein, 122 aa, Artificial Sequence
  source: /note="Description of Artificial Sequence: Synthetic polypeptide"
EVQLVQSGAEVKKPGASVKVSCKASGYTFTSYWMHWVRQAPGQGLEWIGRIDPKSGDTKYTEKFKSRATLTVDKSTSTAYMELSSLRSEDTAVYYCTTMSKLSGTHAWFAYWGQGTLVTVSS

SEQ ID NO: 7831 - protein, 122 aa, Artificial Sequence
  source: /note="Description of Artificial Sequence: Synthetic polypeptide"
EVQLVQSGAEVKKPGASVKVSCKASGYTFTSYWMHWVRQAPGQGLEWMGRIDPKSGDTKYTEKFKSRVTITADKSTSTAYMELSSLRSEDTAVYYCARMSKLSGTHAWFAYWGQGTLVTVSS

SEQ ID NO: 7832 - protein, 122 aa, Artificial Sequence
  source: /note="Description of Artificial Sequence: Synthetic polypeptide"
EVQLVQSGAEVKKPGASVKVSCKASGYTFTSYWMHWVRQAPGQGLEWMGRIDPKSGDTKYTEKFKSRVTITVDKSTSTAYMELSSLRSEDTAVYYCATMSKLSGTHAWFAYWGQGTLVTVSS

SEQ ID NO: 7833 - protein, 122 aa, Artificial Sequence
  source: /note="Description of Artificial Sequence: Synthetic polypeptide"
EVQLVQSGSELKKPGASVKVSCKASGYTFTSYWMHWVRQAPGQGLEWIGRIDPKSGDTKYTEKFKSRAVLSVDKSVSTAYLQISSLKAEDTAVYYCTTMSKLSGTHAWFAYWGQGTLVTVSS

SEQ ID NO: 7834 - protein, 122 aa, Artificial Sequence
  source: /note="Description of Artificial Sequence: Synthetic polypeptide"
EVQLVQSGSELKKPGASVKVSCKASGYTFTSYWMHWVRQAPGQGLEWMGRIDPKSGDTKYTEKFKSRFVFSLDTSVSTAYLQISSLKAEDTAVYYCARMSKLSGTHAWFAYWGQGTLVTVSS

SEQ ID NO: 7835 - protein, 122 aa, Artificial Sequence
  source: /note="Description of Artificial Sequence: Synthetic polypeptide"
EVQLVQSGSELKKPGASVKVSCKASGYTFTSYWMHWVRQAPGQGLEWMGRIDPKSGDTKYTEKFKSRFVFSVDTSVSTAYLQISSLKAEDTAVYYCATMSKLSGTHAWFAYWGQGTLVTVSS

SEQ ID NO: 7836 - protein, 122 aa, Mus musculus
QVQLQQPGAELVKPGASVKLSCKAPGYTFTSYWMHWVKQRPGQGLEWIGRIDPKSGDTKYTEKFKSKATLTVDKPSSTAYMQLSSLTSEDSAVYYCTTMSKLSGTHAWFAYWGQGTLVTVSA

SEQ ID NO: 7837 - protein, 124 aa, Homo sapiens
QVQLVESGGGVVQPGRSLRLSCAASGFAFSSYGMHWVRQAPGKGLEWVAVIWFDGTKKYYTDSVKGRFTISRDNSKNTLYLQMNTLRAEDTAVYYCARDRGIGARRGPYYMDVWGKGTTVTVSS

SEQ ID NO: 7838 - protein, 453 aa, Artificial Sequence
  source: /note="Description of Artificial Sequence: Synthetic polypeptide"
QVQLVESGGGVVQPGRSLRLSCAASGFAFSSYGMHWVRQAPGKGLEWVAVIWFDGTKKYYTDSVKGRFTISRDNSKNTLYLQMNTLRAEDTAVYYCARDRGIGARRGPYYMDVWGKGTTVTVSSASTKGPSVFPLAPSSKSTSGGTAALGCLVKDYFPEPVTVSWNSGALTSGVHTFPAVLQSSGLYSLSSVVTVPSSSLGTQTYICNVNHKPSNTKVDKRVEPKSCDKTHTCPPCPAPELLGGPSVFLFPPKPKDTLMISRTPEVTCVVVDVSHEDPEVKFNWYVDGVEVHNAKTKPREEQYNSTYRVVSVLTVLHQDWLNGKEYKCKVSNKALPAPIEKTISKAKGQPREPQVYTLPPSREEMTKNQVSLTCLVKGFYPSDIAVEWESNGQPENNYKTTPPVLDSDGSFFLYSKLTVDKSRWQQGNVFSCSVMHEALHNHYTQKSLSLSPG

SEQ ID NO: 7839 - protein, 122 aa, Artificial Sequence
  source: /note="Description of Artificial Sequence: Synthetic polypeptide"
QVQLVQSGAEVKKPGSSVKVSCKASGGTFSSYWMHWVRQAPGQGLEWMGRIDPKSGDTKYTEKFKSRVTITADKSTSTAYMELSSLRSEDTAVYYCARMSKLSGTHAWFAYWGQGTLVTVSS

SEQ ID NO: 7840 - protein, 122 aa, Artificial Sequence
  source: /note="Description of Artificial Sequence: Synthetic polypeptide"
QVQLVQSGSELKKPGASVKVSCKASGYTFTSYWMHWVRQAPGQGLEWMGRIDPKSGDTKYTEKFKSRFVFSLDTSVSTAYLQISSLKAEDTAVYYCARMSKLSGTHAWFAYWGQGTLVTVSS

SEQ ID NO: 7841 - protein, 122 aa, Artificial Sequence; identical to SEQ ID NO: 7839
  source: /note="Description of Artificial Sequence: Synthetic polypeptide"
  VARIANT (1)..(1): /replace="Glu"
  VARIANT (16)..(16): /replace="Ala"
  VARIANT (27)..(27): /replace="Tyr"
  VARIANT (30)..(30): /replace="Thr"
  VARIANT (48)..(48): /replace="Ile"
  VARIANT (68)..(68): /replace="Ala"
  VARIANT (70)..(70): /replace="Leu"
  VARIANT (72)..(72): /replace="Val"
  VARIANT (97)..(97): /replace="Thr"
  VARIANT (98)..(98): /replace="Thr"
  SITE (1)..(122): /note="Variant residues given in the sequence have no preference with respect to those in the annotations for variant positions"

SEQ ID NO: 7842 - protein, 122 aa, Artificial Sequence; identical to SEQ ID NO: 7840
  source: /note="Description of Artificial Sequence: Synthetic polypeptide"
  VARIANT (1)..(1): /replace="Glu"
  VARIANT (48)..(48): /replace="Ile"
  VARIANT (68)..(68): /replace="Ala"
  VARIANT (70)..(70): /replace="Leu"
  VARIANT (72)..(72): /replace="Val"
  VARIANT (74)..(74): /replace="Lys"
  VARIANT (97)..(97): /replace="Thr"
  VARIANT (98)..(98): /replace="Thr"
  SITE (1)..(122): /note="Variant residues given in the sequence have no preference with respect to those in the annotations for variant positions"

SEQ ID NO: 7843 - protein, 121 aa, Homo sapiens
CEVQLVESGGGLVQPGGSLRLSCAASGFTFSSYWMSWVRQAPGKGLEWVANIKQDGSEKYYVDSVKGRFTISRDNAKNSLYLQMNSLRAEDTAVYYCARDGDIGDWWFDPWGQGTLVTVSS

SEQ ID NO: 7844 - protein, 98 aa, Artificial Sequence
  source: /note="Description of Artificial Sequence: Synthetic polypeptide"
DVQLVESGGGLVQPGGSRKLSCAASGFTFSSFGMHWVRQAPEKGLEWVAYISSGSSTIYYGDTVKGRFTISRDNPKNTLFLQMTSLRSEDTAMYYCAR

SEQ ID NO: 7845 - protein, 124 aa, Artificial Sequence
  source: /note="Description of Artificial Sequence: Synthetic polypeptide"
DVQLVESGGGLVQPGGSRKLSCAASGFTFSSFGMHWVRQAPEKGLEWVAYISSGSSTIYYGDTVKGRFTISRDNPKNTLFLQMTSLRSEDTAMYYCAREGGYYYGRSYYTMDYWGQGTSVTVSS

SEQ ID NO: 7846 - protein, 71 aa, Mus musculus
EVKLMESGGGLVQPGGSRKLSCAASWVRQAPEKGLEWVARFTISRDNPKNTLFLQMTSLRSEDTAMYYCAR

SEQ ID NO: 7847 - protein, 71 aa, Mus musculus
EVKLVESGGGLVKPGGSLKLSCAASWVRQTPEKRLEWVARFTISRDNAKNTLYLQMSSLRSEDTAMYYCAR

SEQ ID NO: 7848 - protein, 71 aa, Mus musculus
EVKLVESGGGLVQPGGSRKLSCAASWVRQAPEKGLEWVARFTISRDNPKNTLFLQMTSLRSEDTAMYYCAR

SEQ ID NO: 7849 - protein, 71 aa, Homo sapiens
EVQLLESGGGLVQPGGSLRLSCAASWVRQAPGKGLEWVSRFTISRDNSKNTLYLQMNSLRAEDTAVYYCAK

SEQ ID NO: 7850 - protein, 71 aa, Homo sapiens
EVQLVESGGGLIQPGGSLRLSCAASWVRQAPEKGLEWVSRFTISRDNSKNTLYLQMNSLRAEDTAVYYCAR

SEQ ID NO: 7851 - protein, 124 aa, Homo sapiens
EVQLVESGGGLVQPGGSLKLSCAASGFTFSSYWMSWVRQAPGKGLEWVANIKQDGSEKYYVDSVKGRFTISRDNAKNSLYLQMNSLRAEDTAVYYCARPDDSSGYYSAEYFQHWGQGTLVTVSS

SEQ ID NO: 7852 - protein, 125 aa, Homo sapiens
EVQLVESGGGLVQPGGSLRLSCAASGFTFSSYWMSWVRQAPGKGLEWVANIKEDGGEKFYVDSVKGRFTISRDNPKNSLFLQMNSLRAEDTAVYYCARERGHDFWSIYYTHFDYWGQGALVTVSS

SEQ ID NO: 7853 - protein, 117 aa, Homo sapiens
EVQLVESGGGLVQPGGSLRLSCAASGFTFSSYWMSWVRQAPGKGLEWVANIKQDGSEKYYVDSVKGRFTISRDNAKNSLYLQMNSLRAEDTAVYYCARVRRGSGDSWGQGTLVTVSS

SEQ ID NO: 7854 - protein, 98 aa, Homo sapiens
EVQLVESGGGLVQPGGSLRLSCAASGFTFSSYWMSWVRQAPGKGLEWVANIKQDGSEKYYVDSVKGRFTISRDNAKNSLYLQMNSLRAEDTAVYYCAR

SEQ ID NO: 7855 - protein, 120 aa, Homo sapiens
EVQLVESGGGLVQPGGSLRLSCAASGFTFSSYWMSWVRQAPGKGLEWVANIKQDGSEKYYVDSVKGRFTISRDNAKNSLYLQMNSLRAEDTAVYYCARDCVGALGAFDIWGQGTMVTVSS

SEQ ID NO: 7856 - protein, 125 aa, Homo sapiens
EVQLVESGGGLVQPGGSLRLSCAASGFTFSSYWMSWVRQAPGKGLEWVANIKQDGSEKYYVDSVKGRFTISRDNAKNSLYLQMNSLRAEDTAVYYCARDPMTTVVKPSLATNDYWGQGTLVTVSS

SEQ ID NO: 7857 - protein, 121 aa, Homo sapiens
EVQLVESGGGLVQPGGSLRLSCAASGFTFSSYWMSWVRQAPGKGLEWVANIKQDGSEKYYVDSVKGRFTISRDNAKNSLYLQMNSLRAEDTAVYYCAREQQLGPHNWFDPWGQGTLVTVSS

SEQ ID NO: 7858 - protein, 71 aa, Mus musculus
EVQLVESGGGLVQPGGSLRLSCAASWVRQAPGKGLEWVARFTISRDNAKNSLYLQMNSLRAEDTAVYYCAR

SEQ ID NO: 7859 - protein, 71 aa, Homo sapiens
EVQLVESGGGLVQPGGSLRLSCAASWVRQAPGKGLEWVSRFTISRDNAKNTLYLQMNSLRDEDTAVYYCAR

SEQ ID NO: 7860 - protein, 71 aa, Homo sapiens
EVQLVESGGGLVQPGGSLRLSCAASWVRQAPGKGLVWVSRFTISRDNAKNTLYLQMNSLRAEDTAVYYCAR

SEQ ID NO: 7861 - protein, 98 aa, Homo sapiens
EVQLVESGGGLVQPGGSLRLSCSASGFTFSTYWMTWVRQAPGKGLEWVANIKPHGSEAYYVDSVKGRFTISRDNAKNSLFLQMSSLRAEDTAVYYCAR

SEQ ID NO: 7862 - protein, 115 aa, Homo sapiens
EVQLVESGGGLVQPGGSLRLSCSASGFTFSTYWMTWVRQAPGKGLEWVANIKPHGSEAYYVDSVKGRFTISRDNAKNSLFLQMSSLRAEDTAVYYCARANSLDVWGQGTTVTVSS

SEQ ID NO: 7863 - protein, 120 aa, Homo sapiens
EVQLVESGGGVVQPGGSLRLSCAASGFTFSNYAMHWVRQAPGKGLEWVAVISYDGSNKYYADSVKGRFTISRDNSKNTLYLQMNSLRAEDTAVYYCARARDYYYYPMDVWGQGTTVTVSS

SEQ ID NO: 7864 - protein, 154 aa, Artificial Sequence
  source: /note="Description of Artificial Sequence: Synthetic polypeptide"
KLAATMDSRLNLVFLVLILKGVQCDVQLVESGGGLVQPGGSRKLSCAASGFTFSSFGMHWVRQAPEKGLEWVAYISSGSSTIYYGDTVKGRFTISRDNPKNTLFLQMTSLRSEDTAMYYCAREGGYYYGRSYYTMDYWGQGTSVTVSSASTKGP

SEQ ID NO: 7865 - protein, 117 aa, Homo sapiens
LVQLVESGGGLVQPGGSLRLSCAASGFTFSSYWMSWVRQAPGKGLEWVAVIWYDGSNKYYADSVKGRFTISRDNSKNTLYLQMNSLRAEDTAVYYCARDGGSIFDYWGQGTLVTVSS

SEQ ID NO: 7866 - protein, 19 aa, Homo sapiens
MELGLSWVFLVAILEGVQC

SEQ ID NO: 7867 - protein, 118 aa, Homo sapiens
PLVQLVESGGGLVQPGGSLRLSCAASGFTFSSYWMSWVRQAPGKGLEWVAVIWYDGSNKYYADSVKGRFTISRDNSKNTLYLQMNSLRAEDTAVYYCARDGGSIFDYWGQGTLVTVSS

SEQ ID NO: 7868 - protein, 116 aa, Homo sapiens
QVQLVESGGGVVQPGGSLRLSCAASGFTFSSYGMHWVRQAPGKGLEWVAVIWYDGSNKYYADSVKGRFTISRDNSKNTLYLQMNSLRAEDTAVYYCARDRFFFDNWGQGTLVTVSS

SEQ ID NO: 7869 - protein, 123 aa, Homo sapiens
QVQLVESGGGVVQPGRSLKLSCAASGFTFSSYAMHWVRQAPGKGLEWVAVISYDGSNKYYADSVKGRFTISRDNSKNTLYLQMNSLRAEDTAVYYCARARNYYDSSGYSFDYWGQGTLVTVSS

SEQ ID NO: 7870 - protein, 126 aa, Homo sapiens
QVQLVESGGGVVQPGRSLKLSCAASGFTFSSYAMHWVRQAPGKGLEWVAVISYDGSNKYYADSVKGRFTISRDNSKNTLYLQMNSLRAEDTAVYYCARDQETGTTFDYYYYGMDVWGQGTTVTVSS

SEQ ID NO: 7871 - protein, 128 aa, Homo sapiens
QVQLVESGGGVVQPGRSLKLSCAASGFTFSSYAMHWVRQAPGKGLEWVAVISYDGSNKYYADSVKGRFTISRDNSKNTLYLQMNSLRAEDTAVYYCARDQSWSRIAAAGTPPSLFDPWGQGTLVTVSS

SEQ ID NO: 7872 - protein, 132 aa, Homo sapiens
QVQLVESGGGVVQPGRSLRLSCAASGFTFSSYGMHWVRQAPGKGLEWVAVIWYDGSNKYYADSAKGRFTISRDNSKNTLFLQMNSLRAEDTAVYYCARDKGYYDYVWGSYRSNPKNDAFDIWGQGTMVTVSS

SEQ ID NO: 7873 - protein, 115 aa, Artificial Sequence
  source: /note="Description of Artificial Sequence: Synthetic polypeptide"
  source: /note="This sequence represents HCVRmE8"
EVQLLESGPELVKPGASVKISCKASGYTFTDYYINWVKQRPGQGLEWIGWINPGSGNTKYNEKFKGKATLTVDTSSSTAYMQLSSLTSEDSAVYFCTREGETVYWGQGTTLTVSS

SEQ ID NO: 7874 - protein, 115 aa, Artificial Sequence
  source: /note="Description of Artificial Sequence: Synthetic polypeptide"
  source: /note="This sequence represents HCVRCIC7"
EVQLVQSGAEVKKPGESLKISCKGSGYTFTDYYINWVRQMPGKGLEWMGWINPGSGNTKYNEKFKGQVTISADKSISTAYLQWSSLKASDTAMYYCAREGVTVYWGQGTLVTVSS

SEQ ID NO: 7875 - protein, 115 aa, Artificial Sequence
  source: /note="Description of Artificial Sequence: Synthetic polypeptide"
  source: /note="This sequence represents HCVRB12L"
QVQLVQSGAEVKKPGSSVKVSCKASGYDFTRYYINWVRQAPGQGLEWMGWINPGSGNTKYNEKFKGRVTITADESTSTAYMELSSLRSEDTAVYYCAREGITVYWGQGTTVTVSS

SEQ ID NO: 7876 - protein, 444 aa, Artificial Sequence
  source: /note="Description of Artificial Sequence: Synthetic polypeptide"
  source: /note="This sequence represents HCB12L"
QVQLVQSGAEVKKPGSSVKVSCKASGYDFTRYYINWVRQAPGQGLEWMGWINPGSGNTKYNEKFKGRVTITADESTSTAYMELSSLRSEDTAVYYCAREGITVYWGQGTTVTVSSASTKGPSVFPLAPSSKSTSGGTAALGCLVKDYFPEPVTVSWNSGALTSGVHTFPAVLQSSGLYSLSSVVTVPSSSLGTQTYICNVNHKPSNTKVDKKVEPKSCDKTHTCPPCPAPELLGGPSVFLFPPKPKDTLMISRTPEVTCVVVDVSHEDPEVKFNWYVDGVEVHNAKTKPREEQYNSTYRVVSVLTVLHQDWLNGKEYKCKVSNKALPAPIEKTISKAKGQPREPQVYTLPPSRDELTKNQVSLTCLVKGFYPSDIAVEWESNGQPENNYKTTPPVLDSDGSFFLYSKLTVDKSRWQQGNVFSCSVMHEALHNHYTQKSLSLSPG

SEQ ID NO: 7877 - protein, 115 aa, Artificial Sequence
  source: /note="Description of Artificial Sequence: Synthetic polypeptide"
  source: /note="This sequence represents HCVRhE8C6"
QVQLVQSGAEVKKPGSSVKVSCKASGYTFTDYYINWVRQAPGQGLEWMGWINPGSGNTKYNEKFKGRVTITADESTSTAYMELSSLRSEDTAVYYCAREGETVYWGQGTTVTVSS

SEQ ID NO: 7878 - protein, 115 aa, Artificial Sequence
  source: /note="Description of Artificial Sequence: Synthetic polypeptide"
  source: /note="This sequence represents HCVRR17L"
QVQLVQSGAEVKKPGSSVKVSCKASGYTFTRYYINWVRQAPGQGLEWMGWINPGSGNTKYNEKFKGRVTITADESTSTAYMELSSLRSEDTAVYYCAREGTTVYWGQGTTVTVSS

SEQ ID NO: 7879 - protein, 14 aa, Artificial Sequence
  source: /note="Description of Artificial Sequence: Synthetic peptide"
  source: /note="This sequence represents pEG8"
  MOD_RES (1)..(1): pyroglutamic acid
  MOD_RES (14)..(14): Lys-biotin
XFRHDGGYEVHHQX

SEQ ID NO: 7880 - protein, 118 aa, Artificial Sequence
  source: /note="Description of Artificial Sequence: Synthetic polypeptide"
  source: /note="This sequence represents LCVR DNAB12L/R17L"
EMKLVESGGGLVEPGGSLKLSCAASGFTFSNYAMSWVRQTPDKRLEWVASIGRGGSTFYPDSVKGRFTISRDRVRNILYLQMNSLRSEDTAIYYCRVIYSQSISFDYWGQGTTLTVSS

SEQ ID NO: 7881 - protein, 117 aa, Artificial Sequence
  source: /note="Description of Artificial Sequence: Synthetic polypeptide"
QVQLQQSGTELAKPGASVKMSCKASGYTFIDYWMHWIKQSPGQGLEWIGFINPRSGSTTYNQKFRDKATLTVDTSSSTAYMQLTSLTSEDSAVYYCTRPDFDYFDYWGQGTTLTVSS

SEQ ID NO: 7882 - DNA, 420 bp, Artificial Sequence
  source: /note="Description of Artificial Sequence: Synthetic polynucleotide"
aagcttgccgccaccatgaagttgcctgttaggctgttggtgctgatgttctggattcctgcttccagcagtgatgttttgatgacccaaactccactctccctgcctgtcagtcttggagatgaagcctccatctcttgcagatctagtcagagcattgtacatagtaatggaaacacctatttagaatggtacctgcagaaaccaggccagtctccaaagctcctgatctacaaagtttccaaccgattttctggggtcccagacaggttcagtggcagtggatcagggacagatttcacactcaagatcagcagagtggaggctgaggatctgggaatttattactgctttcaaggttcacatgttcctccgacgttcggtggaggcaccaagctggaaatcaaacgtgagtggatc

SEQ ID NO: 7883 - DNA, 60 bp, Artificial Sequence
  source: /note="Description of Artificial Sequence: Synthetic oligonucleotide"
atgaggctccctgctcagctcctggggctgctaatgctctgggtctctggatccagtggg

SEQ ID NO: 7884 - DNA, 336 bp, Artificial Sequence
  source: /note="Description of Artificial Sequence: Synthetic polynucleotide"
gatattgtgatgactcagactccactctccctgtccgtcacccctggacagccggcctccatctcctgcaagtcaagtcagagcctcttatatagtcgcggaaaaacctatttgaattggctcctgcagaagccaggccaatctccacagctcctaatttatgcggtgtctaaactggactctggggtcccagacagattcagcggcagtgggtcaggcacagatttcacactgaaaatcagcagggtggaggccgaagatgttggggtttattactgcgtgcaaggtacacattacccattcacgtttggccaagggaccaagctggagatcaaa

SEQ ID NO: 7885 - protein, 107 aa, Mus musculus
DIKMTQSPSSMYASLGERVTITCKASQDINSYLTWFQQKPGKSPKTLIYRANRLVDGVPSRFSGSGSGQDYSLTISSLEYEDMGIYYCLQYDEFPLTFGAGTKLELK

SEQ ID NO: 7886 - protein, 107 aa, Artificial Sequence
  source: /note="Description of Artificial Sequence: Synthetic polypeptide"
DIQMTQSPSSLSASVGDRVTITCKASQDINSYLTWFQQKPGKAPKLLIYRANRLVDGVPSRFSGSGSGTDFTLTISSLQPEDFATYYCLQYDEFPLTFGQGTKLEIK

SEQ ID NO: 7887 - protein, 107 aa, Artificial Sequence
  source: /note="Description of Artificial Sequence: Synthetic polypeptide"
DIQMTQSPSSLSASVGDRVTITCKASQDINSYLTWFQQKPGKAPKSLIYRANRLVDGVPSRFSGSGSGTDFTLTISSLQPEDFATYYCLQYDEFPLTFGQGTKLEIK

SEQ ID NO: 7888 - protein, 107 aa, Artificial Sequence
  source: /note="Description of Artificial Sequence: Synthetic polypeptide"
DIQMTQSPSSLSASVGDRVTITCKASQDINSYLTWFQQKPGKAPKTLIYRANRLVDGVPSRFSGSGSGTDYTLTISSLQPEDFATYYCLQYDEFPLTFGQGTKLEIK

SEQ ID NO: 7889 - protein, 107 aa, Artificial Sequence; identical to SEQ ID NO: 7887
  source: /note="Description of Artificial Sequence: Synthetic polypeptide"
  VARIANT (46)..(46): /replace="Leu" or "Thr"
  VARIANT (71)..(71): /replace="Tyr"
  SITE (1)..(107): /note="Variant residues given in the sequence have no preference with respect to those in the annotations for variant positions"

SEQ ID NO: 7890 - protein, 108 aa, Homo sapiens
DIQMTQSPSSLSASVGDRVTITCRASQSISSYLNWYQQKPGKAPKLLIYAASSLQSGVPSRFSGSGSGTDFTLTISSLQPEDFATYYCQQSYSTPLTFGGGTKVEIKR

SEQ ID NO: 7891 - protein, 214 aa, Artificial Sequence
  source: /note="Description of Artificial Sequence: Synthetic polypeptide"
DIQMTQSPSSLSASVGDRVTITCRASQSISSYLNWYQQKPGKAPKLLIYAASSLQSGVPSRFSGSGSGTDFTLTISSLQPEDFATYYCQQSYSTPLTFGGGTKVEIKRTVAAPSVFIFPPSDEQLKSGTASVVCLLNNFYPREAKVQWKVDNALQSGNSQESVTEQDSKDSTYSLSSTLTLSKADYEKHKVYACEVTHQGLSSPVTKSFNRGEC

SEQ ID NO: 7892 - protein, 113 aa, Mus musculus
DIVMSQSPSSLAVSVGEKVTMSCKSSQSLLYSGNQKNFLAWYQQKPGQSPKLLIYWASTRESGVPDRFTGSGSGTDFTLTISSVKAEDLAVYYCQQYYSYPWTFGGDTKLEIK

SEQ ID NO: 7893 - protein, 113 aa, Artificial Sequence
  source: /note="Description of Artificial Sequence: Synthetic polypeptide"
DIVMTQSPDSLAVSLGERATINCKSSQSLLYSGNQKNFLAWYQQKPGQPPKLLIYWASTRESGVPDRFSGSGSGTDFTLTISSLQAEDVAVYYCQQYYSYPWTFGGGTKVEIK

SEQ ID NO: 7894 - protein, 113 aa, Artificial Sequence
  source: /note="Description of Artificial Sequence: Synthetic polypeptide"
DIVMTQSPDSLAVSLGERATINCKSSQSLLYSGNQKNFLAWYQQKPGQSPKLLIYWASTRESGVPDRFSGSGSGTDFTLTISSLQAEDVAVYYCQQYYSYPWTFGGGTKVEIK

SEQ ID NO: 7895 - protein, 113 aa, Artificial Sequence; identical to SEQ ID NO: 7893
  source: /note="Description of Artificial Sequence: Synthetic polypeptide"
  VARIANT (49)..(49): /replace="Ser"
  SITE (1)..(113): /note="Variant residues given in the sequence have no preference with respect to those in the annotations for variant positions"

SEQ ID NO: 7896 - protein, 112 aa, Artificial Sequence
  source: /note="Description of Artificial Sequence: Synthetic polypeptide"
DIVMTQSPLSLPVTPGEPASISCRSSQSLVYSNGDTYLHWYLQKPGQSPQLLIYKVSNRFSGVPDRFSGSGSGTDFTLKISRVEAEDVGVYYCSQSTHVPWTFGQGTKVEIK

SEQ ID NO: 7897 - protein, 219 aa, Artificial Sequence
  source: /note="Description of Artificial Sequence: Synthetic polypeptide"
DIVMTQSPLSLPVTPGEPASISCRSSQSLVYSNGDTYLHWYLQKPGQSPQLLIYKVSNRFSGVPDRFSGSGSGTDFTLKISRVEAEDVGVYYCSQSTHVPWTFGQGTKVEIKRTVAAPSVFIFPPSDEQLKSGTASVVCLLNNFYPREAKVQWKVDNALQSGNSQESVTEQDSKDSTYSLSSTLTLSKADYEKHKVYACEVTHQGLSSPVTKSFNRGEC

SEQ ID NO: 7898 - protein, 70 aa, Mus musculus
DIVMTQAPKFLLVSAGDRVTITCWYQQKPGQSPKLLIYGVPDRFTGSGYGTDFTFTISTVQAEDLAVYFC

SEQ ID NO: 7899 - protein, 70 aa, Mus musculus
DIVMTQAPLSLPVSLGDQASISCWYLQKPGQSPKLLIYGVPDRFSGSGSGTDFTLKISRVEAEDLGIYYC

SEQ ID NO: 7900 - protein, 112 aa, Homo sapiens [sequence omitted]

SEQ ID NO: 7901 - protein, 112 aa, Homo sapiens
DIVMTQSPLSLPVTPGEPASISCRSSQSLLESHGYNYLDWYLQKPGQSPQLLIYLASNRPSGVPDRFSGSGSGTDFTLKISRVEAEDVGIYYCMQNLQTPYSFGGQGTKLEI

SEQ ID NO: 7902 - protein, 112 aa, Homo sapiens
DIVMTQSPLSLPVTPGEPASISCRSSQSLLESHGYNYLDWYLQKPGQSPQLLIYLASNRPSGVPDRFSGSGSGTDFTLKISRVEAEDVGIYYCMQNLQTPYSFGQGTKLEIR

SEQ ID NO: 7903 - protein, 112 aa, Homo sapiens
DIVMTQSPLSLPVTPGEPASISCRSSQSLLHNNGYNYLDWYLQKPGQSPQLLIYLGSNRASGVPDRFSGSGSGTDFTLKISRVEAEDVGVYYCMQVLQIPLTFGGGTKVEIK

SEQ ID NO: 7904 - protein, 112 aa, Homo sapiens
DIVMTQSPLSLPVTPGEPASISCRSSQSLLHSNGFNYLHWYLQKPGQSPRLLIYLGSNRASGVPDRFSGSGSGTDFTLKISRVEADDVGIYYCMQALQSPYTFGQGTKLEIK

SEQ ID NO: 7905 - protein, 112 aa, Homo sapiens
DIVMTQSPLSLPVTPGEPASISCRSSQSLLHSNGYNYFDWYLQKPGQSPQLLIYLGSNRASGVPDRFSGSGSGTDFTLKISRVEAEDVGVYYCMQALQTPLTFGGGTKVEIK

SEQ ID NO: 7906 - protein, 100 aa, Homo sapiens
DIVMTQSPLSLPVTPGEPASISCRSSQSLLHSNGYNYLDWYLQKPGQSPQLLIYLGSHRASGVPDRFSGSGSGTDFTLKISRVEAEDVGVYYCMQALQTP

SEQ ID NO: 7907 - protein, 112 aa, Homo sapiens
DIVMTQSPLSLPVTPGEPASISCRSSQSLLHSNGYNYLDWYLQKPGQSPQLLIYLGSNRASGVPDRFSGSGSGTDFTLKISRVEAEDVGVYYCMQALQTPPTFGGGTKVEIK

SEQ ID NO: 7908 - protein, 112 aa, Homo sapiens
DIVMTQSPLSLPVTPGEPASISCRSSQSLLHSNGYNYLDWYLQKPGQSPQLLIYLGSNRASGVPDRFSGSGSGTDFTLKISRVEAEDVGVYYCMQALQTPLTFGGGTKVEIK

SEQ ID NO: 7909 - protein, 112 aa, Homo sapiens
DIVMTQSPLSLPVTPGEPASISCRSSQSLLYSNGYNYLDWYLQKPGQSPQLLIYLGSNRASGVPDRFSGSGSGTDFTLKISRVEAEDVGDYYCMQALQSPLTFGGGTKVEIK

SEQ ID NO: 7910 - protein, 70 aa, Homo sapiens
DIVMTQSPLSLPVTPGEPASISCWYLQKPGQSPQLLIYGVPDRFSGSGSGTDFTLKISRVEAEDVGVYYC

SEQ ID NO: 7911 - protein, 112 aa, Homo sapiens
DIVMTQTPLSLPVTPGEPASISCRSSQSLLESHGYNYLDWYLQKPGQSPQLLIYLASNRPSGVPDRFSGSGSGTDFTLKISRVEAEDVGIYYCMQNLQTPYSFGQGTKLEIR

SEQ ID NO: 7912 - protein, 112 aa, Homo sapiens
DIVMTQTPLSLPVTPGEPASISCRSSQSLLHGNGYNYLDWYLQKPGQSPQLLIYLGSNRASGVPDRFSGSGSGTDFTLKISRVEAEDVGVYYCMQALQTPRTFGQGTKVEIK

SEQ ID NO: 7913 - protein, 112 aa, Homo sapiens
DIVMTQTPLSLPVTPGEPASISCRSSQSLLHSNGYNYLDWYLQKPGQSPQLLIYLGSNRASGVPDRFSGSGSGTDFTLKISRVEAEDVGVYYCMQALQTPHSFGQGTKLEIK

SEQ ID NO: 7914 - protein, 70 aa, Mus musculus
DIVMTQTPLSLPVTPGEPASISCWYLQKPGQSPQLLIYGVPDRFSGSGSGTDFTLKISRVEAEDVGVYYC

SEQ ID NO: 7915 - protein, 70 aa, Homo sapiens
DIVMTQTPLSLSVTPGQPASISCWYLQKPGQPPQLLIYGVPDRFSGSGSGTDFTLKISRVEAEDVGVYYC

SEQ ID NO: 7916 - protein, 70 aa, Homo sapiens
DIVMTQTPLSLSVTPGQPASISCWYLQKPGQSPQLLIYGVPDRFSGSGSGTDFTLKISRVEAEDVGVYYC

SEQ ID NO: 7917 - protein, 112 aa, Artificial Sequence
  source: /note="Description of Artificial Sequence: Synthetic polypeptide"
DVLMTQTPLSLPVSLGDQASISCRSSQSIVHSNGNTYLEWYLQKPGQSPKLLIYKVSNRFSGVPDRFSGSGSGTDFTLKISRVEAEDLGIYYCFQGSHVPPTFGGGTKLEIK

SEQ ID NO: 7918 - protein, 112 aa, Homo sapiens
DVVMTQSPLSLAVTPGEPASISCRSSQSVVFTNGKNYLDWYLQKPGQSPQLLIYLGSNRASGVPDRFSGSGSGTDFTLKISRVEADDVGVYYCMHAVQAPWTFGQGTKVEIK

SEQ ID NO: 7919 - protein, 112 aa, Homo sapiens
DVVMTQSPLSLPVTPGAPASISCRSSQSLLHTNGVNFLDWYLQKPGQSPKLLIYLASHRASGVPDRFSGSGSGTDFTLRISRVEAEDVGIYYCMQGLQTPFTFGPGTKLEIN

SEQ ID NO: 7920 - protein, 112 aa, Homo sapiens
DVVMTQSPLSLPVTPGEPASISCRSSQSIVHSNGNTYLQWYLQKPGQSPQLLIYKVSNRLYGVPDRFSGSGSGTDFTLKISRVEAEDVGVYYCFQGSHVPWTFGQGTKVEIK

SEQ ID NO: 7921 - protein, 112 aa, Homo sapiens
DVVMTQSPLSLPVTPGEPASISCRSSQSLLHSNGYNYFAWYLQKPGQSPQLLVYLGSNRASGVPDRFSGSGSGTDFTLKISRVEAEDVGIYYCMQVLQTPYTFGQGTKLEIS

SEQ ID NO: 7922 - protein, 112 aa, Homo sapiens
DVVMTQSPLSLPVTPGEPASISCRSSQSLLHSNGYNYLDWYLQKPGQSPQLLIYLGSNRASGVPDGFSGSGSGTDFTLKISRVEAEDVGVYYCMQALQTPHTFGQGTKLEIK

SEQ ID NO: 7923 - protein, 112 aa, Homo sapiens
DVVMTQSPLSLPVTPGEPASISCRSSQSLLHSNGYNYLDWYLQKPGQSPQLLIYLGSNRASGVPDRFSGSGSGTDFTLKISRVEAEDVGVYYCMQALQSPPTFGRGTKVEIK

SEQ ID NO: 7924 - protein, 112 aa, Homo sapiens
DVVMTQSPLSLPVTPGEPASISCRSSQSLLHSNGYNYLDWYLQKPGQSPQLLIYLGSNRASGVPDRFSGSGSGTDFTLKISRVEAEDVGVYYCMQALQTPLTFGGGTKVEIK

SEQ ID NO: 7925 - protein, 112 aa, Homo sapiens
DVVMTQSPLSLPVTPGEPASISCRSSQSLLHSNGYNYLDWYLQKPGQSPQLLIYLGSNRASGVPDRFSGSGSGTDFTLKISRVEAEDVGVYYCMQALQTPYTFGQGTKLEIK

SEQ ID NO: 7926 - protein, 112 aa, Homo sapiens
DVVMTQSPLSLPVTPGEPASISCRSSQSLLHSNGYNYSDWYLQKPGQSPQLLIYLGSSRASGVPDRFSGSGSGTDFTLKISRVEAEDVGVYYCMQALQTPFTFGPGTKVDIK

SEQ ID NO: 7927 - protein, 70 aa, Homo sapiens
DVVMTQSPLSLSVTLGQPASISCWFQQRPGQSPRRLIYGVPDRFSGSGSGTDFTLKISRVEAEDVGVYYC

SEQ ID NO: 7928 - protein, 70 aa, Mus musculus
DVVMTQTPLSLPVSLGDQASISCWYLQKPGQSPKLLIYGVPDRFSGSGSGTDFTLKISRVEAEDLGVYYC

SEQ ID NO: 7929 - protein, 112 aa, Homo sapiens
DVVMTQTPLSLSVTPGQPASISCRSSQSLLHSDGMTYFSWYLQKPGQPPQLLIYEVSNRFSGVPDRFSGSGSGTDFTLKISRVEAEDVGVYYCMQNIQLPWTFGQGTKVEIK

SEQ ID NO: 7930 - protein, 17 aa, Homo sapiens
IMWYQPLLIYGGGTFYF

SEQ ID NO: 7931 - protein, 140 aa, Artificial Sequence
  source: /note="Description of Artificial Sequence: Synthetic polypeptide"
KLAATMKLPVRLLVLMFWIPASSSDVLMTQTPLSLPVSLGDQASISCRSSQSIVHSNGNTYLEWYLQKPGQSPKLLIYKVSNRFSGVPDRFSGSGSGTDFTLKISRVEAEDLGIYYCFQGSHVPPTFGGGTKLEIKREWI

SEQ ID NO: 7932 - protein, 20 aa, Artificial Sequence
  source: /note="Description of Artificial Sequence: Synthetic peptide"
MRLPAQLLGLLMLWVSGSSG

SEQ ID NO: 7933 - protein, 17 aa, Artificial Sequence
  source: /note="Description of Artificial Sequence: Synthetic peptide"
VMWYQPLLIYGGGTFYF

SEQ ID NO: 7934 - protein, 17 aa, Homo sapiens
VMWYQPLLVYGGGTFYF

SEQ ID NO: 7935 - protein, 112 aa, Artificial Sequence
  source: /note="Description of Artificial Sequence: Synthetic polypeptide"
  source: /note="This sequence represents LCVRCIC7"
DIQMTQSPSSLSASVGDRVTITCKSTRSLLYSRSKTYLNWYQQKPGKAPKLLIYAVSKLDSGVPSRFSGSGSGTDFTLTISSLQPEDFATYYCVQGTHYPFTFGGGTKVEIK

SEQ ID NO: 7936 - protein, 112 aa, Artificial Sequence
  source: /note="Description of Artificial Sequence: Synthetic polypeptide"
  source: /note="This sequence represents LCVRB12L/R17L/hE8L"
DIVMTQTPLSLSVTPGQPASISCKSSQSLLYSRGKTYLNWLLQKPGQSPQLLIYAVSKLDSGVPDRFSGSGSGTDFTLKISRVEAEDVGVYYCVQGTHYPFTFGQGTKLEIK

SEQ ID NO: 7937 - protein, 219 aa, Artificial Sequence
  source: /note="Description of Artificial Sequence: Synthetic polypeptide"
  source: /note="This sequence represents LCB12L/R17L"
DIVMTQTPLSLSVTPGQPASISCKSSQSLLYSRGKTYLNWLLQKPGQSPQLLIYAVSKLDSGVPDRFSGSGSGTDFTLKISRVEAEDVGVYYCVQGTHYPFTFGQGTKLEIKRTVAAPSVFIFPPSDEQLKSGTASVVCLLNNFYPREAKVQWKVDNALQSGNSQESVTEQDSKDSTYSLSSTLTLSKADYEKHKVYACEVTHQGLSSPVTKSFNRGEC

SEQ ID NO: 7938 - protein, 112 aa, Artificial Sequence
  source: /note="Description of Artificial Sequence: Synthetic polypeptide"
  source: /note="This sequence represents LCVRhE8C6"
DIVMTQTPLSLSVTPGQPASISCKSSQSLLYSRGKTYLNWYLQKPGQSPQLLIYAVSKLDSGVPDRFSGSGSGTDFTLKISRVEAEDVGVYYCVQGTHYPFTFGQGTKLEIK

SEQ ID NO: 7939 - protein, 112 aa, Artificial Sequence
  source: /note="Description of Artificial Sequence: Synthetic polypeptide"
  source: /note="This sequence represents LCVRmE8"
NIVLTQTPLTLSVTIGQPASISCKSSQSLLYSRGKTYLNWLLQRPGQSPKRLIYAVSKLDSGVPDRFIGSGSGTDFTLKISRVEAEDLGVYYCVQGTHYPFTFGSGTKLEIK

SEQ ID NO: 7940 - protein, 444 aa, Artificial Sequence
  source: /note="Description of Artificial Sequence: Synthetic polypeptide"
  source: /note="This sequence represents HCR17L"
QVQLVQSGAEVKKPGSSVKVSCKASGYTFTRYYINWVRQAPGQGLEWMGWINPGSGNTKYNEKFKGRVTITADESTSTAYMELSSLRSEDTAVYYCAREGTTVYWGQGTTVTVSSASTKGPSVFPLAPSSKSTSGGTAALGCLVKDYFPEPVTVSWNSGALTSGVHTFPAVLQSSGLYSLSSVVTVPSSSLGTQTYICNVNHKPSNTKVDKKVEPKSCDKTHTCPPCPAPELLGGPSVFLFPPKPKDTLMISRTPEVTCVVVDVSHEDPEVKFNWYVDGVEVHNAKTKPREEQYNSTYRVVSVLTVLHQDWLNGKEYKCKVSNKALPAPIEKTISKAKGQPREPQVYTLPPSRDELTKNQVSLTCLVKGFYPSDIAVEWESNGQPENNYKTTPPVLDSDGSFFLYSKLTVDKSRWQQGNVFSCSVMHEALHNHYTQKSLSLSPG

SEQ ID NO: 7941 - protein, 114 aa, Artificial Sequence
  source: /note="Description of Artificial Sequence: Synthetic polypeptide"
DVLMTQTPLSLPVSLGDHASISCRSSQSIVQSNGNTYLEWYLQKPGQSPKLLIYKVSNRFSGVPDRFSGSGSGTDFTLKISSVEAEDLGIYYCFQASHVPLTFGAGTKLELKRA

SEQ ID NO: 7942 - protein, 114 aa, Artificial Sequence
  source: /note="Description of Artificial Sequence: Synthetic polypeptide"
DVVLTQTPLTLSVTIGQPASISCKSRQSLLDSDGKTYLHWLLQRPGQSPKRLIYLVSKLDSGVPDRFTGSGSGTDFTLKISRVEAEDLGVYYCWQGTHFPFTFGSGTKLEIKRA

SEQ ID NO: 7943 - protein, 107 aa, Artificial Sequence
  source: /note="Description of Artificial Sequence: Synthetic polypeptide"
DIVMTQAPKFLLVSAGDRVTITCKASQSVSNDVAWYQQKPGQSPKLLIYYASNRYTGVPDRFTGSGYGTDFTFTISTVQAEDLAVYFCQQDYSSPFTFGSGTKLEIK

SEQ ID NO: 7944 - protein, 112 aa, Artificial Sequence
  source: /note="Description of Artificial Sequence: Synthetic polypeptide"
DIVMTQAPLSLPVSLGDQASISCRSSQSIVHSNGNTYLEWYLQKPGQSPKLLIYKVSNRFSGVPDRFSGSGSGTDFTLKISRVEAEDLGIYYCFQGSHVPPTFGGGTKLEIK

SEQ ID NO: 7945 - protein, 112 aa, Artificial Sequence
  source: /note="Description of Artificial Sequence: Synthetic polypeptide"
DIVMTQAPLSLPVSLGDQASISCRSSQSLVHSNGNTYLHWYLQKPGQSLKLLIYKVSNRFSGVPDRFSGSGSGTDFTLKISRVEAEDLGVYFCSQSTHVPLTFGAGTKLELK

SEQ ID NO: 7946 - protein, 112 aa, Artificial Sequence
  source: /note="Description of Artificial Sequence: Synthetic polypeptide"
DIVMTQAPSSLAVSAGEKVTMSCKSSQSLLNSRTRKNYLAWYQQKPGQSPKLLIYWASTRESGVPDRFTGSGSGTDFTLTISSVQAEDLAVYYCKQSYNLWTFGGGTKLEIK

SEQ ID NO: 7947 - protein, 112 aa, Artificial Sequence
  source: /note="Description of Artificial Sequence: Synthetic polypeptide"
DVVMTQTPLSLPVSLGDQASISCRSSQSIVHSNGNTYLEWYLQKPGKSPKLLIYKVSNRFSGVPDRFSGSGSGTDFTLKISRVEAEDLGVYYCFQGSHVPPTFGGGTKLEIK

SEQ ID NO: 7948 - protein, 108 aa, Artificial Sequence
  source: /note="Description of Artificial Sequence: Synthetic polypeptide"
ENVLTQSPAIMSASPGEKVTNTCRASSSVSSSYLHWYQQKSGASPKLWIYSTSNLASGVPARFSGSGSGTSYSLTISSVEAEDAATYYCQQYSGYPLTFGAGTKLELK

SEQ ID NO: 7949 - protein, 115 aa, Artificial Sequence
  source: /note="Description of Artificial Sequence: Synthetic polypeptide"
EVKLMESGGGLVQPGGSRKLSCAASGFTFSSFGMHWVRQAPEKGLEWVAYISSGSSTIYYADTVKGRFTISRDNPKNTLFLQMTSLRSEDTAMYYCARGDSFDYWGQGTTLTVSS

SEQ ID NO: 7950 - protein, 119 aa, Artificial Sequence
  source: /note="Description of Artificial Sequence: Synthetic polypeptide"
EVKLVESGGGLVKPGGSLKLSCAASGFTFSSYAMSWVRQTPEKRLEWVATISSGGSYTYYPDSVKGRFTISRDNAKNTLYLQMSSLRSEDTAMYYCARNYGSRRYFDVWGAGTSVTVSS

SEQ ID NO: 7951 - protein, 117 aa, Artificial Sequence
  source: /note="Description of Artificial Sequence: Synthetic polypeptide"
EVKLVESGGGLVQPGGSRKLSCAASGFTFSSFGMHWVRQAPEKGLEWVAYISSGSSTIYYADTVKGRFTISRDNPKNTLFLQMTSLRSEDTAMYYCARYGNYAMDYWGQGTSVTVSS

SEQ ID NO: 7952 - protein, 124 aa, Artificial Sequence
  source: /note="Description of Artificial Sequence: Synthetic polypeptide"
EVQRVESGGGLVQPGGSRKLSCAASGFTFSSFGMHWVRQAPEKGLEWVAYISSGSSTIYYGDTVKGRFTISRDNPKNTLFLQMTSLRSEDTAMYYCAREGGYYYGRSYYTMDYWGQGTSVTVSS

SEQ ID NO: 7953 - protein, 121 aa, Artificial Sequence
  source: /note="Description of Artificial Sequence: Synthetic polypeptide"
QVHLQQSGPELVKPGASVKMSCKASGYTFISYVMHWVKQKPGQGLEWIGYINPYNDGTKYNEKFKGKATLTSDKSSSTAYWELSSLTSEDSAVYYCARRVSPLTSYAMDYWGQGTSVTVSS

SEQ ID NO: 7954 - protein, 119 aa, Artificial Sequence
  source: /note="Description of Artificial Sequence: Synthetic polypeptide"
QVQLKESGPGLVAPPQSLSITCTVSGFSLTSYGVHWVRQPPGKGLEWLGVIWAGGSTNYNSALMSRLSISKDNSKSQVFLKMNSLQTDDTAMYYCARGRYDGKTRFAYWGQGTLVTVSS

SEQ ID NO: 7955 - protein, 444 aa, Artificial Sequence
  source: /note="Description of Artificial Sequence: Synthetic polypeptide"
QVQLVQSGAEVKKPGSSVKVSCKASGYTFTDYYINWVRQAPGQGLEWMGWINPGSGNTKYNEKFKGRVTITADESTSTAYMELSSLRSEDTAVYYCTREGETVYWGQGTLVTVSSASTKGPSVFPLAPSSKSTSGGTAALGCLVKDYFPEPVTVSWNSGALTSGVHTFPAVLQSSGLYSLSSVVTVPSSSLGTQTYICNVNHKPSNTKVDKKVEPKSCDKTHTCPPCPAPELLGGPSVFLFPPKPKDTLMISRTPEVTCVVVDVSHEDPEVKFNWYVDGVEVHNAKTKPREEQYNSTYRVVSVLTVLHQDWLNGKEYKCKVSNKALPAPIEKTISKAKGQPREPQVYTLPPSRDELTKNQVSLTCLVKGFYPSDIAVEWESNGQPENNYKTTPPVLDSDGSFFLYSKLTVDKSRWQQGNVFSCSVMHEALHNHYTQKSLSLSPG

SEQ ID NO: 7956 - protein, 219 aa, Artificial Sequence
  source: /note="Description of Artificial Sequence: Synthetic polypeptide"
DVVMTQSPLSLPVTLGQPASISCRSSQSLIYSDGNAYLHWFLQKPGQSPRLLIYKVSNRFSGVPDRFSGSGSGTDFTLKISRVEAEDVGVYYCSQSTHVPWTFGQGTKVEIKRTVAAPSVFIFPPSDEQLKSGTASVVCLLNNFYPREAKVQWKVDNALQSGNSQESVTEQDSKDSTYSLSSTLTLSKADYEKHKVYACEVTHQGLSSPVTKSFNRGEC

SEQ ID NO: 7957 - protein, 451 aa, Artificial Sequence
  source: /note="Description of Artificial Sequence: Synthetic polypeptide"
EVQLLESGGGLVQPGGSLRLSCAASGFTFSSYPMSWVRQAPGKGLEWVSAISGSGGSTYYADSVKGRFTISRDNSKNTLYLQMNSLRAEDTAVYYCAREGGSGSYYNGFDYWGQGTLVTVSSASTKGPSVFPLAPSSKSTSGGTAALGCLVKDYFPEPVTVSWNSGALTSGVHTFPAVLQSSGLYSLSSVVTVPSSSLGTQTYICNVNHKPSNTKVDKKVEPKSCDKTHTCPPCPAPELLGGPSVFLFPPKPKDTLMISRTPEVTCVVVDVSHEDPEVKFNWYVDGVEVHNAKTKPREEQYNSTYRVVSVLTVLHQDWLNGKEYKCKVSNKALPAPIEKTISKAKGQPREPQVYTLPPSRDELTKNQVSLTCLVKGFYPSDIAVEWESNGQPENNYKTTPPVLDSDGSFFLYSKLTVDKSRWQQGNVFSCSVMHEALHNHYTQKSLSLSPG

SEQ ID NO: 7958 - protein, 451 aa, Artificial Sequence
  source: /note="Description of Artificial Sequence: Synthetic polypeptide"
EVQLLESGGGLVQPGGSLRLSCAASGFTFSSYPMSWVRQAPGKGLEWVSAISGSGGSTYYADSVKGRFTISRDNSKNTLYLQMNSLRAEDTAVYYCAREGGSGSYFNGFDYWGQGTLVTVSSASTKGPSVFPLAPSSKSTSGGTAALGCLVKDYFPEPVTVSWNSGALTSGVHTFPAVLQSSGLYSLSSVVTVPSSSLGTQTYICNVNHKPSNTKVDKKVEPKSCDKTHTCPPCPAPELLGGPSVFLFPPKPKDTLMISRTPEVTCVVVDVSHEDPEVKFNWYVDGVEVHNAKTKPREEQYNSTYRVVSVLTVLHQDWLNGKEYKCKVSNKALPAPIEKTISKAKGQPREPQVYTLPPSRDELTKNQVSLTCLVKGFYPSDIAVEWESNGQPENNYKTTPPVLDSDGSFFLYSKLTVDKSRWQQGNVFSCSVMHEALHNHYTQKSLSLSPG

SEQ ID NO: 7959 - protein, 455 aa, Artificial Sequence
  source: /note="Description of Artificial Sequence: Synthetic polypeptide"
QVELVESGGGLVQPGGSLRLSCAASGFTFSSYAMSWVRQAPGKGLEWVSAINASGTRTYYADSVKGRFTISRDNSKNTLYLQMNSLRAEDTAVYYCARGKGNTHKPYGYVRYFDVWGQGTLVTVSSASTKGPSVFPLAPSSKSTSGGTAALGCLVEDYFPEPVTVSWNSGALTSGVHTFPAVLQSSGLYSLSSVVTVPSSSLGTQTYICNVNHKPSNTKVDEKVEPKSCDKTHTCPPCPAPELLGGPSVFLFPPKPKDTLMISRTPEVTCVVVDVSHEDPEVKFNWYVDGVEVHNAKTKPREEQYNSTYRVVSVLTVLHQDWLNGKEYKCKVSNKALPAPIEKTISKAKGQPREPQVCTLPPSRDELTKNQVSLSCAVKGFYPSDIAVEWESNGQPENNYKTTPPVLDSDGSFFLVSKLTVDKSRWQQGNVFSCSVMHEALHNHYTQKSLSLSPG

SEQ ID NO: 7960 - protein, 688 aa, Artificial Sequence
  source: /note="Description of Artificial Sequence: Synthetic polypeptide"
QVELVESGGGLVQPGGSLRLSCAASGFTFSSYAMSWVRQAPGKGLEWVSAINASGTRTYYADSVKGRFTISRDNSKNTLYLQMNSLRAEDTAVYYCARGKGNTHKPYGYVRYFDVWGQGTLVTVSSASTKGPSVFPLAPSSKSTSGGTAALGCLVEDYFPEPVTVSWNSGALTSGVHTFPAVLQSSGLYSLSSVVTVPSSSLGTQTYICNVNHKPSNTKVDEKVEPKSCDKTHTCPPCPAPELLGGPSVFLFPPKPKDTLMISRTPEVTCVVVDVSHEDPEVKFNWYVDGVEVHNAKTKPREEQYNSTYRVVSVLTVLHQDWLNGKEYKCKVSNKALPAPIEKTISKAKGQPREPQVYTLPPCRDELTKNQVSLWCLVKGFYPSDIAVEWESNGQPENNYKTTPPVLDSDGSFFLYSKLTVDKSRWQQGNVFSCSVMHEALHNHYTQKSLSLSPGGGSGGGGSGGGGSGGGGSAIQLTQSPSSLSASVGDRVTITCRASQSISSYLAWYQQKPGKAPKLLIYRASTLASGVPSRFSGSGSGTDFTLTISSLQPEDFATYYCQQNYASSNVDNTFGGGTKVEIKSSASTKGPSVFPLAPSSKSTSGGTAALGCLVKDYFPEPVTVSWNSGALTSGVHTFPAVLQSSGLYSLSSVVTVPSSSLGTQTYICNVNHKPSNTKVDKKVEPKSC

SEQ ID NO: 7961 - protein, 702 aa, Artificial Sequence
  source: /note="Description of Artificial Sequence: Synthetic polypeptide"
QVELVESGGGLVQPGGSLRLSCAASGFTFSSYAMSWVRQAPGKGLEWVSAINASGTRTYYADSVKGRFTISRDNSKNTLYLQMNSLRAEDTAVYYCARGKGNTHKPYGYVRYFDVWGQGTLVTVSSASTKGPSVFPLAPSSKSTSGGTAALGCLVEDYFPEPVTVSWNSGALTSGVHTFPAVLQSSGLYSLSSVVTVPSSSLGTQTYICNVNHKPSNTKVDEKVEPKSCDKTHTCPPCPAPELLGGPSVFLFPPKPKDTLMISRTPEVTCVVVDVSHEDPEVKFNWYVDGVEVHNAKTKPREEQYNSTYRVVSVLTVLHQDWLNGKEYKCKVSNKALPAPIEKTISKAKGQPREPQVYTLPPCRDELTKNQVSLWCLVKGFYPSDIAVEWESNGQPENNYKTTPPVLDSDGSFFLYSKLTVDKSRWQQGNVFSCSVMHEALHNHYTQKSLSLSPGGGSGGGGSGGGGSGGGGSQSMQESGPGLVKPSQTLSLTCTVSGFSLSSYAMSWIRQHPGKGLEWIGYIWSGGSTDYASWAKSRVTISKTSTTVSLKLSSVTAADTAVYYCARRYGTSYPDYGDASGFDPWGQGTLVTVSSASVAAPSVFIFPPSDEQLKSGTASVVCLLNNFYPREAKVQWKVDNALQSGNSQESVTEQDSKDSTYSLSSTLTLSKADYEKHKVYACEVTHQGLSSPVTKSFNRGEC

SEQ ID NO: 7962 - protein, 457 aa, Artificial Sequence
  source: /note="Description of Artificial Sequence: Synthetic polypeptide"
QVELVESGGGLVQPGGSLRLSCAASGFTFSSYAMSWVRQAPGKGLEWVSAINASGTRTYYADSVKGRFTISRDNSKNTLYLQMNSLRAEDTAVYYCARGKGNTHKPYGYVRYFDVWGQGTLVTVSSASTKGPSVFPLAPSSKSTSGGTAALGCLVEDYFPEPVTVSWNSGALTSGVHTFPAVLQSSGLYSLSSVVTVPSSSLGTQTYICNVNHKPSNTKVDEKVEPKSCDKTHTCPPCPAPELLGGPSVFLFPPKPKDTLMISRTPEVTCVVVDVSHEDPEVKFNWYVDGVEVHNAKTKPREEQYNSTYRVVSVLTVLHQDWLNGKEYKCKVSNKALPAPIEKTISKAKGQPREPQVCTLPPSRDELTKNQVSLSCAVKGFYPSDIAVEWESNGQPENNYKTTPPVLDSDGSFFLVSKLTVDKSRWQQGNVFSCSVMHEALHNHYTQKSLSLSPGKG

SEQ ID NO: 7963 - protein, 947 aa, Artificial Sequence
  source: /note="Description of Artificial Sequence: Synthetic polypeptide"
QVELVESGGGLVQPGGSLRLSCAASGFTFSSYAMSWVRQAPGKGLEWVSAINASGTRTYYADSVKGRFTISRDNSKNTLYLQMNSLRAEDTAVYYCARGKGNTHKPYGYVRYFDVWGQGTLVTVSSASTKGPSVFPLAPSSKSTSGGTAALGCLVEDYFPEPVTVSWNSGALTSGVHTFPAVLQSSGLYSLSSVVTVPSSSLGTQTYICNVNHKPSNTKVDEKVEPKSCDKTHTCPPCPAPELLGGPSVFLFPPKPKDTLMISRTPEVTCVVVDVSHEDPEVKFNWYVDGVEVHNAKTKPREEQYNSTYRVVSVLTVLHQDWLNGKEYKCKVSNKALPAPIEKTISKAKGQPREPQVYTLPPCRDELTKNQVSLWCLVKGFYPSDIAVEWESNGQPENNYKTTPPVLDSDGSFFLYSKLTVDKSRWQQGNVFSCSVMHEALHNHYTQKSLSLSPGGGSGGGGSGGGGSGGGGSAIQLTQSPSSLSASVGDRVTITCRASQSISSYLAWYQQKPGKAPKLLIYRASTLASGVPSRFSGSGSGTDFTLTISSLQPEDFATYYCQQNYASSNVDNTFGGGTKVEIKRTVAAPSVFIFPPSDEQLKSGTASVVCLLNNFYPREAKVQWKVDNALQSGNSQESVTEQDSKDSTYSLSSTLTLSKADYEKHKVYACEVTHQGLSSPVTKSFNRGECGGGGSGGGGSGGGGSGGGGSGGGGSGGGGSGGQSMQESGPGLVKPSQTLSLTCTVSGFSLSSYAMSWIRQHPGKGLEWIGYIWSGGSTDYASWAKSRVTISKTSTTVSLKLSSVTAADTAVYYCARRYGTSYPDYGDASGFDPWGQGTLVTVSSASTKGPSVFPLAPSSKSTSGGTAALGCLVKDYFPEPVTVSWNSGALTSGVHTFPAVLQSSGLYSLSSVVTVPSSSLGTQTYICNVNHKPSNTKVDKKVEPKSC

SEQ ID NO: 7964 - protein, 455 aa, Artificial Sequence
  source: /note="Description of Artificial Sequence: Synthetic polypeptide"
QVELVESGGGLVQPGGSLRLSCAASGFTFSSYAMSWVRQAPGKGLEWVSAINASGTRTYYADSVKGRFTISRDNSKNTLYLQMNSLRAEDTAVYYCARGKGNTHKPYGYVRYFDVWGQGTLVTVSSASTKGPSVFPLAPSSKSTSGGTAALGCLVKDYFPEPVTVSWNSGALTSGVHTFPAVLQSSGLYSLSSVVTVPSSSLGTQTYICNVNHKPSNTKVDKKVEPKSCDKTHTCPPCPAPELLGGPSVFLFPPKPKDTLMISRTPEVTCVVVDVSHEDPEVKFNWYVDGVEVHNAKTKPREEQYNSTYRVVSVLTVLHQDWLNGKEYKCKVSNKALPAPIEKTISKAKGQPREPQVCTLPPSRDELTKNQVSLSCAVKGFYPSDIAVEWESNGQPENNYKTTPPVLDSDGSFFLVSKLTVDKSRWQQGNVFSCSVMHEALHNHYTQKSLSLSPG

SEQ ID NO: 7965 - protein, 702 aa, Artificial Sequence
  source: /note="Description of Artificial Sequence: Synthetic polypeptide"
QVELVESGGGLVQPGGSLRLSCAASGFTFSSYAMSWVRQAPGKGLEWVSAINASGTRTYYADSVKGRFTISRDNSKNTLYLQMNSLRAEDTAVYYCARGKGNTHKPYGYVRYFDVWGQGTLVTVSSASTKGPSVFPLAPSSKSTSGGTAALGCLVKDYFPEPVTVSWNSGALTSGVHTFPAVLQSSGLYSLSSVVTVPSSSLGTQTYICNVNHKPSNTKVDKKVEPKSCDKTHTCPPCPAPELLGGPSVFLFPPKPKDTLMISRTPEVTCVVVDVSHEDPEVKFNWYVDGVEVHNAKTKPREEQYNSTYRVVSVLTVLHQDWLNGKEYKCKVSNKALPAPIEKTISKAKGQPREPQVYTLPPCRDELTKNQVSLWCLVKGFYPSDIAVEWESNGQPENNYKTTPPVLDSDGSFFLYSKLTVDKSRWQQGNVFSCSVMHEALHNHYTQKSLSLSPGGGSGGGGSGGGGSGGGGSQSMQESGPGLVKPSQTLSLTCTVSGFSLSSYAMSWIRQHPGKGLEWIGYIWSGGSTDYASWAKSRVTISKTSTTVSLKLSSVTAADTAVYYCARRYGTSYPDYGDASGFDPWGQGTLVTVSSASVAAPSVFIFPPSDEQLKSGTASVVCLLNNFYPREAKVQWKVDNALQSGNSQESVTEQDSKDSTYSLSSTLTLSKADYEKHKVYACEVTHQGLSSPVTKSFNRGEC

SEQ ID NO: 7966 - protein, 456 aa, Artificial Sequence
  source: /note="Description of Artificial Sequence: Synthetic polypeptide"
QVELVESGGGLVQPGGSLRLSCAASGFTFSSYAMSWVRQAPGKGLEWVSAINASGTRTYYADSVKGRFTISRDNSKNTLYLQMNSLRAEDTAVYYCARGKGNTHKPYGYVRYFDVWGQGTLVTVSSASTKGPSVFPLAPSSKSTSGGTAALGCLVKDYFPEPVTVSWNSGALTSGVHTFPAVLQSSGLYSLSSVVTVPSSSLGTQTYICNVNHKPSNTKVDKKVEPKSCDKTHTCPPCPAPELLGGPSVFLFPPKPKDTLMISRTPEVTCVVVDVSHEDPEVKFNWYVDGVEVHNAKTKPREEQYNSTYRVVSVLTVLHQDWLNGKEYKCKVSNKALPAPIEKTISKAKGQPREPQVYTLPPSRDELTKNQVSLTCLVKGFYPSDIAVEWESNGQPENNYKTTPPVLDSDGSFFLYSKLTVDKSRWQQGNVFSCSVMHEALHNHYTQKSLSLSPGK

SEQ ID NO: 7967 - protein, 454 aa, Artificial Sequence
  source: /note="Description of Artificial Sequence: Synthetic polypeptide"
EVQLVESGGGLVQPGGSLRLSCSASGFTFSSFGMHWVRQAPGKGLEWVAYISSGSSTIYYGDTVKGRFTISRDNAKNSLFLQMSSLRAEDTAVYYCAREGGYYYGRSYYTMDYWGQGTTVTVSSASTKGPSVFPLAPSSKSTSGGTAALGCLVKDYFPEPVTVSWNSGALTSGVHTFPAVLQSSGLYSLSSVVTVPSSSLGTQTYICNVNHKPSNTKVDKRVEPKSCDKTHTCPPCPAPELLGGPSVFLFPPKPKDTLMISRTPEVTCVVVDVSHEDPEVKFNWYVDGVEVHNAKTKPREEQYNSTYRVVSVLTVLHQDWLNGKEYKCKVSNKALPAPIEKTISKAKGQPREPQVYTLPPSREEMTKNQVSLTCLVKGFYPSDIAVEWESNGQPENNYKTTPPVLDSDGSFFLYSKLTVDKSRWQQGNVFSCSVMHEALHNHYTQKSLSLSPGK

SEQ ID NO: 7968 - protein, 326 aa, Homo sapiens
ASTKGPSVFPLAPCSRSTSESTAALGCLVKDYFPEPVTVSWNSGALTSGVHTFPAVLQSSGLYSLSSVVTVPSSSLGTKTYTCNVDHKPSNTKVDKRVESKYGPPCPPCPAPEFLGGPSVFLFPPKPKDTLMISRTPEVTCVVVDVSQEDPEVQFNWYVDGVEVHNAKTKPREEQFNSTYRVVSVLTVLHQDWLNGKEYKCKVSNKGLPSSIEKTISKAKGQPREPQVYTLPPSQEEMTKNQVSLTCLVKGFYPSDIAVEWESNGQPENNYKTTPPVLDSDGSFFLYSRLTVDKSRWQEGNVFSCSVMHEALHNHYTQKSLSLSLG

SEQ ID NO: 7969 - protein, 219 aa, Artificial Sequence
  source: /note="Description of Artificial Sequence: Synthetic polypeptide"
DVVMTQSPLSLPVTLGQPASISCKSSQSLLYSRGKTYLNWFQQRPGQSPRRLIYDVSKLDSGVPDRFSGSGSGTDFTLKISRVEAEDVGVYYCVQGTHYPFTFGQGTKLEIKRTVAAPSVFIFPPSDEQLKSGTASVVCLLNNFYPREAKVQWKVDNALQSGNSQESVTEQDSKDSTYSLSSTLTLSKADYEKHKVYACEVTHQGLSSPVTKSFNRGEC

SEQ ID NO: 7970 - protein, 219 aa, Artificial Sequence
  source: /note="Description of Artificial Sequence: Synthetic polypeptide"
DIQMTQSPSTLSASVGDRVTITCKSSQSLLYSRGKTYLNWLQQKPGKAPKLLIYAVSKLDSGVPSRFSGSGSGTEFTLTISSLQPDDFATYYCVQGTHYPFTFGQGTKLEIKRTVAAPSVFIFPPSDEQLKSGTASVVCLLNNFYPREAKVQWKVDNALQSGNSQESVTEQDSKDSTYSLSSTLTLSKADYEKHKVYACEVTHQGLSSPVTKSFNRGEC

SEQ ID NO: 7971 - protein, 442 aa, Artificial Sequence
  source: /note="Description of Artificial Sequence: Synthetic polypeptide"
EVQLVESGGGLVQPGGSLRLSCAASGFTFSRYSMSWVRQAPGKGLELVAQINSVGNSTYYPDTVKGRFTISRDNAKNTLYLQMNSLRAEDTAVYYCASGDYWGQGTLVTVSSASTKGPSVFPLAPSSKSTSGGTAALGCLVKDYFPEPVTVSWNSGALTSGVHTFPAVLQSSGLYSLSSVVTVPSSSLGTQTYICNVNHKPSNTKVDKKVEPKSCDKTHTCPPCPAPELLGGPSVFLFPPKPKDTLMISRTPEVTCVVVDVSHEDPEVKFNWYVDGVEVHNAKTKPREEQYNSTYRVVSVLTVLHQDWLNGKEYKCKVSNKALPAPIEKTISKAKGQPREPQVYTLPPSRDELTKNQVSLTCLVKGFYPSDIAVEWESNGQPENNYKTTPPVLDSDGSFFLYSKLTVDKSRWQQGNVFSCSVMHEALHNHYTQKSLSLSPGK

SEQ ID NO: 7972 - protein, 214 aa, Artificial Sequence
  source: /note="Description of Artificial Sequence: Synthetic polypeptide"
DIQMTQSPSTLSASVGDRVTITCRASQSLGNWLAWYQQKPGKAPKLLIYQASTLESGVPSRFSGSGSGTEFTLTISSLQPDDFATYYCQHYKGSFWTFGQGTKVEIKRTVAAPSVFIFPPSDEQLKSGTASVVCLLNNFYPREAKVQWKVDNALQSGNSQESVTEQDSKDSTYSLSSTLTLSKADYEKHKVYACEVTHQGLSSPVTKSFNRGEC

SEQ ID NO: 7973 - protein, 214 aa, Artificial Sequence
  source: /note="Description of Artificial Sequence: Synthetic polypeptide"
DIQMTQSPSTLSASVGDRVTITCRASQSLGNYLAWYQQKPGKAPKLLIYDASTLESGVPSRFSGSGSGTEFTLTISSLQPDDFATYYCQHYKGSFWTFGQGTKVEIKRTVAAPSVFIFPPSDEQLKSGTASVVCLLNNFYPREAKVQWKVDNALQSGNSQESVTEQDSKDSTYSLSSTLTLSKADYEKHKVYACEVTHQGLSSPVTKSFNRGEC

SEQ ID NO: 7974 - protein, 219 aa, Artificial Sequence
  source: /note="Description of Artificial Sequence: Synthetic polypeptide"
DVVMTQSPLSLPVTPGAPASISCRSSQSIVHSNGNTYLEWYLQKPGQSPKLLIYKVSNRFSGVPDRFSGSGSGTDFTLRISRVEAEDVGIYYCFQGSHVPPTFGPGTKLEIKRTVAAPSVFIFPPSDEQLKSGTASVVCLLNNFYPREAKVQWKVDNALQSGNSQESVTEQDSKDSTYSLSSTLTLSKADYEKHKVYACEVTHQGLSSPVTKSFNRGEC

SEQ ID NO: 7975 - protein, 115 aa, Artificial Sequence
  source: /note="Description of Artificial Sequence: Synthetic polypeptide"
QVQLVQSGAEVKKPGSSVKVSCKASGYTFTDYYINWVRQAPGQGLEWMGWINPGSGNTKYNEKFKGRVTITADESTSTAYMELSSLRSEDTAVYYCTREGETVYWGQGTLVTVSS

SEQ ID NO: 7976 - protein, 40 aa, Artificial Sequence
  source: /note="Description of Artificial Sequence: Synthetic polypeptide"
  MOD_RES (1)..(1): Pyroglutamic acid
XFRHDSGYEVHHQKLVFFAEDVGSNKGAIIGLMVGGVVIA

SEQ ID NO: 7977 - protein, 112 aa, Artificial Sequence
  source: /note="Description of Artificial Sequence: Synthetic polypeptide"
  VARIANT (1)..(1): /replace="Gln"
  VARIANT (7)..(7): /replace="Leu"
  VARIANT (46)..(46): /replace="Val" or "Asp" or "Ser"
  VARIANT (63)..(63): /replace="Ser"
  VARIANT (75)..(75): /replace="Ser" or "Val" or "Thr"
  VARIANT (76)..(76): /replace="Arg"
  VARIANT (89)..(89): /replace="Asp"
  VARIANT (107)..(107): /replace="Thr"
  SITE (1)..(112): /note="Variant residues given in the sequence have no preference with respect to those in the annotations for variant positions"
EVQLVESGGGLVQPGGSLRLSCAASGFTFSRYSMSWVRQAPGKGLELVAQINSVGNSTYYPDTVKGRFTISRDNAKNTLYLQMNSLRAEDTAVYYCASGDYWGQGTLVTVSS

SEQ ID NO: 7978 - protein, 112 aa, Artificial Sequence; identical to SEQ ID NO: 7977
  source: /note="Description of Artificial Sequence: Synthetic polypeptide"

SEQ ID NO: 7979 - protein, 112 aa, Artificial Sequence
  source: /note="Description of Artificial Sequence: Synthetic polypeptide"
  MOD_RES (56)..(56): Cys pegylated with a 20KD PEG via maleimide
EVQLVESGGGLVKPGGSLRLSCAASGYTFSRYSMSWVRQAPGKGLEWVGQINIRGXNTYYPDTVKGRFTISRDDSKNTLYLQMNSLKTEDTAVYYCTTGDFWGQGTLVTVSS

SEQ ID NO: 7980 - protein, 112 aa, Artificial Sequence
  source: /note="Description of Artificial Sequence: Synthetic polypeptide"
EVQLVESGGGLVKPGGSLRLSCAASGYTFSRYSMSWVRQAPGKGLEWVGQINIRGNNTYYPDTVKGRFTISRDDSKNTLYLQMNSLKTEDTAVYYCTTGDFWGQGTLVTVSS

SEQ ID NO: 7981 - protein, 118 aa, Artificial Sequence; identical to SEQ ID NO: 7826
  source: /note="Description of Artificial Sequence: Synthetic polypeptide"
  VARIANT (49)..(49): /replace="Ala"
  SITE (1)..(118): /note="Variant residues given in the sequence have no preference with respect to those in the annotations for variant positions"

SEQ ID NO: 7982 - protein, 122 aa, Artificial Sequence
  source: /note="Description of Artificial Sequence: Synthetic polypeptide"
EVQLLESGGGLVQPGGSLRLSCAASGFTFSSYPMSWVRQAPGKGLEWVSAISGSGGSTYYADSVKGRFTISRDNSKNTLYLQMNSLRAEDTAVYYCAREGGSGSYYNGFDYWGQGTLVTVSS

SEQ ID NO: 7983 - protein, 122 aa, Artificial Sequence
  source: /note="Description of Artificial Sequence: Synthetic polypeptide"
EVQLLESGGGLVQPGGSLRLSCAASGFTFSSYPMSWVRQAPGKGLEWVSAISGSGGSTYYADSVKGRFTISRDNSKNTLYLQMNSLRAEDTAVYYCAREGGSGSYFNGFDYWGQGTLVTVSS

SEQ ID NO: 7984 - protein, 124 aa, Artificial Sequence
  source: /note="Description of Artificial Sequence: Synthetic polypeptide"
EVQLVESGGGLVQPGGSLRLSCSASGFTFSSFGMHWVRQAPGKGLEWVAYISSGSSTIYYGDTVKGRFTISRDNAKNSLFLQMSSLRAEDTAVYYCAREGGYYYGRSYYTMDYWGQGTTVTVSS

SEQ ID NO: 7985 - protein, 124 aa, Artificial Sequence; identical to SEQ ID NO: 7984
  source: /note="Description of Artificial Sequence: Synthetic polypeptide"
  VARIANT (37)..(37): /replace="Ile"
  VARIANT (38)..(38): /replace="Gln"
  VARIANT (40)..(40): /replace="Asn" or "Thr"
  SITE (1)..(124): /note="Variant residues given in the sequence have no preference with respect to those in the annotations for variant positions"

SEQ ID NO: 7986 - protein, 124 aa, Artificial Sequence
  source: /note="Description of Artificial Sequence: Synthetic polypeptide"
EVQLVESGGGLVQPGGSLRLSCSASGFTFSSFGMHWVRQNPGKGLEWVAYISSGSSTIYYGDTVKGRFTISRDNAKNSLFLQMSSLRAEDTAVYYCAREGGYYYGRSYYTMDYWGQGTTVTVSS

SEQ ID NO: 7987 - protein, 124 aa, Artificial Sequence
  source: /note="Description of Artificial Sequence: Synthetic polypeptide"
EVQLVESGGGLVQPGGSLRLSCSASGFTFSSFGMHWVRQTPGKGLEWVAYISSGSSTIYYGDTVKGRFTISRDNAKNSLFLQMSSLRAEDTAVYYCAREGGYYYGRSYYTMDYWGQGTTVTVSS

SEQ ID NO: 7988 - protein, 124 aa, Artificial Sequence
  source: /note="Description of Artificial Sequence: Synthetic polypeptide"
EVQLVESGGGLVQPGGSLRLSCSASGFTFSSFGMHWVQQAPGKGLEWVAYISSGSSTIYYGDTVKGRFTISRDNAKNSLFLQMSSLRAEDTAVYYCAREGGYYYGRSYYTMDYWGQGTTVTVSS

SEQ ID NO: 7989 - protein, 124 aa, Artificial Sequence
  source: /note="Description of Artificial Sequence: Synthetic polypeptide"
EVQLVESGGGLVQPGGSLRLSCSASGFTFSSFGMHWIRQAPGKGLEWVAYISSGSSTIYYGDTVKGRFTISRDNAKNSLFLQMSSLRAEDTAVYYCAREGGYYYGRSYYTMDYWGQGTTVTVSS

SEQ ID NO: 7990 - protein, 146 aa, Artificial Sequence
  source: /note="Description of Artificial Sequence: Synthetic polypeptide"
MGWSGVFLFLLSGTAGVHSEVQLQQSGPELVKPGASMKISCKASGYSFTGYTMNWVKQSHGKNLEWIGLINPYSGVTRYNQKFKGKATLIVDKSSSTAYMELLSLTSEDSAVYYCTREAKREWDETYWGQGTLVTVSAAKTTPPSV

SEQ ID NO: 7991 - protein, 149 aa, Artificial Sequence
  source: /note="Description of Artificial Sequence: Synthetic polypeptide"
MGWSGVFIFLLSGTAGVHSEVQLQQSGPELVKPGASMKISCKASGYSFTGYTMNWVKQSHGKNLEWIGLINPYNGVTRYNQKFKGKATLIVDKSSSTAYMELLSLTSEDSAVYYCTREAKREWDETYWGQGTLVTVSAAKTTPPSVYPL

SEQ ID NO: 7992 - protein, 152 aa, Artificial Sequence
  source: /note="Description of Artificial Sequence: Synthetic polypeptide"
MDFGLSLLIFVLILKGVQCEVKLVESGGGLVQPGGSRKLSCAASGFTFSDYGMAWVRQAPGKGPEWVAFISNLAYSIYYADTVTGRFTISRENAKNTLYLEMSSLRSEDTAMYYCARYDYDNILDYVMDYWGQGTSVTVSSAKTTPPSVYPL

SEQ ID NO: 7993 - protein, 145 aa, Artificial Sequence
  source: /note="Description of Artificial Sequence: Synthetic polypeptide"
MGWSGVFLFLLSVTEGVHSQVQLQQSGAELVRPGSSVKISCKASGYIFNNYWINWVKQRPGQGLEWIGQIYPGDGDTNYNGKFKGKATLTADKSSSTAYMQLSSLTSEDSAVYFCAREGYIVYWGQGTLVTVSAAKTTPPSVYPL

SEQ ID NO: 7994 - protein, 115 aa, Artificial Sequence
  source: /note="Description of Artificial Sequence: Synthetic polypeptide"
QLQQSGAELMKPGASVKISCKATGYTFSSYWIEWVKQRPGHGLEWIGEILPGRGSTHYNEKFKGKATFTADTSSNTAYMQLSSLTSEDSAVYYCARSPITTSDYWGQGTTLTVSS

SEQ ID NO: 7995 - protein, 98 aa, Artificial Sequence
  source: /note="Description of Artificial Sequence: Synthetic polypeptide"
AELKKPGASVKISCKATGYTFRSYWIEWVKQRPGHGLEWIGEILPGRGSTKYNEKFKGKATFTADTSSNTANMQLSSLTSEDSAVYYCARSPITTSDY

SEQ ID NO: 7996 - protein, 115 aa, Artificial Sequence
  source: /note="Description of Artificial Sequence: Synthetic polypeptide"
QIQLQQSGPELVKPGAAVKISCKASGYTFTDYYLNWVKQKPGQGLEWIGWIYPGSGNVKYNEKFKGKATLTADTSSNTAHMQLSSLTSEDTAVYFCTREGLIVYWGQGTLVTVSA

SEQ ID NO: 7997 - protein, 115 aa, Artificial Sequence
  source: /note="Description of Artificial Sequence: Synthetic polypeptide"
QIQLQQSGPDLVKPGASVKISCKASGYTFTDYYINWVKQKPGQGLEWIGWLNPGSGNTKYNEKFKGKATMTVDTTSSTVYMQLSSLTSEDSAVYFCTREGPIDYWGRGTSVTVSS

SEQ ID NO: 7998 - protein, 439 aa, Artificial Sequence
  source: /note="Description of Artificial Sequence: Synthetic polypeptide"
EVQLVESGGGLVQPGGSLRLSCAASGFTFSSYGMSWVRQAPGKGLELVASINSNGGSTYYPDSVKGRFTISRDNAKNSLYLQMNSLRAEDTAVYYCASGDYWGQGTTVTVSSASTKGPSVFPLAPCSRSTSESTAALGCLVKDYFPEPVTVSWNSGALTSGVHTFPAVLQSSGLYSLSSVVTVPSSSLGTKTYTCNVDHKPSNTKVDKRVESKYGPPCPPCPAPEFLGGPSVFLFPPKPKDTLMISRTPEVTCVVVDVSQEDPEVQFNWYVDGVEVHNAKTKPREEQFNSTYRVVSVLTVLHQDWLNGKEYKCKVSNKGLPSSIEKTISKAKGQPREPQVYTLPPSQEEMTKNQVSLTCLVKGFYPSDIAVEWESNGQPENNYKTTPPVLDSDGSFFLYSRLTVDKSRWQEGNVFSCSVMHEALHNHYTQKSLSLSLGK

SEQ ID NO: 7999 - protein, 131 aa, Artificial Sequence
  source: /note="Description of Artificial Sequence: Synthetic polypeptide"
MGWSCIILFLVATATGVHSEVQLVESGGGLVQPGGSLKLSCAASGFTFSSYGMSWVRQTPDKRLELVASINSNGGSTYYPDSVKGRFTISRDNAKNTLYLQMSSLKSEDTAMYYCASGDYWGQGSTLTVSS

SEQ ID NO: 8000 - protein, 112 aa, Artificial Sequence
  source: /note="Description of Artificial Sequence: Synthetic polypeptide"
DVVMTQSPLSLPVTLGQPASISCKSSQSLLYSRGKTYLNWFQQRPGQSPRRLIYDVSKLDSGVPDRFSGSGSGTDFTLKISRVEAEDVGVYYCVQGTHYPFTFGQGTKLEIK

SEQ ID NO: 8001 - protein, 112 aa, Artificial Sequence
  source: /note="Description of Artificial Sequence: Synthetic polypeptide"
DIQMTQSPSTLSASVGDRVTITCKSSQSLLYSRGKTYLNWLQQKPGKAPKLLIYAVSKLDSGVPSRFSGSGSGTEFTLTISSLQPDDFATYYCVQGTHYPFTFGQGTKLEIK

SEQ ID NO: 8002 - protein, 113 aa, Artificial Sequence
  source: /note="Description of Artificial Sequence: Synthetic polypeptide"
  VARIANT (2)..(2): /replace="Ile"
  VARIANT (7)..(7): /replace="Thr"
  VARIANT (14)..(14): /replace="Ser"
  VARIANT (15)..(15): /replace="Pro"
  VARIANT (30)..(30): /replace="Val"
  VARIANT (50)..(50): /replace="Gln" or "Lys"
  VARIANT (88)..(88): /replace="Leu"
  VARIANT (105)..(105): /replace="Gly"
  VARIANT (108)..(108): /replace="Arg"
  VARIANT (109)..(109): /replace="Leu"
  SITE (1)..(113): /note="Variant residues given in the sequence have no preference with respect to those in the annotations for variant positions"
DVVMTQSPLSLPVTLGQPASISCRSSQSLIYSDGNAYLHWFLQKPGQSPRLLIYKVSNRFSGVPDRFSGSGSGTDFTLKISRVEAEDVGVYYCSQSTHVPWTFGQGTKVEIKR

SEQ ID NO: 8003 - protein, 113 aa, Artificial Sequence; identical to SEQ ID NO: 8002
  source: /note="Description of Artificial Sequence: Synthetic polypeptide"

SEQ ID NO: 8004 - protein, 112 aa, Artificial Sequence
  source: /note="Description of Artificial Sequence: Synthetic polypeptide"
DIVMTQTPLSLSVTPGQPASISCSSSQSLIYSDGNAYLHWYLQKPGQSPQLLIYKVSNRFSGVPDRFSGSGSGTDFTLKISRVEAEDVGVYYCTQSTHSPWTFGGGTKVEIK

SEQ ID NO: 8005 - protein, 107 aa, Artificial Sequence
  source: /note="Description of Artificial Sequence: Synthetic polypeptide"
DIQMTQSPSTLSASVGDRVTITCRASQSLGNWLAWYQQKPGKAPKLLIYQASTLESGVPSRFSGSGSGTEFTLTISSLQPDDFATYYCQHYKGSFWTFGQGTKVEIK

SEQ ID NO: 8006 - protein, 107 aa, Artificial Sequence
  source: /note="Description of Artificial Sequence: Synthetic polypeptide"
DIQMTQSPSTLSASVGDRVTITCRASQSLGNYLAWYQQKPGKAPKLLIYDASTLESGVPSRFSGSGSGTEFTLTISSLQPDDFATYYCQHYKGSFWTFGQGTKVEIK

SEQ ID NO: 8007 - protein, 112 aa, Artificial Sequence; identical to SEQ ID NO: 7796
  source: /note="Description of Artificial Sequence: Synthetic polypeptide"
  VARIANT (13)..(13): /replace="Ala"
  VARIANT (17)..(17): /replace="Asp" or "Glu" or "Gln" or "a functional analogue thereof"
  VARIANT (21)..(21): /replace="Val"
  VARIANT (79)..(79): /replace="Thr" or "Lys" or "Ala" or "Gly" or "a functional analogue"
  VARIANT (81)..(81): /replace="Gln"
  VARIANT (82)..(82): /replace="Ser" or "Cys" or "Gly" or "Asn" or "a functional analogue"
  VARIANT (84)..(84): /replace="Asp"
  SITE (1)..(112): /note="Variant residues given in the sequence have no preference with respect to those in the annotations for variant positions"

SEQ ID NO: 8008 - protein, 112 aa, Artificial Sequence
  source: /note="Description of Artificial Sequence: Synthetic polypeptide"
DVVMTQSPLSLPVTPGDPASVSCRSSQSIVHSNGNTYLEWYLQKPGQSPKLLIYKVSNRFSGVPDRFSGSGSGTDFTLTIQRVEAEDVGIYYCFQGSHVPPTFGPGTKLEIK

SEQ ID NO: 8009 - protein, 112 aa, Artificial Sequence
  source: /note="Description of Artificial Sequence: Synthetic polypeptide"
DVVMTQSPLSLPVTPGDPASVSCRSSQSIVHSNGNTYLEWYLQKPGQSPKLLIYKVSNRFSGVPDRFSGSGSGTDFTLTISRVDAEDVGIYYCFQGSHVPPTFGPGTKLEIK

SEQ ID NO: 8010 - protein, 112 aa, Artificial Sequence
  source: /note="Description of Artificial Sequence: Synthetic polypeptide"
DVVMTQSPLSLPATPGDPASISCRSSQSIVHSNGNTYLEWYLQKPGQSPKLLIYKVSNRFSGVPDRFSGSGSGTDFTLTIQRVEAEDVGIYYCFQGSHVPPTFGPGTKLEIK

SEQ ID NO: 8011 - protein, 112 aa, Artificial Sequence
  source: /note="Description of Artificial Sequence: Synthetic polypeptide"
DVVMTQSPLSLPATPGDPASISCRSSQSIVHSNGNTYLEWYLQKPGQSPKLLIYKVSNRFSGVPDRFSGSGSGTDFTLTISRVDAEDVGIYYCFQGSHVPPTFGPGTKLEIK

SEQ ID NO: 8012 - protein, 112 aa, Artificial Sequence
  source: /note="Description of Artificial Sequence: Synthetic polypeptide"
DVVMTQSPLSLPVTPGDPASISCRSSQSIVHSNGNTYLEWYLQKPGQSPKLLIYKVSNRFSGVPDRFSGSGSGTDFTLRISRVEAEDVGIYYCFQGSHVPPTFGPGTKLEIK

SEQ ID NO: 8013 - protein, 112 aa, Artificial Sequence
  source: /note="Description of Artificial Sequence: Synthetic polypeptide"
DVVMTQSPLSLPVTPGDPASISCRSSQSIVHSNGNTYLEWYLQKPGQSPKLLIYKVSNRFSGVPDRFSGSGSGTDFTLTISRVEAEDVGIYYCFQGSHVPPTFGPGTKLEIK

SEQ ID NO: 8014 - protein, 112 aa, Artificial Sequence
  source: /note="Description of Artificial Sequence: Synthetic polypeptide"
DVVMTQSPLSLPVTPGDPASISCRSSQSIVHSNGNTYLEWYLQKPGQSPKLLIYKVSNRFSGVPDRFSGSGSGTDFTLTISSVEAEDVGIYYCFQGSHVPPTFGPGTKLEIK

SEQ ID NO: 8015 - protein, 112 aa, Artificial Sequence
  source: /note="Description of Artificial Sequence: Synthetic polypeptide"
DVVMTQSPLSLPVTPGDPASISCRSSQSIVHSNGNTYLEWYLQKPGQSPKLLIYKVSNRFSGVPDRFSGSGSGTDFTLRISSVEAEDVGIYYCFQGSHVPPTFGPGTKLEIK

SEQ ID NO: 8016 - protein, 110 aa, Artificial Sequence
  source: /note="Description of Artificial Sequence: Synthetic polypeptide"
AIQLTQSPSSLSASVGDRVTITCRASQSISSYLAWYQQKPGKAPKLLIYRASTLASGVPSRFSGSGSGTDFTLTISSLQPEDFATYYCQQNYASSNVDNTFGGGTKVEIK

SEQ ID NO: 8017 - protein, 145 aa, Artificial Sequence
  source: /note="Description of Artificial Sequence: Synthetic polypeptide"
MVSSAQFLFLLVLWIQETNGDVVMTQTPLTLSVTIGQPASISCKSSQSLLYSDGKTYLNWLLQRPGQSPMRLIYLVSKLDSGVPDRFTGSGSGTDFTLKISRVEAEDLGVYYCVQGTHFPFTFGSGTKLEIKRADAAPTVSIFPP

SEQ ID NO: 8018 - protein, 146 aa, Artificial Sequence
  source: /note="Description of Artificial Sequence: Synthetic polypeptide"
MVSTAQFLFLLVLWIQETNGDVVMTQTPLTLSVTIGQPASISCKSSQSLLYSDGKTYLNWLLQRPGQSPMRLIYLVSKLDSGVPDRFTGSGSGTDFTLKISRVEAEDLGVYYCVQGTHFPFTFGSGTKLEIKRADAAPTVSIFPPS

SEQ ID NO: 8019 - protein, 146 aa, Artificial Sequence
  source: /note="Description of Artificial Sequence: Synthetic polypeptide"
MKLPVRLLVLVFWIPVSSSDVVMTQTPLSLPVSLGDQASISCRSSQSLVHSDGNTYLHWYLQKPGQSPKLLIYKVSNRFSGVPDRFSGSGSGTDFTLKISRVEAEDLGVYFCSQSTHVPPTFGGGTKLEIKRADAAPTVSIFPPSS

SEQ ID NO: 8020 - protein, 144 aa, Artificial Sequence
  source: /note="Description of Artificial Sequence: Synthetic polypeptide"
MKLPVRLLVLWIQETKGDVVLTQTPLTLSVTIGQPASISCKSSQSLLYSNGKTYLNWLLQRPGQSPKRLIYVVSKLDSGVPDRFTGSGSGTDFTLKISRVEAEDLGVYYCVQGTHFPFTFGSGTKLEIKRADAAPTVSIFPPSS

SEQ ID NO: 8021 - protein, 107 aa, Artificial Sequence
  source: /note="Description of Artificial Sequence: Synthetic polypeptide"
DVVMTQTPLSLPVSLGDQASISCRSSQSLLHSNGNTYLHWYLQKPGQSPKLLIYKVSNRFSGVPDRFSGSGSGTDFTLKISRVEAEDLGVYFCSQSTHVPLTFGAGT

SEQ ID NO: 8022 - protein, 86 aa, Artificial Sequence
  source: /note="Description of Artificial Sequence: Synthetic polypeptide"
SCRSSQSLVHSNGNTYLHWYLQKPGQSPKLLIYKVSNRFSGVPDRFSGSGSGTDFTLKISRVEAEDLGVYFCSQSTHVPLTFGAGT

SEQ ID NO: 8023 - protein, 112 aa, Artificial Sequence
  source: /note="Description of Artificial Sequence: Synthetic polypeptide"
DVVLTQTPFTLSVTIGQPASISCKSSQSLLHSNGESYLNWLFQRPGQSPKRLIYAVSKLDSGVPDRFTGSGSGTDFTLKISRVEAEDLGVYYCVQGTHFPFTFGGGTKLEIK

SEQ ID NO: 8024 - protein, 112 aa, Artificial Sequence
  source: /note="Description of Artificial Sequence: Synthetic polypeptide"
DVVLTQTPLTLSVTIGQPASISCKSSQSLLYSNGKTYLNWLLQRPGQSPKRLIYVVSKLDSGVPDRFTGSGSGTDFTLKISRVEAEDLGVYYCVQGTHYPFTFGGGTKLEIK

SEQ ID NO: 8025 - protein, 131 aa, Artificial Sequence
  source: /note="Description of Artificial Sequence: Synthetic polypeptide"
MGWSCIILFLVATATGVHSDVVMTQTPLSLPVSLGDQASISCRSSQSLVYSNGDTYLHWYLQKPGQSPKLLIYKVSNRFSGVPDRFSGSGSGTDFTLKISRVEAEDLGVYFCSQSTHVPWTFGGGTKLEIK

SEQ ID NO: 8026 - protein, 131 aa, Artificial Sequence
  source: /note="Description of Artificial Sequence: Synthetic polypeptide"
MGWSCIILFLVATATGVHSDIVMTQSPLSLPVTPGEPASISCRSSQSLVYSNGDTYLHWYLQKPGQSPQLLIYKVSNRFSGVPDRFSGSGSGTDFTLKISRVEAEDVGVYYCSQSTHVPWTFGQGTKVEIK

SEQ ID NO: 8027 - protein, 9 aa, Artificial Sequence
  source: /note="Description of Artificial Sequence: Synthetic peptide"
WQGTHFPFT

SEQ ID NO: 8028 - protein, 17 aa, Artificial Sequence
  source: /note="Description of Artificial Sequence: Synthetic peptide"
ATNPNNGYTDYNQRFKD

SEQ ID NO: 8029 - protein, 15 aa, Artificial Sequence
  source: /note="Description of Artificial Sequence: Synthetic peptide"
EEDHAGSGSYLSMDV

SEQ ID NO: 8030 - protein, 6 aa, Artificial Sequence
  source: /note="Description of Artificial Sequence: Synthetic peptide"
GGHLAY

SEQ ID NO: 8031 - protein, 5 aa, Artificial Sequence
  source: /note="Description of Artificial Sequence: Synthetic peptide"
KAWMS

SEQ ID NO: 8032 - protein, 7 aa, Artificial Sequence
  source: /note="Description of Artificial Sequence: Synthetic peptide"
KDSERPS

SEQ ID NO: 8033 - protein, 17 aa, Artificial Sequence
  source: /note="Description of Artificial Sequence: Synthetic peptide"
KSSQNVLYSSNNKNYLA

SEQ ID NO: 8034 - protein, 5 aa, Artificial Sequence
  source: /note="Description of Artificial Sequence: Synthetic peptide"
NYAMH

SEQ ID NO: 8035 - protein, 5 aa, Artificial Sequence
  source: /note="Description of Artificial Sequence: Synthetic peptide"
NYWMN

SEQ ID NO: 8036 - protein, 11 aa, Artificial Sequence
  source: /note="Description of Artificial Sequence: Synthetic peptide"
  MOD_RES (10)..(11): Any amino acid
QQYYSSPLTXX

SEQ ID NO: 8037 - protein, 11 aa, Artificial Sequence
  source: /note="Description of Artificial Sequence: Synthetic peptide"
QSPDSTNTYEV

SEQ ID NO: 8038 - protein, 19 aa, Artificial Sequence
  source: /note="Description of Artificial Sequence: Synthetic peptide"
RIKSTADGGTTSYAAPVEG

SEQ ID NO: 8039 - protein, 11 aa, Artificial Sequence
  source: /note="Description of Artificial Sequence: Synthetic peptide"
SGEALPMQFAH

SEQ ID NO: 8040 - protein, 17 aa, Artificial Sequence
  source: /note="Description of Artificial Sequence: Synthetic peptide"
WINAGNGKRKYSQKFQD

SEQ ID NO: 8041 - protein, 108 aa, Artificial Sequence
  source: /note="Description of Artificial Sequence: Synthetic polypeptide"
  SITE (23)..(33): /note="CDR1"
  SITE (49)..(55): /note="CDR2"
  SITE (88)..(98): /note="CDR3"
QSVLTQPPSVSVSPGQTARITCSGEALPMQFAHWYQQRPGKAPVIVVYKDSERPSGVPERFSGSSSGTTATLTITGVQAEDEADYYCQSPDSTNTYEVFGGGTKLTVL

SEQ ID NO: 8042 - DNA, 363 bp, Homo sapiens
  CDS (1)..(363): /note="NI202.3G12VHB1 variable heavy chain (VH) sequence"
  misc_feature (91)..(105): /note="complementarity determining region (CDR) VHCDR1"
  misc_feature (148)..(198): /note="complementarity determining region (CDR) VHCDR2"
  misc_feature (295)..(330): /note="complementarity determining region (CDR) CDRH3"
  misc_feature (295)..(330): /note="complementarity determining region (CDR) VHCDR3"
gaggtgcagctggtgcagtctggggctgaggtgaagaagccgggggcctcagtgagactctcctgtagggcttctggatacaacttcatcgacttccatatacactgggtgcgacaggcccctggagaggggcttgagtggatgggctggagtaatcctcaaagtggcaactcaagttctgcacagaggtttcagggccgggtcaccatgaccacggacacgtccatgtccgcggcctacatggacctgaactggctgacacttgacgacacggccgtgtattactgtacgagaccccatgatggcgcaggaaactaccgatttgacacctggggccagggaaccctggtcaccgtctcctcg

SEQ ID NO: 8043 - DNA, 339 bp, Homo sapiens
  misc_feature (91)..(105): /note="complementarity determining region (CDR) VHCDR1"
  misc_feature (147)..(204): /note="complementarity determining region (CDR) VHCDR2"
  misc_feature (301)..(306): /note="complementarity determining region (CDR) VHCDR3"
  misc_feature (319)..(339): /note="The nucleotide sequence at positions 319 to 339 may alternatively read 'tcc cgg gtc acc gtc gcc tca' and encode the amino acids 'Ser Arg Val Thr Val Ala Ser'"
gaggtgcagctggtgcagtctgggggaggtctggtcgagccgggggggtccctaagactctcctgtgcagtctccggattcgatttcgaaaaagcctggatgagttgggtccgccaggctccagggcaggggctacagtgggttgcccgtatcaagagcacagctgatggtgggacaacaagctacgccgcccccgtggaaggcaggttcatcatctcaagagatgattcgagaaacatgctttatctgcaaatgaacagtctgaaaactgaagacacagccgtctattattgtacatcagcccactggggccagggaaccctggtcaccgtctcctcg

SEQ ID NO: 8044 - DNA, 369 bp, Homo sapiens
  CDS (1)..(369): /note="NI202.3D8VHE1 variable heavy chain (VH) sequence"
  misc_feature (91)..(105): /note="complementarity determining region (CDR) VHCDR1"
  misc_feature (148)..(198): /note="complementarity determining region (CDR) VHCDR2"
  misc_feature (295)..(336): /note="complementarity determining region (CDR) VHCDR3"
gaggtgcagctggtggagtctgggggaggcgtggtccagcctgggaggtccctgagactctcctgtgcagcctctggattcactttcagtacctatgccatttcctgggtccgccaggctccaggcaaggggctggagtgggtggcaattatttcaaatgatggaagtcgtaaatattatgcagactccgtgaagggccgattcaccatctccagagacaattccagggacacgctggatctggaaatgaacagcctgagagatgaggacacggctgtgtattactgtgcgaaaaaacgagggacgtatgccagcaggtgcaaagcctttgacttctggggccagggaaccctggtcaccgtctcctcg

SEQ ID NO: 8045 - DNA, 402 bp, Artificial Sequence
  source: /note="Description of Artificial Sequence: Synthetic polynucleotide"
atggaaaggcactggatctttctcttcctgttatcagtaactggaggtgtccactcccaggtccagctgcagcagtctggggctgaactggcaaaacctgggacctcagtgcagatgtcctgcaaggcttctggctacacctttactaattactggatgaactggataaaagcgaggcctggacagggtctggaatggattggggctactaatcctaacaatggttatactgactacaatcagaggttcaaggacaaggccatattaactgcagacaaatcctccaatacagcctacatgcacctgagcagcctgacatctgaagactctgcagtctatttctgtgcaagtggggggcacttggcttactggggccaggggactgtggtcactgtctctgca

SEQ ID NO: 8046 - DNA, 372 bp, Artificial Sequence
  source: /note="Description of Artificial Sequence: Synthetic polynucleotide"
caggtgcagctggtgcagtctggggctgaggtgaagaagcccggggcctcagtgaaggtttcctgcaaggcttctggatacaccttcactaactatgctatgcattgggtgcgccaggcccccggacaaaggcttgagtggatgggatggatcaacgctggcaatggtaagagaaaatattcacagaagttccaggacagagtcaccattaacagggacacatccgcgagcacaatctacatggagctgagcagcctgggatctgaagacacggctgtatattactgtgcgagagaggaggatcacgctggttcggggagttacctcagtatggacgtctggggccaaggaagcacggtcaccgtctcctcg

SEQ ID NO: 8047 - DNA, 372 bp, Artificial Sequence
  source: /note="Description of Artificial Sequence: Synthetic polynucleotide"
gaggtgcagctggtggagtctggggctgaggtgaagaagcccggggcctcagtgaaggtttcctgcaaggcttctggatacaccttcactaactatgctatgcattgggtgcgccaggcccccggacaaaggcttgagtggatgggatggatcaacgctggcaatggtaagagaaaatattcacagaagttccaggacagagtcaccattaacagggacacatccgcgagcacaatctacatggagctgagcagcctgggatctgaagacacggctgtatattactgtgcgagagaggaggatcacgctggttcggggagttacctcagtatggacgtctggggccaaggaaccctggtcaccgtctcctcg

SEQ ID NO: 8048 - protein, 123 aa, Homo sapiens
EVQLVESGGGVVQPGRSLRLSCAASGFTFSTYAISWVRQAPGKGLEWVAIISNDGSRKYYADSVKGRFTISRDNSRDTLDLEMNSLRDEDTAVYYCAKKRGTYASRCKAFDFWGQGTLVTVSS

SEQ ID NO: 8049 - protein, 121 aa, Homo sapiens
EVQLVQSGAEVKKPGASVRLSCRASGYNFIDFHIHWVRQAPGEGLEWMGWSNPQSGNSSSAQRFQGRVTMTTDTSMSAAYMDLNWLTLDDTAVYYCTRPHDGAGNYRFDTWGQGTLVTVSS

SEQ ID NO: 8050 - protein, 113 aa, Homo sapiens
  SITE (107)..(113): /note="This region may encompass the amino acid sequence 'Thr Leu Val Thr Val Ser Ser' or 'Ser Arg Val Thr Val Ala Ser'"
EVQLVQSGGGLVEPGGSLRLSCAVSGFDFEKAWMSWVRQAPGQGLQWVARIKSTADGGTTSYAAPVEGRFIISRDDSRNMLYLQMNSLKTEDTAVYYCTSAHWGQGXXXXXXX

SEQ ID NO: 8051 - protein, 124 aa, Artificial Sequence
  source: /note="Description of Artificial Sequence: Synthetic polypeptide"
  SITE (31)..(35): /note="CDR1"
  SITE (50)..(66): /note="CDR2"
  SITE (99)..(113): /note="CDR3"
EVQLVESGAEVKKPGASVKVSCKASGYTFTNYAMHWVRQAPGQRLEWMGWINAGNGKRKYSQKFQDRVTINRDTSASTIYMELSSLGSEDTAVYYCAREEDHAGSGSYLSMDVWGQGTLVTVSS

SEQ ID NO: 8052 - protein, 134 aa, Artificial Sequence
  source: /note="Description of Artificial Sequence: Synthetic polypeptide"
MERHWIFLFLLSVTGGVHSQVQLQQSGAELAKPGTSVQMSCKASGYTFTNYWMNWIKARPGQGLEWIGATNPNNGYTDYNQRFKDKAILTADKSSNTAYMHLSSLTSEDSAVYFCASGGHLAYWGQGTVVTVSA

SEQ ID NO: 8053 - protein, 115 aa, Artificial Sequence
  source: /note="Description of Artificial Sequence: Synthetic polypeptide"
QVQLQQSGAELAKPGTSVQMSCKASGYTFTNYWMNWIKARPGQGLEWIGATNPNNGYTDYNQRFKDKAILTADKSSNTAYMHLSSLTSEDSAVYFCASGGHLAYWGQGTVVTVSA

SEQ ID NO: 8054 - protein, 115 aa, Artificial Sequence
  source: /note="Description of Artificial Sequence: Synthetic polypeptide"
QVQLVQSGAELKKPGSSVKVSCKASGYTFTNYWMNWVRQAPGQGLEWIGATNPNNGYTDYNQRFKDRATLTADKSTNTAYMELSSLRSEDTAVYFCASGGHLAYWGQGTLVTVSS

SEQ ID NO: 8055 - protein, 115 aa, Artificial Sequence
  source: /note="Description of Artificial Sequence: Synthetic polypeptide"
QVQLVQSGAELKKPGSSVKVSCKASGYTFTNYWMNWVRQAPGQGLEWIGATNPNNGYTDYNQRFKDRATLTADKSTNTAYMELSSLRSEDTAVYYCARGGHLAYWGQGTLVTVSS

SEQ ID NO: 8056 - protein, 115 aa, Artificial Sequence
  source: /note="Description of Artificial Sequence: Synthetic polypeptide"
QVQLVQSGAELKKPGSSVKVSCKASGYTFTNYWMNWVRQAPGQGLEWIGATNPNNGYTDYNQRFKDRATLTADKSTNTAYMELSSLRSEDTAVYYCASGGHLAYWGQGTLVTVSS

SEQ ID NO: 8057 - protein, 115 aa, Artificial Sequence
  source: /note="Description of Artificial Sequence: Synthetic polypeptide"
QVQLVQSGAELKKPGSSVKVSCKASGYTFTNYWMNWVRQAPGQGLEWIGATNPNNGYTDYNQRFKDRVTITADKSTNTAYMELSSLRSEDTAVYYCARGGHLAYWGQGTLVTVSS

SEQ ID NO: 8058 - protein, 115 aa, Artificial Sequence
  source: /note="Description of Artificial Sequence: Synthetic polypeptide"
QVQLVQSGAELKKPGSSVKVSCKASGYTFTNYWMNWVRQAPGQGLEWIGATNPNNGYTDYNQRFKDRVTITADKSTNTAYMELSSLRSEDTAVYYCASGGHLAYWGQGTLVTVSS

SEQ ID NO: 8059 - protein, 124 aa, Artificial Sequence
  source: /note="Description of Artificial Sequence: Synthetic polypeptide"
QVQLVQSGAEVKKPGASVKVSCKASGYTFTNYAMHWVRQAPGQRLEWMGWINAGNGKRKYSQKFQDRVTINRDTSASTIYMELSSLGSEDTAVYYCAREEDHAGSGSYLSMDVWGQGSTVTVSS

SEQ ID NO: 8060 - protein, 118 aa, Artificial Sequence
  source: /note="Description of Artificial Sequence: Synthetic polypeptide"
QVQLVQSGAEVKKPGSSVKVSCKASGGTFNNYAINWVRQAPGQGLEWMGGIIPIFGTTTYAQKFQGRVTITADESTNTAYMELSSLRSEDTAVYYCAREGNLNWLDPWGQGTLVTVSS

SEQ ID NO: 8061 - DNA, 324 bp, Homo sapiens
  CDS (1)..(324): /note="NI202.12F4VLa1 variable light chain (VL) sequence"
  misc_feature (67)..(99): /note="complementarity determining region (CDR) VLCDR1"
  misc_feature (145)..(165): /note="complementarity determining region (CDR) VLCDR2"
  misc_feature (262)..(294): /note="complementarity determining region (CDR) VLCDR3"
cagtctgtgctgactcagccaccctcggtgtcagtgtccccaggacagacggccaggatcacctgctctggagaagcattgccaatgcaatttgctcattggtaccaacagaggccaggcaaggccccagtgatagtggtgtacaaagacagtgagagaccgtcaggtgtccctgagcgattctctggctccagctcagggacaacagccacgttgaccatcactggagtccaggcagaagatgaggctgactattactgccagtcgccagacagcactaacacttatgaagtcttcggcggagggaccaagctgaccgtccta

SEQ ID NO: 8062 - DNA, 324 bp, Homo sapiens
  CDS (1)..(324): /note="NI202.3G12VLc1 variable light chain (VL) sequence"
  misc_feature (67)..(99): /note="complementarity determining region (CDR) VLCDR1"
  misc_feature (145)..(165): /note="complementarity determining region (CDR) VLCDR2"
  misc_feature (262)..(294): /note="complementarity determining region (CDR) VLCDR3"
cagtctgtgttgacgcagccgccctcggtgtcagtggccccaggacagacggccaggatcacctgctctggtgatgccttgccaaaacactatgctcattggtaccagcagaagccaggccaggtccctatagtggtcatctataaagacactgagaggccctcagggatccctgagcgattctctggttccacctcagggacaacagtcaccctgaccatcagtggcgtccaggcagaggacgaggctcattattattgtcaatcagcagacgtcagttcaacttatgttgtgtttggcggagggaccaagctgaccgtccta

SEQ ID NO: 8063 - DNA, 321 bp, Homo sapiens
  CDS (1)..(321): /note="NI202.3D8VKc1 variable light chain (VL) sequence"
  misc_feature (70)..(102): /note="complementarity determining region (CDR) VLCDR1"
  misc_feature (148)..(168): /note="complementarity determining region (CDR) VLCDR2"
  misc_feature (265)..(291): /note="complementarity determining region (CDR) VLCDR3"
gaaattgtgatgacgcagtctccatcctcactgtctgcatctattggagacagagtcaccttcacttgtcgggcgagtcacgacattagcaattatttagcctggtttcggcagcaaccagggaaagcccctaagtccctgatctatgctgcatctagtctgcaaagtggggtcccatcaagattcagcgccagtggatctgggacagacttcactctcaccatcagcagcctgcagcccgaagattttgcaacttattattgtgttcaatataggacttaccccctcaccttcggccaagggacacgactggagattaaa

SEQ ID NO: 8064 - DNA, 318 bp, Homo sapiens
  CDS (1)..(318): /note="NI202.3D8VKa1 variable light chain (VL) sequence"
  misc_feature (70)..(102): /note="complementarity determining region (CDR) VLCDR1"
  misc_feature (148)..(168): /note="complementarity determining region (CDR) VLCDR2"
  misc_feature (265)..(288): /note="complementarity determining region (CDR) VLCDR3"
gacatccagttgacccagtctccttccaccctgtctgcatctgtaggagacagagtcaccatcacttgccgggccagtcagagtattagtggctggttggcctggtatcagcagaaaccagggaaagcccctaagctcctgatctatgatgcctccaatttggaaagtggggtcccatcaaggttcagcggcagtggatctgggacagaattcactctcaccatcagcagcctgcagcctgatgattttgcaacttattattgccaacagtatgataattattggacgttcggccaagggaccaaggtggaaatcaaa

SEQ ID NO: 8065 - DNA, 393 bp, Artificial Sequence
  source: /note="Description of Artificial Sequence: Synthetic polynucleotide"
atgaagttgcctgttaggctgttggtgctgatgttctggattcctgcttccagcagtgatgttgtgatgacccaaattccactctacctgtctgtcagtcctggagatcaagcctccatctcttgcagatctagtcagagccttttccatagtaaaggaaacacctatttacattggtatctgcagaagccaggccagtctccaaagctcctgatcaacagggtttccaaccgattttctggggtcccagacaggttcagtggcagtggatcagggacagatttcacactcaagatcagcggagtggaggctgaagatctgggagtttatttctgttctcaaagtgcacatgttccgtggacgttcggtggaggcaccaagctggaaatcaga

SEQ ID NO: 8066 - DNA, 339 bp, Artificial Sequence
  source: /note="Description of Artificial Sequence: Synthetic polynucleotide"
gatattgtgatgactcagtctccagactccctggctgtgtctctgggcgagagggccaccatcaactgcaagtccagccagaatgttttatacagctccaacaataagaactacttagcttggtaccagcagaaaccaggacatcctcctaagttgctcatttactgggcatctacccgggaatccggggtccctgaccgattcagtggcagcgggtctgggacagatttcactctcaccatcaccagcttgcagactgaagatgtggcggtctattactgtcagcagtattatagtagtcctctcactttcggcggagggaccaaggtggagatcaaa

SEQ ID NO: 8067 - DNA, 339 bp, Artificial Sequence
  source: /note="Description of Artificial Sequence: Synthetic polynucleotide"
gatgttgtgatgactcagtctccagactccctggctgtgtctctgggcgagagggccaccatcaactgcaagtccagccagaatgttttatacagctccaacaataagaactacttagcttggtaccagcagaaaccaggacatcctcctaagttgctcatttactgggcatctacccgggaatccggggtccctgaccgattcagtggcagcgggtctgggacagatttcactctcaccatcaccagcttgcagactgaagatgtggcggtctattactgtcagcagtattatagtagtcctctcactttcggcggagggaccaaggtggagatcaaa

SEQ ID NO: 8068 - protein, 106 aa, Homo sapiens
DIQLTQSPSTLSASVGDRVTITCRASQSISGWLAWYQQKPGKAPKLLIYDASNLESGVPSRFSGSGSGTEFTLTISSLQPDDFATYYCQQYDNYWTFGQGTKVEIK

SEQ ID NO: 8069 - protein, 107 aa, Homo sapiens
EIVMTQSPSSLSASIGDRVTFTCRASHDISNYLAWFRQQPGKAPKSLIYAASSLQSGVPSRFSASGSGTDFTLTISSLQPEDFATYYCVQYRTYPLTFGQGTRLEIK

SEQ ID NO: 8070 - protein, 108 aa, Homo sapiens
QSVLTQPPSVSVAPGQTARITCSGDALPKHYAHWYQQKPGQVPIVVIYKDTERPSGIPERFSGSTSGTTVTLTISGVQAEDEAHYYCQSADVSSTYVVFGGGTKLTVL

SEQ ID NO: 8071 - protein, 92 aa, Homo sapiens
QSVLTQPPSVSVSPGQTARITCSGEALPMQFAHWYQQRPGKAPVIVVYSSGTTATLTITGVQAEDEADYYCQSPDSTNTYEVFGGGTKLTVL

SEQ ID NO: 8072 - protein, 113 aa, Artificial Sequence
  source: /note="Description of Artificial Sequence: Synthetic polypeptide"
DIVMTQSPDSLAVSLGERATINCKSSQNVLYSSNNKNYLAWYQQKPGHPPKLLIYWASTRESGVPDRFSGSGSGTDFTLTITSLQTEDVAVYYCQQYYSSPLTFGGGTKVEIK

SEQ ID NO: 8073 - protein, 113 aa, Artificial Sequence
  source: /note="Description of Artificial Sequence: Synthetic polypeptide"
  SITE (26)..(40): /note="CDR1"
  SITE (56)..(63): /note="CDR2"
  SITE (95)..(103): /note="CDR3"
DVVMTQSPDSLAVSLGERATINCKSSQNVLYSSNNKNYLAWYQQKPGHPPKLLIYWASTRESGVPDRFSGSGSGTDFTLTITSLQTEDVAVYYCQQYYSSPLTFGGGTKVEIK

SEQ ID NO: 8074 - protein, 113 aa, Artificial Sequence
  source: /note="Description of Artificial Sequence: Synthetic polypeptide"
EVQLVESGGGLVEPGGSLRLSCAVSGFDFEKAWMSWVRQAPGQGLQWVARIKSTADGGTTSYAAPVEGRFIISRDDSRNMLYLQMNSLKTEDTAVYYCTSAHWGQGTLVTVSS

SEQ ID NO: 8075 - protein, 131 aa, Artificial Sequence
  source: /note="Description of Artificial Sequence: Synthetic polypeptide"
MKLPVRLLVLMFWIPASSSDVVMTQIPLYLSVSPGDQASISCRSSQSLFHSKGNTYLHWYLQKPGQSPKLLINRVSNRFSGVPDRFSGSGSGTDFTLKISGVEAEDLGVYFCSQSAHVPWTFGGGTKLEIR

SEQ ID NO: 8076 - protein, 108 aa, Artificial Sequence
  source: /note="Description of Artificial Sequence: Synthetic polypeptide"
SYELTQPPSVSVSPGQTARITCSGEALPMQFAHWYQQRPGKAPVIVVYKDSERPSGVPERFSGSSSGTTATLTITGVQAEDEADYYCQSPDSTNTYEVFGGGTKLTVL

SEQ ID NO: 8077 - protein, 11 aa, Artificial Sequence
  source: /note="Description of Artificial Sequence: Synthetic peptide"
AREGRGTWFAY

SEQ ID NO: 8078 - protein, 12 aa, Artificial Sequence
  source: /note="Description of Artificial Sequence: Synthetic peptide"
ARPGATVVHRTP

SEQ ID NO: 8079 - protein, 11 aa, Artificial Sequence
  source: /note="Description of Artificial Sequence: Synthetic peptide"
ARYAYGSPFAY

SEQ ID NO: 8080 - protein, 11 aa, Artificial Sequence
  source: /note="Description of Artificial Sequence: Synthetic peptide"
  VARIANT (4)..(4): /replace="Ile" or "Leu" or "Met" or "Phe" or "Trp" or "Tyr" or "Val"
  VARIANT (5)..(5): /replace="Ile" or "Leu" or "Met" or "Phe" or "Trp" or "Tyr" or "Val" or "Ser" or "Thr" or "Asn" or "Gln"
  VARIANT (6)..(6): /replace="Thr" or "Asn" or "Gln" or "Gly"
  SITE (1)..(11): /note="Variant residues given in the sequence have no preference with respect to those in the annotations for variant positions"
ARYAASSPFAY

SEQ ID NO: 8081 - protein, 13 aa, Artificial Sequence
  source: /note="Description of Artificial Sequence: Synthetic peptide"
  VARIANT (4)..(4): /replace="Tyr"
  VARIANT (5)..(5): /replace="Val" or "Ser" or "Tyr"
  VARIANT (6)..(6): /replace="Ser"
  MOD_RES (13)..(13): Any amino acid
  SITE (1)..(13): /note="Variant residues given in the sequence have no preference with respect to those in the annotations for variant positions"
ARYAGGSPFAYDX

SEQ ID NO: 8082 - protein, 11 aa, Artificial Sequence
  source: /note="Description of Artificial Sequence: Synthetic peptide"
ARYYGSSPFAY

SEQ ID NO: 8083 - protein, 11 aa, Artificial Sequence
  source: /note="Description of Artificial Sequence: Synthetic peptide"
ARYYSSSPFAY

SEQ ID NO: 8084 - protein, 11 aa, Artificial Sequence
  source: /note="Description of Artificial Sequence: Synthetic peptide"
ARYYVSSPFAY

SEQ ID NO: 8085 - protein, 10 aa, Artificial Sequence
  source: /note="Description of Artificial Sequence: Synthetic peptide"
ASPYDGSFAY

SEQ ID NO: 8086 - protein, 19 aa, Artificial Sequence
  source: /note="Description of Artificial Sequence: Synthetic peptide"
EIRNKADNHATFYAESVKG

SEQ ID NO: 8087 - protein, 19 aa, Artificial Sequence
  source: /note="Description of Artificial Sequence: Synthetic peptide"
EIRNKADNHATYYAESVKG

SEQ ID NO: 8088 - protein, 114 aa, Artificial Sequence
  source: /note="Description of Artificial Sequence: Synthetic polypeptide"
EVKLEESGGGLVQPGGSMKLSCAASGFSFSDAWMDWVRQSPEKGLEWVAEIRNKADNHATFYAESVKGRFTISRDDSKSSVYLQMNSLRAEDSGIYYCLLWDYWGQGTTLTVSS

SEQ ID NO: 8089 - protein, 114 aa, Artificial Sequence
  source: /note="Description of Artificial Sequence: Synthetic polypeptide"
EVNLEESGGGLVQPGGSMKLSCAASGFTFSDAWMDWVRQSPEKGLEWVAEIRNKADNHATYYAESVKGRFTISRNDSKSSVYLQMNSLRTEDTGIYYCVLWDYWGQGTTLTVSS

SEQ ID NO: 8090 - protein, 119 aa, Artificial Sequence
  source: /note="Description of Artificial Sequence: Synthetic polypeptide"
EVQFVESGGGLVQPKGSLKLSCAASGFSFNIYAMNWVRQAPGKGLEWVARIRSKSNDYATFYADSVKDRFTISRDDSESMLYLQMNNLKIEDTAMYYCVSPYDGALAYWGQGTSVTVSS

SEQ ID NO: 8091 - protein, 119 aa, Artificial Sequence
  source: /note="Description of Artificial Sequence: Synthetic polypeptide"
EVQFVESGGGLVQPKGSLKLSCEVSGFSFNTYAMNWVRQAPGKGLEWVARIRNKTNNYATFYADSVKDRFTISRDDSKNTLYLQMNNLKAEDTAMYFCASPYDGSFAYWGQGTLVTVSA

SEQ ID NO: 8092 - protein, 118 aa, Artificial Sequence
  source: /note="Description of Artificial Sequence: Synthetic polypeptide"
EVQLMESGGDLVKPGGSLELSCTVSGFTFNNYAMSWIRQTPEKRLEWVATISDGGTNTYFPDNVKGRFTISRDNAKSNLYLQMSHLQSEDTAMYYCAREGRGTWFAYWGQGTLVTVSA

SEQ ID NO: 8093 - protein, 10 aa, Artificial Sequence
  source: /note="Description of Artificial Sequence: Synthetic peptide"
GFSFNIYAMN

SEQ ID NO: 8094 - protein, 10 aa, Artificial Sequence
  source: /note="Description of Artificial Sequence: Synthetic peptide"
GFSFNTYAMN

SEQ ID NO: 8095 - protein, 10 aa, Artificial Sequence
  source: /note="Description of Artificial Sequence: Synthetic peptide"
  VARIANT (6)..(6): /replace="Thr" or "Asn" or "Gln" or "Ala" or "Val" or "Ile" or "Leu" or "Met" or "Phe" or "Tyr"
  SITE (1)..(10): /note="Variant residues given in the sequence have no preference with respect to those in the annotations for variant positions"
GFSFNSYAMN

SEQ ID NO: 8096 - protein, 10 aa, Artificial Sequence
  source: /note="Description of Artificial Sequence: Synthetic peptide"
GFSFSDAWMD

SEQ ID NO: 8097 - protein, 10 aa, Artificial Sequence
  source: /note="Description of Artificial Sequence: Synthetic peptide"
GFTFNNYAMS

SEQ ID NO: 8098 - protein, 10 aa, Artificial Sequence
  source: /note="Description of Artificial Sequence: Synthetic peptide"
GFTFSDAWMD

SEQ ID NO: 8099 - protein, 10 aa, Artificial Sequence
  source: /note="Description of Artificial Sequence: Synthetic peptide"
  VARIANT (3)..(3): /replace="Thr" or "Asn" or "Gln"
  SITE (1)..(10): /note="Variant residues given in the sequence have no preference with respect to those in the annotations for variant positions"
GFSFSDAWMD

SEQ ID NO: 8100 - protein, 10 aa, Artificial Sequence
  source: /note="Description of Artificial Sequence: Synthetic peptide"
GYIFTDYYIN

SEQ ID NO: 8101 - protein, 10 aa, Artificial Sequence
  source: /note="Description of Artificial Sequence: Synthetic peptide"
GYTFIDYYIN

SEQ ID NO: 8102 - protein, 10 aa, Artificial Sequence
  source: /note="Description of Artificial Sequence: Synthetic peptide"
GYTFSDYYIN

SEQ ID NO: 8103 - protein, 10 aa, Artificial Sequence
  source: /note="Description of Artificial Sequence: Synthetic peptide"
GYTFTDYEMH

SEQ ID NO: 8104 - protein, 10 aa, Artificial Sequence
  source: /note="Description of Artificial Sequence: Synthetic peptide"
GYTFTDYWVH

SEQ ID NO: 8105 - protein, 10 aa, Artificial Sequence
  source: /note="Description of Artificial Sequence: Synthetic peptide"
  VARIANT (3)..(3): /replace="Ile" or "Leu" or "Met" or "Phe" or "Trp" or "Tyr" or "Val" or "Ser" or "Thr" or "Asn"
  VARIANT (5)..(5): /replace="Ile" or "Leu" or "Met" or "Phe" or "Trp" or "Tyr" or "Val" or "Ser" or "Thr" or "Asn"
  SITE (1)..(10): /note="Variant residues given in the sequence have no preference with respect to those in the annotations for variant positions"
GYAFADYYIN

SEQ ID NO: 8106 - protein, 11 aa, Artificial Sequence
  source: /note="Description of Artificial Sequence: Synthetic peptide"
  VARIANT (3)..(3): /replace="Thr"
  VARIANT (5)..(5): /replace="Ser" or "Thr"
  SITE (1)..(11): /note="Variant residues given in the sequence have no preference with respect to those in the annotations for variant positions"
GYIFIDYYINQ

SEQ ID NO: 8107 - protein, 4 aa, Artificial Sequence
  source: /note="Description of Artificial Sequence: Synthetic peptide"
LKDS

SEQ ID NO: 8108 - protein, 5 aa, Artificial Sequence
  source: /note="Description of Artificial Sequence: Synthetic peptide"
LLWDY

SEQ ID NO: 8109 - protein, 17 aa, Artificial Sequence
  source: /note="Description of Artificial Sequence: Synthetic peptide"
NINPRNGGINYNENFKG

SEQ ID NO: 8110 - protein, 118 aa, Artificial Sequence
  source: /note="Description of Artificial Sequence: Synthetic polypeptide"
QIQLQQSGPELVKPGASVKISCKASGYTFTDYYINWVRQRPGQGLEWIGWIYPESFNTYYNEKFKGKATLTVDTSSNTAYMQLSSLTSEDSAVYFCARYYVSSPFAYWGQGTLVTVSA

SEQ ID NO: 8111 - protein, 118 aa, Artificial Sequence
  source: /note="Description of Artificial Sequence: Synthetic polypeptide"
QVQLQQPGAELVKPGASVKLSCKASGYTFTSYWMHWVKQRPGRGLEWIGEIDPSDGFTYNNQNFKDKSTLTVDRSSGTAYLQLSSLTSEDSAVYYCAGSLGRIGLAYWGHGTLVTVSA

SEQ ID NO: 8112 - protein, 123 aa, Artificial Sequence
  source: /note="Description of Artificial Sequence: Synthetic polypeptide"
QVQLQQPGTALVKPGASVKLSCKSSGYTFTDYWVHWVKQRPGQGLEWIGNINPRNGGINYNENFKGKAILTVDRSFSIAYMQLNSLTSEDSAVYYCARPGATVVHRTPWFAHWGQGTLVTVSA

SEQ ID NO: 8113 - protein, 118 aa, Artificial Sequence
  source: /note="Description of Artificial Sequence: Synthetic polypeptide"
QVQLQQPGTEFVMSGASVMLSCKASGYIFTNYWLHWVKQRPGHGLEWIGEIDPSDSYSICNDNFKGKSTLTVDKSSSTAYMQLSSLTSEDSAVYYCAGSLGRVGLAYWGQGTLVTVST

SEQ ID NO: 8114 - protein, 111 aa, Artificial Sequence
  source: /note="Description of Artificial Sequence: Synthetic polypeptide"
QVQLQQSGAELVRPGASVTLSCKASGYTFTDYEMHWVKQTPVHGLEWIGVIDPEKGGTAYNQKFKGKAILTADKSSSTAYMDLRSLTSEDSAVYYCLKDSWGQGTTLTVSS

SEQ ID NO: 8115 - protein, 118 aa, Artificial Sequence
  source: /note="Description of Artificial Sequence: Synthetic polypeptide"
QVQLQQSGPDLVKPGASVKISCKASGYTFIDYYINWAKQRPGQGLEWIGWIFPGSGSTYYNEKFKGKATLTVDKSSSTAYMFLSSLTSEDSAVFFCARYYGSSPFAYWGQGTLVTVSA

SEQ ID NO: 8116 - protein, 118 aa, Artificial Sequence
  source: /note="Description of Artificial Sequence: Synthetic polypeptide"
QVQLQQSGPELVKPGASVKISCKASGYIFTDYYINWVKRRPGQGLEWIGWIFPGSGVSYYNEQFKGKATLTVDKPSNTAYIFLSRLTSEDSAVYFCARYYSSSPFAYWGQGTLVTVSA

SEQ ID NO: 8117 - protein, 118 aa, Artificial Sequence
  source: /note="Description of Artificial Sequence: Synthetic polypeptide"
QVQLQQSGPELVKPGASVKISCKASGYTFSDYYINWVKQRPGQGLEWIGWIFPGSGSSYYNEKFKGKATLTVDKSSRTAYMLLSSLTSEDSAVYFCARYYGSSPFAYWGQGTLVTVST

SEQ ID NO: 8118 - protein, 19 aa, Artificial Sequence
  source: /note="Description of Artificial Sequence: Synthetic peptide"
RIRNKTNNYATFYADSVKD

SEQ ID NO: 8119 - protein, 19 aa, Artificial Sequence
  source: /note="Description of Artificial Sequence: Synthetic peptide"
RIRSKSNDYATFYADSVKD

SEQ ID NO: 8120 - protein, 19 aa, Artificial Sequence
  source: /note="Description of Artificial Sequence: Synthetic peptide"
  VARIANT (4)..(4): /replace="Thr" or "Asn" or "Gln"
  VARIANT (6)..(6): /replace="Thr" or "Asn" or "Gln"
  VARIANT (8)..(8): /replace="Thr" or "Asn" or "Gln" or "Asp" or "Glu"
  SITE (1)..(19): /note="Variant residues given in the sequence have no preference with respect to those in the annotations for variant positions"
RIRSKSNSYATFYADSVKD

SEQ ID NO: 8121 - protein, 20 aa, Artificial Sequence
  source: /note="Description of Artificial Sequence: Synthetic peptide"
  VARIANT (4)..(4): /replace="Ser"
  VARIANT (6)..(6): /replace="Thr"
  VARIANT (8)..(8): /replace="Asp"
  SITE (1)..(20): /note="Variant residues given in the sequence have no preference with respect to those in the annotations for variant positions"
RIRNKSNNYATFYADSVKDW

SEQ ID NO: 8122 - protein, 118 aa, Artificial Sequence
  source: /note="Description of Artificial Sequence: Synthetic polypeptide"
RVQLQQSGPGLVKPGASVKISCKASGYTFTDYYINWVRQRPGQGLEWIGWIFPGSGITYYNEKFKGKATLTVDRSSSTAYMLLSSLTSEDSAVYFCARYAYGSPFAYWGQGTLVTVSA

SEQ ID NO: 8123 - protein, 17 aa, Artificial Sequence
  source: /note="Description of Artificial Sequence: Synthetic peptide"
TISDGGTNTYFPDNVKG

SEQ ID NO: 8124 - protein, 17 aa, Artificial Sequence
  source: /note="Description of Artificial Sequence: Synthetic peptide"
VIDPEKGGTAYNQKFKG

SEQ ID NO: 8125 - protein, 5 aa, Artificial Sequence
  source: /note="Description of Artificial Sequence: Synthetic peptide"
VLWDY

SEQ ID NO: 8126 - protein, 10 aa, Artificial Sequence
  source: /note="Description of Artificial Sequence: Synthetic peptide"
VSPYDGALAY

SEQ ID NO: 8127 - protein, 17 aa, Artificial Sequence
  source: /note="Description of Artificial Sequence: Synthetic peptide"
WIFPGSGSSYYNEKFKG

SEQ ID NO: 8128 - protein, 17 aa, Artificial Sequence
  source: /note="Description of Artificial Sequence: Synthetic peptide"
WIFPGSGSTYYNEKFKG

SEQ ID NO: 8129 - protein, 17 aa, Artificial Sequence
  source: /note="Description of Artificial Sequence: Synthetic peptide"
WIFPGSGVSYYNEQFKG

SEQ ID NO: 8130 - protein, 17 aa, Artificial Sequence
  source: /note="Description of Artificial Sequence: Synthetic peptide"
  VARIANT (3)..(3): /replace="Ile" or "Leu" or "Met" or "Phe" or "Trp" or "Tyr" or "Val"
  VARIANT (5)..(5): /replace="Glu" or "Gly"
  VARIANT (7)..(7): /replace="Ala" or "Ile" or "Leu" or "Met" or "Phe" or "Trp" or "Tyr" or "Val"
  VARIANT (8)..(8): /replace="Ile" or "Leu" or "Met" or "Phe" or "Trp" or "Tyr" or "Val" or "Ser" or "Thr" or "Asn
  VARIANT (9)..(9): /replace="Thr" or "Asn" or "Gln"
  VARIANT (14)..(14): /replace="His" or "Lys" or "Ser" or "Thr" or "Asn" or "Gln"
  SITE (1)..(17): /note="Variant residues given in the sequence have no preference with respect to those in the annotations for variant positions"
WIAPDSGASYYNERFKG

SEQ ID NO: 8131 - protein, 18 aa, Artificial Sequence
  source: /note="Description of Artificial Sequence: Synthetic peptide"
  VARIANT (3)..(3): /replace="Phe"
  VARIANT (5)..(5): /replace="Gly"
  VARIANT (7)..(7): /replace="Gly"
  VARIANT (8)..(8): /replace="Val" or "Asn" or "Ser"
  VARIANT (9)..(9): /replace="Thr"
  VARIANT (14)..(14): /replace="Lys"
  MOD_RES (18)..(18): Any amino acid
  SITE (1)..(18): /note="Variant residues given in the sequence have no preference with respect to those in the annotations for variant positions"
WIYPESFISYYNEQFKGX

SEQ ID NO: 8132 - protein, 17 aa, Artificial Sequence
  source: /note="Description of Artificial Sequence: Synthetic peptide"
WIYPESFNTYYNEKFKG

SEQ ID NO: 8133 - protein, 5 aa, Artificial Sequence
  source: /note="Description of Artificial Sequence: Synthetic peptide"
  VARIANT (1)..(1): /replace="Ile" or "Leu" or "Met" or "Phe" or "Trp" or "Tyr" or "Val"
  SITE (1)..(5): /note="Variant residues given in the sequence have no preference with respect to those in the annotations for variant positions"
ALWDY

SEQ ID NO: 8134 - protein, 10 aa, Artificial Sequence
  source: /note="Description of Artificial Sequence: Synthetic peptide"
  VARIANT (1)..(1): /replace="Val" or "Ile" or "Leu" or "Met" or "Phe" or "Tyr" or "Trp"
  VARIANT (7)..(7): /replace="Thr" or "Asn" or "Gln" or "Ala" or "Val" or "Ile" or "Leu" or "Met" or "Phe" or "Tyr" or "Trp"
  VARIANT (8)..(8): /replace="Val" or "Ile" or "Leu" or "Met" or "Phe" or "Tyr" or "Trp"
  SITE (1)..(10): /note="Variant residues given in the sequence have no preference with respect to those in the annotations for variant positions"
ASPYDGSAAY

SEQ ID NO: 8135 - protein, 108 aa, Artificial Sequence
  source: /note="Description of Artificial Sequence: Synthetic polypeptide"
DIQMNQSPSSLFASLGDTITITCHASQNINVWLSWYQQKPGNIPKLLIYKASNLHTGVSSRFSGSGSGTDFTLTINNLQPEDIATYYCQQGQSYPLTFGAGTKLELKR

SEQ ID NO: 8136 - protein, 108 aa, Artificial Sequence
  source: /note="Description of Artificial Sequence: Synthetic polypeptide"
DIQMNQSPSSLSASLGDTITITCHASQNINIWLSWYQQKPGNIPKLLIYKASNLHTGVPSRFSGSGSGTGFTLTISSLQPEDIATYYCQQGHSYPLTFGGGTKLEIKR

SEQ ID NO: 8137 - protein, 114 aa, Artificial Sequence
  source: /note="Description of Artificial Sequence: Synthetic polypeptide"
DIVMSQSPSSLAVSAGEKVTMSCKSSQSLLNSRTRKHFLAWYQQKPGQSPKVLIYWASSRESGVPDRFTGSGSGTDFTLTISSVQAEDLAVYYCKQSCNLPWTFGGGTKLEIKR

SEQ ID NO: 8138 - protein, 114 aa, Artificial Sequence
  source: /note="Description of Artificial Sequence: Synthetic polypeptide"
DIVMSQSPSSLAVSAGEKVTMTCKSSQSLLNSRTRKNFLTWYRQKPGQSPKPLIYWASSRESGVPDRFAGSGSGTDFTLTISSVQAEDLAVYYCKQSYNLPWTFGGGTKLEIKR

SEQ ID NO: 8139 - protein, 113 aa, Artificial Sequence
  source: /note="Description of Artificial Sequence: Synthetic polypeptide"
DVLMTQSPLSLPVSLGDQASISCRSSQSIVHRNGNTYLEWYLQKPGQSPKLLIYKVSNRFSGVPDRFSGSGSGTDFTLKISRVEAEDLGVYYCFQGSHVPYTFGGGTKLEIRR

SEQ ID NO: 8140 - protein, 113 aa, Artificial Sequence
  source: /note="Description of Artificial Sequence: Synthetic polypeptide"
DVLMTQTPLSLPVSLGDQASISCRSSQNIIHSNGNTYLEWFLQKPGQSPKLLIYKVSNRFSGVPDRFSGSGSGTDFTLKISRVEAEDLGVYYCFQGSHVPYTFGGGTKLEIKR

SEQ ID NO: 8141 - protein, 113 aa, Artificial Sequence
  source: /note="Description of Artificial Sequence: Synthetic polypeptide"
DVLMTQTPLSLPVSLGDQASISCRSSQNIIHSNGNTYLEWFLQRPGQSPELLIYKVSNRFSGVPDRFSGSGSGTDFTLKISRVEAEDLGVYYCFQGSHVPYTFGGGTKLEIKR

SEQ ID NO: 8142 - protein, 113 aa, Artificial Sequence
  source: /note="Description of Artificial Sequence: Synthetic polypeptide"
DVLMTQTPLSLPVSLGDQASISCRSSQNIVYSNGNTYLEWYLQKPGQSPKLLIYKVSNRFSGVPDRFSGSGSGTYFTLKISRVEAEDLGIYYCFQGSHVPYTFGGGTKLEIKR

SEQ ID NO: 8143 - protein, 113 aa, Artificial Sequence
  source: /note="Description of Artificial Sequence: Synthetic polypeptide"
DVLMTQTPLSLPVSLGDQASISCRSSQSIVHSNGNTYLEWYLQKPGQSPKLLIYKVSNRFSGVPDRFSGSGSGTDFTLKISRVEAEDLGVYYCFQGSHVPYTFGGGTKLEIKR

SEQ ID NO: 8144 - protein, 113 aa, Artificial Sequence
  source: /note="Description of Artificial Sequence: Synthetic polypeptide"
DVLMTQTPLSLPVSLGDQASISCRSSQTIVHSDGNTYLEWYLQKPGQSPKLLIYKVSNRFSGVPDRFSGSGSGTYFTLKISRVEAEDLGVYYCFQGSHVPCTFGGGTKLEIKR

SEQ ID NO: 8145 - protein, 113 aa, Artificial Sequence
  source: /note="Description of Artificial Sequence: Synthetic polypeptide"
DVVMTQTPLSLPVSLGDQASISCRSSQSLVHINGNTYLHWSLQKPGQSPKLLIYKVSNRFSGVPDRFSGSGSGTDFTLKISRVEAEDLGIYFCSQNTHLPLTFGAGTKLELKR

SEQ ID NO: 8146 - protein, 108 aa, Artificial Sequence
  source: /note="Description of Artificial Sequence: Synthetic polypeptide"
EIVLTQSPALMAASPGEKVTITCSVSSSISSSNLHWFQQKSETSPKPWIFGTSYLASGVPVRFSGSGSGTSYSLTISSMEAEDAATYYCQQWNSYPLTFGAGTKLELR

SEQ ID NO: 8147 - protein, 9 aa, Artificial Sequence
  source: /note="Description of Artificial Sequence: Synthetic peptide"
FQGSHVPCT

SEQ ID NO: 8148 - protein, 7 aa, Artificial Sequence
  source: /note="Description of Artificial Sequence: Synthetic peptide"
GTSYLAS

SEQ ID NO: 8149 - protein, 11 aa, Artificial Sequence
  source: /note="Description of Artificial Sequence: Synthetic peptide"
HASQNINIWLS

SEQ ID NO: 8150 - protein, 7 aa, Artificial Sequence
  source: /note="Description of Artificial Sequence: Synthetic peptide"
KASNLHT

SEQ ID NO: 8151 - protein, 9 aa, Artificial Sequence
  source: /note="Description of Artificial Sequence: Synthetic peptide"
KQSCNLPWT

SEQ ID NO: 8152 - protein, 9 aa, Artificial Sequence
  source: /note="Description of Artificial Sequence: Synthetic peptide"
  VARIANT (4)..(4): /replace="Ala" or "Ile" or "Leu" or "Met" or "Phe" or "Trp" or "Tyr" or "Val"
  SITE (1)..(9): /note="Variant residues given in the sequence have no preference with respect to those in the annotations for variant positions"
KQSCNLPWT

SEQ ID NO: 8153 - protein, 9 aa, Artificial Sequence
  source: /note="Description of Artificial Sequence: Synthetic peptide"
KQSYNLPWT

SEQ ID NO: 8154 - protein, 17 aa, Artificial Sequence
  source: /note="Description of Artificial Sequence: Synthetic peptide"
KSSQSLLNSRTRKHFLA

SEQ ID NO: 8155 - protein, 17 aa, Artificial Sequence
  source: /note="Description of Artificial Sequence: Synthetic peptide"
KSSQSLLNSRTRKNFLT

SEQ ID NO: 8156 - protein, 17 aa, Artificial Sequence
  source: /note="Description of Artificial Sequence: Synthetic peptide"
  VARIANT (14)..(14): /replace="Thr" or "Asn" or "Gln" or "Arg" or "His" or "Lys"
  VARIANT (17)..(17): /replace="Thr" or "Asn" or "Gln" or "Ala" or "Ile" or "Leu" or "Met" or "Phe" or "Tyr" or "Val"
  SITE (1)..(17): /note="Variant residues given in the sequence have no preference with respect to those in the annotations for variant positions"
KSSQSLLNSRTRKSFLS

SEQ ID NO: 8157 - protein, 107 aa, Artificial Sequence
  source: /note="Description of Artificial Sequence: Synthetic polypeptide"
QIVLTQSPAIMSASPGEKVTISCSASSSVTYMYWYQQKPGASPKSWIYRTSNLASGVPARFSGSGSGTSYSLTISSMEAEDAATYYCQQFQSYPLTFGAGTKLELKR

SEQ ID NO: 8158 - protein, 107 aa, Artificial Sequence
  source: /note="Description of Artificial Sequence: Synthetic polypeptide"
QIVLTQSPAIMSASPGEKVTMSCSASSSVSNMYWYQQKPGSSPKSWIYRTSNLASGVPARFSGSGSGTSYSLTISNMEAEDAATYYCQHYQNYPLTFGAGTKLELKR

SEQ ID NO: 8159 - protein, 9 aa, Artificial Sequence
  source: /note="Description of Artificial Sequence: Synthetic peptide"
QQGHSYPLT

SEQ ID NO: 8160 - protein, 9 aa, Artificial Sequence
  source: /note="Description of Artificial Sequence: Synthetic peptide"
QQGQSYPLT

SEQ ID NO: 8161 - protein, 9 aa, Artificial Sequence
  source: /note="Description of Artificial Sequence: Synthetic peptide"
  VARIANT (4)..(4): /replace="Thr" or "Asn" or "Gln" or "Arg" or "His" or "Lys"
  SITE (1)..(9): /note="Variant residues given in the sequence have no preference with respect to those in the annotations for variant positions"
QQGSSYPLT

SEQ ID NO: 8162 - protein, 10 aa, Artificial Sequence
  source: /note="Description of Artificial Sequence: Synthetic peptide"
  VARIANT (4)..(4): /replace="His"
  SITE (1)..(10): /note="Variant residues given in the sequence have no preference with respect to those in the annotations for variant positions"
QQGQSYPLTW

SEQ ID NO: 8163 - protein, 9 aa, Artificial Sequence
  source: /note="Description of Artificial Sequence: Synthetic peptide"
QQWNSYPLT

SEQ ID NO: 8164 - protein, 16 aa, Artificial Sequence
  source: /note="Description of Artificial Sequence: Synthetic peptide"
RSSQNIIHSNGNTYLE

SEQ ID NO: 8165 - protein, 16 aa, Artificial Sequence
  source: /note="Description of Artificial Sequence: Synthetic peptide"
RSSQNIVYSNGNTYLE

SEQ ID NO: 8166 - protein, 16 aa, Artificial Sequence
  source: /note="Description of Artificial Sequence: Synthetic peptide"
RSSQSIVHRNGNTYLE

SEQ ID NO: 8167 - protein, 16 aa, Artificial Sequence
  source: /note="Description of Artificial Sequence: Synthetic peptide"
RSSQSLVHINGNTYLH

SEQ ID NO: 8168 - protein, 16 aa, Artificial Sequence
  source: /note="Description of Artificial Sequence: Synthetic peptide"
RSSQTIVHSDGNTYLE

SEQ ID NO: 8169 - protein, 16 aa, Artificial Sequence
  source: /note="Description of Artificial Sequence: Synthetic peptide"
  VARIANT (5)..(5): /replace="Thr" or "Asn" or "Gln"
  VARIANT (7)..(7): /replace="Ile" or "Leu" or "Met" or "Phe" or "Trp" or "Tyr" or "Val"
  VARIANT (8)..(8): /replace="Ile" or "Leu" or "Met" or "Phe" or "Trp" or "Tyr" or "Val" or "Arg" or "His" or "Lys"
  VARIANT (9)..(9): /replace="Thr" or "Asn" or "Gln" or "Arg" or "His" or "Lys"
  SITE (1)..(16): /note="Variant residues given in the sequence have no preference with respect to those in the annotations for variant positions"
RSSQSIAASNGNTYLE

SEQ ID NO: 8170 - protein, 18 aa, Artificial Sequence
  source: /note="Description of Artificial Sequence: Synthetic peptide"
  VARIANT (5)..(5): /replace="Asn"
  VARIANT (7)..(7): /replace="Val"
  VARIANT (8)..(8): /replace="His"
  VARIANT (9)..(9): /replace="Arg"
  SITE (1)..(18): /note="Variant residues given in the sequence have no preference with respect to those in the annotations for variant positions"
RSSQSIIYSNGNTYLEQQ

SEQ ID NO: 8171 - protein, 9 aa, Artificial Sequence
  source: /note="Description of Artificial Sequence: Synthetic peptide"
SQNTHLPLT

SEQ ID NO: 8172 - protein, 12 aa, Artificial Sequence
  source: /note="Description of Artificial Sequence: Synthetic peptide"
SVSSSISSSNLH

SEQ ID NO: 8173 - protein, 7 aa, Artificial Sequence
  source: /note="Description of Artificial Sequence: Synthetic peptide"
WASSRES

SEQ ID NO: 8174 - protein, 17 aa, Artificial Sequence
  source: /note="Description of Artificial Sequence: Synthetic peptide"
WIFPGSGITYYNEKFKG

SEQ ID NO: 8175 - DNA, 15 bp, Oryctolagus cuniculus
aaccactacatgcaa

SEQ ID NO: 8176 - DNA, 15 bp, Oryctolagus cuniculus
aactactacatgcaa

SEQ ID NO: 8177 - DNA, 15 bp, Oryctolagus cuniculus
aactactatatgcaa

SEQ ID NO: 8178 - DNA, 15 bp, Oryctolagus cuniculus
agcaatgcaatgtgg

SEQ ID NO: 8179 - DNA, 15 bp, Oryctolagus cuniculus
agctactacatgcaa

SEQ ID NO: 8180 - DNA, 15 bp, Oryctolagus cuniculus
agctactacatgcag

SEQ ID NO: 8181 - DNA, 339 bp, Artificial Sequence
  source: /note="Description of Artificial Sequence: Synthetic polynucleotide"
caagtgctgacccagtctccatcctccctgtctgcatctgtaggagacagagtcaccatcaattgccgggccagtcagagtgtttactataacaactacctagcctggtatcagcagaaaccagggaaagttcctaagcaactgatctattctacatccactctggcatctggggtcccatctcgtttcagtggcagtggatctgggacagatttcactctcaccatcagcagcctgcagcctgaagatgttgcaacttattactgtctgggcagttatgattgtagtaatggtgattgttttgttttcggcggaggaaccaaggtggaaatcaaacgt

SEQ ID NO: 8182 - DNA, 660 bp, Artificial Sequence
  source: /note="Description of Artificial Sequence: Synthetic polynucleotide"
caagtgctgacccagtctccatcctccctgtctgcatctgtaggagacagagtcaccatcaattgccgggccagtcagagtgtttactataacaactacctagcctggtatcagcagaaaccagggaaagttcctaagcaactgatctattctacatccactctggcatctggggtcccatctcgtttcagtggcagtggatctgggacagatttcactctcaccatcagcagcctgcagcctgaagatgttgcaacttattactgtctgggcagttatgattgtagtaatggtgattgttttgttttcggcggaggaaccaaggtggaaatcaaacgtacggtggctgcaccatctgtcttcatcttcccgccatctgatgagcagttgaaatctggaactgcctctgttgtgtgcctgctgaataacttctatcccagagaggccaaagtacagtggaaggtggataacgccctccaatcgggtaactcccaggagagtgtcacagagcaggacagcaaggacagcacctacagcctcagcagcaccctgacgctgagcaaagcagactacgagaaacacaaagtctacgcctgcgaagtcacccatcagggcctgagctcgcccgtcacaaagagcttcaacaggggagagtgttag

SEQ ID NO: 8183 - DNA, 39 bp, Oryctolagus cuniculus
caggccagtcagaatgtttacaataacaactacctagcc

SEQ ID NO: 8184 - DNA, 39 bp, Oryctolagus cuniculus
caggccagtcagaatgtttataataacaactacctagcc

SEQ ID NO: 8185 - DNA, 39 bp, Oryctolagus cuniculus
caggccagtcagagtgtttacaattacaactaccttgcc

SEQ ID NO: 8186 - DNA, 39 bp, Oryctolagus cuniculus
caggccagtcagagtgtttataattacaactaccttgcc

SEQ ID NO: 8187 - DNA, 39 bp, Oryctolagus cuniculus
caggccagtcagagtgtttatcataacacctacctggcc

SEQ ID NO: 8188 - DNA, 39 bp, Oryctolagus cuniculus
caggccagtcagagtgtttatgataacaactacctagcc

SEQ ID NO: 8189 - DNA, 39 bp, Oryctolagus cuniculus
caggccagtgagagtctttataataacaacgccttggcc

SEQ ID NO: 8190 - DNA, 327 bp, Artificial Sequence
  source: /note="Description of Artificial Sequence: Synthetic polynucleotide"
cagtcgctggaggagtccgggggtcgcctggtcacgcctgggacacccctgacactcacctgcacagtctctggactcgacctcagtagctactacatgcaatgggtccgccaggctccagggaaggggctggaatggatcggagtcattggtattaatgataacacatactacgcgagctgggcgaaaggccgattcaccatctccagagcctcgtcgaccacggtggatctgaaaatgaccagtctgacaaccgaggacacggccacctatttctgtgccagaggggacatctggggcccaggcaccctcgtcaccgtctcgagc

SEQ ID NO: 8191 - DNA, 39 bp, Oryctolagus cuniculus
cgggccagtcagagtgtttactataacaactacctagcc

SEQ ID NO: 8192 - DNA, 39 bp, Oryctolagus cuniculus
cgggccagtcagagtgtttattataacaactacctagcc

SEQ ID NO: 8193 - DNA, 39 bp, Oryctolagus cuniculus
ctaggcagttatgactgtagtactggtgattgttttgtt

SEQ ID NO: 8194 - DNA, 39 bp, Oryctolagus cuniculus
ctaggcagttatgattgtagtaatggtgattgttttgtt

SEQ ID NO: 8195 - DNA, 39 bp, Oryctolagus cuniculus
ctaggcagttatgattgtagtagtggtgattgttttgtt

SEQ ID NO: 8196 - DNA, 39 bp, Oryctolagus cuniculus
ctaggcagttatgattgtagtcgtggtgattgttttgtt

SEQ ID NO: 8197 - DNA, 39 bp, Oryctolagus cuniculus
ctgggcagttatgattgtactaatggtgattgttttgtt

SEQ ID NO: 8198 - DNA, 39 bp, Oryctolagus cuniculus
ctgggcagttatgattgtagtaatggtgattgttttgtt

SEQ ID NO: 8199 - DNA, 39 bp, Oryctolagus cuniculus
ctgggcagttatgattgtagtactggtgattgttttgtt

SEQ ID NO: 8200 - DNA, 39 bp, Oryctolagus cuniculus
ctgggcagttatgattgtagtcgtggtgattgttttgtt

SEQ ID NO: 8201 - DNA, 333 bp, Artificial Sequence
  source: /note="Description of Artificial Sequence: Synthetic polynucleotide"
gaggtgcagcttgtggagtctgggggaggcttggtccagcctggggggtccctgagactctcctgtgcagtctctggaatcgacctcagtaaccactacatgcaatgggtccgtcaggctccagggaaggggctggagtgggtcggagtcgttggtatcaatggtcgcacatactacgcgagctgggcgaaaggccgattcaccatctccagagacaattccaagaccacggtgtatcttcaaatgaacagcctgagagctgaggacactgctgtgtatttctgtgctagaggggacatctggggccaagggaccctcgtcaccgtctcgagc

SEQ ID NO: 8202 - DNA, 1326 bp, Artificial Sequence
  source: /note="Description of Artificial Sequence: Synthetic polynucleotide"
gaggtgcagcttgtggagtctgggggaggcttggtccagcctggggggtccctgagactctcctgtgcagtctctggaatcgacctcagtaaccactacatgcaatgggtccgtcaggctccagggaaggggctggagtgggtcggagtcgttggtatcaatggtcgcacatactacgcgagctgggcgaaaggccgattcaccatctccagagacaattccaagaccacggtgtatcttcaaatgaacagcctgagagctgaggacactgctgtgtatttctgtgctagaggggacatctggggccaagggaccctcgtcaccgtctcgagcgcctccaccaagggcccatcggtcttccccctggcaccctcctccaagagcacctctgggggcacagcggccctgggctgcctggtcaaggactacttccccgaaccggtgacggtgtcgtggaactcaggcgccctgaccagcggcgtgcacaccttcccggctgtcctacagtcctcaggactctactccctcagcagcgtggtgaccgtgccctccagcagcttgggcacccagacctacatctgcaacgtgaatcacaagcccagcaacaccaaggtggacaagagagttgagcccaaatcttgtgacaaaactcacacatgcccaccgtgcccagcacctgaactcctggggggaccgtcagtcttcctcttccccccaaaacccaaggacaccctcatgatctcccggacccctgaggtcacatgcgtggtggtggacgtgagccacgaagaccctgaggtcaagttcaactggtacgtggacggcgtggaggtgcataatgccaagacaaagccgcgggaggagcagtacgccagcacgtaccgtgtggtcagcgtcctcaccgtcctgcaccaggactggctgaatggcaaggagtacaagtgcaaggtctccaacaaagccctcccagcccccatcgagaaaaccatctccaaagccaaagggcagccccgagaaccacaggtgtacaccctgcccccatcccgggaggagatgaccaagaaccaggtcagcctgacctgcctggtcaaaggcttctatcccagcgacatcgccgtggagtgggagagcaatgggcagccggagaacaactacaagaccacgcctcccgtgctggactccgacggctccttcttcctctacagcaagctcaccgtggacaagagcaggtggcagcaggggaacgtcttctcatgctccgtgatgcatgaggctctgcacaaccactacacgcagaagagcctctccctgtctccgggtaaatga

SEQ ID NO: 8203 - DNA, 333 bp, Artificial Sequence
  source: /note="Description of Artificial Sequence: Synthetic polynucleotide"
gaggtgcagcttgtggagtctgggggaggcttggtccagcctggggggtccctgagactctcctgtgcagtctctggaatcggcctcagtagctactacatgcaatgggtccgtcaggctccagggaaggggctggagtgggtcggagtcattggtagtgatggtaagacatactacgcgacctgggcgaaaggccgattcaccatctccagagacaattccaagaccacggtgtatcttcaaatgaacagcctgagagctgaggacactgctgtgtatttctgtaccagaggggacatctggggccaagggaccctcgtcaccgtctcgagc

SEQ ID NO: 8204 - DNA, 12 bp, Oryctolagus cuniculus
gatcttgacttg

SEQ ID NO: 8205 - DNA, 21 bp, Oryctolagus cuniculus
gatgcatccaaactggcatct

SEQ ID NO: 8206 - DNA, 21 bp, Oryctolagus cuniculus
gatgcatccactctggcatct

SEQ ID NO: 8207 - DNA, 21 bp, Oryctolagus cuniculus
gatgcatccactctggcgtct

SEQ ID NO: 8208 - DNA, 36 bp, Oryctolagus cuniculus
ggaggctacagaagtgatagtgttgatggtgttgct

SEQ ID NO: 8209 - DNA, 15 bp, Oryctolagus cuniculus
ggctactacatgaac

SEQ ID NO: 8210 - DNA, 9 bp, Oryctolagus cuniculus
ggggacatc

SEQ ID NO: 8211 - DNA, 48 bp, Oryctolagus cuniculus
gtcattggtagtgatggtaagacatactacgcgacctgggcgaaaggc

SEQ ID NO: 8212 - DNA, 48 bp, Oryctolagus cuniculus
gtcattggtatcaatgataacacatactacgcgagctgggcgaaaggc

SEQ ID NO: 8213 - DNA, 48 bp, Oryctolagus cuniculus
gtcattggtattaatgataacacatactacgcgagctgggcgaaaggc

SEQ ID NO: 8214 - DNA, 48 bp, Oryctolagus cuniculus
gtcattggtattaatggtgccacatactacgcgagctgggcgaaaggc

SEQ ID NO: 8215 - DNA, 48 bp, Oryctolagus cuniculus
gtcattggtgtgaatggtaagagatactacgcgagctgggcgaaaggc

SEQ ID NO: 8216 - DNA, 48 bp, Oryctolagus cuniculus
gtcgttggtatcaatggtcgcacatactacgcgagctgggcgaaaggc

SEQ ID NO: 8217 - DNA, 48 bp, Oryctolagus cuniculus
gtcgttggtattaatggtcgcacatactacgcgagctgggcgaaaggc

SEQ ID NO: 8218 - DNA, 21 bp, Oryctolagus cuniculus
tctacatccactctggcatct

SEQ ID NO: 8219 - DNA, 21 bp, Oryctolagus cuniculus
tctacgtccactctggcatct

SEQ ID NO: 8220 - DNA, 51 bp, Oryctolagus cuniculus
tgcatttacaatggtgatggcagcacatactacgcgagctgggtgaatggc

SEQ ID NO: 8221 - protein, 31 aa, Homo sapiens
CGNLASTCMLGTYTQDFNKFFPQTAIGVGAP

SEQ ID NO: 8222 - protein, 13 aa, Mus musculus
CKASQNVGTNVAW

SEQ ID NO: 8223 - protein, 14 aa, Mus musculus
CSASSSISSIYLHW

SEQ ID NO: 8224 - protein, 8 aa, Mus musculus
DGHYAMNY

SEQ ID NO: 8225 - protein, 8 aa, Mus musculus
DGYYAMNY

SEQ ID NO: 8226 - protein, 21 aa, Artificial Sequence
  source: /note="Description of Artificial Sequence: Synthetic peptide"
  MOD_RES (20)..(21): Any amino acid
EIRSESDASATHYAEAVKGXX

SEQ ID NO: 8227 - protein, 21 aa, Artificial Sequence
  source: /note="Description of Artificial Sequence: Synthetic peptide"
  MOD_RES (5)..(5): Any amino acid
  MOD_RES (8)..(9): Any amino acid
  MOD_RES (12)..(12): Any amino acid
  MOD_RES (15)..(15): Any amino acid
  MOD_RES (20)..(21): Any amino acid
EIRSXSDXXATXYAXAVKGXX

SEQ ID NO: 8228 - protein, 9 aa, Artificial Sequence
  source: /note="Description of Artificial Sequence: Synthetic peptide"
  MOD_RES (8)..(9): Any amino acid
GASNRYLXX

SEQ ID NO: 8229 - protein, 12 aa, Artificial Sequence
  source: /note="Description of Artificial Sequence: Synthetic peptide"
  MOD_RES (11)..(12): Any amino acid
GFTFSNYWISXX

SEQ ID NO: 8230 - protein, 6 aa, Mus musculus
GGNDGY

SEQ ID NO: 8231 - protein, 10 aa, Mus musculus
GYTFTSSVMH

SEQ ID NO: 8232 - protein, 10 aa, Mus musculus
GYTSPTYWIH

SEQ ID NO: 8233 - protein, 10 aa, Mus musculus
GYTSTTYWIH

SEQ ID NO: 8234 - protein, 13 aa, Artificial Sequence
  source: /note="Description of Artificial Sequence: Synthetic peptide"
  MOD_RES (12)..(13): Any amino acid
KASKRVTTYVSXX

SEQ ID NO: 8235 - protein, 13 aa, Artificial Sequence
  source: /note="Description of Artificial Sequence: Synthetic peptide"
  MOD_RES (5)..(5): Any amino acid
  MOD_RES (7)..(7): Any amino acid
  MOD_RES (12)..(13): Any amino acid
KASKXVXTYVSXX

SEQ ID NO: 8236 - protein, 37 aa, Homo sapiens [sequence omitted]

SEQ ID NO: 8237 - protein, 17 aa, Mus musculus
NINPDSGSTDYNEEFKS

SEQ ID NO: 8238 - protein, 17 aa, Mus musculus
NINPDSGSTDYNEKFKG

SEQ ID NO: 8239 - protein, 17 aa, Mus musculus
NINPDSGSTDYNEKFKS

SEQ ID NO: 8240 - protein, 9 aa, Mus musculus
QQGSTIPFT

SEQ ID NO: 8241 - protein, 9 aa, Mus musculus
QQYSSYPFT

SEQ ID NO: 8242 - protein, 7 aa, Mus musculus
RASNLAS

SEQ ID NO: 8243 - protein, 13 aa, Artificial Sequence
  source: /note="Description of Artificial Sequence: Synthetic peptide"
  MOD_RES (10)..(13): Any amino acid
SQSYNYPYTXXXX

SEQ ID NO: 8244 - protein, 15 aa, Artificial Sequence
  source: /note="Description of Artificial Sequence: Synthetic peptide"
  MOD_RES (1)..(2): Any amino acid
  MOD_RES (7)..(11): Any amino acid
  MOD_RES (15)..(15): Any amino acid
XXSNRYXXXXXPVDX

SEQ ID NO: 8245 - protein, 13 aa, Artificial Sequence
  source: /note="Description of Artificial Sequence: Synthetic peptide"
  MOD_RES (12)..(13): Any amino acid
YFDYGLAIQNYXX

SEQ ID NO: 8246 - protein, 17 aa, Mus musculus
YINPYNDGTKYNEKFKG

SEQ ID NO: 8247 - protein, 52 aa, Homo sapiens
YRQSMNNFQGLRSFGCRFGTCTVQKLAHQIYQFTDKDKDNVAPRSKISPQGY

SEQ ID NO: 8248 - protein, 7 aa, Oryctolagus cuniculus
DASTLAS

SEQ ID NO: 8249 - protein, 5 aa, Oryctolagus cuniculus
GYYMN

SEQ ID NO: 8250 - protein, 15 aa, Oryctolagus cuniculus
IGINGATYYASWAKG

SEQ ID NO: 8251 - protein, 13 aa, Oryctolagus cuniculus
LGSYDCTNGDCFV

SEQ ID NO: 8252 - protein, 13 aa, Oryctolagus cuniculus
QASQSVYHNTYLA

SEQ ID NO: 8253 - protein, 13 aa, Artificial Sequence
  source: /note="Description of Artificial Sequence: Synthetic peptide"
  MOD_RES (12)..(13): Any amino acid
AARDESLNGVVXX

SEQ ID NO: 8254 - protein, 9 aa, Artificial Sequence
  source: /note="Description of Artificial Sequence: Synthetic peptide"
  MOD_RES (8)..(9): Any amino acid
AASSLQSXX

SEQ ID NO: 8255 - protein, 13 aa, Artificial Sequence
  source: /note="Description of Artificial Sequence: Synthetic peptide"
  MOD_RES (12)..(13): Any amino acid
AAWDDSLSGWVXX

SEQ ID NO: 8256 - protein, 19 aa, Artificial Sequence
  source: /note="Description of Artificial Sequence: Synthetic peptide"
  MOD_RES (18)..(19): Any amino acid
AGGIAAAGLYYYYGMDVXX

SEQ ID NO: 8257 - protein, 19 aa, Artificial Sequence
  source: /note="Description of Artificial Sequence: Synthetic peptide"
  MOD_RES (18)..(19): Any amino acid
AISGSGGRTYYADSVKGXX

SEQ ID NO: 8258 - protein, 9 aa, Artificial Sequence
  source: /note="Description of Artificial Sequence: Synthetic peptide"
  MOD_RES (8)..(9): Any amino acid
DNNKRPSXX

SEQ ID NO: 8259 - protein, 23 aa, Artificial Sequence
  source: /note="Description of Artificial Sequence: Synthetic peptide"
  MOD_RES (22)..(23): Any amino acid
DQMSIIMLRGVFPPYYYGMDVXX

SEQ ID NO: 8260 - protein, 23 aa, Artificial Sequence
  source: /note="Description of Artificial Sequence: Synthetic peptide"
  MOD_RES (22)..(23): Any amino acid
DQREVGPYSSGWYDYYYGMDVXX

SEQ ID NO: 8261 - protein, 23 aa, Artificial Sequence
  source: /note="Description of Artificial Sequence: Synthetic peptide"
  MOD_RES (22)..(23): Any amino acid
DRLNYYDSSGYYHYKYYGLAVXX

SEQ ID NO: 8262 - protein, 23 aa, Artificial Sequence
  source: /note="Description of Artificial Sequence: Synthetic peptide"
  MOD_RES (22)..(23): Any amino acid
DRLNYYDSSGYYHYKYYGMAVXX

SEQ ID NO: 8263 - protein, 22 aa, Artificial Sequence
  source: /note="Description of Artificial Sequence: Synthetic peptide"
  MOD_RES (21)..(22): Any amino acid
DRTGYSISWSSYYYYYGMDVXX

SEQ ID NO: 8264 - protein, 7 aa, Artificial Sequence
  source: /note="Description of Artificial Sequence: Synthetic peptide"
  MOD_RES (6)..(7): Any amino acid
DYAMSXX

SEQ ID NO: 8265 - protein, 7 aa, Artificial Sequence
  source: /note="Description of Artificial Sequence: Synthetic peptide"
  MOD_RES (6)..(7): Any amino acid
DYYMYXX

SEQ ID NO: 8266 - protein, 24 aa, Artificial Sequence
  source: /note="Description of Artificial Sequence: Synthetic peptide"
  MOD_RES (23)..(24): Any amino acid
EGVSGSSPYSISWYDYYYGMDVXX

SEQ ID NO: 8267 - protein, 22 aa, Artificial Sequence
  source: /note="Description of Artificial Sequence: Synthetic peptide"
  MOD_RES (21)..(22): Any amino acid
ERKRVTMSTLYYYFYYGMDVXX

SEQ ID NO: 8268 - protein, 9 aa, Artificial Sequence
  source: /note="Description of Artificial Sequence: Synthetic peptide"
  MOD_RES (8)..(9): Any amino acid
EVSNRFSXX

SEQ ID NO: 8269 - protein, 21 aa, Artificial Sequence
  source: /note="Description of Artificial Sequence: Synthetic peptide"
  MOD_RES (20)..(21): Any amino acid
FIRSRAYGGTPEYAASVKGXX

SEQ ID NO: 8270 - protein, 9 aa, Artificial Sequence
  source: /note="Description of Artificial Sequence: Synthetic peptide"
  MOD_RES (8)..(9): Any amino acid
GASSLQSXX

SEQ ID NO: 8271 - protein, 9 aa, Artificial Sequence
  source: /note="Description of Artificial Sequence: Synthetic peptide"
  MOD_RES (8)..(9): Any amino acid
GASSRATXX

SEQ ID NO: 8272 - protein, 20 aa, Artificial Sequence
  source: /note="Description of Artificial Sequence: Synthetic peptide"
  MOD_RES (19)..(20): Any amino acid
GGYSGYAGLYSHYYGMDVXX

SEQ ID NO: 8273 - protein, 9 aa, Artificial Sequence
  source: /note="Description of Artificial Sequence: Synthetic peptide"
  MOD_RES (8)..(9): Any amino acid
GKNNRPSXX

SEQ ID NO: 8274 - protein, 12 aa, Artificial Sequence
  source: /note="Description of Artificial Sequence: Synthetic peptide"
  MOD_RES (11)..(12): Any amino acid
GRGIAARWDYXX

SEQ ID NO: 8275 - protein, 13 aa, Artificial Sequence
  source: /note="Description of Artificial Sequence: Synthetic peptide"
  MOD_RES (12)..(13): Any amino acid
GTWDSRLSAVVXX

SEQ ID NO: 8276 - protein, 7 aa, Artificial Sequence
  source: /note="Description of Artificial Sequence: Synthetic peptide"
  MOD_RES (6)..(7): Any amino acid
GYYMHXX

SEQ ID NO: 8277 - protein, 18 aa, Artificial Sequence
  source: /note="Description of Artificial Sequence: Synthetic peptide"
  MOD_RES (17)..(18): Any amino acid
KSSQSLLHSAGKTYLYXX

SEQ ID NO: 8278 - protein, 18 aa, Artificial Sequence
  source: /note="Description of Artificial Sequence: Synthetic peptide"
  MOD_RES (17)..(18): Any amino acid
KSSQSLLHSDGKTYLYXX

SEQ ID NO: 8279 - protein, 18 aa, Artificial Sequence
  source: /note="Description of Artificial Sequence: Synthetic peptide"
  MOD_RES (17)..(18): Any amino acid
KSSQSLLHSDGRNYLYXX

SEQ ID NO: 8280 - protein, 18 aa, Artificial Sequence
  source: /note="Description of Artificial Sequence: Synthetic peptide"
  MOD_RES (10)..(10): Any amino acid
  MOD_RES (12)..(13): Any amino acid
  MOD_RES (17)..(18): Any amino acid
KSSQSLLHSXGXXYLYXX

SEQ ID NO: 8281 - protein, 9 aa, Artificial Sequence
  source: /note="Description of Artificial Sequence: Synthetic peptide"
  MOD_RES (8)..(9): Any amino acid
LGSNRASXX

SEQ ID NO: 8282 - protein, 11 aa, Artificial Sequence
  source: /note="Description of Artificial Sequence: Synthetic peptide"
  MOD_RES (10)..(11): Any amino acid
LQYNIYPWTXX

SEQ ID NO: 8283 - protein, 11 aa, Artificial Sequence
  source: /note="Description of Artificial Sequence: Synthetic peptide"
  MOD_RES (10)..(11): Any amino acid
LQYNSFPWTXX

SEQ ID NO: 8284 - protein, 11 aa, Artificial Sequence
  source: /note="Description of Artificial Sequence: Synthetic peptide"
  MOD_RES (5)..(6): Any amino acid
  MOD_RES (10)..(11): Any amino acid
LQYNXXPWTXX

SEQ ID NO: 8285 - protein, 11 aa, Artificial Sequence
  source: /note="Description of Artificial Sequence: Synthetic peptide"
  MOD_RES (10)..(11): Any amino acid
MQALQTPFTXX

SEQ ID NO: 8286 - protein, 11 aa, Artificial Sequence
  source: /note="Description of Artificial Sequence: Synthetic peptide"
  MOD_RES (10)..(11): Any amino acid
MQSFPLPLTXX

SEQ ID NO: 8287 - protein, 11 aa, Artificial Sequence
  source: /note="Description of Artificial Sequence: Synthetic peptide"
  MOD_RES (3)..(6): Any amino acid
  MOD_RES (8)..(8): Any amino acid
  MOD_RES (10)..(11): Any amino acid
MQXXXXPXTXX

SEQ ID NO: 8288 - protein, 7 aa, Artificial Sequence
  source: /note="Description of Artificial Sequence: Synthetic peptide"
  MOD_RES (6)..(7): Any amino acid
NAWMSXX

SEQ ID NO: 8289 - protein, 13 aa, Artificial Sequence
  source: /note="Description of Artificial Sequence: Synthetic peptide"
  MOD_RES (12)..(13): Any amino acid
NSRDSSVYHLVXX

SEQ ID NO: 8290 - protein, 13 aa, Artificial Sequence
  source: /note="Description of Artificial Sequence: Synthetic peptide"
  MOD_RES (12)..(13): Any amino acid
QGDSLRSFYASXX

SEQ ID NO: 8291 - protein, 11 aa, Artificial Sequence
  source: /note="Description of Artificial Sequence: Synthetic peptide"
  MOD_RES (10)..(11): Any amino acid
QQYGNSLCRXX

SEQ ID NO: 8292 - protein, 11 aa, Artificial Sequence
  source: /note="Description of Artificial Sequence: Synthetic peptide"
  MOD_RES (10)..(11): Any amino acid
QQYGNSLSRXX

SEQ ID NO: 8293 - protein, 11 aa, Artificial Sequence
  source: /note="Description of Artificial Sequence: Synthetic peptide"
  MOD_RES (8)..(8): Any amino acid
  MOD_RES (10)..(11): Any amino acid
QQYGNSLXRXX

SEQ ID NO: 8294 - protein, 13 aa, Artificial Sequence
  source: /note="Description of Artificial Sequence: Synthetic peptide"
  MOD_RES (12)..(13): Any amino acid
RASQGIRKDLGXX

SEQ ID NO: 8295 - protein, 13 aa, Artificial Sequence
  source: /note="Description of Artificial Sequence: Synthetic peptide"
  MOD_RES (12)..(13): Any amino acid
RASQGIRNDLGXX

SEQ ID NO: 8296 - protein, 13 aa, Artificial Sequence
  source: /note="Description of Artificial Sequence: Synthetic peptide"
  MOD_RES (8)..(8): Any amino acid
  MOD_RES (12)..(13): Any amino acid
RASQGIRXDLGXX

SEQ ID NO: 8297 - protein, 14 aa, Artificial Sequence
  source: /note="Description of Artificial Sequence: Synthetic peptide"
  MOD_RES (13)..(14): Any amino acid
RASQSVSSGYLTXX

SEQ ID NO: 8298 - protein, 14 aa, Artificial Sequence
  source: /note="Description of Artificial Sequence: Synthetic peptide"
  MOD_RES (5)..(8): Any amino acid
  MOD_RES (10)..(10): Any amino acid
  MOD_RES (12)..(14): Any amino acid
RASQXXXXGXLXXX

SEQ ID NO: 8299 - protein, 21 aa, Artificial Sequence
  source: /note="Description of Artificial Sequence: Synthetic peptide"
  MOD_RES (20)..(21): Any amino acid
RIKSKTDGGTTDYAAPVKGXX

SEQ ID NO: 8300 - protein, 21 aa, Artificial Sequence
  source: /note="Description of Artificial Sequence: Synthetic peptide"
  MOD_RES (20)..(21): Any amino acid
RIKSKTDGGTTDYTAPVKGXX

SEQ ID NO: 8301 - protein, 21 aa, Artificial Sequence
  source: /note="Description of Artificial Sequence: Synthetic peptide"
  MOD_RES (20)..(21): Any amino acid
RIKSTTDGGTTDYAAPVKGXX

SEQ ID NO: 8302 - protein, 21 aa, Artificial Sequence
  source: /note="Description of Artificial Sequence: Synthetic peptide"
  MOD_RES (5)..(5): Any amino acid
  MOD_RES (14)..(14): Any amino acid
  MOD_RES (20)..(21): Any amino acid
RIKSXTDGGTTDYXAPVKGXX

SEQ ID NO: 8303 - protein, 9 aa, Artificial Sequence
  source: /note="Description of Artificial Sequence: Synthetic peptide"
  MOD_RES (8)..(9): Any amino acid
RNNQRPSXX

SEQ ID NO: 8304 - protein, 9 aa, Artificial Sequence
  source: /note="Description of Artificial Sequence: Synthetic peptide"
  MOD_RES (8)..(9): Any amino acid
RSNQRPSXX

SEQ ID NO: 8305 - protein, 18 aa, Artificial Sequence
  source: /note="Description of Artificial Sequence: Synthetic peptide"
  MOD_RES (17)..(18): Any amino acid
RSSQSLLHSFGYNYLDXX

SEQ ID NO: 8306 - protein, 9 aa, Artificial Sequence
  source: /note="Description of Artificial Sequence: Synthetic peptide"
  MOD_RES (2)..(2): Any amino acid
  MOD_RES (8)..(9): Any amino acid
RXNQRPSXX

SEQ ID NO: 8307 - protein, 7 aa, Artificial Sequence
  source: /note="Description of Artificial Sequence: Synthetic peptide"
  MOD_RES (6)..(7): Any amino acid
SFGMHXX

SEQ ID NO: 8308 - protein, 15 aa, Artificial Sequence
  source: /note="Description of Artificial Sequence: Synthetic peptide"
  MOD_RES (14)..(15): Any amino acid
SGSSSNIGNNYVSXX

SEQ ID NO: 8309 - protein, 15 aa, Artificial Sequence
  source: /note="Description of Artificial Sequence: Synthetic peptide"
  MOD_RES (14)..(15): Any amino acid
SGSSSNIGSNTVNXX

SEQ ID NO: 8310 - protein, 15 aa, Artificial Sequence
  source: /note="Description of Artificial Sequence: Synthetic peptide"
  MOD_RES (14)..(15): Any amino acid
SGSSSNIGSNYVYXX

SEQ ID NO: 8311 - protein, 15 aa, Artificial Sequence
  source: /note="Description of Artificial Sequence: Synthetic peptide"
  MOD_RES (9)..(9): Any amino acid
  MOD_RES (11)..(11): Any amino acid
  MOD_RES (13)..(15): Any amino acid
SGSSSNIGXNXVXXX

SEQ ID NO: 8312 - protein, 19 aa, Artificial Sequence
  source: /note="Description of Artificial Sequence: Synthetic peptide"
  MOD_RES (18)..(19): Any amino acid
SISSSSSYRYYADSVKGXX

SEQ ID NO: 8313 - protein, 7 aa, Artificial Sequence
  source: /note="Description of Artificial Sequence: Synthetic peptide"
  MOD_RES (2)..(2): Any amino acid
  MOD_RES (6)..(7): Any amino acid
SXGMHXX

SEQ ID NO: 8314 - protein, 7 aa, Artificial Sequence
  source: /note="Description of Artificial Sequence: Synthetic peptide"
  MOD_RES (6)..(7): Any amino acid
SYAMSXX

SEQ ID NO: 8315 - protein, 7 aa, Artificial Sequence
  source: /note="Description of Artificial Sequence: Synthetic peptide"
  MOD_RES (6)..(7): Any amino acid
SYGMHXX

SEQ ID NO: 8316 - protein, 9 aa, Artificial Sequence
  source: /note="Description of Artificial Sequence: Synthetic peptide"
  MOD_RES (8)..(9): Any amino acid
TNNQRPSXX

SEQ ID NO: 8317 - protein, 7 aa, Artificial Sequence
  source: /note="Description of Artificial Sequence: Synthetic peptide"
  MOD_RES (6)..(7): Any amino acid
TYSMNXX

SEQ ID NO: 8318 - protein, 19 aa, Artificial Sequence
  source: /note="Description of Artificial Sequence: Synthetic peptide"
  MOD_RES (18)..(19): Any amino acid
VISFDGSIKYSVDSVKGXX

SEQ ID NO: 8319 - protein, 19 aa, Artificial Sequence
  source: /note="Description of Artificial Sequence: Synthetic peptide"
  MOD_RES (4)..(4): Any amino acid
  MOD_RES (8)..(8): Any amino acid
  MOD_RES (11)..(12): Any amino acid
  MOD_RES (18)..(19): Any amino acid
VISXDGSXKYXXDSVKGXX

SEQ ID NO: 8320 - protein, 19 aa, Artificial Sequence
  source: /note="Description of Artificial Sequence: Synthetic peptide"
  MOD_RES (18)..(19): Any amino acid
VISYDGSHESYADSVKGXX

SEQ ID NO: 8321 - protein, 19 aa, Artificial Sequence
  source: /note="Description of Artificial Sequence: Synthetic peptide"
  MOD_RES (18)..(19): Any amino acid
VIWYDGSNKYYADSVKGXX

SEQ ID NO: 8322 - protein, 19 aa, Artificial Sequence
  source: /note="Description of Artificial Sequence: Synthetic peptide"
  MOD_RES (18)..(19): Any amino acid
WINPNSGGTNYAQKFQGXX

SEQ ID NO: 8323 - protein, 19 aa, Artificial Sequence
  source: /note="Description of Artificial Sequence: Synthetic peptide"
  MOD_RES (18)..(19): Any amino acid
WISPNSGGTNYAQKFQGXX

SEQ ID NO: 8324 - protein, 19 aa, Artificial Sequence
  source: /note="Description of Artificial Sequence: Synthetic peptide"
  MOD_RES (3)..(3): Any amino acid
  MOD_RES (18)..(19): Any amino acid
WIXPNSGGTNYAQKFQGXX

SEQ ID NO: 8325 - protein, 9 aa, Artificial Sequence
  source: /note="Description of Artificial Sequence: Synthetic peptide"
  MOD_RES (1)..(1): Any amino acid
  MOD_RES (8)..(9): Any amino acid
XASSLQSXX

SEQ ID NO: 8326 - protein, 9 aa, Artificial Sequence
  source: /note="Description of Artificial Sequence: Synthetic peptide"
  MOD_RES (1)..(1): Any amino acid
  MOD_RES (5)..(9): Any amino acid
XASSXXXXX

SEQ ID NO: 8327 - protein, 15 aa, Artificial Sequence
  source: /note="Description of Artificial Sequence: Synthetic peptide"
  MOD_RES (1)..(1): Any amino acid
  MOD_RES (3)..(4): Any amino acid
  MOD_RES (6)..(15): Any amino acid
XGXXSXXXXXXXXXX

SEQ ID NO: 8328 - protein, 19 aa, Artificial Sequence
  source: /note="Description of Artificial Sequence: Synthetic peptide"
  MOD_RES (1)..(1): Any amino acid
  MOD_RES (4)..(4): Any amino acid
  MOD_RES (6)..(9): Any amino acid
  MOD_RES (18)..(19): Any amino acid
XISXSXXXXYYADSVKGXX

SEQ ID NO: 8329 - protein, 21 aa, Artificial Sequence
  source: /note="Description of Artificial Sequence: Synthetic peptide"
  MOD_RES (1)..(1): Any amino acid
  MOD_RES (3)..(7): Any amino acid
  MOD_RES (9)..(16): Any amino acid
  MOD_RES (20)..(21): Any amino acid
XIXXXXXGXXXXXXXXVKGXX

SEQ ID NO: 8330 - protein, 21 aa, Artificial Sequence
  source: /note="Description of Artificial Sequence: Synthetic peptide"
  MOD_RES (1)..(1): Any amino acid
  MOD_RES (3)..(18): Any amino acid
  MOD_RES (20)..(21): Any amino acid
XIXXXXXXXXXXXXXXXXGXX

SEQ ID NO: 8331 - protein, 11 aa, Artificial Sequence
  source: /note="Description of Artificial Sequence: Synthetic peptide"
  MOD_RES (1)..(1): Any amino acid
  MOD_RES (4)..(11): Any amino acid
XQYXXXXXXXX

SEQ ID NO: 8332 - protein, 23 aa, Artificial Sequence
  source: /note="Description of Artificial Sequence: Synthetic peptide"
  MOD_RES (1)..(1): Any amino acid
  MOD_RES (3)..(7): Any amino acid
  MOD_RES (9)..(10): Any amino acid
  MOD_RES (13)..(15): Any amino acid
  MOD_RES (19)..(20): Any amino acid
  MOD_RES (22)..(23): Any amino acid
XRXXXXXSXXYYXXXYYGXXVXX

SEQ ID NO: 8333 - protein, 18 aa, Artificial Sequence
  source: /note="Description of Artificial Sequence: Synthetic peptide"
  MOD_RES (1)..(1): Any amino acid
  MOD_RES (10)..(10): Any amino acid
  MOD_RES (12)..(13): Any amino acid
  MOD_RES (16)..(18): Any amino acid
XSSQSLLHSXGXXYLXXX

SEQ ID NO: 8334 - protein, 9 aa, Artificial Sequence
  source: /note="Description of Artificial Sequence: Synthetic peptide"
  MOD_RES (1)..(2): Any amino acid
  MOD_RES (4)..(4): Any amino acid
  MOD_RES (8)..(9): Any amino acid
XXNXRPSXX

SEQ ID NO: 8335 - protein, 9 aa, Artificial Sequence
  source: /note="Description of Artificial Sequence: Synthetic peptide"
  MOD_RES (1)..(2): Any amino acid
  MOD_RES (6)..(6): Any amino acid
  MOD_RES (8)..(9): Any amino acid
XXSNRXSXX

SEQ ID NO: 8336 - protein, 13 aa, Artificial Sequence
  source: /note="Description of Artificial Sequence: Synthetic peptide"
  MOD_RES (1)..(3): Any amino acid
  MOD_RES (5)..(6): Any amino acid
  MOD_RES (8)..(9): Any amino acid
  MOD_RES (12)..(13): Any amino acid
XXXDXXLXXVVXX

SEQ ID NO: 8337 - protein, 13 aa, Artificial Sequence
  source: /note="Description of Artificial Sequence: Synthetic peptide"
  MOD_RES (1)..(3): Any amino acid
  MOD_RES (5)..(10): Any amino acid
  MOD_RES (12)..(13): Any amino acid
XXXDXXXXXXVXX

SEQ ID NO: 8338 - protein, 7 aa, Artificial Sequence
  source: /note="Description of Artificial Sequence: Synthetic peptide"
  MOD_RES (1)..(3): Any amino acid
  MOD_RES (5)..(7): Any amino acid
XXXMXXX

SEQ ID NO: 8339 - protein, 23 aa, Artificial Sequence
  source: /note="Description of Artificial Sequence: Synthetic peptide"
  MOD_RES (1)..(3): Any amino acid
  MOD_RES (5)..(9): Any amino acid
  MOD_RES (11)..(14): Any amino acid
  MOD_RES (17)..(17): Any amino acid
  MOD_RES (22)..(23): Any amino acid
XXXSXXXXXGXXXXYYXGMDVXX

SEQ ID NO: 8340 - protein, 7 aa, Artificial Sequence
  source: /note="Description of Artificial Sequence: Synthetic peptide"
  MOD_RES (1)..(7): Any amino acid
XXXXXXX

SEQ ID NO: 8341 - protein, 24 aa, Artificial Sequence
  source: /note="Description of Artificial Sequence: Synthetic peptide"
  MOD_RES (1)..(7): Any amino acid
  MOD_RES (11)..(12): Any amino acid
  MOD_RES (23)..(24): Any amino acid
XXXXXXXPYSXXWYDYYYGMDVXX

SEQ ID NO: 8342 - protein, 23 aa, Artificial Sequence
  source: /note="Description of Artificial Sequence: Synthetic peptide"
  MOD_RES (1)..(17): Any amino acid
  MOD_RES (19)..(20): Any amino acid
  MOD_RES (22)..(23): Any amino acid
XXXXXXXXXXXXXXXXXGXXVXX

SEQ ID NO: 8343 - protein, 24 aa, Artificial Sequence
  source: /note="Description of Artificial Sequence: Synthetic peptide"
  MOD_RES (1)..(17): Any amino acid
  MOD_RES (19)..(20): Any amino acid
  MOD_RES (22)..(24): Any amino acid
XXXXXXXXXXXXXXXXXGXXVXXX

SEQ ID NO: 8344 - protein, 7 aa, Artificial Sequence
  source: /note="Description of Artificial Sequence: Synthetic peptide"
  MOD_RES (1)..(1): Any amino acid
  MOD_RES (3)..(3): Any amino acid
  MOD_RES (5)..(7): Any amino acid
XYXMXXX

SEQ ID NO: 8345 - protein, 7 aa, Artificial Sequence
  source: /note="Description of Artificial Sequence: Synthetic peptide"
  MOD_RES (1)..(1): Any amino acid
  MOD_RES (5)..(7): Any amino acid
XYYMXXX

SEQ ID NO: 8346 - protein, 19 aa, Artificial Sequence
  source: /note="Description of Artificial Sequence: Synthetic peptide"
EIRSESDASATHYAEAVKG

SEQ ID NO: 8347 - protein, 7 aa, Artificial Sequence
  source: /note="Description of Artificial Sequence: Synthetic peptide"
GASNRYL

SEQ ID NO: 8348 - protein, 10 aa, Artificial Sequence
  source: /note="Description of Artificial Sequence: Synthetic peptide"
GFTFSNYWIS

SEQ ID NO: 8349 - protein, 11 aa, Artificial Sequence
  source: /note="Description of Artificial Sequence: Synthetic peptide"
KASKRVTTYVS

SEQ ID NO: 8350 - protein, 9 aa, Artificial Sequence
  source: /note="Description of Artificial Sequence: Synthetic peptide"
SQSYNYPYT

SEQ ID NO: 8351 - protein, 11 aa, Artificial Sequence
  source: /note="Description of Artificial Sequence: Synthetic peptide"
YFDYGLAIQNY

SEQ ID NO: 8352 - protein, 17 aa, Oryctolagus cuniculus
CIYNGDGSTYYASWVNG

SEQ ID NO: 8353 - protein, 7 aa, Oryctolagus cuniculus
DASKLAS

SEQ ID NO: 8354 - protein, 7 aa, Oryctolagus cuniculus
  MOD_RES (5)..(7): Any amino acid
DLDLXXX

SEQ ID NO: 8355 - protein, 12 aa, Oryctolagus cuniculus
GGYRSDSVDGVA

SEQ ID NO: 8356 - protein, 13 aa, Oryctolagus cuniculus
LGSYDCSNGDCFV

SEQ ID NO: 8357 - protein, 13 aa, Oryctolagus cuniculus
LGSYDCSRGDCFV

SEQ ID NO: 8358 - protein, 13 aa, Oryctolagus cuniculus
LGSYDCSSGDCFV

SEQ ID NO: 8359 - protein, 13 aa, Oryctolagus cuniculus
LGSYDCSTGDCFV

SEQ ID NO: 8360 - protein, 5 aa, Oryctolagus cuniculus
NHYMQ

SEQ ID NO: 8361 - protein, 5 aa, Oryctolagus cuniculus
NYYMQ

SEQ ID NO: 8362 - protein, 13 aa, Oryctolagus cuniculus
QASESLYNNNALA

SEQ ID NO: 8363 - protein, 13 aa, Oryctolagus cuniculus
QASQNVYNNNYLA

SEQ ID NO: 8364 - protein, 13 aa, Oryctolagus cuniculus
QASQSVYDNNYLA

SEQ ID NO: 8365 - protein, 13 aa, Oryctolagus cuniculus
QASQSVYNYNYLA

SEQ ID NO: 8366 - protein, 13 aa, Oryctolagus cuniculus
RASQSVYYNNYLA

SEQ ID NO: 8367 - protein, 5 aa, Oryctolagus cuniculus
SNAMW

SEQ ID NO: 8368 - protein, 7 aa, Oryctolagus cuniculus
STSTLAS

SEQ ID NO: 8369 - protein, 5 aa, Oryctolagus cuniculus
SYYMQ

SEQ ID NO: 8370 - protein, 16 aa, Oryctolagus cuniculus
VIGINDNTYYASWAKG

SEQ ID NO: 8371 - protein, 16 aa, Oryctolagus cuniculus
VIGINGATYYASWAKG

SEQ ID NO: 8372 - protein, 16 aa, Oryctolagus cuniculus
VIGSDGKTYYATWAKG

SEQ ID NO: 8373 - protein, 16 aa, Oryctolagus cuniculus
VIGVNGKRYYASWAKG

SEQ ID NO: 8374 - protein, 16 aa, Oryctolagus cuniculus
VVGINGRTYYASWAKG

SEQ ID NO: 8375 - DNA, 1347 bp, Artificial Sequence
  source: /note="Description of Artificial Sequence: Synthetic polynucleotide"
gaagttcagctggttgaatccggtggtggtctggttcagccaggtggttccctgcgtctgtcctgcgctgcttccggtttcaccttctccaactactggatctcctgggttcgtcaggctcctggtaaaggtctggaatgggttgctgaaatccgttccgaatccgacgcgtccgctacccattacgctgaagctgttaaaggtcgtttcaccatctcccgtgacaacgctaagaactccctgtacctgcagatgaactccctgcgtgctgaagacaccgctgtttactactgcctggcttactttgactacggtctggctatccagaactactggggtcagggtaccctggttaccgtttcctccgcctccaccaagggcccatctgtcttcccactggccccatgctcccgcagcacctccgagagcacagccgccctgggctgcctggtcaaggactacttcccagaacctgtgaccgtgtcctggaactctggcgctctgaccagcggcgtgcacaccttcccagctgtcctgcagtcctcaggtctctactccctcagcagcgtggtgaccgtgccatccagcaacttcggcacccagacctacacctgcaacgtagatcacaagccaagcaacaccaaggtcgacaagaccgtggagagaaagtgttgtgtggagtgtccaccttgtccagcccctccagtggccggaccatccgtgttcctgttccctccaaagccaaaggacaccctgatgatctccagaaccccagaggtgacctgtgtggtggtggacgtgtcccacgaggacccagaggtgcagttcaactggtatgtggacggagtggaggtgcacaacgccaagaccaagccaagagaggagcagttcaactccaccttcagagtggtgagcgtgctgaccgtggtgcaccaggactggctgaacggaaaggagtataagtgtaaggtgtccaacaagggactgccatccagcatcgagaagaccatctccaagaccaagggacagccaagagagccacaggtgtataccctgcccccatccagagaggagatgaccaagaaccaggtgtccctgacctgtctggtgaagggattctatccatccgacatcgccgtggagtgggagtccaacggacagccagagaacaactataagaccacccctccaatgctggactccgacggatccttcttcctgtattccaagctgaccgtggacaagtccagatggcagcagggaaacgtgttctcttgttccgtgatgcacgaggccctgcacaaccactatacccagaagagcctgtccctgtctccaggaaagtaa

SEQ ID NO: 8376 - DNA, 1425 bp, Artificial Sequence
  source: /note="Description of Artificial Sequence: Synthetic polynucleotide"
atggacatgagggtgcccgctcagctcctggggctcctgctgctgtggctgagaggtgcgcgctgtcaggtgcagctggtgcagtctggggctgaggtgaagaagcctggggcctcagtgaaggtctcctgcaaggcttctggatacaccttcaccgactactatatgtactgggtgcgacaggcccctggacaagggcttgagtggatgggatggatcagccctaatagtggtggcacaaactatgcccagaagtttcagggcagggtcaccatgaccagggacacgtctatcagcacagcctacatggagctgagtaggctgagatctgacgacacggccgtgtattactgtgtgagaggaggatatagtggctacgctgggctctactcccactactacggtatggacgtctggggccaagggaccacggtcaccgtctctagtgcctccaccaagggcccatcggtcttccccctggcgccctgctccaggagcacctccgagagcacagcggccctgggctgcctggtcaaggactacttccccgaaccggtgacggtgtcgtggaactcaggcgctctgaccagcggcgtgcacaccttcccagctgtcctacagtcctcaggactctactccctcagcagcgtggtgaccgtgccctccagcaacttcggcacccagacctacacctgcaacgtagatcacaagcccagcaacaccaaggtggacaagacagttgagcgcaaatgttgtgtcgagtgcccaccgtgcccagcaccacctgtggcaggaccgtcagtcttcctcttccccccaaaacccaaggacaccctcatgatctcccggacccctgaggtcacgtgcgtggtggtggacgtgagccacgaagaccccgaggtccagttcaactggtacgtggacggcgtggaggtgcataatgccaagacaaagccacgggaggagcagttcaacagcacgttccgtgtggtcagcgtcctcaccgttgtgcaccaggactggctgaacggcaaggagtacaagtgcaaggtctccaacaaaggcctcccagcccccatcgagaaaaccatctccaaaaccaaagggcagccccgagaaccacaggtgtacaccctgcccccatcccgggaggagatgaccaagaaccaggtcagcctgacctgcctggtcaaaggcttctaccccagcgacatcgccgtggagtgggagagcaatgggcagccggagaacaactacaagaccacacctcccatgctggactccgacggctccttcttcctctacagcaagctcaccgtggacaagagcaggtggcagcaggggaacgtcttctcatgctccgtgatgcatgaggctctgcacaaccactacacgcagaagagcctctccctgtctccgggtaaa

SEQ ID NO: 8377 - DNA, 1434 bp, Artificial Sequence
  source: /note="Description of Artificial Sequence: Synthetic polynucleotide"
atggacatgagggtgcccgctcagctcctggggctcctgctgctgtggctgagaggtgcgcgctgtcaggtgcagctggtggaatctgggggaggcgtggtccagcctgggaggtccctgagactctcctgtgcagcctctggattcaccttcagtagctttggcatgcactgggtccgccaggctccaggcaaggggctggagtgggtggcagttatatcatttgatggaagtattaagtattctgtagactccgtgaagggccgattcaccatctccagagacaattcaaagaacacgctgtttctgcaaatgaacagcctgcgagccgaggacacggctgtgtattactgtgcgagagatcggctcaattactatgatagtagtggttattatcactacaaatactacggtatggccgtctggggccaagggaccacggtcaccgtctctagtgcctccaccaagggcccatcggtcttccccctggcgccctgctccaggagcacctccgagagcacagcggccctgggctgcctggtcaaggactacttccccgaaccggtgacggtgtcgtggaactcaggcgctctgaccagcggcgtgcacaccttcccagctgtcctacagtcctcaggactctactccctcagcagcgtggtgaccgtgccctccagcaacttcggcacccagacctacacctgcaacgtagatcacaagcccagcaacaccaaggtggacaagacagttgagcgcaaatgttgtgtcgagtgcccaccgtgcccagcaccacctgtggcaggaccgtcagtcttcctcttccccccaaaacccaaggacaccctcatgatctcccggacccctgaggtcacgtgcgtggtggtggacgtgagccacgaagaccccgaggtccagttcaactggtacgtggacggcgtggaggtgcataatgccaagacaaagccacgggaggagcagttcaacagcacgttccgtgtggtcagcgtcctcaccgttgtgcaccaggactggctgaacggcaaggagtacaagtgcaaggtctccaacaaaggcctcccagcccccatcgagaaaaccatctccaaaaccaaagggcagccccgagaaccacaggtgtacaccctgcccccatcccgggaggagatgaccaagaaccaggtcagcctgacctgcctggtcaaaggcttctaccccagcgacatcgccgtggagtgggagagcaatgggcagccggagaacaactacaagaccacacctcccatgctggactccgacggctccttcttcctctacagcaagctcaccgtggacaagagcaggtggcagcaggggaacgtcttctcatgctccgtgatgcatgaggctctgcacaaccactacacgcagaagagcctctccctgtctccgggtaaa

SEQ ID NO: 8378 - DNA, 1434 bp, Artificial Sequence
  source: /note="Description of Artificial Sequence: Synthetic polynucleotide"
atggacatgagggtgcccgctcagctcctggggctcctgctgctgtggctgagaggtgcgcgctgtcaggtgcagctggtggaatctgggggaggcgtggtccagcctgggaggtccctgagactctcctgtgcagcctctggattcaccttcagtagctttggcatgcattgggtccgccaggctccaggcaaggggctggagtgggtggcagttatatcatttgatggaagtattaagtactctgtagactccgtgaagggccgattcaccatctccagagacaattcaaagaacacgctgtttctgcaaatgaacagcctgcgagccgaggacacggctgtgtattactgtgcgagagatcggctcaattactatgatagtagtggttattatcactacaaatactacggtctggccgtctggggccaagggaccacggtcaccgtctctagtgcctccaccaagggcccatcggtcttccccctggcgccctgctccaggagcacctccgagagcacagcggccctgggctgcctggtcaaggactacttccccgaaccggtgacggtgtcgtggaactcaggcgctctgaccagcggcgtgcacaccttcccagctgtcctacagtcctcaggactctactccctcagcagcgtggtgaccgtgccctccagcaacttcggcacccagacctacacctgcaacgtagatcacaagcccagcaacaccaaggtggacaagacagttgagcgcaaatgttgtgtcgagtgcccaccgtgcccagcaccacctgtggcaggaccgtcagtcttcctcttccccccaaaacccaaggacaccctcatgatctcccggacccctgaggtcacgtgcgtggtggtggacgtgagccacgaagaccccgaggtccagttcaactggtacgtggacggcgtggaggtgcataatgccaagacaaagccacgggaggagcagttcaacagcacgttccgtgtggtcagcgtcctcaccgttgtgcaccaggactggctgaacggcaaggagtacaagtgcaaggtctccaacaaaggcctcccagcccccatcgagaaaaccatctccaaaaccaaagggcagccccgagaaccacaggtgtacaccctgcccccatcccgggaggagatgaccaagaaccaggtcagcctgacctgcctggtcaaaggcttctaccccagcgacatcgccgtggagtgggagagcaatgggcagccggagaacaactacaagaccacacctcccatgctggactccgacggctccttcttcctctacagcaagctcaccgtggacaagagcaggtggcagcaggggaacgtcttctcatgctccgtgatgcatgaggctctgcacaaccactacacgcagaagagcctctccctgtctccgggtaaa

SEQ ID NO: 8379 - DNA, 1431 bp, Artificial Sequence
  source: /note="Description of Artificial Sequence: Synthetic polynucleotide"
atggacatgagggtgcccgctcagctcctggggctcctgctgctgtggctgagaggtgcgcgctgtcaggtgcagctggtggagtctgggggaggcgtggtccagcctgggaggtccctgagactctcctgtgcagcctctggattcaccttcagtagctatggcatgcactgggtccgccaggctccaggcaaggggctggagtgggtggcagttatttcatatgatggaagtcatgaatcctatgcagactccgtgaagggccgattcaccatctccagagacatttccaagaacacgctgtatctgcaaatgaacagcctgagagctgaggacacggctgtgtatttctgtgcgagagagaggaaacgggttacgatgtctaccttatattactacttctactacggtatggacgtctggggccaagggaccacggtcaccgtctctagtgcctccaccaagggcccatcggtcttccccctggcgccctgctccaggagcacctccgagagcacagcggccctgggctgcctggtcaaggactacttccccgaaccggtgacggtgtcgtggaactcaggcgctctgaccagcggcgtgcacaccttcccagctgtcctacagtcctcaggactctactccctcagcagcgtggtgaccgtgccctccagcaacttcggcacccagacctacacctgcaacgtagatcacaagcccagcaacaccaaggtggacaagacagttgagcgcaaatgttgtgtcgagtgcccaccgtgcccagcaccacctgtggcaggaccgtcagtcttcctcttccccccaaaacccaaggacaccctcatgatctcccggacccctgaggtcacgtgcgtggtggtggacgtgagccacgaagaccccgaggtccagttcaactggtacgtggacggcgtggaggtgcataatgccaagacaaagccacgggaggagcagttcaacagcacgttccgtgtggtcagcgtcctcaccgttgtgcaccaggactggctgaacggcaaggagtacaagtgcaaggtctccaacaaaggcctcccagcccccatcgagaaaaccatctccaaaaccaaagggcagccccgagaaccacaggtgtacaccctgcccccatcccgggaggagatgaccaagaaccaggtcagcctgacctgcctggtcaaaggcttctaccccagcgacatcgccgtggagtgggagagcaatgggcagccggagaacaactacaagaccacacctcccatgctggactccgacggctccttcttcctctacagcaagctcaccgtggacaagagcaggtggcagcaggggaacgtcttctcatgctccgtgatgcatgaggctctgcacaaccactacacgcagaagagcctctccctgtctccgggtaaa

SEQ ID NO: 8380 - DNA, 1422 bp, Artificial Sequence
  source: /note="Description of Artificial Sequence: Synthetic polynucleotide"
atggacatgagggtgcccgctcagctcctggggctcctgctgctgtggctgagaggtgcgcgctgtcaggtgcagctggtggagtctgggggaggcgtggtccagcctgggaggtccctgagactctcctgtgcagcgtctggattcaccttcagtagctatggcatgcactgggtccgccaggctccaggcaaggggctggagtgggtggcagttatatggtatgatggaagtaataaatactatgcagactccgtgaagggccgattcatcatctccagagataaatccaagaacacgctgtatctgcaaatgaacagcctgagagccgaggacacggctgtgtattactgtgcgagagcggggggtatagcagcagctggcctctactactactacggtatggacgtctggggccaagggaccacggtcaccgtctctagtgcctccaccaagggcccatcggtcttccccctggcgccctgctccaggagcacctccgagagcacagcggccctgggctgcctggtcaaggactacttccccgaaccggtgacggtgtcgtggaactcaggcgctctgaccagcggcgtgcacaccttcccagctgtcctacagtcctcaggactctactccctcagcagcgtggtgaccgtgccctccagcaacttcggcacccagacctacacctgcaacgtagatcacaagcccagcaacaccaaggtggacaagacagttgagcgcaaatgttgtgtcgagtgcccaccgtgcccagcaccacctgtggcaggaccgtcagtcttcctcttccccccaaaacccaaggacaccctcatgatctcccggacccctgaggtcacgtgcgtggtggtggacgtgagccacgaagaccccgaggtccagttcaactggtacgtggacggcgtggaggtgcataatgccaagacaaagccacgggaggagcagttcaacagcacgttccgtgtggtcagcgtcctcaccgttgtgcaccaggactggctgaacggcaaggagtacaagtgcaaggtctccaacaaaggcctcccagcccccatcgagaaaaccatctccaaaaccaaagggcagccccgagaaccacaggtgtacaccctgcccccatcccgggaggagatgaccaagaaccaggtcagcctgacctgcctggtcaaaggcttctaccccagcgacatcgccgtggagtgggagagcaatgggcagccggagaacaactacaagaccacacctcccatgctggactccgacggctccttcttcctctacagcaagctcaccgtggacaagagcaggtggcagcaggggaacgtcttctcatgctccgtgatgcatgaggctctgcacaaccactacacgcagaagagcctctccctgtctccgggtaaa

SEQ ID NO: 8381 - DNA, 1434 bp, Artificial Sequence
  source: /note="Description of Artificial Sequence: Synthetic polynucleotide"
atggacatgagggtgcccgctcagctcctggggctcctgctgctgtggctgagaggtgcgcgctgtcaggtgcagttggtgcagtctggggctgaggtgaagaagcctggggcctcagtgaaggtctcctgcaaggcttctggatacaccttcaccggctactatatgcactgggtgcgacaggcccctggacaagggcttgagtggatgggatggatcaaccctaacagtggtggcacaaactatgcacagaagtttcagggcagggtcaccatgaccagggacacgtccatcagcacagcctacatggagctgagcaggctgagatctgacgacacggccgtgtatttctgtgcgagagatcaaatgagtattattatgcttcggggagtttttcccccttactattacggtatggacgtctggggccaagggaccacggtcaccgtctctagtgcctccaccaagggcccatcggtcttccccctggcgccctgctccaggagcacctccgagagcacagcggccctgggctgcctggtcaaggactacttccccgaaccggtgacggtgtcgtggaactcaggcgctctgaccagcggcgtgcacaccttcccagctgtcctacagtcctcaggactctactccctcagcagcgtggtgaccgtgccctccagcaacttcggcacccagacctacacctgcaacgtagatcacaagcccagcaacaccaaggtggacaagacagttgagcgcaaatgttgtgtcgagtgcccaccgtgcccagcaccacctgtggcaggaccgtcagtcttcctcttccccccaaaacccaaggacaccctcatgatctcccggacccctgaggtcacgtgcgtggtggtggacgtgagccacgaagaccccgaggtccagttcaactggtacgtggacggcgtggaggtgcataatgccaagacaaagccacgggaggagcagttcaacagcacgttccgtgtggtcagcgtcctcaccgttgtgcaccaggactggctgaacggcaaggagtacaagtgcaaggtctccaacaaaggcctcccagcccccatcgagaaaaccatctccaaaaccaaagggcagccccgagaaccacaggtgtacaccctgcccccatcccgggaggagatgaccaagaaccaggtcagcctgacctgcctggtcaaaggcttctaccccagcgacatcgccgtggagtgggagagcaatgggcagccggagaacaactacaagaccacacctcccatgctggactccgacggctccttcttcctctacagcaagctcaccgtggacaagagcaggtggcagcaggggaacgtcttctcatgctccgtgatgcatgaggctctgcacaaccactacacgcagaagagcctctccctgtctccgggtaaa

SEQ ID NO: 8382 - DNA, 1437 bp, Artificial Sequence
  source: /note="Description of Artificial Sequence: Synthetic polynucleotide"
atggacatgagggtgcccgctcagctcctggggctcctgctgctgtggctgagaggtgcgcgctgtgaggtacagctggtggagtctgggggaggcttggtaaagcctggggggtccctcagactctcctgtgcagcctctggattcactttcggtaacgcctggatgagctgggtccgccaggctccagggaaggggctggagtgggttggccgtattaaaagcaaaactgatggtgggacaacagactacgctgcacccgtgaaaggcagattcaccatctcaagagatgattcaaaaaacacgctgtatctgcaaatgaacagcctgaaaaccgaggacacagccgtgtatttctgtaccacagatcggaccgggtatagcatcagctggtctagttactactactactacggtatggacgtctggggccaagggaccacggtcaccgtctctagtgcctccaccaagggcccatcggtcttccccctggcgccctgctccaggagcacctccgagagcacagcggccctgggctgcctggtcaaggactacttccccgaaccggtgacggtgtcgtggaactcaggcgctctgaccagcggcgtgcacaccttcccagctgtcctacagtcctcaggactctactccctcagcagcgtggtgaccgtgccctccagcaacttcggcacccagacctacacctgcaacgtagatcacaagcccagcaacaccaaggtggacaagacagttgagcgcaaatgttgtgtcgagtgcccaccgtgcccagcaccacctgtggcaggaccgtcagtcttcctcttccccccaaaacccaaggacaccctcatgatctcccggacccctgaggtcacgtgcgtggtggtggacgtgagccacgaagaccccgaggtccagttcaactggtacgtggacggcgtggaggtgcataatgccaagacaaagccacgggaggagcagttcaacagcacgttccgtgtggtcagcgtcctcaccgttgtgcaccaggactggctgaacggcaaggagtacaagtgcaaggtctccaacaaaggcctcccagcccccatcgagaaaaccatctccaaaaccaaagggcagccccgagaaccacaggtgtacaccctgcccccatcccgggaggagatgaccaagaaccaggtcagcctgacctgcctggtcaaaggcttctaccccagcgacatcgccgtggagtgggagagcaatgggcagccggagaacaactacaagaccacacctcccatgctggactccgacggctccttcttcctctacagcaagctcaccgtggacaagagcaggtggcagcaggggaacgtcttctcatgctccgtgatgcatgaggctctgcacaaccactacacgcagaagagcctctccctgtctccgggtaaa

SEQ ID NO: 8383 - DNA, 1437 bp, Artificial Sequence
  source: /note="Description of Artificial Sequence: Synthetic polynucleotide"
atggacatgagggtgcccgctcagctcctggggctcctgctgctgtggctgagaggtgcgcgctgtgaggtacagctggtggagtctgggggaggcttggtaaagcctggggggtcccttagactctcctgtgcagcctctggattcactttcggtaacgcctggatgagctgggtccgccaggctccagggaaggggctggagtgggttggccgtattaaaagcaaaactgatggtgggacaacagactacgctgcacccgtgaaaggcagattcaccatctcaagagatgattcaaaaaacacgctgtatctgcaaatgaacagcctgaaaaccgaggacacagccgtgtattactgtaccacagatcggaccgggtatagcatcagctggtctagttactactactactacggtatggacgtctggggccaagggaccacggtcaccgtctctagtgcctccaccaagggcccatcggtcttccccctggcgccctgctccaggagcacctccgagagcacagcggccctgggctgcctggtcaaggactacttccccgaaccggtgacggtgtcgtggaactcaggcgctctgaccagcggcgtgcacaccttcccagctgtcctacagtcctcaggactctactccctcagcagcgtggtgaccgtgccctccagcaacttcggcacccagacctacacctgcaacgtagatcacaagcccagcaacaccaaggtggacaagacagttgagcgcaaatgttgtgtcgagtgcccaccgtgcccagcaccacctgtggcaggaccgtcagtcttcctcttccccccaaaacccaaggacaccctcatgatctcccggacccctgaggtcacgtgcgtggtggtggacgtgagccacgaagaccccgaggtccagttcaactggtacgtggacggcgtggaggtgcataatgccaagacaaagccacgggaggagcagttcaacagcacgttccgtgtggtcagcgtcctcaccgttgtgcaccaggactggctgaacggcaaggagtacaagtgcaaggtctccaacaaaggcctcccagcccccatcgagaaaaccatctccaaaaccaaagggcagccccgagaaccacaggtgtacaccctgcccccatcccgggaggagatgaccaagaaccaggtcagcctgacctgcctggtcaaaggcttctaccccagcgacatcgccgtggagtgggagagcaatgggcagccggagaacaactacaagaccacacctcccatgctggactccgacggctccttcttcctctacagcaagctcaccgtggacaagagcaggtggcagcaggggaacgtcttctcatgctccgtgatgcatgaggctctgcacaaccactacacgcagaagagcctctccctgtctccgggtaaa

SEQ ID NO: 8384 - DNA, 1434 bp, Artificial Sequence
  source: /note="Description of Artificial Sequence: Synthetic polynucleotide"
atggacatgagggtgcccgctcagctcctggggctcctgctgctgtggctgagaggtgcgcgctgtgaggtgcagctattggagtctgggggaggcttggtacagcctggggagtccctgagactctcctgtgcagcctctgggttcacctttagcagctatgccatgagctgggtccgccaggctccagggaaggggctggagtgggtctcagctattagtggtagtggtggtcgcacatactacgcagactccgtgaagggccggttcaccatctccagagacaattccaagaacacgctgtatctgcaaatgaatagcctgagagccgaggacacggccgtatattactgtgcgaaagatcaaagggaggtagggccgtatagcagtggctggtacgactactactacggtatggacgtctggggccaagggaccacggtcaccgtctctagtgcctccaccaagggcccatcggtcttccccctggcgccctgctccaggagcacctccgagagcacagcggccctgggctgcctggtcaaggactacttccccgaaccggtgacggtgtcgtggaactcaggcgctctgaccagcggcgtgcacaccttcccagctgtcctacagtcctcaggactctactccctcagcagcgtggtgaccgtgccctccagcaacttcggcacccagacctacacctgcaacgtagatcacaagcccagcaacaccaaggtggacaagacagttgagcgcaaatgttgtgtcgagtgcccaccgtgcccagcaccacctgtggcaggaccgtcagtcttcctcttccccccaaaacccaaggacaccctcatgatctcccggacccctgaggtcacgtgcgtggtggtggacgtgagccacgaagaccccgaggtccagttcaactggtacgtggacggcgtggaggtgcataatgccaagacaaagccacgggaggagcagttcaacagcacgttccgtgtggtcagcgtcctcaccgttgtgcaccaggactggctgaacggcaaggagtacaagtgcaaggtctccaacaaaggcctcccagcccccatcgagaaaaccatctccaaaaccaaagggcagccccgagaaccacaggtgtacaccctgcccccatcccgggaggagatgaccaagaaccaggtcagcctgacctgcctggtcaaaggcttctaccccagcgacatcgccgtggagtgggagagcaatgggcagccggagaacaactacaagaccacacctcccatgctggactccgacggctccttcttcctctacagcaagctcaccgtggacaagagcaggtggcagcaggggaacgtcttctcatgctccgtgatgcatgaggctctgcacaaccactacacgcagaagagcctctccctgtctccgggtaaa

SEQ ID NO: 8385 - DNA, 1437 bp, Artificial Sequence
  source: /note="Description of Artificial Sequence: Synthetic polynucleotide"
atggacatgagggtgcccgctcagctcctggggctcctgctgctgtggctgagaggtgcgcgctgtgaggtgcagctggtggagtctgggggaggcctggtcaagcctggggggtccctgagactctcctgtgcagcctctggatacaccttcagtacctatagcatgaactgggtccgccaggctccagggaaggggctggagtgggtctcatccattagtagtagtagtagttacagatattacgcagactcagtgaagggccgattcaccatctccagagacaacgccaagaactcactgtatctgcaaatgagtagcctgagagccgaggacacggctgtgtattactgtgcgagagaaggggtgtctggcagttcgccgtatagcatcagctggtacgactactattacggtatggacgtctggggccaagggaccacggtcaccgtctctagtgcctccaccaagggcccatcggtcttccccctggcgccctgctccaggagcacctccgagagcacagcggccctgggctgcctggtcaaggactacttccccgaaccggtgacggtgtcgtggaactcaggcgctctgaccagcggcgtgcacaccttcccagctgtcctacagtcctcaggactctactccctcagcagcgtggtgaccgtgccctccagcaacttcggcacccagacctacacctgcaacgtagatcacaagcccagcaacaccaaggtggacaagacagttgagcgcaaatgttgtgtcgagtgcccaccgtgcccagcaccacctgtggcaggaccgtcagtcttcctcttccccccaaaacccaaggacaccctcatgatctcccggacccctgaggtcacgtgcgtggtggtggacgtgagccacgaagaccccgaggtccagttcaactggtacgtggacggcgtggaggtgcataatgccaagacaaagccacgggaggagcagttcaacagcacgttccgtgtggtcagcgtcctcaccgttgtgcaccaggactggctgaacggcaaggagtacaagtgcaaggtctccaacaaaggcctcccagcccccatcgagaaaaccatctccaaaaccaaagggcagccccgagaaccacaggtgtacaccctgcccccatcccgggaggagatgaccaagaaccaggtcagcctgacctgcctggtcaaaggcttctaccccagcgacatcgccgtggagtgggagagcaatgggcagccggagaacaactacaagaccacacctcccatgctggactccgacggctccttcttcctctacagcaagctcaccgtggacaagagcaggtggcagcaggggaacgtcttctcatgctccgtgatgcatgaggctctgcacaaccactacacgcagaagagcctctccctgtctccgggtaaa

SEQ ID NO: 8386 - DNA, 1407 bp, Artificial Sequence
  source: /note="Description of Artificial Sequence: Synthetic polynucleotide"
atggacatgagggtgcccgctcagctcctggggctcctgctgctgtggctgagaggtgcgcgctgtgaggtgcagctggtggagtctgggggaggcttggtaaagccagggcggtccctgagactctcctgtacagcttctggattcacctttggtgattatgctatgagctggttccgccaggctccagggaaggggctggagtggataggtttcattagaagcagagcttatggtgggacaccagaatacgccgcgtctgtgaaaggcagattcaccatctcaagagatgattccaaaaccatcgcctatctgcaaatgaacagcctgaaaaccgaggacacagccgtgtatttctgtgctagaggacggggtattgcagctcgttgggactactggggccagggaaccctggtcaccgtctctagtgcctccaccaagggcccatcggtcttccccctggcgccctgctccaggagcacctccgagagcacagcggccctgggctgcctggtcaaggactacttccccgaaccggtgacggtgtcgtggaactcaggcgctctgaccagcggcgtgcacaccttcccagctgtcctacagtcctcaggactctactccctcagcagcgtggtgaccgtgccctccagcaacttcggcacccagacctacacctgcaacgtagatcacaagcccagcaacaccaaggtggacaagacagttgagcgcaaatgttgtgtcgagtgcccaccgtgcccagcaccacctgtggcaggaccgtcagtcttcctcttccccccaaaacccaaggacaccctcatgatctcccggacccctgaggtcacgtgcgtggtggtggacgtgagccacgaagaccccgaggtccagttcaactggtacgtggacggcgtggaggtgcataatgccaagacaaagccacgggaggagcagttcaacagcacgttccgtgtggtcagcgtcctcaccgttgtgcaccaggactggctgaacggcaaggagtacaagtgcaaggtctccaacaaaggcctcccagcccccatcgagaaaaccatctccaaaaccaaagggcagccccgagaaccacaggtgtacaccctgcccccatcccgggaggagatgaccaagaaccaggtcagcctgacctgcctggtcaaaggcttctaccccagcgacatcgccgtggagtgggagagcaatgggcagccggagaacaactacaagaccacacctcccatgctggactccgacggctccttcttcctctacagcaagctcaccgtggacaagagcaggtggcagcaggggaacgtcttctcatgctccgtgatgcatgaggctctgcacaaccactacacgcagaagagcctctccctgtctccgggtaaa

SEQ ID NO: 8387 - DNA, 1437 bp, Artificial Sequence
  source: /note="Description of Artificial Sequence: Synthetic polynucleotide"
atggacatgagggtgcccgctcagctcctggggctcctgctgctgtggctgagaggtgcgcgctgtgaggtgcagctggtggagtctgggggaggcttggtaaagcctggggggtcccttagactctcctgtgcagcctctggattcactttcagtaacgcctggatgagctgggtccgccaggctccagggaaggggctggagtgggttggccgtattaaaagcaaaactgatggtgggacaacagactacactgcacccgtgaaaggcagattcaccatctcaagagatgattcaaaaaacacgctgtatctgcaaatgaatagcctgaaagccgaggacacagccgtgtattactgtaccacagatcggaccgggtatagcatcagctggtctagttactactactactacggtatggacgtctggggccaagggaccacggtcaccgtctctagtgcctccaccaagggcccatcggtcttccccctggcgccctgctccaggagcacctccgagagcacagcggccctgggctgcctggtcaaggactacttccccgaaccggtgacggtgtcgtggaactcaggcgctctgaccagcggcgtgcacaccttcccagctgtcctacagtcctcaggactctactccctcagcagcgtggtgaccgtgccctccagcaacttcggcacccagacctacacctgcaacgtagatcacaagcccagcaacaccaaggtggacaagacagttgagcgcaaatgttgtgtcgagtgcccaccgtgcccagcaccacctgtggcaggaccgtcagtcttcctcttccccccaaaacccaaggacaccctcatgatctcccggacccctgaggtcacgtgcgtggtggtggacgtgagccacgaagaccccgaggtccagttcaactggtacgtggacggcgtggaggtgcataatgccaagacaaagccacgggaggagcagttcaacagcacgttccgtgtggtcagcgtcctcaccgttgtgcaccaggactggctgaacggcaaggagtacaagtgcaaggtctccaacaaaggcctcccagcccccatcgagaaaaccatctccaaaaccaaagggcagccccgagaaccacaggtgtacaccctgcccccatcccgggaggagatgaccaagaaccaggtcagcctgacctgcctggtcaaaggcttctaccccagcgacatcgccgtggagtgggagagcaatgggcagccggagaacaactacaagaccacacctcccatgctggactccgacggctccttcttcctctacagcaagctcaccgtggacaagagcaggtggcagcaggggaacgtcttctcatgctccgtgatgcatgaggctctgcacaaccactacacgcagaagagcctctccctgtctccgggtaaa

SEQ ID NO: 8388 - DNA, 1437 bp, Artificial Sequence
  source: /note="Description of Artificial Sequence: Synthetic polynucleotide"
atggacatgagggtgcccgctcagctcctggggctcctgctgctgtggctgagaggtgcgcgctgtgaggtgcagctggtggagtctgggggaggcttggtaaagcctggggggtcccttagactctcctgtgcagcctctggattcactttcagtaacgcctggatgagctgggtccgccaggctccagggaaggggctggagtgggttggccgtattaaaagcacaactgatggtgggacaacagactacgctgcacccgtgaaaggcagattcaccatctcaagagatgattcaaaaaacacgctgtatctgcaaatgaacagcctgaaaaccgaggacacagccgtgtattactgtaccacagatcggaccggatatagcatcagctggtctagttactactactactacggtatggacgtctggggccaagggaccacggtcaccgtctctagtgcctccaccaagggcccatcggtcttccccctggcgccctgctccaggagcacctccgagagcacagcggccctgggctgcctggtcaaggactacttccccgaaccggtgacggtgtcgtggaactcaggcgctctgaccagcggcgtgcacaccttcccagctgtcctacagtcctcaggactctactccctcagcagcgtggtgaccgtgccctccagcaacttcggcacccagacctacacctgcaacgtagatcacaagcccagcaacaccaaggtggacaagacagttgagcgcaaatgttgtgtcgagtgcccaccgtgcccagcaccacctgtggcaggaccgtcagtcttcctcttccccccaaaacccaaggacaccctcatgatctcccggacccctgaggtcacgtgcgtggtggtggacgtgagccacgaagaccccgaggtccagttcaactggtacgtggacggcgtggaggtgcataatgccaagacaaagccacgggaggagcagttcaacagcacgttccgtgtggtcagcgtcctcaccgttgtgcaccaggactggctgaacggcaaggagtacaagtgcaaggtctccaacaaaggcctcccagcccccatcgagaaaaccatctccaaaaccaaagggcagccccgagaaccacaggtgtacaccctgcccccatcccgggaggagatgaccaagaaccaggtcagcctgacctgcctggtcaaaggcttctaccccagcgacatcgccgtggagtgggagagcaatgggcagccggagaacaactacaagaccacacctcccatgctggactccgacggctccttcttcctctacagcaagctcaccgtggacaagagcaggtggcagcaggggaacgtcttctcatgctccgtgatgcatgaggctctgcacaaccactacacgcagaagagcctctccctgtctccgggtaaa

SEQ ID NO: 8389 - DNA, 981 bp, Homo sapiens
gctagcaccaagggcccatcggtcttccccctggcgccctgctccaggagcacctccgagagcacagcggccctgggctgcctggtcaaggactacttccccgaaccggtgacggtgtcgtggaactcaggcgctctgaccagcggcgtgcacaccttcccagctgtcctacagtcctcaggactctactccctcagcagcgtggtgaccgtgccctccagcaacttcggcacccagacctacacctgcaacgtagatcacaagcccagcaacaccaaggtggacaagacagttgagcgcaaatgttgtgtcgagtgcccaccgtgcccagcaccacctgtggcaggaccgtcagtcttcctcttccccccaaaacccaaggacaccctcatgatctcccggacccctgaggtcacgtgcgtggtggtggacgtgagccacgaagaccccgaggtccagttcaactggtacgtggacggcgtggaggtgcataatgccaagacaaagccacgggaggagcagttcaacagcacgttccgtgtggtcagcgtcctcaccgttgtgcaccaggactggctgaacggcaaggagtacaagtgcaaggtctccaacaaaggcctcccagcccccatcgagaaaaccatctccaaaaccaaagggcagccccgagaaccacaggtgtacaccctgcccccatcccgggaggagatgaccaagaaccaggtcagcctgacctgcctggtcaaaggcttctaccccagcgacatcgccgtggagtgggagagcaatgggcagccggagaacaactacaagaccacacctcccatgctggactccgacggctccttcttcctctacagcaagctcaccgtggacaagagcaggtggcagcaggggaacgtcttctcatgctccgtgatgcatgaggctctgcacaaccactacacgcagaagagcctctccctgtctccgggtaaatga

SEQ ID NO: 8390 - DNA, 1323 bp, Artificial Sequence
  source: /note="Description of Artificial Sequence: Synthetic polynucleotide"
caggagcagctgaaggagtccgggggtcgcctggtcacgcctgggacatccctgacactcacctgcaccgtctctggaatcgacctcagtaaccactacatgcaatgggtccgccaggctccagggaaggggctggagtggatcggagtcgttggtattaatggtcgcacatactacgcgagctgggcgaaaggccgattcaccatctccagaacctcgtcgaccacggtggatctgaaaatgaccaggctgacaaccgaggacacggccacctatttctgtgccagaggggacatctggggcccaggcaccctggtcaccgtctcgagcgcctccaccaagggcccatcggtcttccccctggcaccctcctccaagagcacctctgggggcacagcggccctgggctgcctggtcaaggactacttccccgaaccggtgacggtgtcgtggaactcaggcgccctgaccagcggcgtgcacaccttcccggctgtcctacagtcctcaggactctactccctcagcagcgtggtgaccgtgccctccagcagcttgggcacccagacctacatctgcaacgtgaatcacaagcccagcaacaccaaggtggacaagagagttgagcccaaatcttgtgacaaaactcacacatgcccaccgtgcccagcacctgaactcctggggggaccgtcagtcttcctcttccccccaaaacccaaggacaccctcatgatctcccggacccctgaggtcacatgcgtggtggtggacgtgagccacgaagaccctgaggtcaagttcaactggtacgtggacggcgtggaggtgcataatgccaagacaaagccgcgggaggagcagtacgccagcacgtaccgtgtggtcagcgtcctcaccgtcctgcaccaggactggctgaatggcaaggagtacaagtgcaaggtctccaacaaagccctcccagcccccatcgagaaaaccatctccaaagccaaagggcagccccgagaaccacaggtgtacaccctgcccccatcccgggaggagatgaccaagaaccaggtcagcctgacctgcctggtcaaaggcttctatcccagcgacatcgccgtggagtgggagagcaatgggcagccggagaacaactacaagaccacgcctcccgtgctggactccgacggctccttcttcctctacagcaagctcaccgtggacaagagcaggtggcagcaggggaacgtcttctcatgctccgtgatgcatgaggctctgcacaaccactacacgcagaagagcctctccctgtctccgggtaaatga

SEQ ID NO: 8391 - DNA, 1320 bp, Artificial Sequence
  source: /note="Description of Artificial Sequence: Synthetic polynucleotide"
cagtcgctggaggagtccgggggtcgcctggtcacgcctggaggatccctgacactcacctgcacagtctctggaatcgacgtcactaactactatatgcaatgggtccgccaggctccagggaaggggctggaatggatcggagtcattggtgtgaatggtaagagatactacgcgagctgggcgaaaggccgattcaccatctccaaaacctcgtcgaccacggtggatctgaaaatgaccagtctgacaaccgaggacacggccacctatttctgtgccagaggcgacatctggggcccggggaccctcgtcaccgtctcgagcgcctccaccaagggcccatcggtcttccccctggcaccctcctccaagagcacctctgggggcacagcggccctgggctgcctggtcaaggactacttccccgaaccggtgacggtgtcgtggaactcaggcgccctgaccagcggcgtgcacaccttcccggctgtcctacagtcctcaggactctactccctcagcagcgtggtgaccgtgccctccagcagcttgggcacccagacctacatctgcaacgtgaatcacaagcccagcaacaccaaggtggacaagagagttgagcccaaatcttgtgacaaaactcacacatgcccaccgtgcccagcacctgaactcctggggggaccgtcagtcttcctcttccccccaaaacccaaggacaccctcatgatctcccggacccctgaggtcacatgcgtggtggtggacgtgagccacgaagaccctgaggtcaagttcaactggtacgtggacggcgtggaggtgcataatgccaagacaaagccgcgggaggagcagtacgccagcacgtaccgtgtggtcagcgtcctcaccgtcctgcaccaggactggctgaatggcaaggagtacaagtgcaaggtctccaacaaagccctcccagcccccatcgagaaaaccatctccaaagccaaagggcagccccgagaaccacaggtgtacaccctgcccccatcccgggaggagatgaccaagaaccaggtcagcctgacctgcctggtcaaaggcttctatcccagcgacatcgccgtggagtgggagagcaatgggcagccggagaacaactacaagaccacgcctcccgtgctggactccgacggctccttcttcctctacagcaagctcaccgtggacaagagcaggtggcagcaggggaacgtcttctcatgctccgtgatgcatgaggctctgcacaaccactacacgcagaagagcctctccctgtctccgggtaaatga

SEQ ID NO: 8392 - DNA, 1320 bp, Artificial Sequence
  source: /note="Description of Artificial Sequence: Synthetic polynucleotide"
cagtcgctggaggagtccgggggtcgcctggtcacgcctgggacacccctgacactcacctgcacagtctctggaatcggcctcagtagctactacatgcagtgggtccgccagtctccagggagggggctggaatggatcggagtcattggtagtgatggtaagacatactacgcgacctgggcgaaaggccgattcaccatctccaagacctcgtcgaccacggtggatctgagaatggccagtctgacaaccgaggacacggccacctatttctgtaccagaggggacatctggggcccggggaccctcgtcaccgtctcgagcgcctccaccaagggcccatcggtcttccccctggcaccctcctccaagagcacctctgggggcacagcggccctgggctgcctggtcaaggactacttccccgaaccggtgacggtgtcgtggaactcaggcgccctgaccagcggcgtgcacaccttcccggctgtcctacagtcctcaggactctactccctcagcagcgtggtgaccgtgccctccagcagcttgggcacccagacctacatctgcaacgtgaatcacaagcccagcaacaccaaggtggacaagagagttgagcccaaatcttgtgacaaaactcacacatgcccaccgtgcccagcacctgaactcctggggggaccgtcagtcttcctcttccccccaaaacccaaggacaccctcatgatctcccggacccctgaggtcacatgcgtggtggtggacgtgagccacgaagaccctgaggtcaagttcaactggtacgtggacggcgtggaggtgcataatgccaagacaaagccgcgggaggagcagtacgccagcacgtaccgtgtggtcagcgtcctcaccgtcctgcaccaggactggctgaatggcaaggagtacaagtgcaaggtctccaacaaagccctcccagcccccatcgagaaaaccatctccaaagccaaagggcagccccgagaaccacaggtgtacaccctgcccccatcccgggaggagatgaccaagaaccaggtcagcctgacctgcctggtcaaaggcttctatcccagcgacatcgccgtggagtgggagagcaatgggcagccggagaacaactacaagaccacgcctcccgtgctggactccgacggctccttcttcctctacagcaagctcaccgtggacaagagcaggtggcagcaggggaacgtcttctcatgctccgtgatgcatgaggctctgcacaaccactacacgcagaagagcctctccctgtctccgggtaaatga

SEQ ID NO: 8393 - DNA, 1320 bp, Artificial Sequence
  source: /note="Description of Artificial Sequence: Synthetic polynucleotide"
cagtcgctggaggagtccgggggtcgcctggtcacgcctgggacacccctgacactcacctgcacagtctctggactcgacctcagtagctactacatgcaatgggtccgccaggctccagggaaggggctggaatggatcggagtcattggtattaatgataacacatactacgcgagctgggcgaaaggccgattcaccatctccagagcctcgtcgaccacggtggatctgaaaatgaccagtctgacaaccgaggacacggccacctatttctgtgccagaggggacatctggggcccaggcaccctcgtcaccgtctcgagcgcctccaccaagggcccatcggtcttccccctggcaccctcctccaagagcacctctgggggcacagcggccctgggctgcctggtcaaggactacttccccgaaccggtgacggtgtcgtggaactcaggcgccctgaccagcggcgtgcacaccttcccggctgtcctacagtcctcaggactctactccctcagcagcgtggtgaccgtgccctccagcagcttgggcacccagacctacatctgcaacgtgaatcacaagcccagcaacaccaaggtggacaagagagttgagcccaaatcttgtgacaaaactcacacatgcccaccgtgcccagcacctgaactcctggggggaccgtcagtcttcctcttccccccaaaacccaaggacaccctcatgatctcccggacccctgaggtcacatgcgtggtggtggacgtgagccacgaagaccctgaggtcaagttcaactggtacgtggacggcgtggaggtgcataatgccaagacaaagccgcgggaggagcagtacgccagcacgtaccgtgtggtcagcgtcctcaccgtcctgcaccaggactggctgaatggcaaggagtacaagtgcaaggtctccaacaaagccctcccagcccccatcgagaaaaccatctccaaagccaaagggcagccccgagaaccacaggtgtacaccctgcccccatcccgggaggagatgaccaagaaccaggtcagcctgacctgcctggtcaaaggcttctatcccagcgacatcgccgtggagtgggagagcaatgggcagccggagaacaactacaagaccacgcctcccgtgctggactccgacggctccttcttcctctacagcaagctcaccgtggacaagagcaggtggcagcaggggaacgtcttctcatgctccgtgatgcatgaggctctgcacaaccactacacgcagaagagcctctccctgtctccgggtaaatga

SEQ ID NO: 8394 - DNA, 327 bp, Artificial Sequence
  source: /note="Description of Artificial Sequence: Synthetic polynucleotide"
cagtcgctggaggagtccgggggtcgcctggtcacgcctgggacacccctgacactcacctgttccgtctctggcatcgacctcagtggctactacatgaactgggtccgccaggctccagggaaggggctggaatggatcggagtcattggtattaatggtgccacatactacgcgagctgggcgaaaggccgattcaccatctccaaaacctcgtcgaccacggtggatctgaaaatgaccagtctgacaaccgaggacacggccacctatttctgtgccagaggggacatctggggcccgggcaccctcgtcaccgtctcgagc

SEQ ID NO: 8395 - DNA, 1320 bp, Artificial Sequence
  source: /note="Description of Artificial Sequence: Synthetic polynucleotide"
cagtcgctggaggagtccgggggtcgcctggtcacgcctgggacacccctgacactcacctgttccgtctctggcatcgacctcagtggctactacatgaactgggtccgccaggctccagggaaggggctggaatggatcggagtcattggtattaatggtgccacatactacgcgagctgggcgaaaggccgattcaccatctccaaaacctcgtcgaccacggtggatctgaaaatgaccagtctgacaaccgaggacacggccacctatttctgtgccagaggggacatctggggcccgggcaccctcgtcaccgtctcgagcgcctccaccaagggcccatcggtcttccccctggcaccctcctccaagagcacctctgggggcacagcggccctgggctgcctggtcaaggactacttccccgaaccggtgacggtgtcgtggaactcaggcgccctgaccagcggcgtgcacaccttcccggctgtcctacagtcctcaggactctactccctcagcagcgtggtgaccgtgccctccagcagcttgggcacccagacctacatctgcaacgtgaatcacaagcccagcaacaccaaggtggacaagagagttgagcccaaatcttgtgacaaaactcacacatgcccaccgtgcccagcacctgaactcctggggggaccgtcagtcttcctcttccccccaaaacccaaggacaccctcatgatctcccggacccctgaggtcacatgcgtggtggtggacgtgagccacgaagaccctgaggtcaagttcaactggtacgtggacggcgtggaggtgcataatgccaagacaaagccgcgggaggagcagtacgccagcacgtaccgtgtggtcagcgtcctcaccgtcctgcaccaggactggctgaatggcaaggagtacaagtgcaaggtctccaacaaagccctcccagcccccatcgagaaaaccatctccaaagccaaagggcagccccgagaaccacaggtgtacaccctgcccccatcccgggaggagatgaccaagaaccaggtcagcctgacctgcctggtcaaaggcttctatcccagcgacatcgccgtggagtgggagagcaatgggcagccggagaacaactacaagaccacgcctcccgtgctggactccgacggctccttcttcctctacagcaagctcaccgtggacaagagcaggtggcagcaggggaacgtcttctcatgctccgtgatgcatgaggctctgcacaaccactacacgcagaagagcctctccctgtctccgggtaaatga

SEQ ID NO: 8396 - DNA, 1326 bp, Artificial Sequence
  source: /note="Description of Artificial Sequence: Synthetic polynucleotide"
cagtcggtggaggagtccgggggaggcctggtccagcctgagggatccctgacactcacctgcacagcctctggattcgacttcagtagcaatgcaatgtggtgggtccgccaggctccagggaaggggctggagtggatcggatgcatttacaatggtgatggcagcacatactacgcgagctgggtgaatggccgattctccatctccaaaacctcgtcgaccacggtgactctgcaactgaatagtctgacagtcgcggacacggccacgtattattgtgcgagagatcttgacttgtggggcccgggcaccctcgtcaccgtctcgagcgcctccaccaagggcccatcggtcttccccctggcaccctcctccaagagcacctctgggggcacagcggccctgggctgcctggtcaaggactacttccccgaaccggtgacggtgtcgtggaactcaggcgccctgaccagcggcgtgcacaccttcccggctgtcctacagtcctcaggactctactccctcagcagcgtggtgaccgtgccctccagcagcttgggcacccagacctacatctgcaacgtgaatcacaagcccagcaacaccaaggtggacaagagagttgagcccaaatcttgtgacaaaactcacacatgcccaccgtgcccagcacctgaactcctggggggaccgtcagtcttcctcttccccccaaaacccaaggacaccctcatgatctcccggacccctgaggtcacatgcgtggtggtggacgtgagccacgaagaccctgaggtcaagttcaactggtacgtggacggcgtggaggtgcataatgccaagacaaagccgcgggaggagcagtacgccagcacgtaccgtgtggtcagcgtcctcaccgtcctgcaccaggactggctgaatggcaaggagtacaagtgcaaggtctccaacaaagccctcccagcccccatcgagaaaaccatctccaaagccaaagggcagccccgagaaccacaggtgtacaccctgcccccatcccgggaggagatgaccaagaaccaggtcagcctgacctgcctggtcaaaggcttctatcccagcgacatcgccgtggagtgggagagcaatgggcagccggagaacaactacaagaccacgcctcccgtgctggactccgacggctccttcttcctctacagcaagctcaccgtggacaagagcaggtggcagcaggggaacgtcttctcatgctccgtgatgcatgaggctctgcacaaccactacacgcagaagagcctctccctgtctccgggtaaatga

SEQ ID NO: 8397 - DNA, 366 bp, Artificial Sequence
  source: /note="Description of Artificial Sequence: Synthetic polynucleotide"
gaagttcagctggttgaatccggtggtggtctggttcagccaggtggttccctgcgtctgtcctgcgctgcttccggtttcaccttctccaactactggatctcctgggttcgtcaggctcctggtaaaggtctggaatgggttgctgaaatccgttccgaatccgacgcgtccgctacccattacgctgaagctgttaaaggtcgtttcaccatctcccgtgacaacgctaagaactccctgtacctgcagatgaactccctgcgtgctgaagacaccgctgtttactactgcctggcttactttgactacggtctggctatccagaactactggggtcagggtaccctggttaccgtttcctcc

SEQ ID NO: 8398 - DNA, 1326 bp, Artificial Sequence
  source: /note="Description of Artificial Sequence: Synthetic polynucleotide"
gaggtgcagcttgtggagtctgggggaggcttggtccagcctggggggtccctgagactctcctgtgcagtctctggaatcgacctcagtggctactacatgaactgggtccgtcaggctccagggaaggggctggagtgggtcggagtcattggtattaatggtgccacatactacgcgagctgggcgaaaggccgattcaccatctccagagacaattccaagaccacggtgtatcttcaaatgaacagcctgagagctgaggacactgctgtgtatttctgtgctagaggggacatctggggccaagggaccctcgtcaccgtctcgagcgcctccaccaagggcccatcggtcttccccctggcaccctcctccaagagcacctctgggggcacagcggccctgggctgcctggtcaaggactacttccccgaaccggtgacggtgtcgtggaactcaggcgccctgaccagcggcgtgcacaccttcccggctgtcctacagtcctcaggactctactccctcagcagcgtggtgaccgtgccctccagcagcttgggcacccagacctacatctgcaacgtgaatcacaagcccagcaacaccaaggtggacaagagagttgagcccaaatcttgtgacaaaactcacacatgcccaccgtgcccagcacctgaactcctggggggaccgtcagtcttcctcttccccccaaaacccaaggacaccctcatgatctcccggacccctgaggtcacatgcgtggtggtggacgtgagccacgaagaccctgaggtcaagttcaactggtacgtggacggcgtggaggtgcataatgccaagacaaagccgcgggaggagcagtacgccagcacgtaccgtgtggtcagcgtcctcaccgtcctgcaccaggactggctgaatggcaaggagtacaagtgcaaggtctccaacaaagccctcccagcccccatcgagaaaaccatctccaaagccaaagggcagccccgagaaccacaggtgtacaccctgcccccatcccgggaggagatgaccaagaaccaggtcagcctgacctgcctggtcaaaggcttctatcccagcgacatcgccgtggagtgggagagcaatgggcagccggagaacaactacaagaccacgcctcccgtgctggactccgacggctccttcttcctctacagcaagctcaccgtggacaagagcaggtggcagcaggggaacgtcttctcatgctccgtgatgcatgaggctctgcacaaccactacacgcagaagagcctctccctgtctccgggtaaatga

SEQ ID NO: 8399 - DNA, 1326 bp, Artificial Sequence
  source: /note="Description of Artificial Sequence: Synthetic polynucleotide"
gaggtgcagcttgtggagtctgggggaggcttggtccagcctggggggtccctgagactctcctgtgcagtctctggaatcgacctcagtggctactacatgaactgggtccgtcaggctccagggaaggggctggagtgggtcggagtcattggtattaatggtgccacatactacgcgagctgggcgaaaggccgattcaccatctccagagacaattccaagaccacggtgtatcttcaaatgaacagcctgagagctgaggacactgctgtgtatttctgtgctagaggggacatctggggccaagggaccctcgtcaccgtctcgagcgcctccaccaagggcccatcggtcttccccctggcaccctcctccaagagcacctctgggggcacagcggccctgggctgcctggtcaaggactacttccccgaaccggtgacggtgtcgtggaactcaggcgccctgaccagcggcgtgcacaccttcccggctgtcctacagtcctcaggactctactccctcagcagcgtggtgaccgtgccctccagcagcttgggcacccagacctacatctgcaacgtgaatcacaagcccagcaacaccaaggtggacgcgagagttgagcccaaatcttgtgacaaaactcacacatgcccaccgtgcccagcacctgaactcctggggggaccgtcagtcttcctcttccccccaaaacccaaggacaccctcatgatctcccggacccctgaggtcacatgcgtggtggtggacgtgagccacgaagaccctgaggtcaagttcaactggtacgtggacggcgtggaggtgcataatgccaagacaaagccgcgggaggagcagtacgccagcacgtaccgtgtggtcagcgtcctcaccgtcctgcaccaggactggctgaatggcaaggagtacaagtgcaaggtctccaacaaagccctcccagcccccatcgagaaaaccatctccaaagccaaagggcagccccgagaaccacaggtgtacaccctgcccccatcccgggaggagatgaccaagaaccaggtcagcctgacctgcctggtcaaaggcttctatcccagcgacatcgccgtggagtgggagagcaatgggcagccggagaacaactacaagaccacgcctcccgtgctggactccgacggctccttcttcctctacagcaagctcaccgtggacaagagcaggtggcagcaggggaacgtcttctcatgctccgtgatgcatgaggctctgcacaaccactacacgcagaagagcctctccctgtctccgggtaaatga

SEQ ID NO: 8400 - DNA, 1326 bp, Artificial Sequence
  source: /note="Description of Artificial Sequence: Synthetic polynucleotide"
gaggtgcagcttgtggagtctgggggaggcttggtccagcctggggggtccctgagactctcctgtgcagtctctggaatcgacgtcactaactactacatgcaatgggtccgtcaggctccagggaaggggctggagtgggtcggagtcattggtgtgaatggtaagagatactacgcgagctgggcgaaaggccgattcaccatctccagagacaattccaagaccacggtgtatcttcaaatgaacagcctgagagctgaggacactgctgtgtatttctgtgccagaggggacatctggggccaagggaccctcgtcaccgtctcgagcgcctccaccaagggcccatcggtcttccccctggcaccctcctccaagagcacctctgggggcacagcggccctgggctgcctggtcaaggactacttccccgaaccggtgacggtgtcgtggaactcaggcgccctgaccagcggcgtgcacaccttcccggctgtcctacagtcctcaggactctactccctcagcagcgtggtgaccgtgccctccagcagcttgggcacccagacctacatctgcaacgtgaatcacaagcccagcaacaccaaggtggacaagagagttgagcccaaatcttgtgacaaaactcacacatgcccaccgtgcccagcacctgaactcctggggggaccgtcagtcttcctcttccccccaaaacccaaggacaccctcatgatctcccggacccctgaggtcacatgcgtggtggtggacgtgagccacgaagaccctgaggtcaagttcaactggtacgtggacggcgtggaggtgcataatgccaagacaaagccgcgggaggagcagtacgccagcacgtaccgtgtggtcagcgtcctcaccgtcctgcaccaggactggctgaatggcaaggagtacaagtgcaaggtctccaacaaagccctcccagcccccatcgagaaaaccatctccaaagccaaagggcagccccgagaaccacaggtgtacaccctgcccccatcccgggaggagatgaccaagaaccaggtcagcctgacctgcctggtcaaaggcttctatcccagcgacatcgccgtggagtgggagagcaatgggcagccggagaacaactacaagaccacgcctcccgtgctggactccgacggctccttcttcctctacagcaagctcaccgtggacaagagcaggtggcagcaggggaacgtcttctcatgctccgtgatgcatgaggctctgcacaaccactacacgcagaagagcctctccctgtctccgggtaaatga

SEQ ID NO: 8401 - DNA, 1326 bp, Artificial Sequence
  source: /note="Description of Artificial Sequence: Synthetic polynucleotide"
gaggtgcagcttgtggagtctgggggaggcttggtccagcctggggggtccctgagactctcctgtgcagtctctggaatcggcctcagtagctactacatgcaatgggtccgtcaggctccagggaaggggctggagtgggtcggagtcattggtagtgatggtaagacatactacgcgacctgggcgaaaggccgattcaccatctccagagacaattccaagaccacggtgtatcttcaaatgaacagcctgagagctgaggacactgctgtgtatttctgtaccagaggggacatctggggccaagggaccctcgtcaccgtctcgagcgcctccaccaagggcccatcggtcttccccctggcaccctcctccaagagcacctctgggggcacagcggccctgggctgcctggtcaaggactacttccccgaaccggtgacggtgtcgtggaactcaggcgccctgaccagcggcgtgcacaccttcccggctgtcctacagtcctcaggactctactccctcagcagcgtggtgaccgtgccctccagcagcttgggcacccagacctacatctgcaacgtgaatcacaagcccagcaacaccaaggtggacaagagagttgagcccaaatcttgtgacaaaactcacacatgcccaccgtgcccagcacctgaactcctggggggaccgtcagtcttcctcttccccccaaaacccaaggacaccctcatgatctcccggacccctgaggtcacatgcgtggtggtggacgtgagccacgaagaccctgaggtcaagttcaactggtacgtggacggcgtggaggtgcataatgccaagacaaagccgcgggaggagcagtacgccagcacgtaccgtgtggtcagcgtcctcaccgtcctgcaccaggactggctgaatggcaaggagtacaagtgcaaggtctccaacaaagccctcccagcccccatcgagaaaaccatctccaaagccaaagggcagccccgagaaccacaggtgtacaccctgcccccatcccgggaggagatgaccaagaaccaggtcagcctgacctgcctggtcaaaggcttctatcccagcgacatcgccgtggagtgggagagcaatgggcagccggagaacaactacaagaccacgcctcccgtgctggactccgacggctccttcttcctctacagcaagctcaccgtggacaagagcaggtggcagcaggggaacgtcttctcatgctccgtgatgcatgaggctctgcacaaccactacacgcagaagagcctctccctgtctccgggtaaatga

SEQ ID NO: 8402 - DNA, 1326 bp, Artificial Sequence
  source: /note="Description of Artificial Sequence: Synthetic polynucleotide"
gaggtgcagcttgtggagtctgggggaggcttggtccagcctggggggtccctgagactctcctgtgcagtctctggaatcggcctcagtagctactacatgcaatgggtccgtcaggctccagggaaggggctggagtgggtcggagtcattggtagtgatggtaagacatactacgcgacctgggcgaaaggccgattcaccatctccagagacaattccaagaccacggtgtatcttcaaatgaacagcctgagagctgaggacactgctgtgtatttctgtaccagaggggacatctggggccaagggaccctcgtcaccgtctcgagcgcctccaccaagggcccatcggtcttccccctggcaccctcctccaagagcacctctgggggcacagcggccctgggctgcctggtcaaggactacttccccgaaccggtgacggtgtcgtggaactcaggcgccctgaccagcggcgtgcacaccttcccggctgtcctacagtcctcaggactctactccctcagcagcgtggtgaccgtgccctccagcagcttgggcacccagacctacatctgcaacgtgaatcacaagcccagcaacaccaaggtggacgcgagagttgagcccaaatcttgtgacaaaactcacacatgcccaccgtgcccagcacctgaactcctggggggaccgtcagtcttcctcttccccccaaaacccaaggacaccctcatgatctcccggacccctgaggtcacatgcgtggtggtggacgtgagccacgaagaccctgaggtcaagttcaactggtacgtggacggcgtggaggtgcataatgccaagacaaagccgcgggaggagcagtacgccagcacgtaccgtgtggtcagcgtcctcaccgtcctgcaccaggactggctgaatggcaaggagtacaagtgcaaggtctccaacaaagccctcccagcccccatcgagaaaaccatctccaaagccaaagggcagccccgagaaccacaggtgtacaccctgcccccatcccgggaggagatgaccaagaaccaggtcagcctgacctgcctggtcaaaggcttctatcccagcgacatcgccgtggagtgggagagcaatgggcagccggagaacaactacaagaccacgcctcccgtgctggactccgacggctccttcttcctctacagcaagctcaccgtggacaagagcaggtggcagcaggggaacgtcttctcatgctccgtgatgcatgaggctctgcacaaccactacacgcagaagagcctctccctgtctccgggtaaatga

SEQ ID NO: 8403 - DNA, 1326 bp, Artificial Sequence
  source: /note="Description of Artificial Sequence: Synthetic polynucleotide"
gaggtgcagcttgtggagtctgggggaggcttggtccagcctggggggtccctgagactctcctgtgcagtctctggactcgacctcagtagctactacatgcaatgggtccgtcaggctccagggaaggggctggagtgggtcggagtcattggtatcaatgataacacatactacgcgagctgggcgaaaggccgattcaccatctccagagacaattccaagaccacggtgtatcttcaaatgaacagcctgagagctgaggacactgctgtgtatttctgtgctagaggggacatctggggccaagggaccctcgtcaccgtctcgagcgcctccaccaagggcccatcggtcttccccctggcaccctcctccaagagcacctctgggggcacagcggccctgggctgcctggtcaaggactacttccccgaaccggtgacggtgtcgtggaactcaggcgccctgaccagcggcgtgcacaccttcccggctgtcctacagtcctcaggactctactccctcagcagcgtggtgaccgtgccctccagcagcttgggcacccagacctacatctgcaacgtgaatcacaagcccagcaacaccaaggtggacaagagagttgagcccaaatcttgtgacaaaactcacacatgcccaccgtgcccagcacctgaactcctggggggaccgtcagtcttcctcttccccccaaaacccaaggacaccctcatgatctcccggacccctgaggtcacatgcgtggtggtggacgtgagccacgaagaccctgaggtcaagttcaactggtacgtggacggcgtggaggtgcataatgccaagacaaagccgcgggaggagcagtacgccagcacgtaccgtgtggtcagcgtcctcaccgtcctgcaccaggactggctgaatggcaaggagtacaagtgcaaggtctccaacaaagccctcccagcccccatcgagaaaaccatctccaaagccaaagggcagccccgagaaccacaggtgtacaccctgcccccatcccgggaggagatgaccaagaaccaggtcagcctgacctgcctggtcaaaggcttctatcccagcgacatcgccgtggagtgggagagcaatgggcagccggagaacaactacaagaccacgcctcccgtgctggactccgacggctccttcttcctctacagcaagctcaccgtggacaagagcaggtggcagcaggggaacgtcttctcatgctccgtgatgcatgaggctctgcacaaccactacacgcagaagagcctctccctgtctccgggtaaatga

SEQ ID NO: 8404 - DNA, 1326 bp, Artificial Sequence
  source: /note="Description of Artificial Sequence: Synthetic polynucleotide"
gaggtgcagcttgtggagtctgggggaggcttggtccagcctggggggtccctgagactctcctgtgcagtctctggactcgacctcagtagctactacatgcaatgggtccgtcaggctccagggaaggggctggagtgggtcggagtcattggtatcaatgataacacatactacgcgagctgggcgaaaggccgattcaccatctccagagacaattccaagaccacggtgtatcttcaaatgaacagcctgagagctgaggacactgctgtgtatttctgtgctagaggggacatctggggccaagggaccctcgtcaccgtctcgagcgcctccaccaagggcccatcggtcttccccctggcaccctcctccaagagcacctctgggggcacagcggccctgggctgcctggtcaaggactacttccccgaaccggtgacggtgtcgtggaactcaggcgccctgaccagcggcgtgcacaccttcccggctgtcctacagtcctcaggactctactccctcagcagcgtggtgaccgtgccctccagcagcttgggcacccagacctacatctgcaacgtgaatcacaagcccagcaacaccaaggtggacgcgagagttgagcccaaatcttgtgacaaaactcacacatgcccaccgtgcccagcacctgaactcctggggggaccgtcagtcttcctcttccccccaaaacccaaggacaccctcatgatctcccggacccctgaggtcacatgcgtggtggtggacgtgagccacgaagaccctgaggtcaagttcaactggtacgtggacggcgtggaggtgcataatgccaagacaaagccgcgggaggagcagtacgccagcacgtaccgtgtggtcagcgtcctcaccgtcctgcaccaggactggctgaatggcaaggagtacaagtgcaaggtctccaacaaagccctcccagcccccatcgagaaaaccatctccaaagccaaagggcagccccgagaaccacaggtgtacaccctgcccccatcccgggaggagatgaccaagaaccaggtcagcctgacctgcctggtcaaaggcttctatcccagcgacatcgccgtggagtgggagagcaatgggcagccggagaacaactacaagaccacgcctcccgtgctggactccgacggctccttcttcctctacagcaagctcaccgtggacaagagcaggtggcagcaggggaacgtcttctcatgctccgtgatgcatgaggctctgcacaaccactacacgcagaagagcctctccctgtctccgggtaaatga

SEQ ID NO: 8405 - protein, 445 aa, Artificial Sequence
  source: /note="Description of Artificial Sequence: Synthetic polypeptide"
QVQLVQSGAEVKKPGASVKVSCKASGYTFGNYWMQWVRQAPGQGLEWMGAIYEGTGDTRYIQKFAGRVTMTRDTSTSTVYMELSSLRSEDTAVYYCARLSDYVSGFSYWGQGTLVTVSSASTKGPSVFPLAPCSRSTSESTAALGCLVKDYFPEPVTVSWNSGALTSGVHTFPAVLQSSGLYSLSSVVTVPSSSLGTKTYTCNVDHKPSNTKVDKRVESKYGPPCPPCPAPEAAGGPSVFLFPPKPKDTLMISRTPEVTCVVVDVSQEDPEVQFNWYVDGVEVHNAKTKPREEQFNSTYRVVSVLTVLHQDWLNGKEYKCKVSNKGLPSSIEKTISKAKGQPREPQVYTLPPSQEEMTKNQVSLTCLVKGFYPSDIAVEWESNGQPENNYKTTPPVLDSDGSFFLYSRLTVDKSRWQEGNVFSCSVMHEALHNHYTQKSLSLSLG

SEQ ID NO: 8406 - protein, 445 aa, Artificial Sequence
  source: /note="Description of Artificial Sequence: Synthetic polypeptide"
QVQLVQSGAEVKKPGASVKVSCKASGYTFGNYWMQWVRQAPGQGLEWMGAIYEGTGKTVYIQKFAGRVTMTRDTSTSTVYMELSSLRSEDTAVYYCARLSDYVSGFGYWGQGTLVTVSSASTKGPSVFPLAPCSRSTSESTAALGCLVKDYFPEPVTVSWNSGALTSGVHTFPAVLQSSGLYSLSSVVTVPSSSLGTKTYTCNVDHKPSNTKVDKRVESKYGPPCPPCPAPEAAGGPSVFLFPPKPKDTLMISRTPEVTCVVVDVSQEDPEVQFNWYVDGVEVHNAKTKPREEQFNSTYRVVSVLTVLHQDWLNGKEYKCKVSNKGLPSSIEKTISKAKGQPREPQVYTLPPSQEEMTKNQVSLTCLVKGFYPSDIAVEWESNGQPENNYKTTPPVLDSDGSFFLYSRLTVDKSRWQEGNVFSCSVMHEALHNHYTQKSLSLSLG

SEQ ID NO: 8407 - protein, 445 aa, Artificial Sequence
  source: /note="Description of Artificial Sequence: Synthetic polypeptide"
QVQLVQSGAEVKKPGASVKVSCKASGYTFGNYWMQWVRQAPGQGLEWMGAIYEGTGKTVYIQKFAGRVTMTRDTSTSTVYMELSSLRSEDTAVYYCARLSDYVSGFSYWGQGTLVTVSSASTKGPSVFPLAPCSRSTSESTAALGCLVKDYFPEPVTVSWNSGALTSGVHTFPAVLQSSGLYSLSSVVTVPSSSLGTKTYTCNVDHKPSNTKVDKRVESKYGPPCPPCPAPEAAGGPSVFLFPPKPKDTLMISRTPEVTCVVVDVSQEDPEVQFNWYVDGVEVHNAKTKPREEQFNSTYRVVSVLTVLHQDWLNGKEYKCKVSNKGLPSSIEKTISKAKGQPREPQVYTLPPSQEEMTKNQVSLTCLVKGFYPSDIAVEWESNGQPENNYKTTPPVLDSDGSFFLYSRLTVDKSRWQEGNVFSCSVMHEALHNHYTQKSLSLSLG

SEQ ID NO: 8408 - protein, 445 aa, Artificial Sequence
  source: /note="Description of Artificial Sequence: Synthetic polypeptide"
QVQLVQSGAEVKKPGSSVKVSCKASGYTFGNYWMQWVRQAPGQGLEWMGAIYEGTGKTVYIQKFADRVTITADKSTSTAYMELSSLRSEDTAVYYCARLSDYVSGFGYWGQGTTVTVSSASTKGPSVFPLAPCSRSTSESTAALGCLVKDYFPEPVTVSWNSGALTSGVHTFPAVLQSSGLYSLSSVVTVPSSSLGTKTYTCNVDHKPSNTKVDKRVESKYGPPCPPCPAPEAAGGPSVFLFPPKPKDTLMISRTPEVTCVVVDVSQEDPEVQFNWYVDGVEVHNAKTKPREEQFNSTYRVVSVLTVLHQDWLNGKEYKCKVSNKGLPSSIEKTISKAKGQPREPQVYTLPPSQEEMTKNQVSLTCLVKGFYPSDIAVEWESNGQPENNYKTTPPVLDSDGSFFLYSRLTVDKSRWQEGNVFSCSVMHEALHNHYTQKSLSLSLG

SEQ ID NO: 8409 - protein, 445 aa, Artificial Sequence
  source: /note="Description of Artificial Sequence: Synthetic polypeptide"
QVQLVQSGAEVKKPGSSVKVSCKASGYTFGNYWMQWVRQAPGQGLEWMGAIYEGTGKTVYIQKFAGRVTITADKSTSTAYMELSSLRSEDTAVYYCARLSDYVSGFGYWGQGTTVTVSSASTKGPSVFPLAPCSRSTSESTAALGCLVKDYFPEPVTVSWNSGALTSGVHTFPAVLQSSGLYSLSSVVTVPSSSLGTKTYTCNVDHKPSNTKVDKRVESKYGPPCPPCPAPEAAGGPSVFLFPPKPKDTLMISRTPEVTCVVVDVSQEDPEVQFNWYVDGVEVHNAKTKPREEQFNSTYRVVSVLTVLHQDWLNGKEYKCKVSNKGLPSSIEKTISKAKGQPREPQVYTLPPSQEEMTKNQVSLTCLVKGFYPSDIAVEWESNGQPENNYKTTPPVLDSDGSFFLYSRLTVDKSRWQEGNVFSCSVMHEALHNHYTQKSLSLSLG

SEQ ID NO: 8410 - protein, 324 aa, Mus musculus
AKTTPPSVYPLAPGSAAQTNSMVTLGCLVKGYFPEPVTVTWNSGSLSSGVHTFPAVLQSDLYTLSSSVTVPSSTWPSETVTCNVAHPASSTKVDKKIVPRDCGCKPCICTVPEVSSVFIFPPKPKDVLTITLTPKVTCVVVDISKDDPEVQFSWFVDDVEVHTAQTQPREEQFNSTFRSVSELPIMHQDWLNGKEFKCRVNSAAFPAPIEKTISKTKGRPKAPQVYTIPPPKEQMAKDKVSLTCMITDFFPEDITVEWQWNGQPAENYKNTQPIMDTDGSYFVYSKLNVQKSNWEAGNTFTCSVLHEGLHNHHTEKSLSHSPGK

SEQ ID NO: 8411 - protein, 451 aa, Artificial Sequence
  source: /note="Description of Artificial Sequence: Synthetic polypeptide"
  MOD_RES (449)..(451): Any amino acid
EVQLVESGGGLVQPGGSLRLSCAASGFTFSNYWISWVRQAPGKGLEWVAEIRSESDASATHYAEAVKGRFTISRDNAKNSLYLQMNSLRAEDTAVYYCLAYFDYGLAIQNYWGQGTLVTVSSASTKGPSVFPLAPCSRSTSESTAALGCLVKDYFPEPVTVSWNSGALTSGVHTFPAVLQSSGLYSLSSVVTVPSSNFGTQTYTCNVDHKPSNTKVDKTVERKCCVECPPCPAPPVAGPSVFLFPPKPKDTLMISRTPEVTCVVVDVSHEDPEVQFNWYVDGVEVHNAKTKPREEQFNSTFRVVSVLTVVHQDWLNGKEYKCKVSNKGLPSSIEKTISKTKGQPREPQVYTLPPSREEMTKNQVSLTCLVKGFYPSDIAVEWESNGQPENNYKTTPPMLDSDGSFFLYSKLTVDKSRWQQGNVFSCSVMHEALHNHYTQKSLSLSPGKXXX

SEQ ID NO: 8412 - protein, 125 aa, Artificial Sequence
  source: /note="Description of Artificial Sequence: Synthetic polypeptide"
  MOD_RES (123)..(125): Any amino acid
EVQLVESGGGLVQPGGSLRLSCAASGFTFSNYWISWVRQAPGKGLEWVAEIRSESDASATHYAEAVKGRFTISRDNAKNSLYLQMNSLRAEDTAVYYCLAYFDYGLAIQNYWGQGTLVTVSSXXX

SEQ ID NO: 8413 - protein, 441 aa, Artificial Sequence
  source: /note="Description of Artificial Sequence: Synthetic polypeptide"
EVQLVESGGGLVQPGGSLRLSCAVSGIDLSGYYMNWVRQAPGKGLEWVGVIGINGATYYASWAKGRFTISRDNSKTTVYLQMNSLRAEDTAVYFCARGDIWGQGTLVTVSSASTKGPSVFPLAPSSKSTSGGTAALGCLVKDYFPEPVTVSWNSGALTSGVHTFPAVLQSSGLYSLSSVVTVPSSSLGTQTYICNVNHKPSNTKVDARVEPKSCDKTHTCPPCPAPELLGGPSVFLFPPKPKDTLMISRTPEVTCVVVDVSHEDPEVKFNWYVDGVEVHNAKTKPREEQYASTYRVVSVLTVLHQDWLNGKEYKCKVSNKALPAPIEKTISKAKGQPREPQVYTLPPSREEMTKNQVSLTCLVKGFYPSDIAVEWESNGQPENNYKTTPPVLDSDGSFFLYSKLTVDKSRWQQGNVFSCSVMHEALHNHYTQKSLSLSPGK

SEQ ID NO: 8414 - protein, 441 aa, Artificial Sequence
  source: /note="Description of Artificial Sequence: Synthetic polypeptide"
EVQLVESGGGLVQPGGSLRLSCAVSGIDLSGYYMNWVRQAPGKGLEWVGVIGINGATYYASWAKGRFTISRDNSKTTVYLQMNSLRAEDTAVYFCARGDIWGQGTLVTVSSASTKGPSVFPLAPSSKSTSGGTAALGCLVKDYFPEPVTVSWNSGALTSGVHTFPAVLQSSGLYSLSSVVTVPSSSLGTQTYICNVNHKPSNTKVDKRVEPKSCDKTHTCPPCPAPELLGGPSVFLFPPKPKDTLMISRTPEVTCVVVDVSHEDPEVKFNWYVDGVEVHNAKTKPREEQYASTYRVVSVLTVLHQDWLNGKEYKCKVSNKALPAPIEKTISKAKGQPREPQVYTLPPSREEMTKNQVSLTCLVKGFYPSDIAVEWESNGQPENNYKTTPPVLDSDGSFFLYSKLTVDKSRWQQGNVFSCSVMHEALHNHYTQKSLSLSPGK

SEQ ID NO: 8415 - protein, 439 aa, Artificial Sequence
  source: /note="Description of Artificial Sequence: Synthetic polypeptide"
QSLEESGGRLVTPGTPLTLTCSVSGIDLSGYYMNWVRQAPGKGLEWIGVIGINGATYYASWAKGRFTISKTSSTTVDLKMTSLTTEDTATYFCARGDIWGPGTLVTVSSASTKGPSVFPLAPSSKSTSGGTAALGCLVKDYFPEPVTVSWNSGALTSGVHTFPAVLQSSGLYSLSSVVTVPSSSLGTQTYICNVNHKPSNTKVDKRVEPKSCDKTHTCPPCPAPELLGGPSVFLFPPKPKDTLMISRTPEVTCVVVDVSHEDPEVKFNWYVDGVEVHNAKTKPREEQYASTYRVVSVLTVLHQDWLNGKEYKCKVSNKALPAPIEKTISKAKGQPREPQVYTLPPSREEMTKNQVSLTCLVKGFYPSDIAVEWESNGQPENNYKTTPPVLDSDGSFFLYSKLTVDKSRWQQGNVFSCSVMHEALHNHYTQKSLSLSPGK

SEQ ID NO: 8416 - protein, 442 aa, Artificial Sequence
  source: /note="Description of Artificial Sequence: Synthetic polypeptide"
EVQLVESGGGLVQPGGSLRLSCAVSGLDLSSYYMQWVRQAPGKGLEWVGVIGINDNTYYASWAKGRFTISRDNSKTTVYLQMNSLRAEDTAVYFCARGDIWGQGTLVTVSSASTKGPSVFPLAPSSKSTSGGTAALGCLVKDYFPEPVTVSWNSGALTSGVHTFPAVLQSSGLYSLSSVVTVPSSSLGTQTYICNVNHKPSNTKVDKRVEPKSCDKTHTCPPCPAPELLGGPSVFLFPPKPKDTLMISRTPEVTCVVVDVSHEDPEVKFNWYVDGVEVHNAKTKPREEQYASTYRVVSVLTVLHQDWLNGKEYKCKVSNKALPAPIEKTISKAKGQPREPQVYTLPPSREEMTKNQVSLTCLVKGFYPSDIAVEWESNGQPENNYKTTPPVLDSDGSFFLYSKLTVDKSRWQQGNVFSCSVMHEALHNHYTQKSLSLSPGLY

SEQ ID NO: 8417 - protein, 109 aa, Artificial Sequence
  source: /note="Description of Artificial Sequence: Synthetic polypeptide"
QSLEESGGRLVTPGTPLTLTCTVSGLDLSSYYMQWVRQAPGKGLEWIGVIGINDNTYYASWAKGRFTISRASSTTVDLKMTSLTTEDTATYFCARGDIWGPGTLVTVSS

SEQ ID NO: 8418 - protein, 439 aa, Artificial Sequence
  source: /note="Description of Artificial Sequence: Synthetic polypeptide"
QSLEESGGRLVTPGTPLTLTCTVSGLDLSSYYMQWVRQAPGKGLEWIGVIGINDNTYYASWAKGRFTISRASSTTVDLKMTSLTTEDTATYFCARGDIWGPGTLVTVSSASTKGPSVFPLAPSSKSTSGGTAALGCLVKDYFPEPVTVSWNSGALTSGVHTFPAVLQSSGLYSLSSVVTVPSSSLGTQTYICNVNHKPSNTKVDKRVEPKSCDKTHTCPPCPAPELLGGPSVFLFPPKPKDTLMISRTPEVTCVVVDVSHEDPEVKFNWYVDGVEVHNAKTKPREEQYASTYRVVSVLTVLHQDWLNGKEYKCKVSNKALPAPIEKTISKAKGQPREPQVYTLPPSREEMTKNQVSLTCLVKGFYPSDIAVEWESNGQPENNYKTTPPVLDSDGSFFLYSKLTVDKSRWQQGNVFSCSVMHEALHNHYTQKSLSLSPGK

SEQ ID NO: 8419 - protein, 481 aa, Artificial Sequence
  source: /note="Description of Artificial Sequence: Synthetic polypeptide"
  MOD_RES (479)..(481): Any amino acid
MDMRVPAQLLGLLLLWLRGARCEVQLLESGGGLVQPGESLRLSCAASGFTFSSYAMSWVRQAPGKGLEWVSAISGSGGRTYYADSVKGRFTISRDNSKNTLYLQMNSLRAEDTAVYYCAKDQREVGPYSSGWYDYYYGMDVWGQGTTVTVSSASTKGPSVFPLAPCSRSTSESTAALGCLVKDYFPEPVTVSWNSGALTSGVHTFPAVLQSSGLYSLSSVVTVPSSNFGTQTYTCNVDHKPSNTKVDKTVERKCCVECPPCPAPPVAGPSVFLFPPKPKDTLMISRTPEVTCVVVDVSHEDPEVQFNWYVDGVEVHNAKTKPREEQFNSTFRVVSVLTVVHQDWLNGKEYKCKVSNKGLPAPIEKTISKTKGQPREPQVYTLPPSREEMTKNQVSLTCLVKGFYPSDIAVEWESNGQPENNYKTTPPMLDSDGSFFLYSKLTVDKSRWQQGNVFSCSVMHEALHNHYTQKSLSLSPGKXXX

SEQ ID NO: 8420 - protein, 482 aa, Artificial Sequence
  source: /note="Description of Artificial Sequence: Synthetic polypeptide"
  MOD_RES (480)..(482): Any amino acid
MDMRVPAQLLGLLLLWLRGARCEVQLVESGGGLVKPGGSLRLSCAASGFTFGNAWMSWVRQAPGKGLEWVGRIKSKTDGGTTDYAAPVKGRFTISRDDSKNTLYLQMNSLKTEDTAVYFCTTDRTGYSISWSSYYYYYGMDVWGQGTTVTVSSASTKGPSVFPLAPCSRSTSESTAALGCLVKDYFPEPVTVSWNSGALTSGVHTFPAVLQSSGLYSLSSVVTVPSSNFGTQTYTCNVDHKPSNTKVDKTVERKCCVECPPCPAPPVAGPSVFLFPPKPKDTLMISRTPEVTCVVVDVSHEDPEVQFNWYVDGVEVHNAKTKPREEQFNSTFRVVSVLTVVHQDWLNGKEYKCKVSNKGLPAPIEKTISKTKGQPREPQVYTLPPSREEMTKNQVSLTCLVKGFYPSDIAVEWESNGQPENNYKTTPPMLDSDGSFFLYSKLTVDKSRWQQGNVFSCSVMHEALHNHYTQKSLSLSPGKXXX

SEQ ID NO: 8421 - protein, 482 aa, Artificial Sequence
  source: /note="Description of Artificial Sequence: Synthetic polypeptide"
  MOD_RES (480)..(482): Any amino acid
MDMRVPAQLLGLLLLWLRGARCEVQLVESGGGLVKPGGSLRLSCAASGFTFGNAWMSWVRQAPGKGLEWVGRIKSKTDGGTTDYAAPVKGRFTISRDDSKNTLYLQMNSLKTEDTAVYYCTTDRTGYSISWSSYYYYYGMDVWGQGTTVTVSSASTKGPSVFPLAPCSRSTSESTAALGCLVKDYFPEPVTVSWNSGALTSGVHTFPAVLQSSGLYSLSSVVTVPSSNFGTQTYTCNVDHKPSNTKVDKTVERKCCVECPPCPAPPVAGPSVFLFPPKPKDTLMISRTPEVTCVVVDVSHEDPEVQFNWYVDGVEVHNAKTKPREEQFNSTFRVVSVLTVVHQDWLNGKEYKCKVSNKGLPAPIEKTISKTKGQPREPQVYTLPPSREEMTKNQVSLTCLVKGFYPSDIAVEWESNGQPENNYKTTPPMLDSDGSFFLYSKLTVDKSRWQQGNVFSCSVMHEALHNHYTQKSLSLSPGKXXX

SEQ ID NO: 8422 - protein, 482 aa, Artificial Sequence
  source: /note="Description of Artificial Sequence: Synthetic polypeptide"
  MOD_RES (480)..(482): Any amino acid
MDMRVPAQLLGLLLLWLRGARCEVQLVESGGGLVKPGGSLRLSCAASGFTFSNAWMSWVRQAPGKGLEWVGRIKSKTDGGTTDYTAPVKGRFTISRDDSKNTLYLQMNSLKAEDTAVYYCTTDRTGYSISWSSYYYYYGMDVWGQGTTVTVSSASTKGPSVFPLAPCSRSTSESTAALGCLVKDYFPEPVTVSWNSGALTSGVHTFPAVLQSSGLYSLSSVVTVPSSNFGTQTYTCNVDHKPSNTKVDKTVERKCCVECPPCPAPPVAGPSVFLFPPKPKDTLMISRTPEVTCVVVDVSHEDPEVQFNWYVDGVEVHNAKTKPREEQFNSTFRVVSVLTVVHQDWLNGKEYKCKVSNKGLPAPIEKTISKTKGQPREPQVYTLPPSREEMTKNQVSLTCLVKGFYPSDIAVEWESNGQPENNYKTTPPMLDSDGSFFLYSKLTVDKSRWQQGNVFSCSVMHEALHNHYTQKSLSLSPGKXXX

SEQ ID NO: 8423 - protein, 482 aa, Artificial Sequence
  source: /note="Description of Artificial Sequence: Synthetic polypeptide"
  MOD_RES (480)..(482): Any amino acid
MDMRVPAQLLGLLLLWLRGARCEVQLVESGGGLVKPGGSLRLSCAASGFTFSNAWMSWVRQAPGKGLEWVGRIKSTTDGGTTDYAAPVKGRFTISRDDSKNTLYLQMNSLKTEDTAVYYCTTDRTGYSISWSSYYYYYGMDVWGQGTTVTVSSASTKGPSVFPLAPCSRSTSESTAALGCLVKDYFPEPVTVSWNSGALTSGVHTFPAVLQSSGLYSLSSVVTVPSSNFGTQTYTCNVDHKPSNTKVDKTVERKCCVECPPCPAPPVAGPSVFLFPPKPKDTLMISRTPEVTCVVVDVSHEDPEVQFNWYVDGVEVHNAKTKPREEQFNSTFRVVSVLTVVHQDWLNGKEYKCKVSNKGLPAPIEKTISKTKGQPREPQVYTLPPSREEMTKNQVSLTCLVKGFYPSDIAVEWESNGQPENNYKTTPPMLDSDGSFFLYSKLTVDKSRWQQGNVFSCSVMHEALHNHYTQKSLSLSPGKXXX

SEQ ID NO: 8424 - protein, 482 aa, Artificial Sequence
  source: /note="Description of Artificial Sequence: Synthetic polypeptide"
  MOD_RES (480)..(482): Any amino acid
MDMRVPAQLLGLLLLWLRGARCEVQLVESGGGLVKPGGSLRLSCAASGYTFSTYSMNWVRQAPGKGLEWVSSISSSSSYRYYADSVKGRFTISRDNAKNSLYLQMSSLRAEDTAVYYCAREGVSGSSPYSISWYDYYYGMDVWGQGTTVTVSSASTKGPSVFPLAPCSRSTSESTAALGCLVKDYFPEPVTVSWNSGALTSGVHTFPAVLQSSGLYSLSSVVTVPSSNFGTQTYTCNVDHKPSNTKVDKTVERKCCVECPPCPAPPVAGPSVFLFPPKPKDTLMISRTPEVTCVVVDVSHEDPEVQFNWYVDGVEVHNAKTKPREEQFNSTFRVVSVLTVVHQDWLNGKEYKCKVSNKGLPAPIEKTISKTKGQPREPQVYTLPPSREEMTKNQVSLTCLVKGFYPSDIAVEWESNGQPENNYKTTPPMLDSDGSFFLYSKLTVDKSRWQQGNVFSCSVMHEALHNHYTQKSLSLSPGKXXX

SEQ ID NO: 8425 - protein, 472 aa, Artificial Sequence
  source: /note="Description of Artificial Sequence: Synthetic polypeptide"
  MOD_RES (470)..(472): Any amino acid
MDMRVPAQLLGLLLLWLRGARCEVQLVESGGGLVKPGRSLRLSCTASGFTFGDYAMSWFRQAPGKGLEWIGFIRSRAYGGTPEYAASVKGRFTISRDDSKTIAYLQMNSLKTEDTAVYFCARGRGIAARWDYWGQGTLVTVSSASTKGPSVFPLAPCSRSTSESTAALGCLVKDYFPEPVTVSWNSGALTSGVHTFPAVLQSSGLYSLSSVVTVPSSNFGTQTYTCNVDHKPSNTKVDKTVERKCCVECPPCPAPPVAGPSVFLFPPKPKDTLMISRTPEVTCVVVDVSHEDPEVQFNWYVDGVEVHNAKTKPREEQFNSTFRVVSVLTVVHQDWLNGKEYKCKVSNKGLPAPIEKTISKTKGQPREPQVYTLPPSREEMTKNQVSLTCLVKGFYPSDIAVEWESNGQPENNYKTTPPMLDSDGSFFLYSKLTVDKSRWQQGNVFSCSVMHEALHNHYTQKSLSLSPGKXXX

SEQ ID NO: 8426 - protein, 481 aa, Artificial Sequence
  source: /note="Description of Artificial Sequence: Synthetic polypeptide"
  MOD_RES (479)..(481): Any amino acid
MDMRVPAQLLGLLLLWLRGARCQVQLVESGGGVVQPGRSLRLSCAASGFTFSSFGMHWVRQAPGKGLEWVAVISFDGSIKYSVDSVKGRFTISRDNSKNTLFLQMNSLRAEDTAVYYCARDRLNYYDSSGYYHYKYYGLAVWGQGTTVTVSSASTKGPSVFPLAPCSRSTSESTAALGCLVKDYFPEPVTVSWNSGALTSGVHTFPAVLQSSGLYSLSSVVTVPSSNFGTQTYTCNVDHKPSNTKVDKTVERKCCVECPPCPAPPVAGPSVFLFPPKPKDTLMISRTPEVTCVVVDVSHEDPEVQFNWYVDGVEVHNAKTKPREEQFNSTFRVVSVLTVVHQDWLNGKEYKCKVSNKGLPAPIEKTISKTKGQPREPQVYTLPPSREEMTKNQVSLTCLVKGFYPSDIAVEWESNGQPENNYKTTPPMLDSDGSFFLYSKLTVDKSRWQQGNVFSCSVMHEALHNHYTQKSLSLSPGKXXX

SEQ ID NO: 8427 - protein, 481 aa, Artificial Sequence
  source: /note="Description of Artificial Sequence: Synthetic polypeptide"
  MOD_RES (479)..(481): Any amino acid
MDMRVPAQLLGLLLLWLRGARCQVQLVESGGGVVQPGRSLRLSCAASGFTFSSFGMHWVRQAPGKGLEWVAVISFDGSIKYSVDSVKGRFTISRDNSKNTLFLQMNSLRAEDTAVYYCARDRLNYYDSSGYYHYKYYGMAVWGQGTTVTVSSASTKGPSVFPLAPCSRSTSESTAALGCLVKDYFPEPVTVSWNSGALTSGVHTFPAVLQSSGLYSLSSVVTVPSSNFGTQTYTCNVDHKPSNTKVDKTVERKCCVECPPCPAPPVAGPSVFLFPPKPKDTLMISRTPEVTCVVVDVSHEDPEVQFNWYVDGVEVHNAKTKPREEQFNSTFRVVSVLTVVHQDWLNGKEYKCKVSNKGLPAPIEKTISKTKGQPREPQVYTLPPSREEMTKNQVSLTCLVKGFYPSDIAVEWESNGQPENNYKTTPPMLDSDGSFFLYSKLTVDKSRWQQGNVFSCSVMHEALHNHYTQKSLSLSPGKXXX

SEQ ID NO: 8428 - protein, 480 aa, Artificial Sequence
  source: /note="Description of Artificial Sequence: Synthetic polypeptide"
  MOD_RES (478)..(480): Any amino acid
MDMRVPAQLLGLLLLWLRGARCQVQLVESGGGVVQPGRSLRLSCAASGFTFSSYGMHWVRQAPGKGLEWVAVISYDGSHESYADSVKGRFTISRDISKNTLYLQMNSLRAEDTAVYFCARERKRVTMSTLYYYFYYGMDVWGQGTTVTVSSASTKGPSVFPLAPCSRSTSESTAALGCLVKDYFPEPVTVSWNSGALTSGVHTFPAVLQSSGLYSLSSVVTVPSSNFGTQTYTCNVDHKPSNTKVDKTVERKCCVECPPCPAPPVAGPSVFLFPPKPKDTLMISRTPEVTCVVVDVSHEDPEVQFNWYVDGVEVHNAKTKPREEQFNSTFRVVSVLTVVHQDWLNGKEYKCKVSNKGLPAPIEKTISKTKGQPREPQVYTLPPSREEMTKNQVSLTCLVKGFYPSDIAVEWESNGQPENNYKTTPPMLDSDGSFFLYSKLTVDKSRWQQGNVFSCSVMHEALHNHYTQKSLSLSPGKXXX

SEQ ID NO: 8429 - protein, 476 aa, Artificial Sequence
  source: /note="Description of Artificial Sequence: Synthetic polypeptide"
  MOD_RES (475)..(476): Any amino acid
MDMRVPAQLLGLLLLWLRGARCQVQLVESGGGVVQPGRSLRLSCAASGFTFSSYGMHWVRQAPGKGLEWVAVIWYDGSNKYYADSVKGRFIISRDKSKNTLYLQMNSLRAEDTAVYYCARAGGIAAAGLYYYYGMDVWGQGTTVTVSSASTKGPSVFPLAPCSRSTSESTAALGCLVKDYFPEPVTVSWNSGALTSGVHTFPAVLQSSGLYSLSSVVTVPSSNFGTQTYTCNVDHKPSNTKVDKTVERKCCVECPPCPAPPVAGPSVFLFPPKPKDTLMISRTPEVTCVVVDVSHEDPEVQFNWYVDGVEVHNAKTKPREEQFNSTFRVVSVLTVVHQDWLNGKEYKCKVSNKGLPAPIEKTISKTKGQPREPQVYTLPPSREEMTKNQVSLTCLVKGFYPSDIAVEWESNGQPENNYKTTPPMLDSDGSFFLYSKLTVDKSRWQQGNVFSCSVMHEALHNHYTQKSLSLSPGKXX

SEQ ID NO: 8430 - protein, 478 aa, Artificial Sequence
  source: /note="Description of Artificial Sequence: Synthetic polypeptide"
  MOD_RES (476)..(478): Any amino acid
MDMRVPAQLLGLLLLWLRGARCQVQLVQSGAEVKKPGASVKVSCKASGYTFTDYYMYWVRQAPGQGLEWMGWISPNSGGTNYAQKFQGRVTMTRDTSISTAYMELSRLRSDDTAVYYCVRGGYSGYAGLYSHYYGMDVWGQGTTVTVSSASTKGPSVFPLAPCSRSTSESTAALGCLVKDYFPEPVTVSWNSGALTSGVHTFPAVLQSSGLYSLSSVVTVPSSNFGTQTYTCNVDHKPSNTKVDKTVERKCCVECPPCPAPPVAGPSVFLFPPKPKDTLMISRTPEVTCVVVDVSHEDPEVQFNWYVDGVEVHNAKTKPREEQFNSTFRVVSVLTVVHQDWLNGKEYKCKVSNKGLPAPIEKTISKTKGQPREPQVYTLPPSREEMTKNQVSLTCLVKGFYPSDIAVEWESNGQPENNYKTTPPMLDSDGSFFLYSKLTVDKSRWQQGNVFSCSVMHEALHNHYTQKSLSLSPGKXXX

SEQ ID NO: 8431 - protein, 481 aa, Artificial Sequence
  source: /note="Description of Artificial Sequence: Synthetic polypeptide"
  MOD_RES (479)..(481): Any amino acid
MDMRVPAQLLGLLLLWLRGARCQVQLVQSGAEVKKPGASVKVSCKASGYTFTGYYMHWVRQAPGQGLEWMGWINPNSGGTNYAQKFQGRVTMTRDTSISTAYMELSRLRSDDTAVYFCARDQMSIIMLRGVFPPYYYGMDVWGQGTTVTVSSASTKGPSVFPLAPCSRSTSESTAALGCLVKDYFPEPVTVSWNSGALTSGVHTFPAVLQSSGLYSLSSVVTVPSSNFGTQTYTCNVDHKPSNTKVDKTVERKCCVECPPCPAPPVAGPSVFLFPPKPKDTLMISRTPEVTCVVVDVSHEDPEVQFNWYVDGVEVHNAKTKPREEQFNSTFRVVSVLTVVHQDWLNGKEYKCKVSNKGLPAPIEKTISKTKGQPREPQVYTLPPSREEMTKNQVSLTCLVKGFYPSDIAVEWESNGQPENNYKTTPPMLDSDGSFFLYSKLTVDKSRWQQGNVFSCSVMHEALHNHYTQKSLSLSPGKXXX

SEQ ID NO: 8432 - protein, 448 aa, Artificial Sequence
  source: /note="Description of Artificial Sequence: Synthetic polypeptide"
EVQLVESGGGLVQPGGSLRLSCAASGFTFSNYWISWVRQAPGKGLEWVAEIRSESDASATHYAEAVKGRFTISRDNAKNSLYLQMNSLRAEDTAVYYCLAYFDYGLAIQNYWGQGTLVTVSSASTKGPSVFPLAPCSRSTSESTAALGCLVKDYFPEPVTVSWNSGALTSGVHTFPAVLQSSGLYSLSSVVTVPSSNFGTQTYTCNVDHKPSNTKVDKTVERKCCVECPPCPAPPVAGPSVFLFPPKPKDTLMISRTPEVTCVVVDVSHEDPEVQFNWYVDGVEVHNAKTKPREEQFNSTFRVVSVLTVVHQDWLNGKEYKCKVSNKGLPSSIEKTISKTKGQPREPQVYTLPPSREEMTKNQVSLTCLVKGFYPSDIAVEWESNGQPENNYKTTPPMLDSDGSFFLYSKLTVDKSRWQQGNVFSCSVMHEALHNHYTQKSLSLSPGK

SEQ ID NO: 8433 - protein, 330 aa, Homo sapiens
ASTKGPSVFPLAPSSKSTSGGTAALGCLVKDYFPEPVTVSWNSGALTSGVHTFPAVLQSSGLYSLSSVVTVPSSSLGTQTYICNVNHKPSNTKVDKRVEPKSCDKTHTCPPCPAPELLGGPSVFLFPPKPKDTLMISRTPEVTCVVVDVSHEDPEVKFNWYVDGVEVHNAKTKPREEQYASTYRVVSVLTVLHQDWLNGKEYKCKVSNKALPAPIEKTISKAKGQPREPQVYTLPPSREEMTKNQVSLTCLVKGFYPSDIAVEWESNGQPENNYKTTPPVLDSDGSFFLYSKLTVDKSRWQQGNVFSCSVMHEALHNHYTQKSLSLSPGK

SEQ ID NO: 8434 - protein, 114 aa, Artificial Sequence
  source: /note="Description of Artificial Sequence: Synthetic polypeptide"
  MOD_RES (112)..(114): Any amino acid
EVQLVESGGGLVQPGGSLRLSCAVSGIDLSGYYMNWVRQAPGKGLEWVGVIGINGATYYASWAKGRFTISRDNSKTTVYLQMNSLRAEDTAVYFCARGDIWGQGTLVTVSSXXX

SEQ ID NO: 8435 - protein, 441 aa, Artificial Sequence
  source: /note="Description of Artificial Sequence: Synthetic polypeptide"
EVQLVESGGGLVQPGGSLRLSCAVSGIDLSNHYMQWVRQAPGKGLEWVGVVGINGRTYYASWAKGRFTISRDNSKTTVYLQMNSLRAEDTAVYFCARGDIWGQGTLVTVSSASTKGPSVFPLAPSSKSTSGGTAALGCLVKDYFPEPVTVSWNSGALTSGVHTFPAVLQSSGLYSLSSVVTVPSSSLGTQTYICNVNHKPSNTKVDKRVEPKSCDKTHTCPPCPAPELLGGPSVFLFPPKPKDTLMISRTPEVTCVVVDVSHEDPEVKFNWYVDGVEVHNAKTKPREEQYASTYRVVSVLTVLHQDWLNGKEYKCKVSNKALPAPIEKTISKAKGQPREPQVYTLPPSREEMTKNQVSLTCLVKGFYPSDIAVEWESNGQPENNYKTTPPVLDSDGSFFLYSKLTVDKSRWQQGNVFSCSVMHEALHNHYTQKSLSLSPGK

SEQ ID NO: 8436 - protein, 441 aa, Artificial Sequence
  source: /note="Description of Artificial Sequence: Synthetic polypeptide"
EVQLVESGGGLVQPGGSLRLSCAVSGIDVTNYYMQWVRQAPGKGLEWVGVIGVNGKRYYASWAKGRFTISRDNSKTTVYLQMNSLRAEDTAVYFCARGDIWGQGTLVTVSSASTKGPSVFPLAPSSKSTSGGTAALGCLVKDYFPEPVTVSWNSGALTSGVHTFPAVLQSSGLYSLSSVVTVPSSSLGTQTYICNVNHKPSNTKVDKRVEPKSCDKTHTCPPCPAPELLGGPSVFLFPPKPKDTLMISRTPEVTCVVVDVSHEDPEVKFNWYVDGVEVHNAKTKPREEQYASTYRVVSVLTVLHQDWLNGKEYKCKVSNKALPAPIEKTISKAKGQPREPQVYTLPPSREEMTKNQVSLTCLVKGFYPSDIAVEWESNGQPENNYKTTPPVLDSDGSFFLYSKLTVDKSRWQQGNVFSCSVMHEALHNHYTQKSLSLSPGK

SEQ ID NO: 8437 - protein, 441 aa, Artificial Sequence
  source: /note="Description of Artificial Sequence: Synthetic polypeptide"
EVQLVESGGGLVQPGGSLRLSCAVSGIGLSSYYMQWVRQAPGKGLEWVGVIGSDGKTYYATWAKGRFTISRDNSKTTVYLQMNSLRAEDTAVYFCTRGDIWGQGTLVTVSSASTKGPSVFPLAPSSKSTSGGTAALGCLVKDYFPEPVTVSWNSGALTSGVHTFPAVLQSSGLYSLSSVVTVPSSSLGTQTYICNVNHKPSNTKVDARVEPKSCDKTHTCPPCPAPELLGGPSVFLFPPKPKDTLMISRTPEVTCVVVDVSHEDPEVKFNWYVDGVEVHNAKTKPREEQYASTYRVVSVLTVLHQDWLNGKEYKCKVSNKALPAPIEKTISKAKGQPREPQVYTLPPSREEMTKNQVSLTCLVKGFYPSDIAVEWESNGQPENNYKTTPPVLDSDGSFFLYSKLTVDKSRWQQGNVFSCSVMHEALHNHYTQKSLSLSPGK

SEQ ID NO: 8438 - protein, 441 aa, Artificial Sequence
  source: /note="Description of Artificial Sequence: Synthetic polypeptide"
EVQLVESGGGLVQPGGSLRLSCAVSGIGLSSYYMQWVRQAPGKGLEWVGVIGSDGKTYYATWAKGRFTISRDNSKTTVYLQMNSLRAEDTAVYFCTRGDIWGQGTLVTVSSASTKGPSVFPLAPSSKSTSGGTAALGCLVKDYFPEPVTVSWNSGALTSGVHTFPAVLQSSGLYSLSSVVTVPSSSLGTQTYICNVNHKPSNTKVDKRVEPKSCDKTHTCPPCPAPELLGGPSVFLFPPKPKDTLMISRTPEVTCVVVDVSHEDPEVKFNWYVDGVEVHNAKTKPREEQYASTYRVVSVLTVLHQDWLNGKEYKCKVSNKALPAPIEKTISKAKGQPREPQVYTLPPSREEMTKNQVSLTCLVKGFYPSDIAVEWESNGQPENNYKTTPPVLDSDGSFFLYSKLTVDKSRWQQGNVFSCSVMHEALHNHYTQKSLSLSPGK

SEQ ID NO: 8439 - protein, 441 aa, Artificial Sequence
  source: /note="Description of Artificial Sequence: Synthetic polypeptide"
EVQLVESGGGLVQPGGSLRLSCAVSGLDLSSYYMQWVRQAPGKGLEWVGVIGINDNTYYASWAKGRFTISRDNSKTTVYLQMNSLRAEDTAVYFCARGDIWGQGTLVTVSSASTKGPSVFPLAPSSKSTSGGTAALGCLVKDYFPEPVTVSWNSGALTSGVHTFPAVLQSSGLYSLSSVVTVPSSSLGTQTYICNVNHKPSNTKVDARVEPKSCDKTHTCPPCPAPELLGGPSVFLFPPKPKDTLMISRTPEVTCVVVDVSHEDPEVKFNWYVDGVEVHNAKTKPREEQYASTYRVVSVLTVLHQDWLNGKEYKCKVSNKALPAPIEKTISKAKGQPREPQVYTLPPSREEMTKNQVSLTCLVKGFYPSDIAVEWESNGQPENNYKTTPPVLDSDGSFFLYSKLTVDKSRWQQGNVFSCSVMHEALHNHYTQKSLSLSPGK

SEQ ID NO: 8440 - protein, 441 aa, Artificial Sequence
  source: /note="Description of Artificial Sequence: Synthetic polypeptide"
EVQLVESGGGLVQPGGSLRLSCAVSGLDLSSYYMQWVRQAPGKGLEWVGVIGINDNTYYASWAKGRFTISRDNSKTTVYLQMNSLRAEDTAVYFCARGDIWGQGTLVTVSSASTKGPSVFPLAPSSKSTSGGTAALGCLVKDYFPEPVTVSWNSGALTSGVHTFPAVLQSSGLYSLSSVVTVPSSSLGTQTYICNVNHKPSNTKVDKRVEPKSCDKTHTCPPCPAPELLGGPSVFLFPPKPKDTLMISRTPEVTCVVVDVSHEDPEVKFNWYVDGVEVHNAKTKPREEQYASTYRVVSVLTVLHQDWLNGKEYKCKVSNKALPAPIEKTISKAKGQPREPQVYTLPPSREEMTKNQVSLTCLVKGFYPSDIAVEWESNGQPENNYKTTPPVLDSDGSFFLYSKLTVDKSRWQQGNVFSCSVMHEALHNHYTQKSLSLSPGK

SEQ ID NO: 8441 - protein, 114 aa, Artificial Sequence
  source: /note="Description of Artificial Sequence: Synthetic polypeptide"
  MOD_RES (112)..(114): Any amino acid
EVQLVESGGGLVQPGGSLRLSCAVSGLDLSSYYMQWVRQAPGKGLEWVGVIGINDNTYYASWAKGRFTISRDNSKTTVYLQMNSLRAEDTAVYFCARGDIWGQGTLVTVSSXXX

SEQ ID NO: 8442 - protein, 440 aa, Artificial Sequence
  source: /note="Description of Artificial Sequence: Synthetic polypeptide"
QEQLKESGGRLVTPGTSLTLTCTVSGIDLSNHYMQWVRQAPGKGLEWIGVVGINGRTYYASWAKGRFTISRTSSTTVDLKMTRLTTEDTATYFCARGDIWGPGTLVTVSSASTKGPSVFPLAPSSKSTSGGTAALGCLVKDYFPEPVTVSWNSGALTSGVHTFPAVLQSSGLYSLSSVVTVPSSSLGTQTYICNVNHKPSNTKVDKRVEPKSCDKTHTCPPCPAPELLGGPSVFLFPPKPKDTLMISRTPEVTCVVVDVSHEDPEVKFNWYVDGVEVHNAKTKPREEQYASTYRVVSVLTVLHQDWLNGKEYKCKVSNKALPAPIEKTISKAKGQPREPQVYTLPPSREEMTKNQVSLTCLVKGFYPSDIAVEWESNGQPENNYKTTPPVLDSDGSFFLYSKLTVDKSRWQQGNVFSCSVMHEALHNHYTQKSLSLSPGK

SEQ ID NO: 8443 - protein, 439 aa, Artificial Sequence
  source: /note="Description of Artificial Sequence: Synthetic polypeptide"
QSLEESGGRLVTPGGSLTLTCTVSGIDVTNYYMQWVRQAPGKGLEWIGVIGVNGKRYYASWAKGRFTISKTSSTTVDLKMTSLTTEDTATYFCARGDIWGPGTLVTVSSASTKGPSVFPLAPSSKSTSGGTAALGCLVKDYFPEPVTVSWNSGALTSGVHTFPAVLQSSGLYSLSSVVTVPSSSLGTQTYICNVNHKPSNTKVDKRVEPKSCDKTHTCPPCPAPELLGGPSVFLFPPKPKDTLMISRTPEVTCVVVDVSHEDPEVKFNWYVDGVEVHNAKTKPREEQYASTYRVVSVLTVLHQDWLNGKEYKCKVSNKALPAPIEKTISKAKGQPREPQVYTLPPSREEMTKNQVSLTCLVKGFYPSDIAVEWESNGQPENNYKTTPPVLDSDGSFFLYSKLTVDKSRWQQGNVFSCSVMHEALHNHYTQKSLSLSPGK

SEQ ID NO: 8444 - protein, 112 aa, Artificial Sequence
  source: /note="Description of Artificial Sequence: Synthetic polypeptide"
  MOD_RES (110)..(112): Any amino acid
QSLEESGGRLVTPGTPLTLTCSVSGIDLSGYYMNWVRQAPGKGLEWIGVIGINGATYYASWAKGRFTISKTSSTTVDLKMTSLTTEDTATYFCARGDIWGPGTLVTVSSXXX

SEQ ID NO: 8445 - protein, 439 aa, Artificial Sequence
  source: /note="Description of Artificial Sequence: Synthetic polypeptide"
QSLEESGGRLVTPGTPLTLTCTVSGIGLSSYYMQWVRQSPGRGLEWIGVIGSDGKTYYATWAKGRFTISKTSSTTVDLRMASLTTEDTATYFCTRGDIWGPGTLVTVSSASTKGPSVFPLAPSSKSTSGGTAALGCLVKDYFPEPVTVSWNSGALTSGVHTFPAVLQSSGLYSLSSVVTVPSSSLGTQTYICNVNHKPSNTKVDKRVEPKSCDKTHTCPPCPAPELLGGPSVFLFPPKPKDTLMISRTPEVTCVVVDVSHEDPEVKFNWYVDGVEVHNAKTKPREEQYASTYRVVSVLTVLHQDWLNGKEYKCKVSNKALPAPIEKTISKAKGQPREPQVYTLPPSREEMTKNQVSLTCLVKGFYPSDIAVEWESNGQPENNYKTTPPVLDSDGSFFLYSKLTVDKSRWQQGNVFSCSVMHEALHNHYTQKSLSLSPGK

SEQ ID NO: 8446 - protein, 112 aa, Artificial Sequence
  source: /note="Description of Artificial Sequence: Synthetic polypeptide"
  MOD_RES (110)..(112): Any amino acid
QSLEESGGRLVTPGTPLTLTCTVSGLDLSSYYMQWVRQAPGKGLEWIGVIGINDNTYYASWAKGRFTISRASSTTVDLKMTSLTTEDTATYFCARGDIWGPGTLVTVSSXXX

SEQ ID NO: 8447 - protein, 441 aa, Artificial Sequence
  source: /note="Description of Artificial Sequence: Synthetic polypeptide"
QSVEESGGGLVQPEGSLTLTCTASGFDFSSNAMWWVRQAPGKGLEWIGCIYNGDGSTYYASWVNGRFSISKTSSTTVTLQLNSLTVADTATYYCARDLDLWGPGTLVTVSSASTKGPSVFPLAPSSKSTSGGTAALGCLVKDYFPEPVTVSWNSGALTSGVHTFPAVLQSSGLYSLSSVVTVPSSSLGTQTYICNVNHKPSNTKVDKRVEPKSCDKTHTCPPCPAPELLGGPSVFLFPPKPKDTLMISRTPEVTCVVVDVSHEDPEVKFNWYVDGVEVHNAKTKPREEQYASTYRVVSVLTVLHQDWLNGKEYKCKVSNKALPAPIEKTISKAKGQPREPQVYTLPPSREEMTKNQVSLTCLVKGFYPSDIAVEWESNGQPENNYKTTPPVLDSDGSFFLYSKLTVDKSRWQQGNVFSCSVMHEALHNHYTQKSLSLSPGK

SEQ ID NO: 8448 - protein, 107 aa, Mus musculus
RADAAPTVSIFPPSSEQLTSGGASVVCFLNNFYPKDINVKWKIDGSERQNGVLNSWTDQDSKDSTYSMSSTLTLTKDEYERHNSYTCEATHKTSTSPIVKSFNRNEC

SEQ ID NO: 8449 - protein, 479 aa, Artificial Sequence
  source: /note="Description of Artificial Sequence: Synthetic polypeptide"
MDMRVPAQLLGLLLLWLRGARCEVQLVESGGGLVKPGGSLRLSCAASGFTFSNAWMSWVRQAPGKGLEWVGRIKSKTDGGTTDYTAPVKGRFTISRDDSKNTLYLQMNSLKAEDTAVYYCTTDRTGYSISWSSYYYYYGMDVWGQGTTVTVSSASTKGPSVFPLAPCSRSTSESTAALGCLVKDYFPEPVTVSWNSGALTSGVHTFPAVLQSSGLYSLSSVVTVPSSNFGTQTYTCNVDHKPSNTKVDKTVERKCCVECPPCPAPPVAGPSVFLFPPKPKDTLMISRTPEVTCVVVDVSHEDPEVQFNWYVDGVEVHNAKTKPREEQFNSTFRVVSVLTVVHQDWLNGKEYKCKVSNKGLPAPIEKTISKTKGQPREPQVYTLPPSREEMTKNQVSLTCLVKGFYPSDIAVEWESNGQPENNYKTTPPMLDSDGSFFLYSKLTVDKSRWQQGNVFSCSVMHEALHNHYTQKSLSLSPGK

SEQ ID NO: 8450 - protein, 478 aa, Artificial Sequence
  source: /note="Description of Artificial Sequence: Synthetic polypeptide"
MDMRVPAQLLGLLLLWLRGARCQVQLVESGGGVVQPGRSLRLSCAASGFTFSSFGMHWVRQAPGKGLEWVAVISFDGSIKYSVDSVKGRFTISRDNSKNTLFLQMNSLRAEDTAVYYCARDRLNYYDSSGYYHYKYYGLAVWGQGTTVTVSSASTKGPSVFPLAPCSRSTSESTAALGCLVKDYFPEPVTVSWNSGALTSGVHTFPAVLQSSGLYSLSSVVTVPSSNFGTQTYTCNVDHKPSNTKVDKTVERKCCVECPPCPAPPVAGPSVFLFPPKPKDTLMISRTPEVTCVVVDVSHEDPEVQFNWYVDGVEVHNAKTKPREEQFNSTFRVVSVLTVVHQDWLNGKEYKCKVSNKGLPAPIEKTISKTKGQPREPQVYTLPPSREEMTKNQVSLTCLVKGFYPSDIAVEWESNGQPENNYKTTPPMLDSDGSFFLYSKLTVDKSRWQQGNVFSCSVMHEALHNHYTQKSLSLSPGK

SEQ ID NO: 8451 - protein, 478 aa, Artificial Sequence
  source: /note="Description of Artificial Sequence: Synthetic polypeptide"
MDMRVPAQLLGLLLLWLRGARCQVQLVESGGGVVQPGRSLRLSCAASGFTFSSFGMHWVRQAPGKGLEWVAVISFDGSIKYSVDSVKGRFTISRDNSKNTLFLQMNSLRAEDTAVYYCARDRLNYYDSSGYYHYKYYGMAVWGQGTTVTVSSASTKGPSVFPLAPCSRSTSESTAALGCLVKDYFPEPVTVSWNSGALTSGVHTFPAVLQSSGLYSLSSVVTVPSSNFGTQTYTCNVDHKPSNTKVDKTVERKCCVECPPCPAPPVAGPSVFLFPPKPKDTLMISRTPEVTCVVVDVSHEDPEVQFNWYVDGVEVHNAKTKPREEQFNSTFRVVSVLTVVHQDWLNGKEYKCKVSNKGLPAPIEKTISKTKGQPREPQVYTLPPSREEMTKNQVSLTCLVKGFYPSDIAVEWESNGQPENNYKTTPPMLDSDGSFFLYSKLTVDKSRWQQGNVFSCSVMHEALHNHYTQKSLSLSPGK

SEQ ID NO: 8452 - protein, 475 aa, Artificial Sequence
  source: /note="Description of Artificial Sequence: Synthetic polypeptide"
MDMRVPAQLLGLLLLWLRGARCQVQLVQSGAEVKKPGASVKVSCKASGYTFTDYYMYWVRQAPGQGLEWMGWISPNSGGTNYAQKFQGRVTMTRDTSISTAYMELSRLRSDDTAVYYCVRGGYSGYAGLYSHYYGMDVWGQGTTVTVSSASTKGPSVFPLAPCSRSTSESTAALGCLVKDYFPEPVTVSWNSGALTSGVHTFPAVLQSSGLYSLSSVVTVPSSNFGTQTYTCNVDHKPSNTKVDKTVERKCCVECPPCPAPPVAGPSVFLFPPKPKDTLMISRTPEVTCVVVDVSHEDPEVQFNWYVDGVEVHNAKTKPREEQFNSTFRVVSVLTVVHQDWLNGKEYKCKVSNKGLPAPIEKTISKTKGQPREPQVYTLPPSREEMTKNQVSLTCLVKGFYPSDIAVEWESNGQPENNYKTTPPMLDSDGSFFLYSKLTVDKSRWQQGNVFSCSVMHEALHNHYTQKSLSLSPGK
